United States Patent Application Publication US 2018/0126003 A1 - sequence listing, part 139

SEQ ID NO: 243823 - DNA, 2613 bp, Artificial Sequence
  derived and/or modified sequence
atgaattcaaacctgccggcagagaacctcaccatagctgttaacatgactaaaacccttccaacagctgttacccacggattcaactccacaaacgatccaccttcaatgtcgatcaccaggctcttccccgccctcctcgaatgctttgggatcgttctctgcggttacattgcaggtcgagctaacgtgattacgagcacccaggctaagggcttgggcaatttcgtgagcagattcgccctgcctgctctgctgttcaaaaatatggtggtcctcaatttttctaatgtagactggtcattcctttactcgattttaattgccaaagcaagcgtgtttttcattgtctgtgttctgaccctgctcgtggcatctccggattctcggtttagcaaagccggtctgttccctatcttcgctactcagtcaaatgattttgcccttggctatcccatcgtggaagccctgtatcaaacgacttacccagagtacctgcagtacatttacctggtggcccccatctccctgatgatgctgaatcccatagggtttattttttgtgagattcagaagtggaaagatacccaaaatgcctctcagaacaagattaagatcgtgggattaggccttttgcgcgtgttacagaatccgatagtgttcatggtcttcatcggaatcgcttttaacttcatactggacagaaaagtccctgtgtacgtcgaaaacttcctggacgggttgggcaattcgttctctgggtctgccctattctacttggggctcacaatggtggggaaaatcaagcgtctgaaaaaaagcgccttcgtggtactgattctcctgatcaccgccaaattgctagttctcccgctgttgtgtcgggaaatggtggaacttcttgataagggcgattctgtggtgaaccataccagcctgagtaactatgctttcctgtacggagtctttcccgtcgctcctggagtggcaatctttgctacacagtttaacatggaggtggagattatcacaagtggcatggtgattagtacttttgtgtctgctccaataatgtacgtctccgcatggctgctcaccttcccaacaatggatccaaaaccgttagcatacgccatacagaatgtgagcttcgatatttccatcgtttccctaatcagcctcatttggagccttgctattttactcctgagcaaaaagtacaagcagctcccccacatgttaacaacaaaccttctgattgcacaatccatcgtttgcgccggaatgatgatctggaatttcgtaaaagagaagaactttgtgggccagatcctggtgttcgtcctcctttattcttcactgtacagcacatatctgtggactggtctactagcaatttctctgttcctattgaagaagagagagcgcgttcagatacccgtggggatcattataatttcagggtggggcatccctgcattgcttgtgggcgttcttttgataaccgggaaacataatggtgattccatcgattcagcctttttttacggaaaggaacagatgatcacaacagccgtgactctcttttgttcaatactaatcgctggaatatctttgatgtgcatgaatcagacagctcaggcaggatcttatgaggggttcgatcaatcccagagtcataaagtcgtggaacccggaaatacagctttcgaggaatcgccggctcctgtgaacgagccggagctctttacttcttcaattcccgagactagctgttgctcctgctccatgggcaatggcgagctacattgccccagcattgagccaatagcgaacacgtctacttcggagccggtgatcccaagcttcgagaaaaacaaccactgtgtcagtcggtgtaacagccagtcctgtattcttgcacaggaagaggagcagtacttgcagtccggtgatcaacaactgacccgtcatgtgctgctctgtctattgctcatcatcgggcttttcgctaacctgagcagctgtttgtggtggctttttaaccaggagcctgggcggctgtacgttgagctgcagttcttttgtgccgtgttcaattttggacaaggatttatctcgttcgggatcttcgggttagacaagcacctgattattctgccctttaaacgaagactggaatttctctggaataacaaagacacggcggagaaccgagatagcccggtgtcggaagagattaaaatgacatgccaacagttcatacattaccatagggatctttgcatcaggaatatcgtgaaggaaagacgatgtggggcaaagacttctgccggcaccttctgcggatgcgatctggtcagctggttaatcgaagtggggttggccagcgatcgtggtgaggctgtcatctacggcgaccgcctggtgcagggcggcgtgatacagcatatcacgaatgaatatgaattccgcgacgaatacctgttttaccgcttcctccagaaatcaccggagcagtcccctccggccataaatgccaacacgctccagcaggaacggtataaagagatcgagcactcatctcccccgtcgcatagccccaagacttag

SEQ ID NO: 243824 - DNA, 2613 bp, Artificial Sequence
  derived and/or modified sequence
atgaattcaaacctgcccgccgaaaacctcactatcgcagtgaacatgacaaagactctgccgacggccgtgactcacggctttaacagcaccaatgacccgccttccatgtccattacaaggctgtttcccgcacttctcgaatgttttggcatagtgctctgtggatatatcgctggtcgagctaatgttattacttctacacaggccaagggcctgggcaactttgtgagcaggttcgcccttcccgccctgctcttcaagaacatggtcgtgctgaatttcagcaacgtagattggagtttcctttactccatcctgattgcaaaggcgagcgtttttttcatagtttgtgtcctcaccctgctcgtggccagccctgactcccgcttctcaaaggccggtctcttccccatcttcgctactcagtctaatgattttgccttgggatatcccattgtggaggcattgtatcagacgacatatcccgaatatttacaatatatttatctggtggcgcctattagtctgatgatgttgaatccaatcggcttcattttctgcgagatacagaagtggaaagacacccaaaacgcctcccagaacaaaataaagatcgttggactggggctcctgagagtgctccagaacccaatcgttttcatggtattcatcggaatagcatttaattttattctggatcgtaaggtgcctgtgtacgtcgaaaattttctggacggtctcggaaattcattcagtggctccgctctgttttatctggggcttacaatggtgggcaagatcaagagactcaagaaatccgcgtttgtggtcctgatcctgctgataaccgcaaagctcctggttctacccctcttatgccgagagatggtggaactgctggacaagggtgactccgtggtgaaccatacctcactgtcgaactatgcattcctgtacggagtgttcccagtcgcacctggagtggctatctttgctacgcagttcaacatggaggtcgaaatcatcacctcgggcatggtgatctcaaccttcgtgtctgcaccaatcatgtatgttagtgcctggctgcttactttccctacgatggatcccaaaccgttggcctacgccattcagaacgtctctttcgacatctctatcgtgtctcttattagtctgatatggagcctcgccatcctcctgttatccaaaaaatacaaacagctgcctcatatgctgacgaccaacttgctgatcgcccagagcatcgtctgtgcggggatgatgatttggaatttcgttaaggagaagaattttgtgggtcagatcctggtgttcgtgctgctctacagttcactgtactccacatacttgtggactgggctgctcgcaatctcactgttcctccttaaaaagcgcgaaagagtacagattcctgtggggattatcatcatttccggctgggggatccccgcactgttagtaggagtgctattaatcaccggcaagcacaatggtgattctattgattccgccttcttctacgggaaggaacaaatgatcacaactgcggtgacgttgttttgctcaatattaattgctgggatatctcttatgtgcatgaaccagaccgctcaggcaggatcgtacgaaggctttgatcagtcacagtcacacaaggtggttgagcccggtaataccgctttcgaggagtctccagcccccgttaacgagccagaattgttcacctcatccataccagagacaagctgttgcagctgctctatggggaacggcgaattgcattgtccttcgatcgaaccaattgctaatacgtcaacaagtgagcctgtgatcccctcgttcgaaaaaaataatcattgtgtctctagatgcaactctcaatcctgcattctcgcccaagaagaggagcaatacttacagagtggcgatcagcagctgacccggcatgtgcttctttgcctgttactgattatcggtctgttcgcaaacctgagctcttgtctgtggtggttgttcaaccaggagcccggacgtctgtatgtggagctccaattcttttgcgcagtgttcaatttcggccaaggattcatctcttttggtatattcggcctggacaaacacctaattattttgcctttcaagcgtcgccttgaattcctctggaataacaaggatactgctgaaaatcgtgatagccctgtgtcagaggaaataaaaatgacctgtcagcaattcatccactaccatcgtgatctctgcatccgaaatatcgtgaaggaaaggagatgcggcgcaaagaccagcgccggaactttttgtgggtgcgacctggtgtcttggctcatagaggtgggcttggcgtccgatcgaggcgaggccgtcatttacggagaccggttggtgcaggggggcgtgattcaacacatcaccaacgaatacgaattcagagacgaatatctgttctataggttcttacagaaatctcctgaacaaagtccacctgcgataaacgccaacacactgcagcaagagaggtacaaagagatagagcatagcagtcctccatcccacagtccgaagacatag

SEQ ID NO: 243825 - DNA, 2613 bp, Artificial Sequence
  derived and/or modified sequence
atgaacagcaacctgcctgctgagaacctgaccatcgctgtgaacatgaccaagaccctgcccacagctgtgacccacggcttcaacagcaccaatgacccccccagcatgagcatcaccaggctcttccctgccctgctggagtgcttcggcatcgtgctgtgtggctacatcgccggccgggccaacgtcatcaccagcacccaggccaagggcctgggcaactttgtgtccagatttgccctgcctgccctgctcttcaagaacatggtggtgctgaacttcagcaatgtggactggagcttcctgtacagcatcctgattgccaaggccagcgtcttcttcatcgtgtgtgtgctgaccctgctggtggccagcccagacagccgcttcagcaaggccggcctcttccccatctttgccacccagagcaatgactttgccctgggctaccccatcgtggaggccctgtaccagaccacctacccagagtacctgcagtacatctacctggtggcccccatcagcctgatgatgctgaaccccatcggcttcatcttctgtgagatccagaagtggaaggacacccagaatgccagccagaacaagatcaagatcgtgggcctgggcctgctgcgggtgctgcagaaccccatcgtgttcatggtgttcatcggcatcgccttcaacttcatcctggacaggaaggtgcctgtgtatgtggagaacttcctggatggcctgggcaacagcttcagcggcagcgccctcttctacctgggcctgaccatggtgggcaagatcaagaggctgaagaagagcgcctttgtggtgctgatcctgctgatcacagccaagctgctggtgctgcccctgctgtgccgggagatggtggagctgctggacaagggggacagcgtggtgaaccacaccagcctgagcaactatgccttcctgtatggagtcttccctgtggcccctggggtggccatctttgccacccagttcaacatggaggtggagatcatcaccagcggcatggtgatcagcacctttgtgtctgcccccatcatgtatgtgtctgcctggctgctgaccttccccaccatggaccccaagcccctggcctatgccatccagaatgtgtcctttgacatcagcatcgtgtccctcatcagcctcatctggagcctggccatcctgctgctgagcaagaagtacaagcagctgccccacatgctgaccaccaacctgctgattgcccagagcatcgtgtgtgccggcatgatgatctggaactttgtgaaggagaagaactttgtgggccagatcctggtgtttgtgctgctgtacagcagcctgtacagcacctacctgtggacaggcctgctggccatcagcctcttcctgctgaagaagcgggagcgggtgcagatccctgtgggcatcatcatcatcagcggctggggcatcccagccctgctggtgggcgtgctgctgatcaccgggaagcacaacggggacagcattgacagcgccttcttctacggcaaggagcagatgatcaccacagctgtgaccctcttctgcagcatcctgattgctggcatcagcctgatgtgcatgaaccagacagcccaggccggcagctatgagggctttgaccagagccagagccacaaggtggtggagcccggcaacacagcctttgaggagagccctgcccctgtgaatgaacctgagctgttcaccagcagcatccctgagaccagctgctgcagctgcagcatgggaaatggagagctgcactgccccagcattgagcccatcgccaacaccagcaccagcgagcccgtcatccccagctttgagaagaacaaccactgtgtgagccgctgcaacagccagagctgcatcctggcccaggaggaggagcagtacctgcagagcggggaccagcagctgaccaggcatgtgctgctgtgcctgctgctgatcatcggcctgtttgccaacctgagcagctgcctgtggtggctgttcaaccaggagcccggccgcctgtatgtggagctgcagttcttctgtgctgtgttcaactttggccagggcttcatcagctttggcatcttcggcctggacaagcacctgatcatcctgcccttcaagaggcggctggagttcctgtggaacaacaaggacacagcagaaaatagagacagccctgtgtctgaggagatcaagatgacctgccagcagttcatccactaccaccgggacctgtgcatccggaacatcgtgaaggagcggcgctgtggggccaagaccagcgctggcaccttctgtggctgtgacctggtgtcctggctgattgaggtgggcctggccagtgacagaggagaggccgtcatctatggagaccggctggtgcagggcggcgtcatccagcacatcaccaatgaatatgagttcagagatgagtacctgttctaccgcttcctgcagaagagccctgagcagagccccccagccatcaatgccaacaccctgcagcaggagcgctacaaggagattgagcacagcagcccccccagccacagccccaagacctag

SEQ ID NO: 243826 - DNA, 2613 bp, Artificial Sequence
  derived and/or modified sequence
atgaacagcaacctgcccgccgagaacctgaccatcgccgtgaacatgactaaaacactccctactgcagtaacacacggcttcaatagtacgaacgatcctccttccatgagcattacccggctgtttcccgctttactagagtgcttcggtattgtcctgtgtggatacattgctggccgggccaacgttatcacttcaacccaggccaagggacttggcaacttcgtcagtcgtttcgccttgccagccttgctgttcaagaacatggtggtgctgaacttttcgaacgttgattggtctttcctttactcgatcctcattgctaaggcttccgtctttttcatcgtctgcgtgctcacccttctggtcgccagccctgattcaaggttctctaaagcagggttattcccaattttcgccactcagtctaacgactttgccctagggtaccctatagtcgaggctctgtatcaaaccacttaccctgaataccttcaatatatctatctggtcgcccccatatccctgatgatgctgaatcccatcgggttcattttctgtgaaatccagaaatggaaagatacacagaacgcatcccagaataaaattaagatcgtgggtttaggcctactgagagtgctccagaaccctatcgtgtttatggtgtttataggcatcgccttcaactttattttggaccgtaaggttccagtctatgtggaaaactttcttgatggcctggggaatagttttagcggaagtgccttgttttacttaggcctgacaatggtgggcaaaatcaaaagactgaaaaaaagcgcattcgtggtattaatcctcctcataaccgcaaagctcctggttcttccactgctctgtagagaaatggtggagttgttggacaaaggcgatagtgtcgtgaaccacacttccctgagcaattacgcattcctatacggagtgtttccagtggcccccggcgttgccatcttcgcaacccaattcaacatggaggtggaaatcatcacctcaggtatggtcatctcaacctttgtgagcgcgcctattatgtatgtcagtgcctggctgttgaccttccccaccatggaccccaagcccctggcttacgccatccagaatgtctcctttgatatttctattgtgtcactcatcagtttgatttggagtctggcgatcttgttgctaagcaagaaatacaaacagttacctcatatgctcaccacaaacttgttgattgcccaatctattgtttgtgccggaatgatgatatggaattttgtgaaggagaaaaactttgtgggccagatcctggtcttcgtgttgctgtattcctccctgtacagtacgtacctgtggaccggactcctggccatcagcctgttcctgctgaaaaaacgagagcgtgtgcagatccccgtaggcataatcattatttctgggtggggcattcctgccctcctggtgggggtactgttgataacgggcaagcacaatggtgattccattgattccgcattcttttacggcaaggagcagatgattacgactgctgttactctgttctgctctattctcatagccggtatctcacttatgtgtatgaatcagaccgctcaggctggtagttatgaaggttttgatcagagtcagtcacataaggtggttgaacccggcaatacagctttcgaagagtctcctgcacctgtgaacgaaccggagctgttcacctcaagcatccccgagacatcatgctgcagttgctcaatggggaacggcgagctgcattgtccttctatagaacccatcgccaacactagtactagtgagcctgtgattccaagcttcgagaagaataaccactgtgtgtccaggtgtaactcccagtcttgtatcttggctcaggaagaggagcagtaccttcagagcggagaccaacagttaacacgacatgtcttgttgtgcctgcttctcatcatagggttattcgccaacctttcttcatgcctgtggtggctgttcaatcaggaacctgggcggctgtacgtagagctccagttcttttgcgctgtgttcaatttcggccaggggttcatttccttcgggatttttggactggacaagcacctcattattctccccttcaagcgcagacttgaattcttgtggaacaacaaagacaccgccgagaacagggattctcccgttagtgaagagattaaaatgacatgtcaacaattcatccattaccatcgtgatctctgcatccgcaatatagtcaaagagcggcggtgcggcgcgaagacatcggcaggcaccttttgtggttgcgacttagtgtcctggttgatagaagtgggactggcctcagaccggggcgaggctgtgatctacggcgataggttagtgcaagggggagtcatccagcatattaccaatgaatatgagtttagggatgagtaccttttttatagattccttcagaagtcgccggaacaatcacctccagcgattaatgcaaatacacttcaacaggagcgctataaagagatcgagcactctagtcctcccagccatagtcccaaaacatag

SEQ ID NO: 243827 - DNA, 2613 bp, Artificial Sequence
  derived and/or modified sequence
atgaacagcaacctgcccgccgagaacctgaccatcgccgtgaacatgactaaaacactccccacagctgtcacacatggctttaattcaacaaatgaccctccttccatgagtatcactcgtctgtttccagcgctgttagagtgcttcggcattgtcttgtgcggttatatcgccgggagagcaaacgtgattactagcacacaggccaaggggctgggcaactttgtatcccgttttgctctgcccgctcttttgttcaaaaatatggtcgttcttaacttttccaacgtggactggtcttttctatactcaatactcatagctaaggcttctgtctttttcatcgtttgcgtcctcacccttctcgtcgcatcccctgactcccggttcagcaaggctggcctctttcctatcttcgccacccagtcaaatgacttcgccctgggttaccccattgtagaggcactgtaccagaccacataccccgaatacctgcagtacatatacctggtcgccccaatcagcctgatgatgctgaatccgattggcttcatcttctgcgaaatacagaagtggaaggatacccagaacgctagtcaaaacaagattaagatcgtggggttgggcctactgagagtgctgcagaaccccatcgtgtttatggttttcatcggcattgccttcaacttcatcctggatcgaaaagtgccagtgtatgtagaaaatttcctggacggattggggaattcgttttccggatccgcgctgttttatctgggactgacaatggtcggaaaaattaagcggttaaaaaaatctgcgttcgtcgtacttatcctgcttattactgccaaattgctggtactgcctctattgtgtagggagatggtggaactgttggataagggagattctgtcgtgaaccacacaagtttgtcaaattacgcattcctgtacggagtgttcccagttgcccccggcgtagcgatctttgcaacacaatttaatatggaggtggaaattattaccagtggaatggttatctcgacttttgtgtccgccccaatcatgtatgtgagcgcttggctgctaacatttcctacaatggacccaaagcccctggcttatgccattcagaatgtttccttcgatattagcattgtatctctgatttcgctgatttggtcactggccatcttgctgctgagcaaaaaatacaagcagttgccccacatgttgacaacaaacctcctaatcgctcagagcattgtctgcgcaggcatgatgatttggaattttgttaaagagaaaaattttgtggggcaaatcctggtatttgtgttactctactcaagtctgtacagtacatacctttggactggattattggccatatccctgtttctgttaaagaagcgcgaacgcgttcagattccagtaggcattataatcatttctggatggggtattccagccttgctggtgggtgtcttgttaataactggcaaacacaatggggatagtatcgactctgcctttttttacggcaaggaacagatgataaccacagcagtaactctcttttgctccatccttatcgctgggatctccttgatgtgcatgaaccaaaccgcccaggccggctcatatgaggggtttgatcagtcacagtctcacaaggtcgtggagcccggcaataccgcattcgaggagtcgcccgccccagtgaacgagccagagttatttaccagctctatcccagagacttcatgctgtagctgcagcatggggaacggagaattgcactgcccttccattgaaccgattgcaaatacctcaaccagtgagcccgtgatcccaagttttgaaaagaataaccattgcgtgtctaggtgtaactcacagtcgtgcattttggcacaggaggaggagcagtacctgcagtctggtgaccagcagctgaccaggcatgtactgctgtgcctgctcctgatcatcgggctcttcgctaatctatccagctgcctgtggtggctgttcaaccaggaaccgggccgcctctatgtagaacttcagttcttctgcgcggtcttcaacttcggccagggctttatatcatttggaatattcgggcttgataagcacttgatcatcctgccttttaagaggcggctggaatttctgtggaataacaaggatacggccgagaatcgcgactccccagtctctgaggagataaagatgacctgccagcagttcatacactaccaccgggacctgtgtatccgaaacattgttaaagaacgcaggtgtggtgccaaaacatcggccggcacattctgcggttgtgatctggtatcatggctgatcgaggttggcctcgcatcggatcggggagaggccgtcatatacggtgacagattggtgcagggtggcgtgatccagcacattactaacgagtacgagttcagagacgagtatctgttttatagatttctgcagaaaagtcccgagcagtccccgccagccatcaatgcaaacaccctgcagcaagaacggtacaaggagatcgagcactcctcccctccctcccacagcccaaagacttag

SEQ ID NO: 243828 - DNA, 2613 bp, Artificial Sequence
  derived and/or modified sequence
atgaacagcaacctgcccgccgagaacctgaccatcgccgtgaacatgacaaaaactttgccaactgctgtaacccacggcttcaactctactaacgatcctccttctatgtcaatcaccaggttatttcccgccctcttggagtgtttcggtatcgtgctttgtggatacattgcaggaagagcgaatgtgatcacgtctacacaggccaagggactcgggaacttcgtgtcccggttcgccctacccgcactacttttcaagaatatggtcgttctgaattttagcaacgtcgattggagtttcctgtatagcatcctgatagccaaggccagcgtcttttttatagtctgcgtgttgaccctgttggttgcgtctcccgatagtagattctccaaggccggcctgtttcccatttttgcgacccagagtaatgacttcgctttgggttacccaatcgtcgaggctctgtatcaaaccacttacccagagtacctgcagtatatttacttggtggctccgatatctttgatgatgttgaatccgataggatttatcttctgtgaaattcagaagtggaaggacacacaaaatgccagccagaacaagatcaaaatagtgggtctcggactgctgagggtgctacagaaccctattgttttcatggtgttcattggcattgccttcaattttatactggatcgcaaggtgcccgtatatgtggagaatttcctggacggcctagggaacagctttagcgggtctgcactcttctatctggggcttacaatggtgggcaaaataaagaggctgaaaaagtctgcctttgtggtcctgatcctgctgatcacggctaagctactggtgctccccctgttatgcagggagatggtggagctcctggacaagggagacagcgtcgtcaaccatacttccttgtcaaactacgccttcttgtacggagttttccctgttgcgcccggggtagctatcttcgccacacagtttaacatggaggtcgagatcatcaccagcggcatggtgattagcacattcgtgagtgcgccaataatgtatgtgagtgcctggcttctcacgttcccaactatggaccctaagccactggcttacgccattcagaacgtttcatttgatatatcaattgtgtccttgatttccctgatctggtcccttgccatcttacttctctcgaagaagtacaaacagctgccgcatatgctgacgacaaacctactgatcgcacagtccattgtatgcgccgggatgatgatttggaatttcgtgaaggagaagaattttgtgggacagatcctggtgttcgtccttctgtactccagcctttactctacttacttgtggaccggattactcgcaatctccctgttcttgcttaaaaagagggagcgagtccagatcccggtcgggatcattattatctccgggtggggcattccagccctcctcgtgggcgtacttctgattacgggcaagcacaacggagatagtattgatagcgcattcttttacggtaaggaacaaatgataaccaccgcagtgaccttgttctgcagcattctgatcgcgggtattagtctgatgtgtatgaaccaaacagctcaggcggggagctatgaaggatttgatcaatctcagagccacaaagtagtagagccaggcaatacagcttttgaagagagtcccgctcccgttaatgagcctgagttgtttaccagctctattcccgagacttcttgctgcagctgctccatgggaaacggcgagttacactgcccaagtatagagcccatagccaatacttcaactagcgagcctgtgattccgtcttttgagaagaacaatcattgtgtttcgcggtgcaattcccagtcctgcatcctcgcgcaagaagaagaacagtacctccagtccggcgatcagcaactaacacgtcacgttttgctctgtttgctgttgatcatcgggctgttcgccaatctatccagctgcttgtggtggctgtttaaccaagagcccggccgcttatatgttgagttgcagtttttttgcgccgtcttcaactttggtcaagggttcatttcctttggtatatttggcctggacaaacacctgatcattctacctttcaaaagacggctagaatttctgtggaacaataaggacacggccgagaacagggattcacctgtctccgaggagatcaaaatgacctgtcagcaattcatacattatcacagggatctgtgtattagaaatatcgttaaggagcgacgttgtggggcaaagaccagcgccggaactttctgtgggtgcgaccttgtgtcttggctcattgaggtgggcctggcgagcgataggggagaggctgtgatttatggcgacagactagtccagggcggtgtgatccaacacatcaccaatgaatacgagttccgggacgagtatctcttctacagatttctgcaaaaatcgcctgaacagtcaccgcctgcaattaacgcaaatactttgcagcaagaacgctataaagaaatagaacacagcagcccaccttcccactcccccaagacttag

SEQ ID NO: 243829 - DNA, 2613 bp, Artificial Sequence
  derived and/or modified sequence
atgaactccaacctgcccgctgagaaccttactatcgcagtgaacatgaccaaaactctgcctaccgctgtgacccacggctttaattccaccaacgatcctccttcgatgtccattacacggctgttccctgccctgctggaatgtttcggaatcgtcctctgtggttacatcgctggacgggctaacgtgataacatctacgcaggcaaagggccttggcaattttgtttcacgtttcgccctgccggctctcctctttaagaacatggtagtcctcaacttctctaatgttgattggtccttcctgtattccatactcatagctaaggccagcgtgtttttcatcgtgtgcgtgctgacactattagtggcgagtcccgattccaggttttccaaggctggattatttccaatctttgctacccaaagcaatgactttgcactcggttatcccattgtggaggctttgtatcagactacatatccagaatatttgcagtacatatacctcgtcgcaccgatcagtcttatgatgctcaaccccattggcttcatcttctgtgaaatccagaagtggaaagatacccagaacgcctcccaaaataagatcaaaatagtggggttggggctattacgagttttgcaaaacccgatagtcttcatggtattcatagggattgctttcaacttcattctggatcggaaggtgcctgtctacgtagaaaacttcctggacggcctgggtaacagttttagcggatcggcgctgttttacctaggcttaacgatggtcgggaagatcaaaagattaaaaaagtccgccttcgtcgttcttattctgctgatcaccgcaaaactgctcgtgcttcccctgctgtgccgcgaaatggtggaattgcttgacaagggcgattcagttgtgaatcacacatctctgagcaactatgcttttctgtacggtgtatttcccgtggcgcctggggtggccatctttgccacccagtttaatatggaagtagagataattaccagcggcatggtgataagcaccttcgtaagcgcacccatcatgtacgtcagcgcgtggctactgacgtttcccacgatggaccccaaacccctggcctacgcaattcagaatgtcagctttgacatatcaatcgtgagcttgattagcctcatatggtccttagcgatactcctgctgagtaagaagtataagcagttgccgcacatgctcaccacaaacctgttgatagctcagagtatcgtgtgtgcaggcatgatgatatggaatttcgttaaggaaaagaatttcgttggacagattctcgtttttgtcctcctatactccagcctatatagtacttacttatggactgggctcttagctatctctttgtttttactaaaaaaacgcgaacgggtccagatcccagttgggatcatcatcatttcaggatggggaatccctgcactgcttgtgggggtattgttgatcacagggaagcataacggtgacagtatagattctgccttcttctacggaaaggaacagatgatcactaccgctgtgacactcttctgctccatcctaatcgcaggaatcagcctgatgtgcatgaaccaaacggctcaggccggatcttatgagggcttcgaccagtcacagagtcacaaagtggtagaacctggcaataccgcttttgaggaaagtccagctccagtaaacgaacctgagctcttcacgtcctcaattcccgagacctcatgttgcagctgcagtatgggtaacggcgaactgcactgcccctctatcgagcctattgctaataccagcaccagtgagcctgtgatcccttccttcgagaaaaataaccattgcgtgagcagatgtaactcacagagctgtatcttggcacaggaggaagaacaatatttgcagtctggggatcagcagttaaccagacacgttctcttatgtctgctcctcatcataggattatttgctaatctctcttcctgtttgtggtggctgtttaatcaggaacctggccgactatatgtggagctgcagtttttttgcgctgtgttcaattttggccaggggtttatcagctttggcattttcggattggacaaacacctcatcattcttccatttaaacgaagactagaatttctgtggaataataaggacactgccgaaaatagggattctcctgtgagtgaggaaatcaaaatgacatgccagcagtttattcattatcaccgtgatttatgcattagaaacatcgtgaaagagcggagatgcggagctaagaccagcgcaggaactttttgcggatgtgacctggtctcgtggctgatagaggtgggactcgcctcagacaggggcgaagcggtgatttacggcgataggctggtgcagggaggcgtgatacagcatattaccaatgagtatgagttccgggacgaatacctgttttatcggttcctgcaaaagtccccagagcaaagtccaccggcaatcaatgccaacacactccagcaggaaaggtataaggagatagaacactccagcccaccgagtcattcccccaaaacttag

SEQ ID NO: 243830 - DNA, 2613 bp, Artificial Sequence
  derived and/or modified sequence
atgaactcaaacctgcccgctgagaacctgacaattgcagtcaatatgacaaagacgctccctacggccgtgacgcatggctttaacagtacaaacgaccccccttcgatgagtattacccggttgttccccgctcttctcgaatgctttgggattgtgctatgtggctatatcgcgggtcgggctaatgtcatcacatcaacacaggctaaaggcctcggaaattttgtttcgcgcttcgccctgcccgcactactcttcaagaatatggtggtgcttaacttttctaacgtcgactggagcttcctctactcaatcctgatagccaaggcttctgttttcttcattgtctgcgtgctcaccctgctggttgcttcccctgattcacggttcagcaaggctggcctgttccctatctttgccacccagtctaacgatttcgctttgggctatccgatcgttgaagcattatatcaaacaacttatccggagtatctgcagtatatttatttagtcgcgccaatcagcctgatgatgctgaaccctatcggtttcattttctgcgaaattcagaaatggaaggatacgcagaatgccagtcaaaacaaaatcaagatagtgggtctgggtctgctcagagtgctccagaaccccattgttttcatggtattcataggcatcgccttcaacttcatcttggaccggaaggtgcccgtctatgtggagaacttcctcgacggcctgggcaattcattttcaggttcagctctgttctatctgggtttgacaatggtcggtaaaatcaaacgcctcaagaagtcggcgttcgttgtgttgattctcctgatcaccgcgaagctgctcgttttaccactcctctgtagagagatggttgagttgctagataagggagattccgtggttaatcacacctctttgtccaactatgcctttctgtatggagtctttcccgttgcacccggagtcgccatttttgccacccagttcaacatggaggtcgagatcattaccagcggaatggtcatctcaacctttgtgtcagcgccaataatgtatgtgtccgcctggctgcttaccttcccgacgatggaccccaagcccctggcctacgctattcaaaacgtgtcatttgatatctctattgtcagcctgatctcactcatttggagcctggctattttgttgctgtccaaaaaatacaagcaactgccgcacatgctgacaaccaacctgttaattgctcagtcgattgtctgtgcaggtatgatgatttggaactttgtgaaggagaaaaactttgtcggtcagattctggtgtttgttctcctgtatagtagcctgtactctacctacctgtggactggtctgcttgctataagcctatttctgttgaagaagagggagcgggtgcagattccagttggcataatcattatctcagggtggggtatccctgccctcctcgtgggcgtcttgctgattaccggaaagcataatggtgattctatcgattccgcattcttttacggaaaagagcagatgatcaccacagcagtcacgctgttttgcagcatactgattgcagggatttcactaatgtgtatgaatcagacagcacaagctggaagctatgagggcttcgatcaatctcagtcacacaaggtggtcgagccaggaaataccgccttcgaagagtcgccagccccagtgaacgagcccgaactcttcactagcagcattcccgagacgtcatgttgttcctgttccatgggcaacggagaattgcattgcccttcaatcgaacccatcgcgaatacctcgacttccgagcctgtcattccatctttcgaaaaaaataaccactgcgtgtctcgatgtaattcccaatcatgtatcctcgcccaggaggaggagcagtatctccagagcggggaccagcagctaactaggcacgtcctgttatgtttactcttgatcatcgggttgttcgcgaacctgtccagctgcttatggtggctgtttaaccaggagcctggtaggctgtatgtggagcttcaattcttttgtgccgtgttcaactttggacagggctttattagcttcggtattttcggcctggataagcaccttatcatcctgcctttcaaacgcagactcgaattcctctggaacaacaaggacactgcggagaaccgggacagccccgtcagtgaagaaattaagatgacttgccagcaattcatccactaccaccgtgatctgtgcatccggaacatagtcaaggagaggagatgcggggctaaaacctctgccggtactttttgcggttgtgacctggtgagctggctgatcgaggtggggctggcgagcgatcgcggagaggccgtaatctatggcgatcgtctcgtacaaggcggagtcattcagcatataaccaatgagtatgaattcagagatgagtacctcttctaccgctttttgcagaagtcaccggagcaatctcctccagccataaatgcaaacaccctccagcaagaaagatataaagaaatcgagcactcaagccccccttcccatagccctaagacctag

SEQ ID NO: 243831 - DNA, 2613 bp, Artificial Sequence
  derived and/or modified sequence
atgaacagtaatcttccagccgaaaacctgaccattgccgtaaacatgactaaaactttgcccacagcagttactcatgggtttaatagtacgaacgaccccccaagcatgagtattacccgcctgttcccagctcttctggaatgtttcgggatagtcctgtgcggctatatcgctggtcgtgcaaacgtgatcacgtccactcaggccaaggggctcgggaactttgtgtctagatttgcgcttcccgctctgctcttcaaaaacatggtggtccttaatttctcaaatgtcgactggagttttttgtatagcattttaatcgctaaagcttctgtgttcttcatagtatgtgtgctcacattattagtggcttcacccgactctagattctccaaggctggtttattccccatcttcgccacccagtcgaacgatttcgccctggggtatcccattgtggaggctttatatcagaccacctaccctgaatacctccagtatatctatctggtggcacctataagcctcatgatgctgaaccctatcggattcatcttctgtgagatccagaaatggaaggatacccagaacgcttcacagaacaagattaagattgtaggcctaggactcctccgcgttctacagaaccctattgtgtttatggtgttcatcgggatagcattcaatttcatactcgatcggaaggttccagtttatgtggaaaacttcctggacggcctgggaaacagtttcagcggctctgccttgttctatctgggtttgaccatggtgggtaaaattaaaaggctgaagaagtctgcgtttgtggtcctgatccttctgatcacagcaaagctcctagtactacccctcctgtgccgagaaatggtggaactcctcgataagggcgactccgtcgtgaatcacactagcctgagtaattacgcttttctgtacggagtgttccccgttgccccaggggttgccattttcgctacccaatttaacatggaagttgaaatcatcacttccggaatggttatctccaccttcgtgtccgcccctatcatgtatgttagcgcgtggctcttgacttttccaaccatggaccctaaacctctcgcttatgccattcaaaatgtgagtttcgatattagcatcgtttcgctgatctccctgatctggtccctggcaattctcctccttagtaagaagtataaacagttgcctcatatgctaaccacaaacctgttgattgcgcagagtattgtgtgtgcgggaatgatgatatggaattttgtcaaagagaagaattttgtgggacaaatccttgtgtttgtcctcctgtactcctctctgtattcaacatatttgtggactggactcctggccatctcactttttctgctgaaaaaacgggaacgagtgcagatacctgtggggattatcatcataagcggatgggggattcctgctttactggtgggggtgttactgatcacgggcaaacacaacggagattcgatcgattctgcattcttctatggtaaggagcaaatgatcacaactgcagtgaccctcttctgctccatcttgattgccggaatctcactgatgtgcatgaaccagactgctcaagcaggtagttatgaaggcttcgaccagagccagtcgcacaaagtggtggagccaggaaatacagcctttgaggagtctcccgcaccagtaaacgagcccgagctgtttacctctagcataccagaaaccagctgttgcagttgctccatgggaaatggtgaactgcattgtccgtccatcgaacctattgctaatacttctacaagcgagcccgttatcccatcattcgaaaagaataaccactgtgttagccgctgcaactcccaatcttgtatcctggcccaggaggaggaacagtacctgcagtctggcgaccagcagctgacacgccacgtgcttctctgcctactgcttatcataggattattcgccaatttatcgtcctgcttatggtggctgtttaatcaggaaccgggaaggctgtatgtggaattgcagttcttctgtgccgtctttaacttcggacaggggttcatctctttcgggattttcggtctggataaacacttaatcattctgcccttcaagcgtcgtctggagttcctgtggaacaataaagacactgccgagaatcgcgactccccagtttccgaggagatcaagatgacctgccagcaattcattcactatcatcgggacctgtgtatccgcaatatcgtgaaagagcgcagatgcggggctaaaacgagcgcgggaactttttgtgggtgtgatcttgttagctggttgatcgaagtcggattggccagtgatagaggcgaagccgtgatatatggcgatcgactagtgcagggcggtgttatccagcatattacaaacgaatatgaattccgcgacgaatatctgttttatcggttcctacagaagagccccgaacagtcacctcctgccattaatgctaacaccctgcaacaggagcggtacaaagaaattgagcacagcagtcctcctagtcacagccctaagacctag

SEQ ID NO: 243832 - protein, 393 aa, Artificial Sequence
  derived and/or modified sequence
MGLLRGGLPCARAMARLGAVRSHYCALLLAAALAVCAFYYLGSGRETFSSATKRLKEARAGAPAAPSPPALELARGSVAPAPGAKAKSLEGGGAGPVDYHLLMMFTKAEHNAALQAKARVALRSLLRLAKFEAHEVLNLHFVSEEASREVAKGLLRELLPPAAGFKCKVIFHDVAVLTDKLFPIVEAMQKHFSAGLGTYYSDSIFFLSVAMHQIMPKEILQIIQLDLDLKFKTNIRELFEEFDSFLPGAIIGIAREMQPVYRHTFWQFRHENPQTRVGGPPPEGLPGFNSGVMLLNLEAMRQSPLYSRLLEPAQVQQLADKYHFRGHLGDQDFFTMIGMEHPKLFHVLDCTWNRQLCTWWRDHGYSDVFEAYFRCEGHVKIYHGNCNTPIPED

SEQ ID NO: 243833 - protein, 190 aa, Artificial Sequence
  derived and/or modified sequence
MWPPRCKDPGRQSAEILQIIQLDLDLKFKTNIRELFEEFDSFLPGAIIGIAREMQPVYRHTFWQFRHENPQTRVGGPPPEGLPGFNSGVMLLNLEAMRQSPLYSRLLEPAQVQQLADKYHFRGHLGDQDFFTMIGMEHPKLFHVLDCTWNRQLCTWWRDHGYSDVFEAYFRCEGHVKIYHGNCNTPIPED

SEQ ID NO: 243834 - protein, 187 aa, Artificial Sequence
  derived and/or modified sequence
MNGMSVLMKETLKSSVTPSPYEETGERQPSVNWAVSPHQTQNQWARWSWTSQPLELHTFWQFRHENPQTRVGGPPPEGLPGFNSGVMLLNLEAMRQSPLYSRLLEPAQVQQLADKYHFRGHLGDQDFFTMIGMEHPKLFHVLDCTWNRQLCTWWRDHGYSDVFEAYFRCEGHVKIYHGNCNTPIPED

SEQ ID NO: 243835 - DNA, 1182 bp, Artificial Sequence
  derived and/or modified sequence
atgggcctgctgagaggcggcctgccctgcgccagagccatggccagactgggcgccgtgagaagccactactgcgccctgctgctggccgccgccctggccgtgtgcgccttctactacctgggcagcggcagagagaccttcagcagcgccaccaagagactgaaggaggccagagccggcgcccccgccgcccccagcccccccgccctggagctggccagaggcagcgtggcccccgcccccggcgccaaggccaagagcctggagggcggcggcgccggccccgtggactaccacctgctgatgatgttcaccaaggccgagcacaacgccgccctgcaggccaaggccagagtggccctgagaagcctgctgagactggccaagttcgaggcccacgaggtgctgaacctgcacttcgtgagcgaggaggccagcagagaggtggccaagggcctgctgagagagctgctgccccccgccgccggcttcaagtgcaaggtgatcttccacgacgtggccgtgctgaccgacaagctgttccccatcgtggaggccatgcagaagcacttcagcgccggcctgggcacctactacagcgacagcatcttcttcctgagcgtggccatgcaccagatcatgcccaaggagatcctgcagatcatccagctggacctggacctgaagttcaagaccaacatcagagagctgttcgaggagttcgacagcttcctgcccggcgccatcatcggcatcgccagagagatgcagcccgtgtacagacacaccttctggcagttcagacacgagaacccccagaccagagtgggcggccccccccccgagggcctgcccggcttcaacagcggcgtgatgctgctgaacctggaggccatgagacagagccccctgtacagcagactgctggagcccgcccaggtgcagcagctggccgacaagtaccacttcagaggccacctgggcgaccaggacttcttcaccatgatcggcatggagcaccccaagctgttccacgtgctggactgcacctggaacagacagctgtgcacctggtggagagaccacggctacagcgacgtgttcgaggcctacttcagatgcgagggccacgtgaagatctaccacggcaactgcaacacccccatccccgaggactag

SEQ ID NO: 243836 - DNA, 1182 bp, Artificial Sequence
  derived and/or modified sequence
atgggtctcctcagggggggtctgccatgtgcccgagcaatggctcgtctgggcgccgtgcgctctcattattgcgctctgctcttagcagctgccctggctgtttgcgctttctactacctaggtagtggccgggaaacattctcgtccgctacaaagagactgaaggaagctcgcgcgggagcgcctgctgcaccatccccacctgcactcgaactggctcggggctcagtggccccggcccccggtgcaaaggctaagtccctggagggcggcggggcagggcccgtggattaccacctcctcatgatgttcaccaaagccgaacacaacgctgcactgcaagccaaagcccgcgtggccttacgaagcttgctcaggctggctaaattcgaggcgcatgaggtcctcaacttgcacttcgtgtctgaggaggctagtcgcgaagtagctaaaggcctgcttagggagctcttgccaccagctgctgggtttaaatgcaaagtgatttttcacgacgtggccgttctcacggacaagttgtttccgatcgtggaagcaatgcagaagcatttctccgctggcctcggaacgtactactccgattcaatcttcttcttaagcgttgccatgcaccagattatgccaaaggaaattctccagattattcaactggacctcgatcttaaatttaagacgaacatcagagagctgtttgaggaatttgattcctttctcccaggagcgatcataggcatagcccgcgagatgcagccagtttaccgccacaccttttggcaattccgccacgagaacccccagacccgcgttggcggccctcctccagaggggttgcctggctttaattctggagtgatgcttcttaatctggaggccatgcgtcagtctccgctttattcccgcttgttagagccagcgcaagtgcagcagctggccgacaagtatcacttccgcggacacctgggagatcaagatttctttaccatgatcggtatggaacatccaaagctgtttcacgtcctcgactgtacctggaatagacagctgtgtacgtggtggcgtgaccacgggtactccgatgttttcgaagcctactttaggtgcgagggccatgtcaagatctatcatggcaactgtaacacacctataccagaggactag

SEQ ID NO: 243837 - DNA, 1182 bp, Artificial Sequence
  derived and/or modified sequence
atgggcctgctgcggggcggcctgccctgtgcccgggccatggcccggctgggcgctgtgcgcagccactactgtgccctgctgctggccgccgccctggccgtgtgtgccttctactacctgggcagcggccgggagaccttcagcagcgccaccaagaggctgaaggaggcccgggccggggccccagctgcccccagccccccagccctggagctggcccggggctctgtggccccagcccctggggccaaggccaagagcctggagggcggcggggccggccctgtggactaccacctgctgatgatgttcaccaaggccgagcacaatgctgccctgcaggccaaggcccgggtggccctgcggagcctgctgcggctggccaagtttgaggcccacgaggtgctgaacctgcactttgtgtctgaggaggccagccgggaggtggccaagggcctgctgcgggagctgctgcccccagctgctggcttcaagtgcaaggtgatcttccatgatgtggccgtgctgacagacaagctgttccccatcgtggaggccatgcagaagcacttctctgctggcctgggcacctactacagcgacagcatcttcttcctgtctgtggccatgcaccagatcatgcccaaggagatcctgcagatcatccagctggacctggacctgaagttcaagaccaacatccgggagctgtttgaggagtttgacagcttcctgcccggggccatcattggaattgcccgggagatgcagcctgtgtaccgccacaccttctggcagttcagacatgagaacccccagaccagggtgggcggccccccacctgagggcctgcccggcttcaacagcggcgtgatgctgctgaacctggaggccatgaggcagagccccctgtacagccggctgctggagcccgcccaggtgcagcagctggccgacaagtaccacttccggggccacctgggggaccaggacttcttcaccatgattggcatggagcaccccaagctgttccacgtgctggactgcacctggaaccggcagctgtgcacctggtggagggaccacggctacagtgatgtgtttgaggcctacttccgctgtgagggccacgtgaagatctaccacggcaactgcaacacccccatccctgaggactag

SEQ ID NO: 243838 - DNA, 1182 bp, Artificial Sequence
  derived and/or modified sequence
atgggcctgctgcggggcggcctgccctgcgcccgggccatggccagactgggggcagtgaggtctcattactgcgccctgttgctggccgctgcactcgctgtgtgcgcattctactatcttgggagcggtcgggagaccttcagctccgcgactaaaaggctaaaagaggcccgtgccggggctcccgccgccccctcaccaccggctctggaactcgccagaggttcagtcgctcctgcacctggggccaaggcaaagagtttggagggtgggggtgctgggccagtggattatcatctgcttatgatgttcaccaaagccgagcacaatgcggccctgcaggcaaaggcccgggtggccctccgcagcctgctgagactggccaaatttgaggcgcatgaagtgctaaaccttcactttgtttctgaggaagctagccgagaagtggcaaagggtctgctccgcgagctcctgccaccggccgcaggattcaaatgcaaggttatattccacgacgtcgccgtcctcaccgacaaactttttcccatcgtagaagcaatgcagaagcacttttctgcggggctgggaacctactattcagatagcatcttcttcctgtccgtagccatgcatcagattatgcccaaggagatcttgcagatcatccagctggacctagacctgaaattcaaaaccaacattagggagctgttcgaagagttcgactctttcctgcccggggctatcatcggtattgcccgcgagatgcagccagtgtatcgccacaccttttggcaattccgccacgaaaatcctcagacccgcgtgggcggacccccccccgaaggcctgcctggattcaattctggggtcatgctcctgaatctcgaagccatgcgccaaagtcccctttacagcaggctcctcgagcctgctcaggtgcagcagctagcagataagtaccattttcgcgggcacctcggggatcaggacttcttcactatgattggcatggaacaccctaagctgtttcacgttctggactgtacctggaataggcaactctgcacctggtggcgggaccacggatactccgacgtgttcgaggcatacttccggtgcgaagggcacgtgaagatctatcacggtaactgcaacacaccaattcccgaggattag

SEQ ID NO: 243839 - DNA, 1182 bp, Artificial Sequence
  derived and/or modified sequence
atgggactactcaggggcggtttgccctgcgcccgagcaatggccagactaggggcagtccgatcccattactgcgccttgttactggcagctgccctagctgtttgtgccttttattatctcggctcagggcgagagacattttcgtcggccacaaaacggcttaaagaggcaagagctggagcaccagctgcaccatcaccacctgctttggaattagcccgtgggtccgtcgccccagcaccaggcgctaaagctaaatcattggagggcggtggtgccggtcccgtcgactatcatttgttgatgatgtttactaaagccgaacacaatgcagctctgcaggccaaggcaagagtggccctgaggtcactgctgagactggccaaatttgaggcacatgaggttctcaacttgcacttcgtgtccgaggaggcttctcgggaggtggccaaaggtctgctgcgcgaactgcttccccctgccgctggcttcaagtgcaaagtcatttttcatgatgtggcagtgctcacggataaactgttccccatcgtcgaggcgatgcagaagcactttagtgcaggtctgggaacatactacagtgattcaatctttttcttaagtgtcgctatgcatcagattatgccaaaagaaatcctacagattatccaattagacctggatctgaaattcaaaactaatattcgcgagcttttcgaggagttcgactcctttctgcctggggctatcattggaatagcacgtgaaatgcagccagtatatagacacaccttttggcagttccggcatgagaacccacagacaagagtgggcggaccgcctccggagggacttccaggatttaacagcggcgtcatgcttttaaacctggaggcaatgaggcagagccccctgtattctagactccttgaaccggcacaggtgcagcagctcgctgacaaataccactttcgcggtcacctcggtgaccaagacttctttactatgatcggcatggagcaccccaagctgtttcacgttcttgactgcacctggaaccggcagttatgcacatggtggagagatcacggatatagcgacgtttttgaggcctatttcagatgtgagggccatgtcaaaatttaccacggaaactgtaacacacccatccccgaggactag

SEQ ID NO: 243840 - DNA, 2727 bp, Artificial Sequence
  derived and/or modified sequence
cccctttcatggccgccgcctggcgccggggctaagtggccgccggcgtccgggtacccgagggctctcccgcgttgctggcaccgctggcgccgcggtctcgtagcgcatgggcctcctccgaggcgggctcccatgcgctcgggccatggcgcgcctgggcgctgtgcgctcccactactgcgccctgctgctggccgcggcgctggccgtctgcgccttctactacctcggctcaggccgggagaccttctccagcgccaccaagaggctgaaggaggcccgcgccggggctcccgccgcgccctcgccgcccgcgctggagctagcgcggggctccgtggcgccagcccccggcgcgaaggccaagagcttggagggcggcggtgccgggccggtggactaccacctgctgatgatgttcaccaaggcggagcacaatgccgcgctgcaggccaaggcccgcgtcgcgctgcgctcactgctgcgcctcgccaagttcgaggcgcacgaggtgcttaaccttcacttcgtgagcgaggaggccagccgcgaggtggccaagggcctgctgcgggagctcctgccgcccgccgctggcttcaagtgcaaggtcatcttccacgatgttgctgtgctgacggataagctcttccccatcgtggaggccatgcagaagcacttcagtgctggcttgggaacctactacagtgactccatcttcttcctctcggtcgccatgcatcagatcatgcccaaagagatcctgcagatcattcagctggacctagacctgaagtttaagaccaacatccgggagttgtttgaggaatttgacagtttcctgccaggcgccatcatcggcatagcccgggagatgcagccagtttacaggcacacattctggcagttccgccatgagaacccccagacccgggttgggggcccgccccccgaggggctgccgggcttcaacagcggggtgatgttgctgaacctggaggccatgcgccagtccccgctctacagccgcctgctggagccggcgcaggtgcagcagctggccgacaagtaccacttccgcggccacctcggggaccaggacttcttcaccatgatcggcatggagcaccccaagctcttccatgtgctggactgtacctggaaccggcagctgtgcacctggtggagggaccatggctacagtgacgtcttcgaggcctatttcaggtgtgagggccacgtcaagatctaccacgggaactgcaacactcccatcccggaggactaggcgctccccgtgccttgcccccggggcctccagatctgggggaaggacagggttccttgggacagacccaagggcagtgtctgacccgctagagagacaccgcagggaagtcctgtgattaaggtgctgagacctcctgccgggcaggtcactgtgctgaggccacccgccaaggactggcctgtgcactgctggtgcttgggaccttattcctccagggagcaggcgacacaaaggacacgcatgtccagtgggctgggaagcaagcacttgaagagaaggaaggggagaaagggtcccccttgctgtctgcctctgaggaatggaaatcctttagacccggccttttttggaccaatataaatttaatttaaattgacagccttccatttttcgagaaagtacaaacagaactgctttagcacccatcgagccccaaacgggtaaggtaagccaaggttttaatgaccagcccagtatctaagcttccaaacgaatgccagcccatcacatactcaccctgggaggctgctgcacgcgcattctcctgatgctcacgtcacttggtgtaggtttcaggatcgcctctttgaggaaggacttcaggaccaactggggcctgcataagaaaacttatctcattattagagtactcacagcttgtatctcccagctacatcctagaaccccattgtcctttattccaccaaaccagctccaggtgaccagactctactcagaaagcaaattcgtcatcaaagaacagagactggccaccacaaggacatgcaggagaactgtcgggaccaggaagactcattccaaaaagcccaggccgggcacagtcgtcaagcctgtaatcccaacactttgggagaccgaggtgggggtatcgattgagcctcggaggtcgagatcagcctgggaaacacagggaggcccccatcgctacaaaatattttaaaaattagccaggtgtggtggcttgtgcttgttgtcccggctacttgggaggctgaagtgggagggtggcttgagtccaggagttcactgcactgagctgtgatcacaccactgcactccagcctggacgacagagtgagacgtccatctcaaaaaaaaaaaaaaaaccaaaaaggaacccagcaattcccaagtgtgaccatgtgggcttggaagacatgtcactcatgggctagtaagcattctagtttctttgtttaaaaaatccccttatcataccacgttagaccgtagaccttagcagaaattaaagcgtcatttcttttgatggggcctcctgtacgtaggctgcagacgtgaaagccccaggggtccatttgtatcaattttcatcttgttttgttttgatttcatttacgtttttctttttcccatgagtgaggatagccaataaatcatctttgagaacatgg

SEQ ID NO: 243841 - protein, 1462 aa, Artificial Sequence
  derived and/or modified sequence
MFRGPKPPIAPKPRLTAPNEWRASVYLNDSLNKCSNGRLPCVDRGLDEGPRSIPKCSESETDEDYIVVPRVPLREDEPKDEGSVGNKALVSPESSAEEEEEREEGGEACGLEGTGAGEDSVAPAAPGAGALSREGEEGTDLALEDEGEGCADEPGTLEQVSRSEEEEKLVQPHRECSLEDSGPWAGEGVFQSDLLLPHIHGEDQEPPDTPGEAEEDDEEGCASTDPAGADEGSGPDRPTEDMGQDAEDTSEEPPEKEELAGVQEAETATDCPEVLEEGCEEATGVTGGEQVDLSEPPDHEKKTNQEVAAATLEDHAQDESAEESCQIVPFENDCMEDFVTSLTGSPYEFFPTESTSFCSESCSPLSESAKGLESEQAPKLGLRAEENPMVGALCGQCGSLQGGAAEGPAAPDVVVVLEEEALDDALANPYVMGVGLPGQAAPGEGGQAASDALGGYGSKEELNCEAEGGLVPADRKNTSTRVRPHSGKVAGYVPETVPEETGPEAGSSAPGIGGAAEEVGKTLLSLEGKPLEASRALPAKPRAFTLYPRSFSVEGREIPVSVYQEPEGSGLDDHRIKRKEDNLSLSCVIGSSGSFSQRNHLPSSGTSTPSSMVDIPPPFDLACITKKPITKSSPSLLIESDSPDKYKKKKSSFKRFLALTFKKKTENKLHVDVNVSSSRSSSESSYHGPSRILEVDRRSLSNSPQLKSRTGKLRASESPSSLIFYRDGKRKGVPFSRTVSRVESFEDRSRPPFLPLPLTKPRSISFPSADTSDYENIPAMNSDYENIQIPPRRPARAGAFTKLFEDQSRALSTANENDGYVDMSSFNAFESKQQSADQDAESAYTEPYKVCPISSAAPKEDLTSDEEQRSSEEEDSASRDPSVTHKVEGQSRALVIAQELLSSEKAYVEMLQHLNLDFHGAVMRALDDMDHEGRDTLAREELRQGLSELPAIHDLHQGILEELEERLSNWESQQKVADVFLAREQGFDHHATHILQFDRYLGLLSENCLHSPRLAAAVREFEQSVQGGSQTAKHRLLRVVQRLFQYQVLLTDYLNNLCPDSAEYDNTQGALSLISKVTDRANDSMEQGENLQKLVHIEHSVRGQGDLLQPGREFLKEGTLMKVTGKNRRPRHLFLMNDVLLYTYPQKDGKYRLKNTLAVANMKVSRPVMEKVPYALKIETSESCLMLSASSCAERDEWYGCLSRALPEDYKAQALAAFHHSVEIRERLGVSLGERPPTLVPVTHVMMCMNCGCDFSLTLRRHHCHACGKIVCRNCSRNKYPLKYLKDRMAKVCDGCFGELKKRGRAVPGLMRERPVSMSFPLSSPRFSGSAFSSVFQSINPSTFKKQKKVPSALTEVAASGEGSAISGYLSRCKRGKRHWKKLWFVIKGKVLYTYMASEDKVALESMPLLGFTIAPEKEEGSSEVGPIFHLYHKKTLFYSFKAEDTNSAQRWIEAMEDASVL

SEQ ID NO: 243842 - DNA, 4389 bp, Artificial Sequence
  derived and/or modified sequence
atgtttagaggtcccaaacccccgatcgctccaaaacctcgccttacagcgccaaacgaatggcgcgcctccgtgtacctgaacgacagcctaaacaagtgttcgaacggccgactgccctgtgtagaccgcgggcttgatgaaggaccacgctccatcccaaagtgttccgagagcgaaacagacgaagactatatagtggtgccgcgcgtcccattgcgcgaggatgaacccaaagatgagggaagcgtgggtaacaaagcgttggtgtcgcccgaaagctccgccgaggaggaagaggaaagggaggagggaggcgaggcttgtggattggagggaactggtgcgggagaggactccgttgcacccgctgccccaggggccggcgccctgagccgcgaaggcgaggagggtactgacctggcccttgaggatgagggcgagggttgcgccgacgaaccaggtacgctcgagcaggtgagcagaagtgaagaggaggaaaaattggtccagccccacagagaatgctctcttgaggacagcggaccttgggccggcgaaggggtgtttcaatctgatttactcctgcctcacatccatggtgaagaccaggaaccccccgacactcctggagaagctgaagaggatgatgaggagggctgcgccagcactgaccccgccggcgccgatgaggggagcgggcccgaccgccccacagaggatatgggacaggacgcagaagacacatccgaagagccccccgagaaggaagaactggcgggcgtccaggaggcagaaactgcaactgattgccccgaggtcctagaggaaggctgtgaggaggcaaccggcgtcaccggtggcgagcaggtcgacctgagcgaaccacctgatcacgagaagaagaccaaccaggaggtggctgccgctacactcgaagaccacgctcaggatgaatcggctgaggagtcttgtcagatcgtgcccttcgagaatgattgtatggaagatttcgtcacatccctcacgggcagcccatatgagttctttcccaccgagagcacttctttctgctcagagtcttgctctcctttgtcggagtcggcaaaagggcttgaatccgagcaagccccaaaactgggccttagagcggaagaaaacccaatggtcggcgcgctgtgcggacagtgcggatcactccaggggggagccgctgagggccccgctgcccccgacgtagtggtcgttctcgaggaagaggccctagatgacgctctcgcaaatccgtacgtcatgggagtcgggctgcctggacaggccgctcccggcgaggggggccaggccgcgtctgacgccctgggcggctacgggagtaaagaggagctgaactgcgaggctgaagggggactcgttccagctgaccgcaaaaatacttcgacccgggtgaggccacacagtggaaaggtcgccgggtacgtccctgagacagtgcccgaagaaactggtccggaggccggaagctccgccccaggtataggaggtgcagccgaagaagtcggaaagacactgttgtccctggagggcaaacctttagaagcgtcaagagcccttccagcaaagcctcgcgcttttacactctatccaaggagcttctccgtggagggcagggaaattccagtgagtgtttatcaggagcctgaaggctcaggcctcgacgaccataggatcaagagaaaggaggataacctttccctgtcttgcgtaatcgggagcagcggatccttttcacagagaaatcatttgccctcctctggcacaagcaccccgagtagcatggtggacatcccaccccctttcgacctggcttgtataactaaaaaaccaattaccaagagttctccctctctcttaatagaaagcgacagcccagacaaatataagaagaaaaagtccagctttaagcgctttttggctctcacttttaagaagaagacggaaaataagctccacgttgatgtcaatgtgtccagctcccggtcgtccagcgagagctcttatcatggccctagccggatcttagaagtcgatcggcggtccttatccaacagcccccagctcaaaagcagaactggaaagctcagggcctctgaatcgccttcaagccttatcttttatcgcgacggcaagcgaaagggggttcccttctcacgtactgtctcccgtgtggagtcattcgaggatcggagtagacctccctttcttcccctaccactcacaaagccgaggtctatatccttcccaagcgccgacacttctgattacgaaaatatccctgcgatgaactctgactacgagaatatacagatccccccccgccgtcccgcgagggctggtgcctttacgaaactgttcgaagaccagagccgagcattgagcaccgctaatgagaatgacgggtatgttgacatgagcagctttaatgcctttgagtccaagcaacagagcgcagaccaagacgctgaatccgcatataccgaaccctataaagtgtgcccaatttcaagtgccgcccccaaagaggacctcacttcagatgaagagcaacgctctagcgaggaggaggacagtgccagccgggaccctagtgtcacccacaaagtggagggacagtcccgggccctggtcattgctcaagaactgcttagcagtgagaaggcgtatgtggagatgctgcagcacctgaaccttgactttcacggtgccgtaatgagagctcttgacgatatggatcacgaagggcgtgacaccctggcccgggaggagctgagacaaggccttagcgagctcccagcaatccatgatctgcaccagggaatcctggaggagctagaagaaaggctgagtaactgggagtcgcaacagaaggtcgccgacgtgttcctcgcccgagaacaggggtttgatcaccacgctacacacattctgcaatttgatcggtatctgggactactgtccgagaactgcctgcattccccacgcctcgccgctgctgtgagagaattcgagcaatcggtgcagggaggctcacaaacagcaaagcatagactgctgagagttgtccaacgcctgttccagtatcaggtgctgctgacagattacctcaacaatctctgcccagattccgctgagtacgacaatacccagggcgcgctttccctgatcagtaaggttacagatcgtgctaatgacagcatggagcagggggagaatctgcaaaagctcgtgcatatcgagcacagtgtgaggggccagggcgatctactacaacccggtcgggaatttctgaaggagggcacactaatgaaggtgaccggaaaaaataggcggcccaggcatttgtttctgatgaatgacgttttgctatacacttatcctcagaaagatggcaaatacagactcaagaacaccctggccgttgccaatatgaaagtcagtaggcctgtgatggagaaagtgccctatgccctgaagatagagacctcagaaagctgcctgatgttgtcagcttcttcctgcgcagagagagacgaatggtacgggtgtctgtcacgagccttacccgaggactataaggcacaggcattagcggcttttcatcattccgttgagatccgtgagagactgggcgtcagcctcggcgagaggcccccgaccttagttccggtaacgcacgtgatgatgtgcatgaattgcggatgtgacttttctctgacattgcggagacatcactgtcatgcatgcgggaagattgtgtgccgcaattgctccagaaacaagtatccactgaagtacctcaaggataggatggccaaggtgtgtgacggctgtttcggagagctgaagaagcgcggccgcgccgtgcctggcctcatgcgggaaagacccgtttcgatgtcttttcccctgagctccccacgctttagcgggagcgctttttcatcagtatttcaatccataaatccctcaactttcaaaaagcagaagaaagtgccatccgctctgaccgaagtggcagcatctggcgaaggatccgctatcagtgggtatctgtccaggtgcaagaggggtaaacggcactggaagaaactgtggtttgtgattaaggggaaggtgctgtacacgtatatggcctcagaggataaggtggctctcgagtcaatgcctctcctggggtttactatcgccccagagaaggaggaaggcagctccgaagtcggcccaatcttccacctgtaccataaaaagactttattctactcattcaaagcagaggataccaatagtgcccagaggtggattgaggcgatggaggacgcctcagtgctgtag

SEQ ID NO: 243843 - DNA, 4389 bp, Artificial Sequence
  derived and/or modified sequence
atgttccggggccccaagccacccatcgcccccaagccccggctgacagccccaaatgagtggagggcctctgtgtacctgaatgacagcctgaacaagtgcagcaatggccgcctgccctgtgtggaccggggcctggatgagggccccaggagcatccccaagtgcagcgagagcgagacagatgaggactacatcgtggtgccccgggtgcccctgagagaagatgagcccaaggatgagggctctgtgggcaacaaggccctggtgtccccagagagcagcgctgaggaggaggaggagcgggaggagggcggggaggcctgtggcctggagggcaccggggccggggaggacagcgtggccccagctgcccctggggccggggccctgagccgggagggggaggagggcacagacctggccctggaggatgaaggagagggctgtgctgatgagcccggcaccctggagcaggtgagccgctctgaggaggaggagaagctggtgcagccccacagagaatgttccctggaggacagcggcccctgggccggggagggcgtcttccagagcgacctgctgctgccccacatccacggggaggaccaggagcccccagacaccccaggagaggccgaggaggatgatgaggagggctgtgccagcacagatcctgctggagcagatgagggcagcggccctgaccggcccacagaggacatgggccaggatgctgaggacaccagcgaggagcccccagagaaggaggagctggccggcgtgcaggaggccgagacagccacagactgcccagaggtgctggaggagggctgtgaggaggccactggagtgactggaggagagcaggtggacctgtctgagcccccagaccacgagaagaagaccaaccaggaggtggccgccgccaccctggaggaccacgcccaggatgagagcgctgaggagagctgccagatcgtgccctttgaaaatgactgcatggaggactttgtgaccagcctgaccggcagcccctatgagttcttccccacagagagcaccagcttctgcagcgagagctgcagccccctgtctgagagcgccaagggcctggagagcgagcaggcccccaagctgggcctgcgggcagaggagaaccccatggtgggcgccctgtgtggccagtgtggcagcctgcagggcggcgctgctgagggccctgctgccccagatgtggtggtggtgctggaggaggaggccctggatgatgccctggccaacccctacgtgatgggcgtgggcctgcccggccaggccgcccctggagagggcggccaggccgccagtgatgccctgggcggctacggcagcaaggaggagctgaactgtgaggccgagggcggcctggtgcctgctgacaggaagaacaccagcaccagggtgcggccccacagcggcaaggtggccggctacgtgcctgagaccgtgcctgaggagactggacctgaggccggcagcagcgcccctggcatcggcggcgctgctgaggaggtgggcaagaccctgctgagcctggagggcaagcccctggaggccagccgggccctgcctgccaagccccgggccttcaccctgtaccccaggagcttctctgtggagggccgggagatccctgtgtctgtgtaccaggagcctgagggcagcggcctggatgaccaccgcatcaagaggaaggaggacaacctgagcctgagctgtgtgattggcagcagcggcagcttcagccagaggaaccacctgcccagcagcggcaccagcacccccagctccatggtggacatccccccaccatttgacctggcctgcatcaccaagaagcccatcaccaagagcagccccagcctgctgattgaaagtgacagcccagacaagtacaagaagaagaagagcagcttcaagcgcttcctggccctgaccttcaagaagaagacagagaacaagctgcacgtggatgtgaatgtgagcagcagccgcagcagcagcgagagcagctaccacggccccagccgcatcctggaggtggacagaagaagcctgagcaacagcccccagctgaagagcaggacaggcaagctgcgggccagcgagagccccagcagcctcatcttctacagagatggcaagaggaaaggagtgcccttcagcaggacagtgtcccgggtggagagctttgaggacaggagcaggcctcccttcctgcccctgcccctgaccaagcccaggagcatctccttccccagcgctgacaccagtgactatgagaacatcccagccatgaacagcgactatgagaacatccagatccccccccggcggcctgcccgggccggggccttcaccaagctgtttgaggaccagagccgggccctgagcacagccaatgaaaatgatggctacgtggacatgagcagcttcaatgcctttgagagcaagcagcagagcgctgaccaggatgctgagagcgcctacacagagccctacaaggtgtgccccatcagcagcgctgcccccaaggaggacctgaccagtgatgaggagcagaggagcagcgaggaggaggacagcgccagccgggaccccagcgtgacccacaaggtggagggccagagccgggccctggtgattgcccaggagctgctgagcagcgagaaggcctacgtggagatgctgcagcacctgaacctggacttccatggagctgtgatgagggccctggatgacatggaccacgagggccgggacaccctggcccgggaggagctgcggcagggcctgtctgagctgcctgccatccatgacctgcaccagggcatcctggaggagctggaggagcggctgagcaactgggagagccagcagaaggtggctgatgtgttcctggcccgggagcagggctttgaccaccacgccacccacatcctgcagtttgaccgctacctgggcctgctgtctgagaactgcctgcacagcccccggctggccgctgctgtgcgggagtttgagcagagcgtgcagggcggcagccagacagccaagcaccggctgctgcgggtggtgcagaggctcttccagtaccaggtgctgctgacagactacctgaacaacctgtgcccagattctgcagaatatgacaacacccagggcgccctgagcctcatcagcaaggtgacagaccgggccaatgacagcatggagcagggcgagaacctgcagaagctggtgcacatcgagcacagcgtgcggggccagggcgacctgctgcagcccggccgggagttcctgaaggagggcaccctgatgaaggtgacaggcaagaacagaagacccaggcacctgttcctgatgaatgatgtgctgctgtacacctacccccagaaggatggcaagtaccgcctgaagaacaccctggccgtggccaacatgaaggtgtccaggcctgtgatggagaaggtgccctatgccctgaagattgagaccagcgagagctgcctgatgctgagcgccagcagctgtgccgagagagatgagtggtacggctgcctgagccgggccctgcctgaggactacaaggcccaggccctggccgccttccaccacagcgtggagatccgggagcggctgggcgtgtccctgggggagcggccccccaccctggtgcctgtgacccacgtgatgatgtgcatgaactgtggctgtgacttcagcctgaccctgcggcggcaccactgccacgcctgtgggaagatcgtgtgcaggaactgcagcaggaacaagtaccccctgaagtacctgaaggacaggatggccaaggtgtgtgatggctgctttggagagctgaagaagaggggccgggctgtgcccggcctgatgagggagaggcctgtgtccatgtccttccccctgagcagcccccgcttcagcggcagcgccttcagcagcgtcttccagagcatcaaccccagcaccttcaagaagcagaagaaggtgcccagcgccctgacagaggtggccgccagcggggagggcagcgccatcagcggctacctgagccgctgcaagaggggcaagaggcactggaagaagctgtggtttgtgatcaagggcaaggtgctgtacacctacatggccagcgaggacaaggtggccctggagagcatgcccctgctgggcttcaccatcgcccctgagaaggaggagggcagcagcgaggtgggccccatcttccacctgtaccacaagaagaccctcttctacagcttcaaggccgaggacaccaacagcgcccagcgctggattgaggccatggaggatgcctctgtgctgtag

SEQ ID NO: 243844 - DNA, 4389 bp, Artificial Sequence
  derived and/or modified sequence
atgttccggggccccaagccccccatcgcccccaagccccggctgactgctcctaacgaatggagagcgtccgtttatctgaatgattcactgaacaaatgttctaacggccggctcccatgtgtggacaggggcctcgatgaggggccaaggtccattcctaaatgttctgagtccgagactgacgaagattatatcgtggtgccgcgcgtccccttgcgcgaagatgaacccaaggacgaaggcagtgtcgggaataaagcgctcgtcagtcccgaatcctccgcagaggaggaggaagaacgagaggaaggcggtgaggcctgcggactggagggcacaggcgctggggaagattctgttgcacctgcggccccaggggcaggcgcactcagtagagagggcgaagaaggcaccgaccttgctctcgaggatgagggtgaaggttgtgccgatgaaccaggaacactggagcaagtatccaggtcagaagaagaagagaaacttgtccagccccatagggagtgttccctggaggacagtgggccttgggccggcgaaggggtgtttcagagcgacttattgctgccacacattcacggagaggaccaggagccgcctgacacccctggagaggccgaagaggatgatgaagagggatgcgccagcactgaccccgctggagccgacgagggctccgggccggaccggcctacggaggatatgggccaggatgccgaagacacctccgaagaacccccagaaaaggaagagctggcgggagtccaggaggccgagacagctacagattgcccagaggtcctggaggagggttgcgaggaggccaccggtgtgacggggggagagcaggtggaccttagcgagccacccgaccacgaaaaaaaaactaatcaggaagtcgccgccgccactctggaagaccacgcacaagatgagtcagctgaagagtcctgccagattgtgccctttgagaacgactgcatggaggacttcgttacgtccctaaccggttccccgtatgaatttttcccaacggagagtacctccttctgcagcgagtcttgctcccccttgagtgagtctgctaagggtttggaatcagaacaagctccaaagttgggactccgtgccgaggaaaatccaatggtcggcgccctgtgtggacagtgcgggagtttgcagggaggcgcagcggaaggaccagccgccccagatgttgtggtcgttctggaagaagaagcactggacgatgccctcgccaatccatatgtcatgggcgtcggactgccgggtcaggcagcccctggcgagggtggccaggccgccagcgacgccctgggaggttatggttcaaaagaggagctgaattgtgaagccgagggcggcttagtgccagcagaccggaagaacacatctacacgcgtgaggccgcactcaggaaaagttgcaggctacgtccccgaaaccgtgcccgaggagaccggacccgaggctgggagctccgccccaggcatcgggggtgctgctgaggaagtgggcaagacactgctttctcttgagggtaagcccctcgaggcatcccgcgcattgcccgctaagccgcgggccttcaccttatatccccggtcattctccgtggaggggcgggagattcccgtcagcgtttaccaggagcctgaagggtctggtctcgacgatcaccggattaaacgcaaggaggacaacctgtccttgtcctgtgtgatagggtctagcggatctttttctcagaggaatcacttacccagcagcggaactagcacaccaagcagtatggtggatatccccccgccattcgacttagcttgtattactaagaaaccaataaccaaaagttctccctcgctgttgatcgagagcgacagccctgataagtacaaaaaaaagaagagttcatttaagcggttcttagcactgacgtttaagaaaaagaccgagaataagttgcatgtcgacgtgaacgtgtcgtccagccgatctagctccgaatcaagctatcacggcccgagccggatcctggaagttgaccggcgttcactaagtaattcacctcaattgaagtccaggaccggtaagctgcgggcttccgagtctccctcttcccttatattctaccgggacggtaagagaaaaggggtcccgttttcccggaccgtgagtcgcgtcgaatccttcgaggacaggtcccgacctccattcctcccattaccacttactaagccccgctccattagctttcctagtgctgacactagtgactatgaaaatatccccgcgatgaactcagattacgaaaacattcagattccaccccgaagaccggcacgagccggagcatttaccaagttattcgaggatcaatcccgtgcgctctcaacggccaacgagaacgatggctacgtggatatgtcttcttttaatgcgttcgaatctaagcagcagtctgctgatcaggatgcagagtccgcctatactgaaccatacaaagtatgtcctataagtagtgccgcgccaaaggaagacctgacctctgacgaggagcaaagatcatccgaagaggaagactcggccagccgggatcccagcgttacccacaaagtggaaggccaaagcagagctttggtcatcgctcaagagctgctgagctctgaaaaggcttacgtggagatgctgcagcacttgaatcttgatttccacggtgccgtgatgcgcgctctggacgatatggatcatgagggtagagataccctggcccgcgaggaacttagacagggtctgagtgagctccctgccatccacgatctccatcaggggattctagaagaattagaggaaagactgagtaactgggaatcgcaacagaaggtggccgatgtgttcctcgctcgcgagcagggctttgaccaccacgccactcatattctccagtttgatcggtacctggggttgctatcagagaattgtctgcactcgccccgcctggccgccgccgtgcgcgagttcgagcaaagcgtgcagggtgggagccagactgctaaacacaggctattgcgggtggtgcagcgactgttccaataccaggtgcttctgacggattatcttaacaacctgtgccctgacagtgcagaatacgataatactcagggagcgctcagtttgatctcgaaggtgactgatagagctaatgatagcatggaacaaggggagaatctacagaaactggtacatattgaacatagtgtccgcggccagggcgacctcctgcaacctgggagagaattccttaaggaaggtacactgatgaaagtaacaggaaaaaacagaaggccacgccacctgttcttgatgaacgacgtgcttctatatacctacccccagaaggacgggaaatacagactgaagaatacgctggcagtcgccaatatgaaggttagcaggccagttatggagaaagtcccatatgccctgaagattgaaaccagcgagtcctgcttaatgttgtcggcctctagctgtgcagagagagatgaatggtatgggtgcttgtctcgcgctctacccgaggattataaggcgcaggctcttgcagcttttcaccactctgtcgagatccgggagcggttgggggtgtctctgggagagcgtcctcctacattagtacctgtcacacacgtgatgatgtgcatgaactgcgggtgtgattttagcctcaccttaaggaggcatcactgccacgcttgtgggaaaatcgtctgtcgcaattgttcaagaaataagtacccactcaagtatcttaaagatcggatggccaaagtctgtgatggatgtttcggtgagttgaaaaaacggggaagggctgtccccggactgatgcgcgagagaccagtgtcgatgagctttcccctctcctccccgcgattctcaggctcagccttctcctcggtattccagtccataaaccctagcactttcaagaagcagaaaaaagtccctagcgccctcactgaggtggcagcaagcggggagggcagcgctattagcggctacctcagtcggtgtaaacgagggaagaggcattggaagaagctttggttcgtcatcaagggtaaggtgctttatacttacatggctagcgaggacaaagtggccctggagtcaatgcccctcctaggttttaccatcgctcccgaaaaagaggagggatcttcagaagtggggcctatctttcacctgtaccacaaaaagactttattctacagtttcaaggcggaggataccaatagcgcccagcggtggatcgaagccatggaggatgcctctgtgctgtag

SEQ ID NO: 243845 - DNA, 4389 bp, Artificial Sequence
  derived and/or modified sequence
atgttcaggggtccgaagcccccaatcgcccctaagcccaggttgaccgcacctaatgagtggcgtgccagtgtgtatctgaatgatagcctgaacaaatgctctaacggtcggcttccttgtgtggacagaggtcttgacgagggacctcggtctattccaaagtgtagtgagtccgaaaccgacgaggactatatcgtcgttccgagggttccactccgcgaggatgagccaaaagacgagggatccgtgggcaataaagccttagtgtccccagagagctccgcagaagaagaggaggaaagagaagagggcggtgaggcatgtgggctagaaggcactggcgcaggtgaggattcggtggctcccgcagcaccgggtgccggtgccttgtccagagagggcgaagaagggacagatctggccctggaggacgaaggggaaggttgcgcagacgaaccaggcaccctagaacaagttagcagatctgaggaagaagaaaagttggttcagccacaccgggagtgcagtctagaagattcagggccatgggccggtgagggggtatttcagagtgaccttctcctacctcatatacacggcgaagatcaagagcctcccgataccccaggggaagccgaggaggacgatgaagaaggctgtgctagtactgatcccgcaggagctgatgagggctcaggccctgatagaccgaccgaggatatggggcaggatgctgaggatacatccgaggaaccaccggaaaaggaggaactcgctggagttcaggaagcggaaaccgctaccgactgtcccgaggtcctcgaggagggatgtgaagaagccactggcgtgaccggaggtgagcaggtggatctgtcagagcctcctgaccacgagaagaagactaatcaggaagtggcggcagcaacgcttgaggaccatgcacaggacgaatccgcagaagagtcttgccaaatcgtgcccttcgaaaacgattgcatggaggacttcgtgacaagcctcacaggatctccctatgagttttttcccactgaatcaaccagcttctgttctgaatcttgcagccctctgagcgaaagtgcgaagggactggagtcagagcaagccccaaagctggggctgagagccgaagaaaatcccatggtgggagcgctctgtggccagtgcggcagtctgcagggaggcgctgcagaaggacctgctgccccagacgtcgtcgtggtgttggaagaggaagctttagatgatgccctggcgaacccctacgtgatgggggtgggcctgcccggacaagcagcgccaggcgaaggcggtcaagcagcatcagatgccctgggtgggtacggcagcaaagaggaattaaactgtgaagctgagggcggacttgtgcccgcagatagaaaaaataccagcacccgagtgcgcccacattccgggaaggtcgcgggttacgtgccagaaacagtgccagaggaaacaggccctgaggcaggatccagcgccccaggaatagggggtgccgcagaagaggtgggaaagactctactgagcctcgagggaaagcccctggaagctagtagggccttacctgccaaacctagggccttcactctgtatcctcgatctttctcagtggaggggagggagatcccagtaagcgtgtatcaagaaccagaggggagcggacttgacgaccacaggattaagagaaaagaggataacttgtccctgtcctgtgtgatagggagcagtggcagtttcagccaaagaaaccaccttcctagctctgggaccagcaccccgtcctcgatggtggatatccccccaccctttgatctcgcctgcataacaaagaagccaataacgaagtccagcccatcactgctcatagaatccgactctcccgacaagtataagaaaaaaaagtctagctttaaaaggttcctggctctgaccttcaaaaagaagacagagaacaaattgcatgttgacgtgaacgtgtctagtagtcgttcttctagcgagtcttcctaccacgggccatctcggatcctggaggtggatcggcgttccctttctaacagccctcaacttaagagcaggacaggaaaactgcgggcttctgagtccccctcaagtctgatcttctatcgggacgggaaacgcaagggagtgcctttttctcggaccgtgtcgagagtggagtcctttgaggaccggagtcgcccacccttcctgccactcccccttacgaagcctagatctatttcatttcctagcgctgacacatccgattacgagaatatccctgcaatgaattccgactatgaaaacatccagataccccctagaaggcccgctagagcaggagccttcaccaaattgttcgaagaccagagtcgggctctgtcgacagctaacgaaaacgatggctatgtagacatgagcagcttcaatgctttcgaaagcaaacagcagtccgccgaccaagatgctgaaagcgcatatacggagccttacaaagtttgccctatttcgagcgccgcaccgaaggaggatctgactagcgatgaggaacaacggtctagtgaggaggaagacagcgcttcacgcgatccatccgtgacccacaaggtagaaggtcagagtcgggcactcgttattgcacaggaactgctctcatccgagaaggcatacgtggagatgttgcagcacctgaatcttgattttcatggtgccgtcatgcgagctctggacgacatggatcacgagggacgagatactctggccagagaggagctgcggcaaggcctttcggaattgccggctattcatgacctgcaccaggggatactcgaggagctggaggagcggctgtctaactgggaatcgcagcagaaagtggccgacgtgtttctagcccgagaacaaggctttgaccaccacgcgactcatatcttacagttcgatcgctatctggggcttttatccgagaactgccttcattcccccagactggccgctgccgtcagggagtttgagcagagtgtccagggcggttcccagactgccaagcatcgcctgctacgagtggtccagcgcctctttcagtatcaggtacttctgacggactacctgaataatctgtgccctgactcagcagagtacgacaacactcaaggtgcactgtctctaatctccaaagtcacggaccgtgcgaatgattccatggaacagggggagaatctgcagaaactcgttcacattgagcattcagtgcggggacaaggcgatcttttacagccagggagagagttcctcaaggagggaacactcatgaaggtcacaggaaaaaataggcgccctagacatctgttcctgatgaatgacgtcctgctgtacacatatcctcagaaagacggcaagtatagattgaaaaatactctggccgtggccaacatgaaagtgtcgcggcctgtcatggagaaagtgccatacgctctgaagatcgagacgtcagaatcttgcctaatgctgtccgcaagttcctgtgccgagagagatgagtggtacggctgcctcagtcgtgcgttgcccgaggactacaaagcacaggcactcgcagccttccaccactcagtcgaaatcagagaaagactgggggtgagcctgggggaacgaccgcctaccctggttcctgtgactcacgtgatgatgtgcatgaattgtggttgcgacttttcccttaccctgcgcaggcatcactgccacgcctgtggcaagatcgtgtgcagaaattgcagcaggaacaagtacccccttaagtatttgaaagatcgcatggcgaaagtgtgcgatggttgtttcggcgagctcaagaagcgcggtagggccgtgccgggactcatgcgcgaacgcccagtcagcatgtcattcccactttcttccccaagattttctggttccgccttctccagtgtctttcagtcgataaaccccagcacatttaaaaagcagaaaaaggtgcctagcgcgctcacagaggtggcagccagcggggagggcagcgccatttcaggatacctgtccaggtgcaaacgtggaaagagacactggaagaaactttggttcgtgatcaaggggaaagtgttatatacatacatggcttccgaggacaaagtagctctggagtctatgccactgctcggatttacaatcgcacctgagaaggaggaggggagctccgaagttggccctatctttcacctgtaccacaagaagacattattttattccttcaaggccgaagacacgaactcagctcagcgatggatagaagcaatggaggacgcctcagtcctgtag

SEQ ID NO: 243846 - DNA, 5720 bp, Artificial Sequence
  derived and/or modified sequence
caaaaccacctgtcgctcccaagccaaagactaccagtccactgacgccagtgaccgcgcccaaattcccttcctcagccaggcccgagagtcttcacagtccaaactccatgttcaggggtccgaagccccccattgcccccaagcccaggctgactgccccaaacgagtggagagccagtgtgtacctgaatgacagcttgaacaaatgcagcaacgggcggctgccctgtgtagacagggggcttgatgaggggccccggtccatcccaaagtgctctgagtcggagaccgacgaggattacatcgtggtccccagggttccgctgagggaggatgaacccaaggacgagggcagtgtggggaacaaagccctggtgtctcccgagtcctctgcggaagaggaagaggagcgtgaagagggaggcgaggcatgtggcctggagggtacaggagctggtgaggattcagtggcccctgctgctccgggtgcaggagcgctgagcagggagggtgaggaaggcacagaccttgctcttgaggatgaaggggagggctgcgctgatgagccagggacactggagcaggtgtccagaagtgaggaggaagagaagctagtgcagccacacagggagtgcagcctggaggacagtgggccttgggctggagagggggtcttccagagcgacctcctcctgcctcacatccatggagaggaccaggagccccccgacacccccggggaggcagaggaggatgatgaggaaggctgtgccagcacagacccagcaggggcagatgagggttcgggtcctgacaggcccacggaggacatgggacaggatgctgaggacaccagtgaggagccccctgagaaggaggagctggccggggtccaggaggcagagacagccacagactgccctgaagttcttgaggagggatgtgaagaggccacgggtgtcacaggtggggaacaggttgacctcagtgaaccacctgaccacgagaagaaaaccaaccaagaagtggcagccgccaccctggaggaccatgcacaggatgagtccgccgaggagagctgccagattgtcccttttgagaatgactgcatggaggacttcgtgacttccctcacaggaagcccctatgagttcttcccaactgagagcacctctttttgcagcgagagctgttctcctctttctgaatcagcgaaaggtttagaatcagagcaggcaccaaagctggggctgcgtgcggaggagaaccccatggtgggggctttgtgtggccagtgtggctccctacagggtggagcggccgagggtcccgcagcccctgatgtggtggtcgtgctggaggaggaggccttggatgatgcactggccaacccctatgtgatgggagtgggcctgcccggtcaggcggcccctggagaaggagggcaggctgcatcggacgccctgggtggttatggctcgaaagaagaattgaactgtgaggcagagggtggcctggttcccgcggacaggaagaacaccagcacgagggtccggccccactctgggaaggtggccggctatgtcccagaaaccgtccctgaagaaaccggacctgaggcgggctcgtcagcccctggcattggaggtgccgcagaggaggtgggaaagacgcttttgtcattggaggggaagcccttggaagccagcagggccttgccagcaaagcccagggcctttactttataccctcggtcgttctccgtggaaggccgagagattccagtgtccgtgtaccaggagcctgaggggtcagggttggatgaccacaggataaagaggaaagaggacaatctctctctgtcgtgtgtaattggctcctctgggagtttctcccagagaaaccaccttccgtccagcggcacctccacgccttcttccatggtcgacatcccacctcctttcgacctggcctgcatcaccaagaagcccatcacaaagagctctccctcactcctgatcgagagcgactccccggacaagtacaagaagaagaagtcatcctttaagcgcttcctggcactgacgtttaagaagaagacggagaacaaattgcatgtggatgtgaacgtgtcttcctctaggtcctcttcagagtccagctaccacgggccttccaggattctggaagttgaccggagaagcctcagcaactcccctcagcttaagtctcggactgggaagctccgggcttctgaatccccctcctccctcatcttttatagagatggcaagaggaaaggtgtccccttcagcaggacggtgtccagagtggagtcctttgaagaccgctcccggccgcccttcctgcccttgccactgaccaagccacggtccatctccttccccagcgctgacacttcagactatgagaacattccagccatgaactcggactatgagaatatccagattccaccccggagacctgccagggctggcgcgttcacgaagctgtttgaagatcagagcagagccctgtccacagcaaacgaaaatgatggctacgtggacatgagcagcttcaacgcctttgagagcaaacagcagagtgcagaccaggacgcagaaagcgcctacacagagccctacaaagtctgtcccatctcgtcggcagcccccaaagaggaccttacgtcggatgaagagcagagaagctcggaggaggaggacagtgcttcaagagaccccagtgtcacccacaaggtggaaggacagtccagagcccttgtcatcgcacaggaactgctatcttcagagaaagcatacgtggagatgctccagcacttaaatctggatttccatggagctgtcatgagggccttggatgacatggaccatgaaggcagagacacattggcccgggaggagctgaggcagggcctgagtgaactcccagccatccacgaccttcatcaaggcatcctggaggagctggaggaaaggctgtcaaattgggagagccagcagaaggtagctgacgtcttcctggcccgggagcaggggtttgatcaccacgccactcacatcctgcagttcgacaggtacctaggtctgctcagtgagaattgcctccactctccccggctggcagctgctgtccgtgaatttgagcagagtgtacaaggaggcagccagactgcgaagcatcggctgctgcgggtggttcaacgcctcttccagtaccaagtgctcctcacagactatttaaacaacctttgtccggactccgccgagtacgacaacacacagggtgcactgagcctcatctccaaagtcacagaccgtgccaacgacagcatggagcaaggggaaaacctgcagaagctggtccacattgagcacagcgtccggggccaaggggatctcctccagccaggaagggagtttctgaaggaagggacgctgatgaaagtaacagggaaaaacagacggccccggcacctatttctgatgaacgatgtgctcctgtacacctatccccagaaggatgggaagtaccggctgaagaacacattggctgtggccaacatgaaggtcagccgccctgtgatggagaaagtgccctacgctctaaagattgagacttccgagtcctgcctgatgctgtctgcgagctcctgtgcagagagggacgagtggtatggctgtctgagcagagccctccctgaggactacaaggcccaggcgctggctgcattccaccatagcgtggagatacgagagaggctgggggttagccttggggagaggccccccaccctggtgcctgtcacacacgtcatgatgtgcatgaactgcggctgcgacttctccctcaccctgcggcgtcatcactgtcacgcctgtggcaagatcgtgtgccggaactgttcgcggaacaagtacccgctgaagtacctgaaggacaggatggccaaggtctgcgacggctgcttcggggagctgaagaagcggggcagggctgtcccgggcctgatgagagagcggcctgtgagcatgagcttcccgctgtcttcaccccgcttctcgggcagtgccttttcatccgtcttccagagcattaacccctcgaccttcaagaagcagaagaaagtcccttcagccctgacagaggtggctgcctctggagagggctctgccatcagtggctatctcagccggtgtaagaggggcaagcggcactggaagaagctctggtttgtcatcaaaggcaaagttctctacacctacatggccagtgaggacaaagtggccttggagagtatgcctctgctaggcttcaccattgctccagaaaaggaagagggcagcagtgaagtaggacctatttttcacctttaccacaagaaaaccctattttatagcttcaaagcagaagataccaattcagctcagaggtggatcgaggccatggaagatgcgagtgtgttatagcagttatcaagcatgtggacttgtaacaaattcttaggtcaatatgtgaatgcttttagaagctaagctgtggctcaactcatccggacacacacctggattcagcaatgaggcctgaccttttttgctataaccgccccaccactcccctgcccttgccaacatcttcatgaatggaatccttaagggatatttatggacctctccttttctgtgttttccacccctacccccacccgccacccagtaataaactatttccttaccccgcagtgagttaaaatttagtaagatgaagatgtggaaaccaatgaaaagtacatttagaaatgcaggctttttagtagaaagaagctcttacagtttttactcatgataaatcttatcacctttcaaaaattgattgtggtgcctcaggtgaaatgagaagctatcagtaacagctactctcatcgaaagcactttattattttacggagctgcaacctccaattttgtgttttctaagtgatttacttaagtcaataacagatggaatcctgtggactaatgtgccaccagttttctaacaagggtgtacataaaatggatttgtgcagacctggctgtggcttgctggtgtgcaagcacacatcactttagaggggctgcgccccaccagataggaaggggaggattttctcctccagtcgaccttgtgacctgtatactaacataacttattaaaggaggggtccctcctcccccagagcagtcctcaacactatgtcagtgctggaaatgcagccactggcagatctggccccccagacgtcaccgcagggcctctgaagagtcaaggtctgctttaatttattgtgtgcctttctgtgtttacctcactcaagctgacaacattgtttatgggaatctatccttcttttagacacacggtaatccttgggctgtattactgaaggctttttattttttgagaggtgaaaaaaagagaaaacaagttagactccaaaggtgaattcctggtcttggcagatggctctgggaacagcgagggagcacagaagtcgtggcctgaggctgttctatgggcacttggggctaaatcgcctcctgagggtgactgttgcttattctgctggacaggtttttacataaagcaaagggcatgtgaggggtgggattccttgttactcttactgcaataaaaatcaattgtttgat

SEQ ID NO: 243847 - DNA, 4389 bp, Artificial Sequence
  derived and/or modified sequence
atgttcagaggccccaagccccccatcgcccccaagcccagactgaccgcccccaacgagtggagagccagcgtgtacctgaacgacagcctgaacaagtgcagcaacggcagactgccctgcgtggacagaggcctggacgagggccccagaagcatccccaagtgcagcgagagcgagaccgacgaggactacatcgtggtgcccagagtgcccctgagagaggacgagcccaaggacgagggcagcgtgggcaacaaggccctggtgagccccgagagcagcgccgaggaggaggaggagagagaggagggcggcgaggcctgcggcctggagggcaccggcgccggcgaggacagcgtggcccccgccgcccccggcgccggcgccctgagcagagagggcgaggagggcaccgacctggccctggaggacgagggcgagggctgcgccgacgagcccggcaccctggagcaggtgagcagaagcgaggaggaggagaagctggtgcagccccacagagagtgcagcctggaggacagcggcccctgggccggcgagggcgtgttccagagcgacctgctgctgccccacatccacggcgaggaccaggagccccccgacacccccggcgaggccgaggaggacgacgaggagggctgcgccagcaccgaccccgccggcgccgacgagggcagcggccccgacagacccaccgaggacatgggccaggacgccgaggacaccagcgaggagccccccgagaaggaggagctggccggcgtgcaggaggccgagaccgccaccgactgccccgaggtgctggaggagggctgcgaggaggccaccggcgtgaccggcggcgagcaggtggacctgagcgagccccccgaccacgagaagaagaccaaccaggaggtggccgccgccaccctggaggaccacgcccaggacgagagcgccgaggagagctgccagatcgtgcccttcgagaacgactgcatggaggacttcgtgaccagcctgaccggcagcccctacgagttcttccccaccgagagcaccagcttctgcagcgagagctgcagccccctgagcgagagcgccaagggcctggagagcgagcaggcccccaagctgggcctgagagccgaggagaaccccatggtgggcgccctgtgcggccagtgcggcagcctgcagggcggcgccgccgagggccccgccgcccccgacgtggtggtggtgctggaggaggaggccctggacgacgccctggccaacccctacgtgatgggcgtgggcctgcccggccaggccgcccccggcgagggcggccaggccgccagcgacgccctgggcggctacggcagcaaggaggagctgaactgcgaggccgagggcggcctggtgcccgccgacagaaagaacaccagcaccagagtgagaccccacagcggcaaggtggccggctacgtgcccgagaccgtgcccgaggagaccggccccgaggccggcagcagcgcccccggcatcggcggcgccgccgaggaggtgggcaagaccctgctgagcctggagggcaagcccctggaggccagcagagccctgcccgccaagcccagagccttcaccctgtaccccagaagcttcagcgtggagggcagagagatccccgtgagcgtgtaccaggagcccgagggcagcggcctggacgaccacagaatcaagagaaaggaggacaacctgagcctgagctgcgtgatcggcagcagcggcagcttcagccagagaaaccacctgcccagcagcggcaccagcacccccagcagcatggtggacatccccccccccttcgacctggcctgcatcaccaagaagcccatcaccaagagcagccccagcctgctgatcgagagcgacagccccgacaagtacaagaagaagaagagcagcttcaagagattcctggccctgaccttcaagaagaagaccgagaacaagctgcacgtggacgtgaacgtgagcagcagcagaagcagcagcgagagcagctaccacggccccagcagaatcctggaggtggacagaagaagcctgagcaacagcccccagctgaagagcagaaccggcaagctgagagccagcgagagccccagcagcctgatcttctacagagacggcaagagaaagggcgtgcccttcagcagaaccgtgagcagagtggagagcttcgaggacagaagcagaccccccttcctgcccctgcccctgaccaagcccagaagcatcagcttccccagcgccgacaccagcgactacgagaacatccccgccatgaacagcgactacgagaacatccagatcccccccagaagacccgccagagccggcgccttcaccaagctgttcgaggaccagagcagagccctgagcaccgccaacgagaacgacggctacgtggacatgagcagcttcaacgccttcgagagcaagcagcagagcgccgaccaggacgccgagagcgcctacaccgagccctacaaggtgtgccccatcagcagcgccgcccccaaggaggacctgaccagcgacgaggagcagagaagcagcgaggaggaggacagcgccagcagagaccccagcgtgacccacaaggtggagggccagagcagagccctggtgatcgcccaggagctgctgagcagcgagaaggcctacgtggagatgctgcagcacctgaacctggacttccacggcgccgtgatgagagccctggacgacatggaccacgagggcagagacaccctggccagagaggagctgagacagggcctgagcgagctgcccgccatccacgacctgcaccagggcatcctggaggagctggaggagagactgagcaactgggagagccagcagaaggtggccgacgtgttcctggccagagagcagggcttcgaccaccacgccacccacatcctgcagttcgacagatacctgggcctgctgagcgagaactgcctgcacagccccagactggccgccgccgtgagagagttcgagcagagcgtgcagggcggcagccagaccgccaagcacagactgctgagagtggtgcagagactgttccagtaccaggtgctgctgaccgactacctgaacaacctgtgccccgacagcgccgagtacgacaacacccagggcgccctgagcctgatcagcaaggtgaccgacagagccaacgacagcatggagcagggcgagaacctgcagaagctggtgcacatcgagcacagcgtgagaggccagggcgacctgctgcagcccggcagagagttcctgaaggagggcaccctgatgaaggtgaccggcaagaacagaagacccagacacctgttcctgatgaacgacgtgctgctgtacacctacccccagaaggacggcaagtacagactgaagaacaccctggccgtggccaacatgaaggtgagcagacccgtgatggagaaggtgccctacgccctgaagatcgagaccagcgagagctgcctgatgctgagcgccagcagctgcgccgagagagacgagtggtacggctgcctgagcagagccctgcccgaggactacaaggcccaggccctggccgccttccaccacagcgtggagatcagagagagactgggcgtgagcctgggcgagagaccccccaccctggtgcccgtgacccacgtgatgatgtgcatgaactgcggctgcgacttcagcctgaccctgagaagacaccactgccacgcctgcggcaagatcgtgtgcagaaactgcagcagaaacaagtaccccctgaagtacctgaaggacagaatggccaaggtgtgcgacggctgcttcggcgagctgaagaagagaggcagagccgtgcccggcctgatgagagagagacccgtgagcatgagcttccccctgagcagccccagattcagcggcagcgccttcagcagcgtgttccagagcatcaaccccagcaccttcaagaagcagaagaaggtgcccagcgccctgaccgaggtggccgccagcggcgagggcagcgccatcagcggctacctgagcagatgcaagagaggcaagagacactggaagaagctgtggttcgtgatcaagggcaaggtgctgtacacctacatggccagcgaggacaaggtggccctggagagcatgcccctgctgggcttcaccatcgcccccgagaaggaggagggcagcagcgaggtgggccccatcttccacctgtaccacaagaagaccctgttctacagcttcaaggccgaggacaccaacagcgcccagagatggatcgaggccatggaggacgccagcgtgctgtag

SEQ ID NO: 243848 - protein, 430 aa, Artificial Sequence
  derived and/or modified sequence
MSLVELLLWWNCFSRTGVAASLEVSESPGSIQVARGQPAVLPCTFTTSAALINLNVIWMVTPLSNANQPEQVILYQGGQMFDGAPRFHGRVGFTGTMPATNVSIFINNTQLSDTGTYQCLVNNLPDIGGRNIGVTGLTVLVPPSAPHCQIQGSQDIGSDVILLCSSEEGIPRPTYLWEKLDNTLKLPPTATQDQVQGTVTIRNISALSSGLYQCVASNAIGTSTCLLDLQVISPQPRNIGLIAGAIGTGAVIIIFCIALILGAFFYWRSKNKEEEEEEIPNEIREDDLPPKCSSAKAFHTEISSSDNNTLTSSNAYNSRYWSNNPKVHRNTESVSHFSDLGQSFSFHSGNANIPSIYANGTHLVPGQHKTLVVTANRGSSPQVMSRSNGSVSRKPRPPHTHSYTISHATLERIGAVPVMVPAQSRAGSLV

SEQ ID NO: 243849 - DNA, 1293 bp, Artificial Sequence
  derived and/or modified sequence
atgagcctggtggagctgctgctgtggtggaactgcttcagcagaaccggcgtggccgccagcctggaggtgagcgagagccccggcagcatccaggtggccagaggccagcccgccgtgctgccctgcaccttcaccaccagcgccgccctgatcaacctgaacgtgatctggatggtgacccccctgagcaacgccaaccagcccgagcaggtgatcctgtaccagggcggccagatgttcgacggcgcccccagattccacggcagagtgggcttcaccggcaccatgcccgccaccaacgtgagcatcttcatcaacaacacccagctgagcgacaccggcacctaccagtgcctggtgaacaacctgcccgacatcggcggcagaaacatcggcgtgaccggcctgaccgtgctggtgccccccagcgccccccactgccagatccagggcagccaggacatcggcagcgacgtgatcctgctgtgcagcagcgaggagggcatccccagacccacctacctgtgggagaagctggacaacaccctgaagctgccccccaccgccacccaggaccaggtgcagggcaccgtgaccatcagaaacatcagcgccctgagcagcggcctgtaccagtgcgtggccagcaacgccatcggcaccagcacctgcctgctggacctgcaggtgatcagcccccagcccagaaacatcggcctgatcgccggcgccatcggcaccggcgccgtgatcatcatcttctgcatcgccctgatcctgggcgccttcttctactggagaagcaagaacaaggaggaggaggaggaggagatccccaacgagatcagagaggacgacctgccccccaagtgcagcagcgccaaggccttccacaccgagatcagcagcagcgacaacaacaccctgaccagcagcaacgcctacaacagcagatactggagcaacaaccccaaggtgcacagaaacaccgagagcgtgagccacttcagcgacctgggccagagcttcagcttccacagcggcaacgccaacatccccagcatctacgccaacggcacccacctggtgcccggccagcacaagaccctggtggtgaccgccaacagaggcagcagcccccaggtgatgagcagaagcaacggcagcgtgagcagaaagcccagacccccccacacccacagctacaccatcagccacgccaccctggagagaatcggcgccgtgcccgtgatggtgcccgcccagagcagagccggcagcctggtgtag

SEQ ID NO: 243850 - DNA, 1293 bp, Artificial Sequence
  derived and/or modified sequence
atgtcgctcgtggagctccttctatggtggaattgcttctcccgaacgggagtcgccgcctcactagaagtcagcgagtctcccggatccattcaggtggctcgcggacaaccggcggtccttccctgcacctttacaacatccgccgccctgattaacttgaacgtgatctggatggtaaccccactgagtaacgccaatcagcccgaacaggtcatactgtaccagggcggccaaatgttcgacggtgcgcccagattccatggccgcgtgggcttcacggggactatgcctgctaccaatgtcagcatcttcatcaacaatacccagctgtcagatacgggcacctatcagtgtcttgtaaataatctaccagatattggggggcgcaatatcggcgttacagggctgacggttctggtgccccctagcgctcctcactgtcagatacagggaagccaggacatcgggtcagatgtcattttgctgtgcagctctgaagaggggatacctaggcccacctacctttgggagaaacttgacaacacactcaaactacccccaacggctacccaagatcaggtgcagggaaccgtgacaatccgcaacatctctgcactgtcctctggattgtaccagtgtgtagcctcgaatgcaatcgggacgagcacatgtcttctggacttgcaggtgatcagtccacagcctaggaacatagggttgatcgccggcgccattgggactggggctgttatcattatcttttgcatcgcactcatcctcggcgctttcttctactggcggagcaagaacaaagaagaggaggaggaggagattcccaatgagatcagagaggatgatctaccccctaaatgcagctcagcgaaagccttccacacagaaatctcaagcagtgacaacaacactctcacctcttctaacgcctacaattccaggtattggagcaacaacccaaaggtgcacagaaatactgaaagtgtctcccatttctctgacctcggccaatcatttagtttccactctggcaatgcaaacattccctccatttatgcaaacggaacacacctggtccccggtcagcataagactctggtggttactgcaaatcgaggctctagccctcaggtgatgtccagaagtaatggcagtgtatctagaaaaccaagaccccctcacacccacagctacactatcagtcatgccacgcttgaacgcatcggcgctgtcccggtgatggtgcctgcccagagccgggccgggtccctggtgtag

SEQ ID NO: 243851 - DNA, 1293 bp, Artificial Sequence
  derived and/or modified sequence
atgtcactggtagagctccttctatggtggaattgctttagcaggacgggagtggcagcttctttggaggtgtctgagtccccaggctccattcaggtggcccgcggccagccggccgttttgccgtgcacattcaccacgtcggcagctctcatcaatttgaatgttatatggatggtgactcccctgagcaatgcaaatcaacctgaacaggtgatcctgtaccagggtggacagatgttcgacggggccccaaggttccacggaagggtgggcttcactggtactatgccagccacaaatgtgtcgatctttataaataacacacagctctccgatacaggtacttaccaatgtctcgtcaataacctgcctgacattggcgggaggaatattggggttactggtctaactgtgttggtgccaccatccgctcctcactgccagatccagggcagccaggacatcgggtcagatgtgatcttactgtgttcatctgaggagggtattcctaggcctacctatctgtgggaaaagctggataatactctcaagctgccaccaacagcgacacaggatcaggtccagggcactgtgacaattcgaaatatctccgccctgtctagtggtttgtaccagtgtgtggcgtcaaacgcaattggaactagtacctgcctgctggaccttcaggtgatttcgcctcagcctagaaacattggactgatagcaggcgccatcggaacaggggccgtgatcatcatcttctgtattgctctgattttaggtgcgttcttttattggcggagcaaaaacaaggaggaggaggaagaggaaatcccaaatgaaatacgcgaggacgacctccctcccaagtgctcgagtgccaaagcctttcatacagagattagctccagtgacaataacaccctgacaagttcaaatgcctataactctcgatactggagcaacaatcctaaggtacatcgcaacacggagagtgtctcgcacttttcagacctcggccagtcgtttagcttccattcgggcaacgccaatatcccaagtatatatgctaacggcacgcacttggtaccaggccagcacaagaccctcgtagtgacagccaatagaggttcgtcaccgcaggtgatgagccgctccaatggcagcgtcagccgaaaaccacgccccccgcacactcactcctacacgattagccatgccactctagagcggattggagccgtccccgtgatggtaccagctcagtcccgcgcgggcagcctagtctag

SEQ ID NO: 243852 - DNA, 3558 bp, Artificial Sequence
  derived and/or modified sequence
gccgtcccgctgttgtaagtggagggacggcagtcagctgaccctgcagtgtgcaggcgagcgcagggagtacgccatgtcctgagaaggggcgattctcaggctctggcagttacagcttctcctcaccctgccgagcaaccaggccacggggctccgtgcatcgccacctagagtgttaccctcttccttgttcacagaggttctccgcagtgtgtgagaaagaggccctctctcagatgaatggataaagaaaatgcaggacatatggtgggaggagccaagatggccgaataggaacagctccggtctacagctcccagtgtgagcgacacagaagacaggtgatttctgcatttccatctgaggcaagaagaataaatgtctctggtggaacttttgctctggtggaactgcttttctagaactggtgttgcagcatccctggaagtgtcagagagccctgggagtatccaggtggcccggggtcagccagcagtcctgccctgcactttcactaccagcgctgccctcattaacctcaatgtcatttggatggtcactcctctctccaatgccaaccaacctgaacaggtcatcctgtatcagggtggacagatgtttgatggtgccccccggttccacggtagggtaggatttacaggcaccatgccagctaccaatgtctctatcttcattaataacactcagttatcagacactggcacctaccagtgcctggtcaacaaccttccagacatagggggcaggaacattggggtcaccggtctcacagtgttagttcccccttctgccccacactgccaaatccaaggatcccaggatattggcagcgatgtcatcctgctctgtagctcagaggaaggcattcctcgaccaacttacctttgggagaagttagacaataccctcaaactacctccaacagctactcaggaccaggtccagggaacagtcaccatccggaacatcagtgccctgtcttcaggtttgtaccagtgcgtggcttctaatgctattggaaccagcacctgtcttctggatctccaggttatttcaccccagcccaggaacattggactaatagctggagccattggcactggtgcagttattatcattttttgcattgcactaattttaggggcattcttttactggagaagcaaaaataaagaggaggaagaagaagaaattcctaatgaaataagagaggatgatcttccacccaagtgttcttctgccaaagcatttcacactgagatttcctcctcggacaacaacacactaacctcttccaatgcctacaacagtcgatactggagcaacaatccaaaagttcatagaaacacagagtcagtcagccacttcagtgacttgggccaatctttctctttccactcaggcaatgccaacataccatccatttatgctaatgggacccatctggtcccgggtcaacataagactctggtagtgacagccaacagagggtcatcaccacaggtgatgtccaggagcaatggctcagtcagtaggaagcctcggcctccacacactcattcctacaccatcagccacgcaacactggaacgaattggtgcagtacctgtcatggtaccagcccagagtcgggccgggtccttggtataggacatgaggaaatgttgtgttcagaaatgaataaatggaatgccctcatacaagggggagggtggggtggggagtgctgggaaagaaacacttccttataattatattagtaaaatgcacaaagaagaaggcagtgctgttacttggccactaagatgtgtaaaatggactgaaatgctccatcatgaagacttgcttccccaccaaagatgtcctgggattctgctggatctcaaagatgtgccaagccaaggaaaaagatacaagagcagaatagtacttaaaatccaaactgccgcccagatgggcttgttcttcatgcctaacttaataatttttaagagattaaagtgccagatggagtttaaatattgaaattattttaaaaggtaggtgtctttaagaaaataacaagcaaccctgtgatatgttccgtctctcccaattccctcgttatatagagggcttaatggtataaatggttaatattggtcccaacagggctgactcttctatcatataatcaaaactttttacatgagcaaaattcagtaagaaatgggggaagacaaaggaaacgtctttgagaagccccttcatatttatttatttatctcttcctgaaccatgaatttcatatgtggaatattgctatattgacagattcttgcctgtctgtgttattctaggatctgttacaggtccatggcaattactgtttattttttcctggaaaaatatttttttataaaaggcttttttttttttttaaatacatgagaggcattgggctaagaaagaaaagactgttgtataataccttgttcaatggttgtatttagtgagctcatagaggtccatcatatcatgaccgagctaggttgtgtgggcaggaaggtagggctaaggggttgtagccttgctgggcagcctctcagagcaaggttgttcagatctcccttgctattacagtaggttactattaatgagggcagcacctgatgccttttgtactgaggtatgtaactttctccttatttgacaagtagaagttaacttacttgtcagggagggcagacgtttttttgttctgtttcgtttttcaaaataatgctttttgcaaaagaggtaagactgagactaaaggtgttatcttctggtgtgctcctggaagtgtctaccctacatttgtgtcagctcagggttgcagtgttgcccagatgcattttacatcactgtaaagagattacttttgtggttactacctggcttggctggccttgcggttcaccagattaatttacaaactcccccactttattttgtgctatgtagatctggccatacttgcattagtgactgtcttgccttaaccacacttaagcaacccacaaatttcttctcagatttgtttcctagattacttatgatactcatcccatgtctcaataagagtgtcttttctttctggatgtgttctcttactccctcttaccaccatactttttgctctcttctcctgcaagcgtagtcttcacagggagtggcttcctgacatttttttcagttatgtgaatgaatggaaaccaacagctgctgcaaacactgtttttccaagaaggctacactcagaacctaaccattgccaaccatttcagtattgataaaaagctgaatttactttagcattacttatttttttttccatttgatggttcttactttgtaaaaatttaaataaatgaatgtctatactttttataaagaaaagtgaaaataccatgacactgaaaagatgatgctatcagatgctgtttagaaagcatttatcttgcatttctttattctttctaattatctaaaattcaataaaattttattcat

SEQ ID NO: 243853 - DNA, 3525 bp, Artificial Sequence
  derived and/or modified sequence
gtgcgtcagggagagtggccgtcccgctgttgtaagtggagggacggcagtcagctgaccctgcagtgtgcaggcgagcgcagggagtacgccatgtcctgagaaggggcgattctcaggctctggcagttacagcttctcctcaccctgccgagcaaccaggccacggggctccgtgcatcgccacctagagtgttaccctcttccttgttcacagaggttctccgcagtgtgtgagaaagaggccctctctcaggcaagaagaataaatgtctctggtggaacttttgctctggtggaactgcttttctagaactggtgttgcagcatccctggaagtgtcagagagccctgggagtatccaggtggcccggggtcagccagcagtcctgccctgcactttcactaccagcgctgccctcattaacctcaatgtcatttggatggtcactcctctctccaatgccaaccaacctgaacaggtcatcctgtatcagggtggacagatgtttgatggtgccccccggttccacggtagggtaggatttacaggcaccatgccagctaccaatgtctctatcttcattaataacactcagttatcagacactggcacctaccagtgcctggtcaacaaccttccagacatagggggcaggaacattggggtcaccggtctcacagtgttagttcccccttctgccccacactgccaaatccaaggatcccaggatattggcagcgatgtcatcctgctctgtagctcagaggaaggcattcctcgaccaacttacctttgggagaagttagacaataccctcaaactacctccaacagctactcaggaccaggtccagggaacagtcaccatccggaacatcagtgccctgtcttcaggtttgtaccagtgcgtggcttctaatgctattggaaccagcacctgtcttctggatctccaggttatttcaccccagcccaggaacattggactaatagctggagccattggcactggtgcagttattatcattttttgcattgcactaattttaggggcattcttttactggagaagcaaaaataaagaggaggaagaagaagaaattcctaatgaaataagagaggatgatcttccacccaagtgttcttctgccaaagcatttcacactgagatttcctcctcggacaacaacacactaacctcttccaatgcctacaacagtcgatactggagcaacaatccaaaagttcatagaaacacagagtcagtcagccacttcagtgacttgggccaatctttctctttccactcaggcaatgccaacataccatccatttatgctaatgggacccatctggtcccgggtcaacataagactctggtagtgacagccaacagagggtcatcaccacaggtgatgtccaggagcaatggctcagtcagtaggaagcctcggcctccacacactcattcctacaccatcagccacgcaacactggaacgaattggtgcagtacctgtcatggtaccagcccagagtcgggccgggtccttggtataggacatgaggaaatgttgtgttcagaaatgaataaatggaatgccctcatacaagggggagggtggggtggggagtgctgggaaagaaacacttccttataattatattagtaaaatgcacaaagaagaaggcagtgctgttacttggccactaagatgtgtaaaatggactgaaatgctccatcatgaagacttgcttccccaccaaagatgtcctgggattctgctggatctcaaagatgtgccaagccaaggaaaaagatacaagagcagaatagtacttaaaatccaaactgccgcccagatgggcttgttcttcatgcctaacttaataatttttaagagattaaagtgccagatggagtttaaatattgaaattattttaaaaggtaggtgtctttaagaaaataacaagcaaccctgtgatatgttccgtctctcccaattccctcgttatatagagggcttaatggtataaatggttaatattggtcccaacagggctgactcttctatcatataatcaaaactttttacatgagcaaaattcagtaagaaatgggggaagacaaaggaaacgtctttgagaagccccttcatatttatttatttatctcttcctgaaccatgaatttcatatgtggaatattgctatattgacagattcttgcctgtctgtgttattctaggatctgttacaggtccatggcaattactgtttattttttcctggaaaaatatttttttataaaaggcttttttttttttttaaatacatgagaggcattgggctaagaaagaaaagactgttgtataataccttgttcaatggttgtatttagtgagctcatagaggtccatcatatcatgaccgagctaggttgtgtgggcaggaaggtagggctaaggggttgtagccttgctgggcagcctctcagagcaaggttgttcagatctcccttgctattacagtaggttactattaatgagggcagcacctgatgccttttgtactgaggtatgtaactttctccttatttgacaagtagaagttaacttacttgtcagggagggcagacgtttttttgttctgtttcgtttttcaaaataatgctttttgcaaaagaggtaagactgagactaaaggtgttatcttctggtgtgctcctggaagtgtctaccctacatttgtgtcagctcagggttgcagtgttgcccagatgcattttacatcactgtaaagagattacttttgtggttactacctggcttggctggccttgcggttcaccagattaatttacaaactcccccactttattttgtgctatgtagatctggccatacttgcattagtgactgtcttgccttaaccacacttaagcaacccacaaatttcttctcagatttgtttcctagattacttatgatactcatcccatgtctcaataagagtgtcttttctttctggatgtgttctcttactccctcttaccaccatactttttgctctcttctcctgcaagcgtagtcttcacagggagtggcttcctgacatttttttcagttatgtgaatgaatggaaaccaacagctgctgcaaacactgtttttccaagaaggctacactcagaacctaaccattgccaaccatttcagtattgataaaaagctgaatttactttagcattacttatttttttttccatttgatggttcttactttgtaaaaatttaaataaatgaatgtctatactttttataaagaaaagtgaaaataccatgacactgaaaagatgatgctatcagatgctgtttagaaagcatttatcttgcatttctttattctttctaattatctaaaattcaataaaattttattcatataaaataagttgtcattaattatcaatactaacgagtatgtcattttaaaacttagtattctctttaatgttacaaga

SEQ ID NO: 243854 - DNA, 1293 bp, Artificial Sequence
  derived and/or modified sequence
atgagcctggtggagctgctgctgtggtggaactgcttcagcaggactggagtggccgccagcctggaggtgtctgagagccctggcagcatccaggtggcccggggccagcctgctgtgctgccctgcaccttcaccaccagcgctgccctgatcaacctgaatgtcatctggatggtgacccccctgagcaatgccaaccagcctgagcaggtgatcctgtaccagggcggccagatgtttgatggagccccccgcttccacggccgggtgggcttcaccggcaccatgcctgccaccaacgtgtccatcttcatcaacaacacccagctgagtgacaccggcacctaccagtgcctggtgaacaacctgcctgacattggaggcaggaacatcggcgtgacaggcctgactgtgctggtgccccccagcgccccccactgccagatccagggcagccaggacatcggcagtgatgtgatcctgctgtgcagcagcgaggagggcatcccccggcccacctacctgtgggagaagctggacaacaccctgaagctgcccccaacagccacccaggaccaggtgcagggcaccgtgaccatccggaacatcagcgccctgagcagcggcctgtaccagtgtgtggccagcaatgccatcggcaccagcacctgcctgctggacctgcaggtgatcagcccccagcccagaaatattggcctgattgctggggccatcggcaccggggccgtcatcatcatcttctgcatcgccctgatcctgggcgccttcttctactggaggagcaagaacaaggaggaggaggaggaggagatccccaatgagatcagagaagatgacctgccccccaagtgcagcagcgccaaggccttccacacagagatcagcagcagtgacaacaacaccctgaccagcagcaatgcctacaacagccgctactggagcaacaaccccaaggtgcacaggaacacagaatctgtgagccacttcagtgacctgggccagagcttctccttccacagcggaaatgccaacatccccagcatctatgccaacggcacccacctggtgcccggccagcacaagaccctggtggtgacagccaacagaggcagcagcccccaggtgatgagccgcagcaatggatctgtgtccaggaagcccaggcctccccacacccacagctacaccatcagccacgccaccctggagagaattggagctgtgcctgtgatggtgcctgcccagagccgggccggcagcctggtgtag

SEQ ID NO: 243855 - DNA, 1293 bp, Artificial Sequence
  derived and/or modified sequence
atgagcctggtggagctgctgctgtggtggaactgcttcagccggaccggcgtggccgcctcgctggaggtctctgagtctcctggctcaatccaggtggcaaggggccagcctgccgtcctcccctgtaccttcaccacatctgccgctctgatcaaccttaatgtgatttggatggtaacgcccttgtcgaatgctaaccagccagagcaagtgatcctgtaccagggcgggcaaatgttcgatggcgcacctcgttttcatggccgcgtcggcttcaccgggacaatgccagccacaaacgtatcgatttttattaacaacacccagctgtccgacactggaacctaccaatgcctggtgaacaatcttcctgatattggcggcagaaatatcggtgtcaccggtctaacagtgcttgtgccgccatcagccccacattgccagatacagggaagtcaagatatcggctccgacgtgattctgctctgtagcagtgaagagggcatccctagacctacttacctctgggagaagctggataatacacttaagctaccccctacagcgacccaggaccaggtgcaagggaccgttactatccgcaatatttcagctttatcctccggcctttaccagtgtgtagccagtaacgcaatcggcactagtacatgccttctggaccttcaggtgatcagtccacaaccgcgaaacatcggtctcattgccggcgctattggcaccggcgctgtgattataatcttttgtatcgccttgatactgggcgcgttcttttattggaggtctaagaataaagaggaggaagaggaggagatccctaatgagatccgtgaggacgatctgcctcccaagtgtagctctgcaaaagcatttcacactgagatttcctcttcagacaataataccctgacctcatcaaatgcatacaattctcgttactggtccaacaatcctaaggtccacaggaacactgagtctgtgtcccatttttccgacctgggccaatcatttagcttccactctgggaacgccaatatcccatcgatctacgcaaatggaacacacctcgtgcccggacagcataaaacactagtggtgacagcaaacagggggtcttccccacaggtgatgtcaagatctaacggttctgtgtcacgaaagccacgccccccccacactcacagttatacaatctcccacgctacccttgagcgaatcggggccgttcccgtcatggtgcccgcgcagtcgagggcaggatctcttgtgtag

SEQ ID NO: 243856 - DNA, 1293 bp, Artificial Sequence
  derived and/or modified sequence
atgagcctggtggagctgctgctgtggtggaactgcttcagccggactggggtggccgccagtttggaggtcagcgaatccccaggctccatccaggtggcccgaggccagcccgctgtcttgccctgtacattcacaacttctgcggccctgatcaatctaaatgtgatttggatggtgactccgttatccaacgccaatcagccggaacaggtgattctataccagggcggccaaatgttcgacggagccccacgcttccacgggcgggttggtttcacaggcacaatgcctgctacaaatgtttcaatcttcattaataacactcagctcagcgacacagggacataccagtgcctggttaacaatctcccggatataggcgggcgtaatattggtgtgaccggtttaacagtgctggtgcctccctccgctcctcattgccaaatccagggttcacaagatattgggagtgatgtcatcctgctgtgttcgagcgaggagggaatcccccgcccgacgtatttgtgggagaagctagacaataccctgaagctccccccaactgccacacaggaccaggtccaggggacagtcacgatcagaaacataagcgcactatcatctggactgtaccaatgtgtcgcatcaaatgctattgggacttcgacttgtttgctggatctacaagtaatatcccctcaacctagaaatattggccttatcgccggggcgataggaaccggcgccgtaatcataattttctgcatcgctctgattctgggcgcattcttctactggagatccaagaacaaagaagaggaagaagaagagattccaaacgaaattcgcgaagatgacttgccccccaaatgctcgtcagcaaaagcctttcacaccgagatttcatcctctgacaacaacacattgacgtcgtcgaacgcttacaatagccgatattggagtaacaatcccaaggtacacaggaatacagaatctgtcagccacttcagtgatctgggacagagcttctcgttccactccggtaacgccaacatcccatcaatctatgcaaatggcacccaccttgtgcctggtcagcacaaaacattagtagtgacagctaaccgaggatccagcccacaagtgatgagtcgctccaacgggtccgtctcccgtaagccccggcctccgcatacacactcttacactatctctcacgctacattagaacgcattggtgccgtaccggtgatggtgccggcgcagagccgcgcaggtagtctcgtgtag

SEQ ID NO: 243857 - DNA, 1293 bp, Artificial Sequence
  derived and/or modified sequence
atgagccttgtcgagctgctgctctggtggaattgcttctcccggacaggggtggctgcctcactagaggtatccgaaagccccggtagcatccaggtcgcaaggggccaacctgctgttctcccctgcaccttcacaacatctgcagccctgattaatctcaatgtgatttggatggtcactcctctgtctaatgctaatcaacctgaacaggttattctttaccaggggggacagatgttcgacggggctcctaggtttcacgggagggtcgggttcaccggaacaatgcctgctacaaacgtgtccattttcatcaataacactcagctgtccgacaccggaacttaccagtgcttagtcaataatctcccagatatcggagggagaaacatcggtgtcacaggtttaaccgttctggtgccgccttccgcaccacattgccagatccaggggtcccaggatatcgggtctgatgtcatcttgttatgttcatccgaggaaggcatacctcgtccaacttatttgtgggagaaactggacaacaccctgaagcttccacctacggccactcaggatcaggtgcagggtactgtgacgatccgcaatatatcagccctgtcttctgggctgtaccagtgcgtggcatcaaatgccatcggaacttcaacctgccttctggacctccaagtcattagtcctcaacccaggaatattgggctcatcgccggtgccataggaaccggcgctgttatcattattttttgcattgccctcatcctgggagcttttttttactggcgatccaaaaataaggaagaggaggaggaagaaatacctaacgagatcagggaggacgatttgcctccaaagtgcagttctgcgaaagcctttcacaccgagatcagtagttccgacaacaataccctgacaagcagcaatgcatacaactcacgatattggtcaaataaccccaaggtccatcggaacacagaaagcgtgagccacttctccgacctgggccagagcttttcattccattctggtaatgcaaacataccatcaatctatgccaacggaacgcacctagtgccaggtcagcataaaactctggtagttacagctaatagaggatcatccccccaggtcatgtcccgtagtaacgggtctgtttccaggaaaccacggccacctcatactcattcgtacacgatcagtcatgccaccctggagcgcataggcgcagtgcccgtaatggtccccgcacagtccagagctgggtctctggtgtag

SEQ ID NO: 243858 - DNA, 1293 bp, Artificial Sequence
  derived and/or modified sequence
atgtcactggtagagcttctcttgtggtggaactgtttcagtcggaccggggtcgcggcttccctagaggtgtctgagtcccctggttcgatacaagtggccaggggccagccagcggttcttccttgtacatttactacaagcgctgcgctcattaatcttaatgtaatttggatggttactcccttatcaaacgcaaatcagcctgaacaagtgatcttgtatcaggggggacaaatgtttgacggagcaccccgattccacggaagggtgggcttcacaggtacaatgcctgctaccaacgtgtccatctttataaacaatacacagttgtccgacactggaacataccagtgcttggtgaacaatctgcctgacattggtggcaggaatatcggagtcaccggcttaaccgtcctggtgcccccatctgctccacattgccagattcagggcagccaggatattggttctgacgtcatcctcttatgctcctcagaggagggaattcctcgaccaacgtacctctgggagaagctggataacacgttgaaactccctccaacagcaacccaagaccaagttcaggggactgttactatcaggaacatctcagcattgagttctgggctttatcagtgcgtggccagcaacgcgatcggaacgagtacctgcctcctggacctgcaggtcatttccccacaacccaggaacatcggattaattgccggagccatcggaacaggtgccgttattatcattttttgcatcgcgctgattctaggcgcatttttctattggcgtagtaagaataaggaggaagaggaagaagaaataccaaatgaaattcgcgaggatgacctgccccctaagtgcagttctgcgaaagcctttcacacagaaatttctagctcagataataatacattaacctcatccaacgcttataattcaagatattggagtaataatcccaaagtgcaccgaaataccgaaagtgtcagccatttttctgacctgggtcagtccttttcctttcacagtggaaacgcaaacatacccagcatctacgcaaatggcacccacctagtgccaggacagcacaaaacactggtggtgaccgcaaatcgcggaagttcgcctcaggtcatgagcaggtcgaatggcagcgtatcccgcaagccgcgacctccccacactcattcctatactattagccacgcgactctcgaacggatcggagccgttcctgtgatggttcccgctcagtcacgagctgggtccctcgtatag

SEQ ID NO: 243859 - protein, 639 aa, Artificial Sequence
  derived and/or modified sequence
MSASGVLSFTQQGWEQVLAKVKRAVVYLDAACAESLHWGCGSTRLLEAVGGPDCHLREFEPDAIGGGAKQPKAVFVLSCLLKGRTVEILRDIICRSHFQYCVVVTTVSHAVHLTANHVPAAAAAEMEGQQPVFEQLEEKLCEWMGNMNYTAEVFHVPLLLAPVAPHFALTPAFASLFPLLPQDVHLLNSARPDKRKLGSLGDVDSTTLTPELLLQIRCLVSGLSSLCEHLGVREECFAVGSLSQVIAADLANYAPAKNRKKTAAGRASVVFVDRTLDLTGAVGHHGDNLVEKIISALPQLPGHTNDVMVNMIALTALHTEEENYNVVAPGCLSQSSDTTAKALWEALLNTKHKEAVMEVRRHLVEAASRENLPIKMSMGRVTPGQLMSYIQLFKNNLKALMNHCGLLQLGLATAQTLKHPQTAKWDNFLAFERLLLQSIGESAMSVVLNQLLPMIKPVTQRTNEDYSPEELLILLIYIYSVTGELTVDKDLCEAEEKVKKALAQVFCEESGLSPLLQKITDWDSSINLTFHKSKIAVDELFTSLRDIAGARSLLKQFKSVYVPGNHTHQVSRPHPSDYPLLILFVVGGVTVSEVKMVKDLVASLKPGTQVIVLSTRLLKPLNIPELLFATDRLHPDLGF

SEQ ID NO: 243860 - protein, 684 aa, Artificial Sequence
  derived and/or modified sequence
MSASGVLSFTQQGWEQVLAKVKRAVVYLDAACAESLHWGCGSTRLLEAVGGPDCHLREFEPDAIGGGAKQPKAVFVLSCLLKGRTVEILRDIICRSHFQYCVVVTTVSHAVHLTANHVPAAAAAEMEGQQPVFEQLEEKLCEWMGNMNYTAEVFHVPLLLAPVAPHFALTPAFASLFPLLPQDVHLLNSARPDKRKLGSLGDVDSTTLTPELLLQIRCLVSGLSSLCEHLGVREECFAVGSLSQVIAADLANYAPAKNRKKTAAGRASVVFVDRTLDLTGAVGHHGDNLVEKIISALPQLPGHTNDVMVNMIALTALHTEEENYNVVAPGCLSQSSDTTAKALWEALLNTKHKEAVMEVRRHLVEAASRENLPIKMSMGRVTPGQLMSYIQLFKNNLKALMNHCGLLQLGLATAQTLKHPQTAKWDNFLAFERLLLQSIGESAMSVVLNQLLPMIKPVTQRTNEDYSPEELLILLIYIYSVTGELTVDKDLCEAEEKVKKALAQVFCEESGLSPLLQKITDWDSSINLTFHKSKIAVDELFTSLRDIAGARSLLKQFKSVYVPGNHTHQASYKPLLKQVVEEIFHPERPDSVDIEHMSSGLTDLLKTGFSMFMKVSRPHPSDYPLLILFVVGGVTVSEVKMVKDLVASLKPGTQVIVLSTRLLKPLNIPELLFATDRLHPDLGF

SEQ ID NO: 243861 - DNA, 1920 bp, Artificial Sequence
  derived and/or modified sequence
atgagcgccagcggcgtgctgagcttcacccagcagggctgggagcaggtgctggccaaggtgaagagagccgtggtgtacctggacgccgcctgcgccgagagcctgcactggggctgcggcagcaccagactgctggaggccgtgggcggccccgactgccacctgagagagttcgagcccgacgccatcggcggcggcgccaagcagcccaaggccgtgttcgtgctgagctgcctgctgaagggcagaaccgtggagatcctgagagacatcatctgcagaagccacttccagtactgcgtggtggtgaccaccgtgagccacgccgtgcacctgaccgccaaccacgtgcccgccgccgccgccgccgagatggagggccagcagcccgtgttcgagcagctggaggagaagctgtgcgagtggatgggcaacatgaactacaccgccgaggtgttccacgtgcccctgctgctggcccccgtggccccccacttcgccctgacccccgccttcgccagcctgttccccctgctgccccaggacgtgcacctgctgaacagcgccagacccgacaagagaaagctgggcagcctgggcgacgtggacagcaccaccctgacccccgagctgctgctgcagatcagatgcctggtgagcggcctgagcagcctgtgcgagcacctgggcgtgagagaggagtgcttcgccgtgggcagcctgagccaggtgatcgccgccgacctggccaactacgcccccgccaagaacagaaagaagaccgccgccggcagagccagcgtggtgttcgtggacagaaccctggacctgaccggcgccgtgggccaccacggcgacaacctggtggagaagatcatcagcgccctgccccagctgcccggccacaccaacgacgtgatggtgaacatgatcgccctgaccgccctgcacaccgaggaggagaactacaacgtggtggcccccggctgcctgagccagagcagcgacaccaccgccaaggccctgtgggaggccctgctgaacaccaagcacaaggaggccgtgatggaggtgagaagacacctggtggaggccgccagcagagagaacctgcccatcaagatgagcatgggcagagtgacccccggccagctgatgagctacatccagctgttcaagaacaacctgaaggccctgatgaaccactgcggcctgctgcagctgggcctggccaccgcccagaccctgaagcacccccagaccgccaagtgggacaacttcctggccttcgagagactgctgctgcagagcatcggcgagagcgccatgagcgtggtgctgaaccagctgctgcccatgatcaagcccgtgacccagagaaccaacgaggactacagccccgaggagctgctgatcctgctgatctacatctacagcgtgaccggcgagctgaccgtggacaaggacctgtgcgaggccgaggagaaggtgaagaaggccctggcccaggtgttctgcgaggagagcggcctgagccccctgctgcagaagatcaccgactgggacagcagcatcaacctgaccttccacaagagcaagatcgccgtggacgagctgttcaccagcctgagagacatcgccggcgccagaagcctgctgaagcagttcaagagcgtgtacgtgcccggcaaccacacccaccaggtgagcagaccccaccccagcgactaccccctgctgatcctgttcgtggtgggcggcgtgaccgtgagcgaggtgaagatggtgaaggacctggtggccagcctgaagcccggcacccaggtgatcgtgctgagcaccagactgctgaagcccctgaacatccccgagctgctgttcgccaccgacagactgcaccccgacctgggcttctag

SEQ ID NO: 243862 - DNA, 2055 bp, Artificial Sequence
  derived and/or modified sequence
atgagcgccagcggcgtgctgagcttcacccagcagggctgggagcaggtgctggccaaggtgaagagagccgtggtgtacctggacgccgcctgcgccgagagcctgcactggggctgcggcagcaccagactgctggaggccgtgggcggccccgactgccacctgagagagttcgagcccgacgccatcggcggcggcgccaagcagcccaaggccgtgttcgtgctgagctgcctgctgaagggcagaaccgtggagatcctgagagacatcatctgcagaagccacttccagtactgcgtggtggtgaccaccgtgagccacgccgtgcacctgaccgccaaccacgtgcccgccgccgccgccgccgagatggagggccagcagcccgtgttcgagcagctggaggagaagctgtgcgagtggatgggcaacatgaactacaccgccgaggtgttccacgtgcccctgctgctggcccccgtggccccccacttcgccctgacccccgccttcgccagcctgttccccctgctgccccaggacgtgcacctgctgaacagcgccagacccgacaagagaaagctgggcagcctgggcgacgtggacagcaccaccctgacccccgagctgctgctgcagatcagatgcctggtgagcggcctgagcagcctgtgcgagcacctgggcgtgagagaggagtgcttcgccgtgggcagcctgagccaggtgatcgccgccgacctggccaactacgcccccgccaagaacagaaagaagaccgccgccggcagagccagcgtggtgttcgtggacagaaccctggacctgaccggcgccgtgggccaccacggcgacaacctggtggagaagatcatcagcgccctgccccagctgcccggccacaccaacgacgtgatggtgaacatgatcgccctgaccgccctgcacaccgaggaggagaactacaacgtggtggcccccggctgcctgagccagagcagcgacaccaccgccaaggccctgtgggaggccctgctgaacaccaagcacaaggaggccgtgatggaggtgagaagacacctggtggaggccgccagcagagagaacctgcccatcaagatgagcatgggcagagtgacccccggccagctgatgagctacatccagctgttcaagaacaacctgaaggccctgatgaaccactgcggcctgctgcagctgggcctggccaccgcccagaccctgaagcacccccagaccgccaagtgggacaacttcctggccttcgagagactgctgctgcagagcatcggcgagagcgccatgagcgtggtgctgaaccagctgctgcccatgatcaagcccgtgacccagagaaccaacgaggactacagccccgaggagctgctgatcctgctgatctacatctacagcgtgaccggcgagctgaccgtggacaaggacctgtgcgaggccgaggagaaggtgaagaaggccctggcccaggtgttctgcgaggagagcggcctgagccccctgctgcagaagatcaccgactgggacagcagcatcaacctgaccttccacaagagcaagatcgccgtggacgagctgttcaccagcctgagagacatcgccggcgccagaagcctgctgaagcagttcaagagcgtgtacgtgcccggcaaccacacccaccaggccagctacaagcccctgctgaagcaggtggtggaggagatcttccaccccgagagacccgacagcgtggacatcgagcacatgagcagcggcctgaccgacctgctgaagaccggcttcagcatgttcatgaaggtgagcagaccccaccccagcgactaccccctgctgatcctgttcgtggtgggcggcgtgaccgtgagcgaggtgaagatggtgaaggacctggtggccagcctgaagcccggcacccaggtgatcgtgctgagcaccagactgctgaagcccctgaacatccccgagctgctgttcgccaccgacagactgcaccccgacctgggcttctag

SEQ ID NO: 243863 - DNA, 1920 bp, Artificial Sequence
  derived and/or modified sequence
atgtcagctagtggggtgttgagcttcacccagcaaggctgggagcaggtgcttgccaaggtgaagcgcgccgtcgtgtatttagacgcggcctgtgccgaatctctgcactggggatgcggtagtactagactgcttgaggccgtcggaggtcctgattgccatcttcgggaattcgagcctgatgccatcggaggaggcgccaagcaacctaaggcagtttttgtgctcagctgtctgcttaaagggcgaacggtggaaattcttcgggacatcatttgcagaagccattttcagtattgcgttgtggtaaccactgtgtcccatgccgtacacctgacagccaaccacgtcccagcggcggcagcggcggaaatggaagggcaacaaccagtcttcgagcagcttgaagagaagttatgtgaatggatgggcaacatgaattacacggccgaggtctttcatgtccctctcctcttggcacctgtggcaccacatttcgctctgaccccagcctttgcttctctcttccctctgctgcctcaggacgtgcacctgcttaattcggcccggccagataagagaaagctcggcagtctgggtgatgtggattctactactctcactcctgagctgctcctgcagatccggtgcctagtgtcgggcctctcctccctgtgcgagcacttgggggtgagagaagagtgctttgctgtgggttccctttctcaggtgattgccgccgacctggctaattacgcccccgctaaaaaccggaagaagactgccgcggggcgtgccagtgtggttttcgtcgatagaactctggacctgaccggggccgtggggcaccacggagataacctggtcgagaagatcatatcagcactaccccaacttccagggcacacaaacgacgtcatggtgaacatgattgccctcacggctttgcacaccgaggaagaaaactataacgtggtagcccccggatgcctgtcccagagctccgacaccaccgcaaaggcgctctgggaagctctccttaacacaaaacataaagaagctgtaatggaagtccgccgccacctggtggaagcggccagtcgggaaaatcttcctattaaaatgagtatgggcagagttacgccgggacagctcatgtcttatattcagctcttcaagaacaatctgaaggcgctgatgaatcactgcgggctattacagctgggcttggccacagctcagaccttaaagcatcctcagactgcgaagtgggataacttcctcgccttcgagcggcttttgctccagtcaatcggtgaaagtgccatgtccgttgtcctcaaccagctcttaccaatgatcaagccagtgacccagagaactaatgaggactacagtcccgaggaacttctcatcttgcttatatacatctatagtgtgacgggcgaactgacagtcgacaaagatctctgcgaagccgaagagaaggtgaaaaaggccctggcccaagtgttttgcgaagagtctggcctgtctcccctgttacagaagatcaccgactgggattcaagtattaacttaaccttccataagagcaaaattgctgtggatgagctgtttactagccttcgtgacattgcaggagcccggtccctgctcaagcagtttaagtctgtatacgtgcctgggaaccatactcaccaagtcagtcgaccccatcccagtgactaccctctcctgatcctgttcgtagtgggaggggtgacggtgtccgaggtgaaaatggtaaaagacctggtggcctcattaaaacctgggacccaggtcattgtcctctctacacgattgcttaaaccgttgaacattccagagctactgttcgcaacagacaggctgcaccctgatctaggcttttag

SEQ ID NO: 243864 - DNA, 2055 bp, Artificial Sequence
  derived and/or modified sequence
atgtctgcatcaggagttctgtcatttactcagcaggggtgggagcaggtgctcgccaaagttaaacgagccgtcgtgtatcttgatgccgcatgcgctgagtcactccactggggttgcgggagtacccggctcctagaagcagtaggcggaccggattgccatctccgcgaattcgaacccgatgccatcggcgggggcgcaaagcagcccaaagctgtgtttgtcctatcatgtctcctgaaaggccgcaccgttgagatcctgcgagatataatctgccgttctcactttcagtattgcgtggtggttactactgtgagtcacgccgtgcacctaactgctaaccacgtccccgccgctgccgccgccgaaatggagggacagcaaccagtcttcgagcaactggaagagaagctgtgtgagtggatgggcaacatgaactataccgcagaggtgtttcacgtcccactgctgttagccccagtcgcaccccacttcgccttgacccccgctttcgctagcctttttccacttctcccccaggacgttcatctcctgaattcagctcggcccgataaacgaaaacttgggtcccttggcgatgtcgattccactaccctaacacccgaactcctgctgcaaatccgatgtttagtttcaggactcagttccctttgtgagcatcttggcgtacgcgaggaatgcttcgcagttgggagccttagccaagttatcgcagcagaccttgcaaactatgcccccgccaagaataggaagaagaccgctgccgggcgcgcttccgtggtgttcgtagacagaaccctggacttgaccggggcggtgggccaccacggcgacaatttggtggagaagattatctctgctctgcctcaactccctggccatacaaacgacgtgatggtgaatatgattgccctgacggccctgcacacagaggaggaaaattataacgtcgtggcccctggttgtcttagccagagctctgatacaactgctaaagcactgtgggaggcgctgttgaacacgaaacataaagaggcggtcatggaagtgcggagacatctggtcgaggctgcatcacgcgaaaaccttcccattaagatgagtatgggccgagtcaccccgggtcagctcatgagctacatccagctttttaaaaataatctgaaagcactgatgaatcactgtggactactgcagctcggcctggccactgcgcaaaccctgaaacaccctcagaccgcaaagtgggataattttctggcttttgagagactgctcctgcagtccatcggcgaatcggcgatgtccgtggtcctcaaccagctccttcctatgattaagccggtaactcagaggaccaatgaggattacagcccggaggagctccttatcctgctcatttacatctatagcgttaccggggagctgactgttgacaaagatctgtgtgaagcagaggaaaaggttaaaaaggcactggcccaggtgttctgtgaggagagcgggttgagtcccctgctccagaagatcaccgattgggacagctcaatcaatctcactttccacaagagtaaaatagccgtcgatgaactgttcaccagcctccgcgacatagcaggagcgcgatctttactcaaacagtttaaatctgtgtatgttcctggcaatcacacacatcaagctagctacaagcctctgcttaaacaggtcgtggaggaaatcttccacccagagcggccagacagcgtggacatcgaacatatgtcatccggactcacggacctgctgaagaccgggttcagcatgttcatgaaagtgtcccgcccccaccccagtgactaccccttacttatcctgtttgtggtcggcggcgttaccgtgagtgaggtgaaaatggtcaaggatctggtggccagcctcaagcccggtacccaggtgatcgtgctatcaacgcgactgctgaaacccctgaatattcctgagctgttgtttgctactgatagattacaccctgacttaggattttag

SEQ ID NO: 243865 - DNA, 1920 bp, Artificial Sequence
  derived and/or modified sequence
atgtctgccagcggcgtgctgtccttcacccagcagggctgggagcaggtgctggccaaggtgaagagagctgtggtgtacctggatgctgcctgtgccgagagcctgcactggggctgcggcagcacccggctgctggaggccgtgggcggccctgactgccacctgcgggagtttgagccagatgccatcggcggcggggccaagcagcccaaggctgtgtttgtgctgagctgcctgctgaagggccgcacagtggagatcctgcgggacatcatctgccgcagccacttccagtactgtgtggtggtgaccaccgtgtcccatgctgtgcacctgacagccaaccacgtgcctgctgctgctgctgctgagatggagggccagcagcctgtgtttgagcagctggaggagaagctgtgtgagtggatgggcaacatgaactacacagctgaggtgttccacgtgcccctgctgctggcccctgtggccccccactttgccctgaccccagcctttgccagcctcttccccctgctgccccaggatgtgcacctgctgaacagcgcccggccagacaagaggaagctgggcagcctgggagatgtggacagcaccaccctgaccccagagctgctgctgcagatccgctgcctggtgtctggcctgagcagcctgtgtgagcacctgggcgtgcgggaggagtgctttgctgtgggcagcctgagccaggtgattgctgctgacctggccaactatgccccagccaagaacaggaagaagacagctgctggccgggcctctgtggtgtttgtggacaggaccctggacctgactggagctgtgggccaccacggggacaacctggtggagaagatcatcagcgccctgccccagctgcccggccacaccaatgatgtgatggtgaacatgattgccctgacagccctgcacacagaggaggagaactacaacgtggtggcccctggctgcctgagccagagcagtgacaccacagccaaggccctgtgggaggccctgctgaacaccaagcacaaggaggccgtgatggaggtgcggcggcacctggtggaggccgccagccgggagaacctgcccatcaagatgtccatgggccgggtgaccccaggccagctgatgagctacatccagctgttcaagaacaacctgaaggccctgatgaaccactgcggcctgctgcagctgggcctggccacagcccagaccctgaagcacccccagacagccaagtgggacaacttcctggcctttgagcggctgctgctgcagagcattggagagagcgccatgtctgtggtgctgaaccagctgctgcccatgatcaagcctgtgacccagaggaccaatgaagactacagccctgaggagctgctgatcctgctgatctacatctacagcgtgactggagagctgactgtggacaaggacctgtgtgaggccgaggagaaggtgaagaaggccctggcccaggtgttctgtgaggagagcggcctgagccccctgctgcagaagatcacagactgggacagcagcatcaacctgaccttccacaagagcaagattgctgtggatgagctgttcaccagcctgcgggacattgctggggcccggagcctgctgaagcagttcaagtctgtgtatgtgcccggcaaccacacccaccaggtgtcccggccccaccccagcgactaccccctgctgatcctgtttgtggtgggcggcgtgacagtgtctgaggtgaagatggtgaaggacctggtggccagcctgaagccaggcacccaggtgattgtgctgagcacccggctgctgaagcccctgaacatccctgagctgctgtttgccacagaccggctgcacccagacctgggcttctag

SEQ ID NO: 243866 - DNA, 2055 bp, Artificial Sequence
  derived and/or modified sequence
atgtctgccagcggcgtgctgtccttcacccagcagggctgggagcaggtgctggccaaggtgaagagagctgtggtgtacctggatgctgcctgtgccgagagcctgcactggggctgcggcagcacccggctgctggaggccgtgggcggccctgactgccacctgcgggagtttgagccagatgccatcggcggcggggccaagcagcccaaggctgtgtttgtgctgagctgcctgctgaagggccgcacagtggagatcctgcgggacatcatctgccgcagccacttccagtactgtgtggtggtgaccaccgtgtcccatgctgtgcacctgacagccaaccacgtgcctgctgctgctgctgctgagatggagggccagcagcctgtgtttgagcagctggaggagaagctgtgtgagtggatgggcaacatgaactacacagctgaggtgttccacgtgcccctgctgctggcccctgtggccccccactttgccctgaccccagcctttgccagcctcttccccctgctgccccaggatgtgcacctgctgaacagcgcccggccagacaagaggaagctgggcagcctgggagatgtggacagcaccaccctgaccccagagctgctgctgcagatccgctgcctggtgtctggcctgagcagcctgtgtgagcacctgggcgtgcgggaggagtgctttgctgtgggcagcctgagccaggtgattgctgctgacctggccaactatgccccagccaagaacaggaagaagacagctgctggccgggcctctgtggtgtttgtggacaggaccctggacctgactggagctgtgggccaccacggggacaacctggtggagaagatcatcagcgccctgccccagctgcccggccacaccaatgatgtgatggtgaacatgattgccctgacagccctgcacacagaggaggagaactacaacgtggtggcccctggctgcctgagccagagcagtgacaccacagccaaggccctgtgggaggccctgctgaacaccaagcacaaggaggccgtgatggaggtgcggcggcacctggtggaggccgccagccgggagaacctgcccatcaagatgtccatgggccgggtgaccccaggccagctgatgagctacatccagctgttcaagaacaacctgaaggccctgatgaaccactgcggcctgctgcagctgggcctggccacagcccagaccctgaagcacccccagacagccaagtgggacaacttcctggcctttgagcggctgctgctgcagagcattggagagagcgccatgtctgtggtgctgaaccagctgctgcccatgatcaagcctgtgacccagaggaccaatgaagactacagccctgaggagctgctgatcctgctgatctacatctacagcgtgactggagagctgactgtggacaaggacctgtgtgaggccgaggagaaggtgaagaaggccctggcccaggtgttctgtgaggagagcggcctgagccccctgctgcagaagatcacagactgggacagcagcatcaacctgaccttccacaagagcaagattgctgtggatgagctgttcaccagcctgcgggacattgctggggcccggagcctgctgaagcagttcaagtctgtgtatgtgcccggcaaccacacccaccaggccagctacaagcccctgctgaagcaggtggtggaggagatcttccaccctgagaggccagattctgtggacatcgagcacatgagcagcggcctgacagacctgctgaagacaggcttctccatgttcatgaaggtgtcccggccccaccccagcgactaccccctgctgatcctgtttgtggtgggcggcgtgacagtgtctgaggtgaagatggtgaaggacctggtggccagcctgaagccaggcacccaggtgattgtgctgagcacccggctgctgaagcccctgaacatccctgagctgctgtttgccacagaccggctgcacccagacctgggcttctag

SEQ ID NO: 243867 - DNA, 1920 bp, Artificial Sequence
  derived and/or modified sequence
atgagcgccagcggcgtgctgagcttcacccagcagggctgggagcaagtgctcgcaaaagttaaaagggccgttgtttacctggatgccgcgtgcgctgaaagcctgcattggggctgcggctctactagactgctcgaggctgtcggcggccccgactgccatttacgcgaatttgaacccgatgcaattggcgggggggctaaacaacccaaggctgtcttcgttcttagctgcttactaaagggcaggacagtggagatactgcgcgacatcatttgcaggtcccacttccagtactgtgtagttgtaacaaccgtgtctcatgcagtgcacctgactgctaaccatgttccagcggctgcggccgccgagatggaaggtcaacagcctgtgtttgaacagttggaagaaaaactatgtgagtggatgggcaacatgaactacaccgcagaggttttccacgtccccctgctgttggctcccgtggcccctcattttgccctgaccccggctttcgctagccttttcccgctattaccacaggatgttcatctgctgaacagtgcccggccagataagagaaaactgggctctctgggtgacgtggacagcactactctgaccccagagctgcttctgcagattcggtgcctggtgagcggcctgtcttctctgtgcgaacacctgggagtaagagaggagtgcttcgcagttggctctctgtctcaagtgatcgcagccgatctcgccaattatgcaccagccaagaaccggaagaagaccgccgcgggtcgggccagcgttgtctttgttgatcgcaccctggatctcaccggggctgtgggtcaccacggcgacaacttggtggaaaagatcatctccgctctcccccagctcccaggccacaccaacgatgtgatggtgaatatgatcgcacttactgcgctccatacagaggaagaaaactacaatgtggtcgccccaggctgcctttcccagtcctctgataccacagcaaaggccctgtgggaagccctgctgaacacaaaacacaaggaagcagttatggaggtccgacggcacctggtggaagccgcttcgagggagaatctgcccataaagatgtcaatgggccgtgtgacccccggtcaattgatgtcgtacatccagctgtttaaaaataatctcaaagcccttatgaaccactgtggactcctgcagttgggactggccactgctcagacgttaaaacatccgcaaactgctaaatgggacaactttctcgcctttgaacgcctgctgctacagtccatcggcgagtcagcaatgagcgtggttctgaaccagctgcttccaatgatcaagccagtgacccagcggacgaacgaagattacagcccggaggaattgcttatcttgctgatctatatttacagcgtgaccggagagctaactgtggacaaagacctttgtgaggccgaggaaaaagttaagaaggcgctggcccaagtgttttgcgaggaatcgggattatctccccttttacagaagattacggattgggattcttccataaatctgacattccacaagtcaaagatcgctgtcgacgaactgtttacctctctgagggacatcgcaggggctcgaagtctccttaagcaattcaagtccgtctatgttccgggaaaccatacacaccaggtcagtaggcctcaccccagtgattatcccctcttaattctctttgtggtaggtggagttaccgtaagcgaggtgaagatggttaaagacctggtggccagcctgaagccaggcacacaagtcatcgtcctgagcacgagactgctgaaaccactgaacatacccgaactcctctttgcaaccgaccgactccacccagatctggggttttag

SEQ ID NO: 243868 - DNA, 2055 bp, Artificial Sequence
  derived and/or modified sequence
atgagcgccagcggcgtgctgagcttcacccagcagggctgggagcaggttctggcaaaggtaaaacgggctgtggtgtacctagatgccgcctgcgctgagtccctgcactggggatgtggcagcacccggctattggaggctgtgggggggcccgattgccatctgcgagagtttgaacccgatgctattggaggaggcgctaaacagccaaaggccgtgttcgtgctatcttgtttactgaaaggtcgcacggtggagatcctgagagacattatttgccgcagccattttcagtactgtgtggttgtaaccaccgtgtcccacgctgtccacttgaccgcaaatcatgtgccggccgcagccgccgccgaaatggaggggcagcagcccgtgtttgagcaactggaagagaaactgtgcgagtggatgggcaacatgaactacaccgctgaggtgtttcacgttcctctccttctcgcccccgtggctccgcattttgccctcaccccggcctttgcttcactgttcccccttttgccacaagatgtgcacctactgaatagcgcacgtccggacaagagaaagttagggtctcttggagatgtcgactccacaacccttacacctgagcttctgctccaaatcaggtgtctagtgtctggcttgtctagtttgtgtgagcacctcggggtgagagaggagtgttttgctgtggggtcccttagtcaagtgatcgccgctgacctagccaattacgctccagccaagaaccgtaagaagaccgcagccggccgtgctagtgttgtgtttgtagatcgaacactcgatttaacaggcgcagtcgggcaccatggagataatctcgtggagaaaattatctctgctctacctcaactgcccgggcatacgaatgacgtgatggtcaatatgatcgccctgaccgcccttcacaccgaggaggagaattacaacgtggtcgcgccggggtgtctgagtcaaagttctgacaccaccgcgaaggcactgtgggaagcccttctgaatacaaagcataaagaagcagtgatggaggtcaggcgacacctggtcgaggccgctagcagggagaacttacccatcaagatgtctatgggaagggtcactcctggacaactcatgagttacatccagctgtttaaaaacaacctgaaagcgctcatgaaccattgcgggctactgcagctgggtcttgctacggcccagaccctcaaacacccacagactgccaagtgggacaattttctggctttcgaaaggctgcttttgcagtccatcggcgagtcggctatgtcagtggtgctgaaccagctgttacccatgatcaagcctgtaactcagcgtacaaatgaagattacagtccagaagagctgctgattctgctaatctacatttacagcgtaaccggagaactcaccgtggacaaggacttgtgcgaagcggaggaaaaggtcaagaaagccttggctcaggttttctgcgaggaaagcgggctaagccctctccttcagaagataaccgactgggacagctcaattaaccttactttccacaagtccaagatcgcagtggatgaactctttactagtctgagggacatcgcgggcgccagaagtcttcttaaacagtttaagagcgtgtatgtgccagggaaccacactcatcaggcctcctacaagccacttctgaaacaagtagtggaggaaattttccatcccgagaggccagactcagtcgatattgagcacatgtctagtggattaacagatcttctgaagacagggtttagtatgtttatgaaggtttccaggcctcacccaagcgactatccactcttgatcctcttcgttgtgggcggcgtgaccgtaagcgaggtgaagatggtcaaagacctggtagccagcctgaaaccaggcacacaggtgattgtgctgagtacaaggctgctaaagcctctcaacatcccagaactactgttcgccacagacaggctgcaccccgatttaggattctag

SEQ ID NO: 243869 - DNA, 1920 bp, Artificial Sequence
  derived and/or modified sequence
atgtcggcctcaggcgtcctgagcttcacacagcaagggtgggagcaggtgctcgcgaaggtcaagcgggctgtggtgtacctagacgctgcttgtgcagaaagtttacattggggatgtgggtcaacccgactcttggaagccgtgggcggacctgactgtcacctgcgcgaatttgaacccgatgccatcgggggtggggctaaacaaccaaaggcggtatttgtgctgtcttgcctgctgaaaggccgtacagtcgagatactcagagacattatttgccgcagtcactttcagtactgcgtcgtggtaacaactgtgagccatgccgtacatctcaccgccaaccacgtcccagcagccgcagctgccgagatggaaggacagcagcccgtgttcgaacagctggaagaaaagctgtgcgagtggatgggaaacatgaactacacagcagaggtgttccatgtacccctgctgttggctccagtggcccctcatttcgcgttgacaccggcttttgcttcccttttcccattgttgccccaggacgtgcacctcttaaattctgctaggcctgacaagaggaagctggggtccttaggcgacgttgattctacaacactcacgccggagctcttgctccagattagatgcctagtgagtggcttaagctctttgtgtgagcatttgggtgtgcgagaggagtgtttcgccgtcggatccctatcccaggtcatcgcagccgatttggctaattacgcacctgcaaagaatcgtaagaagactgctgccggtagagcttctgttgtgttcgtggacaggaccctggaccttacaggtgctgtggggcaccatggcgataacctcgtcgagaaaataatatccgcccttccccagttgcctgggcacacgaatgatgttatggtaaacatgattgctcttaccgctctgcacactgaagaagagaattataacgtggtagcacctgggtgccttagccaatctagcgacactaccgcaaaagccctgtgggaagctctcctaaacacgaaacacaaggaagcagttatggaggtgaggcgacatctcgtagaagctgccagtagagaaaatcttccgatcaagatgtcgatgggacgggtgacccccggtcaactgatgtcctacatccaactgttcaagaataatctcaaagctctgatgaatcattgtgggcttttacagctgggcttggcgaccgcacaaaccctcaagcacccccaaacagccaagtgggataatttcctggccttcgagaggctcctgttgcagtctattggcgagtcagcaatgagcgtggtcttgaatcagctcttgcccatgatcaagcctgtgactcagagaaccaacgaagactacagccccgaagaactcctgattctgctgatctacatctacagtgtcaccggcgagctgaccgtggacaaggacttatgcgaagctgaggagaaagtgaaaaaagccctcgcacaggttttttgtgaggagagcggtctgagtcccctgctgcagaagatcacagattgggactcctctattaacctaactttccacaagtccaagatcgccgtagacgagttattcaccagtctccgtgatattgcaggtgcccgaagtctgcttaagcagtttaagtctgtgtacgtgcctgggaatcatacccatcaggtttcgcgccctcatccctcagattatccgttgctgattttattcgtggtcggcggagttaccgtgagcgaggtcaaaatggttaaggaccttgtcgcttctctgaaacctggtacccaagtgatcgtccttagtacgcgactgctgaagccgctgaatattcccgaacttctgtttgcgaccgaccgccttcatcctgatctgggattctag

SEQ ID NO: 243870 - DNA, 2055 bp, Artificial Sequence
  derived and/or modified sequence
atgagcgcttccggagtgctgtctttcacccagcagggctgggagcaggtccttgctaaggtgaagagagcggtcgtgtacttagatgctgcatgcgccgagtctctgcattggggttgtggatcaacacggctgctggaggccgtagggggaccagattgccacctcagggagttcgagcccgatgcaattggcggtggggctaagcaaccaaaggccgtgttcgttctgtcatgtctgctgaagggccgtacagtggaaatccttcgagacattatttgtaggtcacactttcagtactgcgtggtcgtcaccacagtctctcatgcggtccatctcacagcgaaccacgtcccggcagcagcagcagcagagatggaaggtcagcagcccgtctttgaacaactggaggaaaagctctgtgaatggatggggaacatgaattacactgctgaagtgtttcacgtcccgctgttgctagcacccgtcgcccctcatttcgctctcaccccggctttcgccagcctgttccccctgcttccgcaagacgttcatctgctcaatagcgcacggccagataagaggaaactcggatctctgggagatgtggacagcacaaccctgacgccagagctgctgttgcagatccgatgtctggtgagcgggcttagttcactctgtgaacaccttggagtacgcgaagagtgtttcgccgtgggcagcctttcccaagtaatcgccgctgatctggctaactatgcaccagcaaaaaatagaaaaaagaccgcagctggacgtgcctctgtggtgttcgtggacaggacattagacctgaccggggcagtcggccaccacggagataatctggtggaaaagattatctcggctttgcctcagcttcctggtcacactaacgacgtgatggttaacatgatcgcactaaccgcacttcacacagaggaggagaattacaacgtggtggcccctgggtgtctgtcccagtccagcgacacgactgccaaagcactgtgggaagccctcctgaataccaagcataaggaagcagtgatggaagtacgcagacatcttgtagaggccgcaagtcgggaaaacctgccaatcaagatgagtatggggagagtgacacccggacagcttatgtcttatattcagctgttcaagaataacctcaaagctctgatgaatcattgtggactcttgcaactgggactggcaaccgcccagactctgaaacaccctcagacagccaaatgggataattttttggcgttcgaacgacttctcctgcagtcaatcggtgagtctgcaatgtctgtggtgcttaatcagctgctccccatgataaaacccgtcacacagcgaaccaatgaggactactcccctgaggagctcttgatactccttatctatatctatagtgtgacgggagagttaaccgtagacaaagatctctgcgaagcagaggagaaggtcaagaaagcactggcccaggttttctgcgaggagtcaggacttagccctctgctccaaaagattaccgactgggacagtagcataaacctgacctttcacaaatcaaaaattgctgtggatgagctgttcacctctctcagggacatcgcaggagctcggagcctgcttaagcagtttaagagcgtgtacgttccaggaaatcacacccaccaagcctcctacaaaccactgctaaaacaggtggtggaggaaatcttccacccagagcggcctgattctgtagatatagaacacatgtcaagcgggttaacagacctactgaagacagggttctcaatgttcatgaaagtgagtcgcccacatccatccgactaccctctgttgatcctgttcgtcgtgggaggcgttaccgtcagtgaggtgaaaatggtcaaggacctggtcgccagcctcaaacctgggacccaggttatcgtgctgagtaccagactgttgaagcctctgaacatccccgaattgctcttcgcgaccgatagactgcatcctgatctgggtttctag

SEQ ID NO: 243871 - DNA, 2221 bp, Artificial Sequence
  derived and/or modified sequence
agaggccgaccacgtgtactgtggagactgtcaaagtctcccggagcccaatttccggaagcggtgagttctgaaagaagttcctgcaccgtagtttcccaagtctgcgaatccccaaccatgagcgcctcgggcgtactgtcctttacccagcaaggatgggagcaggtgctggccaaagtgaaacgggctgtggtttacctggacgccgcctgcgccgagagcctgcactggggctgcggatccacccgtctcctggaggcggtggggggtcctgactgtcacctgcgagagttcgagcccgacgcaattggtggtggagccaagcagcccaaggcagtgtttgtgctgagctgcctgctgaaaggccggaccgtggagatcctacgggacatcatctgccgcagtcacttccagtattgtgtggtggtcacaaccgtgagccacgctgtccacctcacagctaatcatgtcccagcggcggcagcggccgagatggaggggcagcagccggtgttcgagcagctggaggagaagctgtgtgaatggatgggcaacatgaactacacggccgaggtgttccatgtcccgttattgcttgcccctgttgctccccactttgccttgactccagcttttgcatcccttttcccactgctaccccaggatgtgcacctccttaatagcgcccgaccggacaagaggaagctgggaagcctgggtgatgtggactccactacgctaaccccagagctgctgctgcagatcagatgcctagtgtcaggcctcagttctctgtgtgaacatttaggagtacgggaggagtgttttgctgtaggttccttaagtcaggtcatcgctgcggatctggccaattatgcccctgcaaagaacaggaagaagactgctgcaggcagggcatcagtggtttttgtggacagaaccctggatctcacaggagcagttggacatcatggagacaacttagtagagaagatcatttcagcacttccccagctcccaggccacacaaatgatgtgatggttaacatgatagcgctcactgcactccatactgaggaggaaaattataatgtggttgcaccaggctgtctttcacaatccagtgacaccacagccaaagccctatgggaagctttactgaacactaagcacaaagaggcagtgatggaagttcggagacatctagtggaagcggcaagcagagaaaacctgccaatcaagatgagtatggggagagtcacaccgggacagctcatgtcctatattcagctcttcaagaacaacctcaaagctctaatgaatcattgtggcctcctccagcttggactggccacagctcaaacgttgaaacacccacagactgccaagtgggacaactttctggcttttgaaaggctccttcttcagagcattggggagtcagcaatgtccgttgtgttaaatcagctgctgcccatgattaagcctgtaacccagagaaccaacgaggactacagccctgaggaactgctgatccttctcatatatatttattctgtcactggagagctcacggtagacaaagacctgtgtgaagcagaagaaaaagtcaagaaagcattggctcaggtcttctgtgaggaatctggattgtcacctttgctgcaaaaaattacggactgggactcttcaattaatctgacatttcacaaatccaaaattgccgtggatgaactctttacttcacttcgggatattgctggagctcggagtctcctgaaacagtttaagtctgtatatgttcctggaaatcatacccaccaggtgagccggcctcatcctagtgactaccccctcctgatcctctttgtggtaggtggggtcacagtctctgaagtgaaaatggtcaaagatcttgtggcatcgttgaagccaggaacccaggtaatcgtgctgtccacacgactcctgaagccacttaacattcctgagctgttatttgcaactgaccgactgcatccagaccttggcttctgagcatccgctaagaagataagacctactcaagctggaaatgccgatgcaattttctgccaccactccaaatactcctccacaaccagcgtccctgtcactaattgcgagaatgatggaattctgcctgaagggtcttgatacctactcagtgaggtactttgcttggattgctgtgattctt

SEQ ID NO: 243872 - DNA, 3176 bp, Artificial Sequence
  derived and/or modified sequence
tcagggagcgtgtcagaggccgaccacgtgtactgtggagactgtcaaagtctcccggagcccaatttccggaagcggtgagttctgaaagaagttcctgcaccgtagtttcccaagtctgcgaatccccaaccatgagcgcctcgggcgtactgtcctttacccagcaaggatgggagcaggtgctggccaaagtgaaacgggctgtggtttacctggacgccgcctgcgccgagagcctgcactggggctgcggatccacccgtctcctggaggcggtggggggtcctgactgtcacctgcgagagttcgagcccgacgcaattggtggtggagccaagcagcccaaggcagtgtttgtgctgagctgcctgctgaaaggccggaccgtggagatcctacgggacatcatctgccgcagtcacttccagtattgtgtggtggtcacaaccgtgagccacgctgtccacctcacagctaatcatgtcccagcggcggcagcggccgagatggaggggcagcagccggtgttcgagcagctggaggagaagctgtgtgaatggatgggcaacatgaactacacggccgaggtgttccatgtcccgttattgcttgcccctgttgctccccactttgccttgactccagcttttgcatcccttttcccactgctaccccaggatgtgcacctccttaatagcgcccgaccggacaagaggaagctgggaagcctgggtgatgtggactccactacgctaaccccagagctgctgctgcagatcagatgcctagtgtcaggcctcagttctctgtgtgaacatttaggagtacgggaggagtgttttgctgtaggttccttaagtcaggtcatcgctgcggatctggccaattatgcccctgcaaagaacaggaagaagactgctgcaggcagggcatcagtggtttttgtggacagaaccctggatctcacaggagcagttggacatcatggagacaacttagtagagaagatcatttcagcacttccccagctcccaggccacacaaatgatgtgatggttaacatgatagcgctcactgcactccatactgaggaggaaaattataatgtggttgcaccaggctgtctttcacaatccagtgacaccacagccaaagccctatgggaagctttactgaacactaagcacaaagaggcagtgatggaagttcggagacatctagtggaagcggcaagcagagaaaacctgccaatcaagatgagtatggggagagtcacaccgggacagctcatgtcctatattcagctcttcaagaacaacctcaaagctctaatgaatcattgtggcctcctccagcttggactggccacagctcaaacgttgaaacacccacagactgccaagtgggacaactttctggcttttgaaaggctccttcttcagagcattggggagtcagcaatgtccgttgtgttaaatcagctgctgcccatgattaagcctgtaacccagagaaccaacgaggactacagccctgaggaactgctgatccttctcatatatatttattctgtcactggagagctcacggtagacaaagacctgtgtgaagcagaagaaaaagtcaagaaagcattggctcaggtcttctgtgaggaatctggattgtcacctttgctgcaaaaaattacggactgggactcttcaattaatctgacatttcacaaatccaaaattgccgtggatgaactctttacttcacttcgggatattgctggagctcggagtctcctgaaacagtttaagtctgtatatgttcctggaaatcatacccaccaggcatcttataagccattgttgaagcaagttgtggaggaaatatttcatcccgagaggccagattccgttgatattgaacacatgtcttcaggcctcactgatctccttaaaactggatttagcatgttcatgaaggtgagccggcctcatcctagtgactaccccctcctgatcctctttgtggtaggtggggtcacagtctctgaagtgaaaatggtcaaagatcttgtggcatcgttgaagccaggaacccaggtaatcgtgctgtccacacgactcctgaagccacttaacattcctgagctgttatttgcaactgaccgactgcatccagaccttggcttctgagcatccgctaagaagataagacctactcaagctggaaatgccgatgcaattttctgccaccactccaaatactcctccacaaccagcgtccctgtcactaattgcgagaatgatggaattctgcctgaagggtcttgatacctactcagtgaggtactttgcttggattgctgtgattcttaaaaaaaaaaaaaaaaagtttttttattttcctgaaggcgacagtctgtcttttggcgagtccaattagtgatcgtttccatttatccttaaccctctgtttgtgatcttcctgattccacctacaagttcattagttctaaataaaagcctgttggcaagtgttggtagattacaactctttttatttgaagttgctcgagaagttagacatgctttagaattatgagtgtggggaaaatttgatgttccttaggattatataactgaggagggaacattgcaaatagggtctgaggctttgtttctctcttgctctgaaacatttctgaaaaggcaaggaagggaggggtagtgtctggggcagtgctggtagcctgcatgtgttgtaaatcatcctgccataacaaaggactgcattgttctagctggcccactgggcaggtctgccaggctacttggaactgtagtgggaaggtggttgattggagggttatctgtatataaaaggttttctcccctccaaagaaagactccagtacaagatacctggtcccagggagtctaaattgtaacagcaacccctgtggactttgtgggtatgagttttgattgaaatataaagctttcttttctgtaagtttaagttttccatctgaccatagcagaaaaacctagacccacctagtgaaactttgtaagaactccagggcaaaaacgaaccacttgcaacccacatgtttgtaggtgtatggtcgatggaagtttctggcatccatgttggtaataaagagataaaactgaaaa

SEQ ID NO: 243873 - protein, 372 aa, Artificial Sequence
  derived and/or modified sequence
MSTAALITLVRSGGNQVRRRVLLSSRLLQDDRRVTPTCHSSTSEPRCSRFDPDGSGSPATWDNFGIWDNRIDEPILLPPSIKYGKPIPKISLENVGCASQIGKRKENEDRFDFAQLTDEVLYFAVYDGHGGPAAADFCHTHMEKCIMDLLPKEKNLETLLTLAFLEIDKAFSSHARLSADATLLTSGTTATVALLRDGIELVVASVGDSRAILCRKGKPMKLTIDHTPERKDEKERIKKCGGFVAWNSLGQPHVNGRLAMTRSIGDLDLKTSGVIAEPETKRIKLHHADDSFLVLTTDGINFMVNSQEICDFVNQCHDPNEAAHAVTEQAIQYGTEDNSTAVVVPFGAWGKYKNSEINFSFSRSFASSGRWA

SEQ ID NO: 243874 - protein, 233 aa, Artificial Sequence
  derived and/or modified sequence
MSTAALITLVRSGGNQVRRRVLLSSRLLQDDRRVTPTCHSSTSEPRCSRFDPDGSGSPATWDNFGIWDNRIDEPILLPPSIKYGKPIPKISLENVGCASQIGKRKENEDRFDFAQLTDEVLYFAVYDGHGGPAAADFCHTHMEKCIMDLLPKEKNLETLLTLAFLEIDKAFSSHARLSADENCAWSAALDLEPVDTICGASVEREICLILSQVKESSGSYPGLREGSHISLSH

SEQ ID NO: 243875 - DNA, 1119 bp, Artificial Sequence
  derived and/or modified sequence
atgtctaccgctgcactgatcacactggtccgcagcggcggcaaccaggtgagacgtcgcgttcttctgagttcacggttgctccaggatgaccgaagagtgacgcctacgtgccactcaagtacatccgaaccacgctgctctagattcgatcccgatggcagtggcagcccagcgacctgggataatttcggcatatgggacaaccgaattgacgaaccaatactcctaccgccaagcataaaatacgggaaacccataccaaagatctcgttagaaaatgttggctgcgccagccaaatcggcaagcggaaggaaaacgaggatcggttcgactttgcccaacttaccgatgaggttctgtattttgcagtttacgacggccatggtggcccagccgctgctgacttttgtcatacccatatggagaaatgcattatggaccttcttcccaaagaaaaaaatctcgaaacactgctgaccttagcctttttggagattgataaggctttcagttcccatgcacgcctgtcagccgacgccaccctgctgacttcgggaacaacagcaacggtggccttgctgcgcgacggtatcgagctcgtggttgcttctgtaggcgatagcagggccatcctgtgtcgaaaggggaagcctatgaaactgaccatcgatcacacgccggaaagaaaggatgagaaggagcgaatcaagaagtgcgggggtttcgttgcatggaatagtctggggcagcctcatgtgaacggtcggctggcaatgacaaggtccattggagatctggacctcaagacctctggagtgatcgccgaacctgagaccaagcgcatcaagttacaccacgcagacgattcttttttagtgctcacaactgacggcattaacttcatggtaaactctcaagaaatttgcgacttcgtcaaccaatgtcacgacccaaacgaggcagcccacgcggtgactgaacaggcaatacagtacggaaccgaagataattcgaccgctgttgtcgtgccttttggagcctggggcaaatacaagaatagtgagattaatttctcattttcacgttcattcgcctcatctggacgctgggcatag

SEQ ID NO: 243876 - DNA, 1119 bp, Artificial Sequence
  derived and/or modified sequence
atgagcacagctgccctgatcaccctggtgcgcagcggcggcaaccaggtgagaagaagagtgctgctgagcagccggctgctgcaggatgaccggcgggtgacccccacctgccacagcagcaccagcgagccccgctgcagcagatttgatcctgatggcagcggcagccctgccacctgggacaactttggcatctgggacaacagaattgatgagcccatcctgctgccccccagcatcaagtatggcaagcccatccccaagatcagcctggagaatgtgggctgtgccagccagatcggcaagaggaaagaaaatgaagatagatttgattttgcccagctgacagatgaggtgctgtactttgctgtgtatgatggccatggaggccctgctgctgctgacttctgccacacccacatggagaagtgcatcatggacctgctgcccaaggagaagaacctggagaccctgctgaccctggccttcctggagattgacaaggccttcagcagccacgcccggctgtctgcagatgccaccctgctgaccagcggcaccacagccaccgtggccctgctgagagatggcatcgagctggtggtggcctctgtgggggacagccgggccatcctgtgcaggaagggcaagcccatgaagctgaccatcgaccacaccccagagaggaaggatgagaaggagcgcatcaagaagtgtggcggctttgtggcctggaacagcctgggccagccccacgtgaatggccgcctggccatgaccaggagcatcggggacctggacctgaagaccagcggcgtgattgctgagcctgagaccaagaggatcaagctgcaccacgcagatgacagcttcctggtgctgaccacagatggcatcaacttcatggtgaacagccaggagatctgtgactttgtgaaccagtgccacgaccccaatgaggccgcccatgctgtgacagagcaggccatccagtatggaacagaggacaacagcacagctgtggtggtgccctttggagcctggggcaagtacaagaacagcgagatcaacttctccttcagccgcagctttgccagcagcggccgctgggcctag

SEQ ID NO: 243877 - DNA, 1119 bp, Artificial Sequence
  derived and/or modified sequence
atgagcaccgccgccctgatcaccctggtgcggagcggcggcaaccaggtgcgcagaagggttctcctatctagccgcttgctgcaggatgatcgccgagtcaccccgacatgtcacagttctaccagtgagccaagatgctcccgcttcgatcctgatggttcaggaagtcccgccacctgggacaacttcggaatttgggataaccgaattgacgaaccaatcctgcttcctccctcaatcaaatacggtaagcctattcccaaaatttctctggagaacgtgggatgtgcaagccaaataggcaaacggaaggaaaacgaggacagattcgactttgcccagctgaccgacgaagtgttatacttcgcagtatacgacggtcacggtggtcccgctgctgctgacttttgccatacacatatggaaaaatgcatcatggatctgctgcccaaggaaaagaatctggagactctgctgacactggctttcctggagattgacaaggcattcagctctcatgcaaggttgtctgccgatgccacactactgacgtcaggcactacggcaaccgtcgctctgctgcgagacggcattgagctggttgtcgcttctgtaggagacagtcgtgccatcttatgccgaaaagggaagcctatgaagctgacgattgaccatacgccagagcgcaaggacgagaaagaacgcataaagaagtgtggtggcttcgtcgcatggaacagcttaggccagccgcatgtaaacgggagactggcaatgacccggtccatcggtgatctggaccttaagacctccggtgtgatagcagaaccggaaacaaaacggataaagctgcaccacgcagacgatagttttctcgtgctcacaacggatggtatcaatttcatggtgaattcccaggaaatctgcgatttcgtaaaccaatgccacgaccctaacgaagcagcacatgccgtcacagagcaggcgattcaatacggaacggaggacaatagtacagcggtggtcgtgccattcggtgcttgggggaagtacaagaactctgagattaacttctcattcagccgtagtttcgcaagttccggacgatgggcttag

SEQ ID NO: 243878 - DNA, 1119 bp, Artificial Sequence
  derived and/or modified sequence
atgagtacagcagctcttattaccctggtccgcagcggtgggaaccaagtgcgcaggagggtgctcctttctagcagactcctgcaggatgatagacgcgttacgcctacctgtcacagttcaacttccgaaccccgatgctcacgctttgaccctgatgggtccggcagcccggcaacgtgggataactttggcatttgggacaacagaatcgatgaacccattctgctgccaccaagcatcaaatatggtaaacccattccaaagatttcactggagaacgtgggttgcgctagccaaatcggaaaaaggaaggaaaatgaggaccggtttgactttgctcaactcaccgacgaagttctgtatttcgcagtgtacgacgggcacgggggtcctgcggcagcggatttctgtcatacgcacatggagaagtgcattatggatctgctcccgaaggagaaaaacctggagactctcttgaccttggccttcctggaaattgacaaggcgttttcatcacacgcaaggctgagcgccgatgccacattattgacttccgggactactgctactgttgctctgctgcgcgatggaatcgaactggttgttgcaagtgtcggagattctcgagccattctatgtcgcaaaggcaaacctatgaagctaacaattgatcacacgcccgagcgaaaagatgagaaggagcgaatcaagaagtgcgggggatttgtggcttggaattcgcttggtcagccgcatgtcaatggacgactggctatgacaagaagcatcggcgatctagatcttaaaacttccggtgtaatcgcagagcctgagactaagcgcattaagctgcaccacgcagatgactcattccttgtactgaccactgacggaattaatttcatggtgaactcccaggagatctgtgacttcgtcaaccagtgtcacgacccaaatgaggccgctcacgccgtgacagaacaggctattcagtacggtacggaggataattccacagcagtggtcgtaccctttggcgcatgggggaagtataaaaatagcgaaataaatttttcattctctaggtcatttgcaagctccggcagatgggcctag

SEQ ID NO: 243879 - DNA, 1941 bp, Artificial Sequence
  derived and/or modified sequence
gtcaaatagcagccgcggggaggctcgttcccatcggcatctgtgactggctgcgatcgagggcccgggcggccggccagccgtctcgccgagtgcggactggccggatctgctgtcagtcagcgggaacagacttctccctctccatctggtcaactgcgggagaaaaattttcgagaatttccagcaggcaaggcagtggccgctttgactgcttgcttcggagatccgagacgacggagaaggcactcttatttaccgaccaagaaagctcctcccccgtcctccgttagctaattaaaacatttttcagggacgtagccatccagagacattccattattgttccattgacctttccctcatcactgagtcctttggagctgagttatgtcaacagctgccttaattactttggtcagaagtggtgggaaccaggtgagaaggagagtgctgctaagctcccgcctgctgcaggacgacaggcgggtgacacccacgtgccacagctccacttcagagcctaggtgttctcggtttgacccagatggtagtgggagtccagctacctgggacaattttgggatctgggataaccgcattgatgagccaattctgctgccacccagcattaagtatggcaagccaattcccaaaatcagcttggaaaatgtggggtgcgcctcacagattggcaaacggaaagagaatgaagatcggtttgacttcgctcagctgacagatgaggtcctgtactttgcagtgtatgatggacacggtggacctgcagcagctgatttctgtcatacccacatggagaaatgtattatggatttgcttcctaaggagaagaacttggaaactctgttgaccttggcttttctagaaatagataaagccttttcgagtcatgcccgcctgtctgctgatgcaactcttctgacctctgggactactgcaacagtagccctattgcgagatggtattgaactggttgtagccagtgttggggacagccgggctattttgtgtagaaaaggaaaacccatgaagctgaccattgaccatactccagaaagaaaagatgaaaaagaaaggatcaagaaatgtggtggttttgtagcttggaatagtttggggcagcctcacgtaaatggcaggcttgcaatgacaagaagtattggagatttggaccttaagaccagtggtgtcatagcagaacctgaaactaagaggattaagttacatcatgctgatgacagcttcctggtcctcaccacagatggaattaacttcatggtgaatagtcaagagatttgtgactttgtcaatcagtgccatgatcccaacgaagcagcccatgcggtgactgaacaggcaatacagtacggtactgaggataacagtactgcagtagtagtgccttttggtgcctggggaaaatataagaactctgaaatcaacttctcattcagcagaagctttgcctccagtggacgatgggcctgattaccagctgggacttagagtttctgtgcaacagtttttcactgagcatgtcaagaaactgataagatcaaaaaggtctcctaactcactagatcagcgcacaagtcagtgtaaaccacttagatagtagttttttcataaatgctcatcatatttatgttccgctgtacatgttcagtataaatatatgtgtagtgaagctactgtgagtctttaaatggaaagagcaaatgagaagtggtttggatacacttgatgagagatgagagtgtcacattaataatttttaagactcttaggcagctatgggtttcttttgatcatttttgttctttattcatttgaacacgtttttgaagttcttcaaaactagtcagtttgaattttgacagctattcaatatgtgatctccaagtttaaaaaaattttttt

SEQ ID NO: 243880 - DNA, 1119 bp, Artificial Sequence
  derived and/or modified sequence
atgagcaccgccgccctgatcaccctggtgagaagcggcggcaaccaggtgagaagaagagtgctgctgagcagcagactgctgcaggacgacagaagagtgacccccacctgccacagcagcaccagcgagcccagatgcagcagattcgaccccgacggcagcggcagccccgccacctgggacaacttcggcatctgggacaacagaatcgacgagcccatcctgctgccccccagcatcaagtacggcaagcccatccccaagatcagcctggagaacgtgggctgcgccagccagatcggcaagagaaaggagaacgaggacagattcgacttcgcccagctgaccgacgaggtgctgtacttcgccgtgtacgacggccacggcggccccgccgccgccgacttctgccacacccacatggagaagtgcatcatggacctgctgcccaaggagaagaacctggagaccctgctgaccctggccttcctggagatcgacaaggccttcagcagccacgccagactgagcgccgacgccaccctgctgaccagcggcaccaccgccaccgtggccctgctgagagacggcatcgagctggtggtggccagcgtgggcgacagcagagccatcctgtgcagaaagggcaagcccatgaagctgaccatcgaccacacccccgagagaaaggacgagaaggagagaatcaagaagtgcggcggcttcgtggcctggaacagcctgggccagccccacgtgaacggcagactggccatgaccagaagcatcggcgacctggacctgaagaccagcggcgtgatcgccgagcccgagaccaagagaatcaagctgcaccacgccgacgacagcttcctggtgctgaccaccgacggcatcaacttcatggtgaacagccaggagatctgcgacttcgtgaaccagtgccacgaccccaacgaggccgcccacgccgtgaccgagcaggccatccagtacggcaccgaggacaacagcaccgccgtggtggtgcccttcggcgcctggggcaagtacaagaacagcgagatcaacttcagcttcagcagaagcttcgccagcagcggcagatgggcctag

SEQ ID NO: 243881 - protein, 757 aa, Artificial Sequence
  derived and/or modified sequence
MAEVGRTGISYPGALLPQGFWAAVEVWLERPQVANKRLCGARLEARWSAALPCAEARGPGTSAGSEQKERGPGPGQGSPGGGPGPRSLSGPEQGTACCELEEAQGQCQQEEAQREAASVPLRDSGHPGHAEGREGDFPAADLDSLWEDFSQSLARGNSELLAFLTSSGAGSQPEAQRELDVVLRTVIPKTSPHCPLTTPRREIVVQDVLNGTITFLPLEEDDEGNLKVKMSNVYQIQLSHSKEEWFISVLIFCPERWHSDGIVYPKPTWLGEELLAKLAKWSVENKKSDFKSTLSLISIMKYSKAYQELKEKYKEMVKVWPEVTDPEKFVYEDVAIAAYLLILWEEERAERRLTARQSFVDLGCGNGLLVHILSSEGHPGRGIDVRRRKIWDMYGPQTQLEEDAITPNDKTLFPDVDWLIGNHSDELTPWIPVIAARSSYNCRFFVLPCCFFDFIGRYSRRQSKKTQYREYLDFIKEVGFTCGFHVDEDCLRIPSTKRVCLVGKSRTYPSSREASVDEKRTQYIKSRRGCPVSPPGWELSPSPRWVAAGSAGHCDGQQALDARVGCVTRAWAAEHGAGPQAEGPWLPGFHPREKAERVRNCAALPRDFIDQVVLQVANLLLGGKQLNTRSSRNGSLKTWNGGESLSLAEVANELDTETLRRLKRECGGLQTLLRNSHQVFQVVNGRVHIRDWREETLWKTKQPEAKQRLLSEACKTRLCWFFMHHPDGCALSTDCCPFAHGPAELRPPRTTPRKKIS

SEQ ID NO: 243882 - DNA, 2274 bp, Artificial Sequence
  derived and/or modified sequence
atggccgaggtggggcggacgggaatcagctaccctggcgccctgctccctcagggtttctgggctgctgtggaagtgtggcttgaaagaccccaagtggctaacaagaggctctgcggagcgcggctggaggcccgctggtccgccgctctgccatgcgcggaggcccgaggacctggaacctctgccgggagtgagcagaaggaaagaggccccggccctggtcagggatctccaggcgggggacctgggccaagaagcctgtcaggccctgagcagggcacggcatgctgcgaactggaagaagctcaggggcagtgccaacaggaagaggcccagcgggaggctgcctccgtgccactccgggacagcggccaccccgggcacgccgagggacgtgaaggtgattttcctgctgccgatctggattccctttgggaagacttctcccagtcattggccagaggaaactctgagttacttgctttcctaactagttctggggctggttctcagccagaagcgcagcgcgagctggacgtggtgctgagaaccgtcatccccaaaacgtcccctcattgcccattaaccacccctagaagagagatcgttgtgcaagacgtgctgaatggtaccattacattcctcccccttgaagaagatgacgaaggcaaccttaaagttaagatgtccaatgtctaccagatccaactgtcccactccaaggaggagtggtttatcagcgtgctgatattttgcccagaacgctggcattccgacggaatcgtctaccccaaacccacatggttgggtgaggaactgctggcaaagttagcaaaatggtctgtagagaataaaaagagcgacttcaagtcaaccctctccctaattagcattatgaaatactcaaaagcctatcaggagttgaaggaaaaatacaaggagatggtgaaagtgtggccggaagtgaccgaccccgagaagtttgtgtacgaggatgtggccatcgccgcatacctccttatcctgtgggaagaagaaagggctgaacgtaggctcactgcacggcagagtttcgtcgacctagggtgtggtaacggcttgttagtgcacatcctgtcttccgagggccacccggggcgcggcatagacgtgaggaggcggaagatttgggacatgtacggcccacagacacaactggaggaggatgccatcacacccaacgataagacactcttccccgacgtggactggctaatcggcaatcactcagatgagctcacgccttggattcccgtcattgcggccagatcttcctataattgtcgattttttgttctaccatgttgtttcttcgacttcattggacgttacagcagaagacagagcaagaaaactcaatatagggaatacctggatttcatcaaagaggtcggctttacttgtgggttccatgtggatgaggactgcctcaggattccatctaccaagcgggtttgtctcgtcggcaagtcccgcacatacccatcctcccgggaggcctccgttgatgagaagagaacccaatacatcaagagcagaagagggtgcccagtttctcctcctggatgggagctgagcccgagcccgcgctgggtggccgccggctcagccgggcactgcgatggtcagcaggccctggacgctcgagtcggctgcgtgacacgcgcctgggccgccgaacatggcgcgggtccacaagctgaggggccgtggctcccgggatttcaccccagagagaaggctgaacgcgtaagaaactgtgccgctcttcccagagactttattgaccaagtggtccttcaagtagccaacttgctgctgggaggtaaacagcttaatacacgatctagtaggaacgggagtctgaagacatggaatggtggggagtccctgtccctggcggaagtagccaatgagctagataccgagactctgagacgcctcaaacgggaatgcggggggttgcagacattgctcagaaacagccatcaggtattccaggttgtaaacggaagagtccatatccgtgactggcgcgaggaaaccctgtggaagactaagcagcccgaggcaaagcagaggctcctgagtgaagcctgcaagacccggctatgctggtttttcatgcatcaccctgacggctgcgctctctctactgattgttgcccttttgcccatgggcctgcagagttacgcccaccgagaaccactcccaggaagaagatctcatag

SEQ ID NO: 243883 - DNA, 2274 bp, Artificial Sequence
  derived and/or modified sequence
atggccgaggtgggccgcacaggcatctcctacccaggggccctgctgccccagggcttctgggccgctgtggaggtgtggctggagcggccccaggtggccaacaagaggctgtgtggggcccggctggaggcccgctggagcgctgccctgccctgtgccgaggcccggggccctggcaccagcgctggcagcgagcagaaggagcggggccctggccctggccagggcagccctgggggcggccctggccccaggagcctgagcggccctgagcagggcacagcctgctgtgagctggaggaggcccagggccagtgccagcaggaggaggcccagcgggaggccgcctctgtgcccctgcgggacagcggccaccctggccacgccgagggccgggagggggacttccctgctgctgacctggacagcctgtgggaggacttcagccagagcctggcccggggcaacagcgagctgctggccttcctgaccagcagtggagctggcagccagcctgaggcccagcgggagctggatgtggtgctgaggacagtcatccccaagaccagcccccactgccccctgaccaccccccggcgggagatcgtggtgcaggatgtgctgaatggcaccatcaccttcctgcccctggaggaggatgatgagggcaacctgaaggtgaagatgagcaatgtgtaccagatccagctgagccacagcaaggaggagtggttcatctctgtgctgatcttctgcccagagcgctggcacagtgatggcatcgtgtaccccaagcccacctggctgggggaggagctgctggccaagctggccaagtggagcgtggagaacaagaagagtgacttcaagagcaccctgagcctcatcagcatcatgaagtacagcaaggcctaccaggagctgaaggagaagtacaaggagatggtgaaggtgtggccagaggtgacagatcctgagaagtttgtgtatgaagatgtggccatcgccgcctacctgctgatcctgtgggaggaggagagagctgagcggcggctgacagcccggcagagctttgtggacctgggctgtggaaatggcctgctggtgcacatcctgagcagcgagggccaccctggccggggcattgatgtgagaagaaggaagatctgggacatgtatggcccccagacccagctggaggaggatgccatcaccccaaatgacaagaccctcttcccagatgtggactggctgattggcaaccacagtgatgagctgaccccctggatccctgtgattgctgcccggagcagctacaactgccgcttctttgtgctgccctgctgcttctttgacttcatcggccgctacagccggcggcagagcaagaagacccagtaccgggagtacctggacttcatcaaggaggtgggcttcacctgtggcttccacgtggatgaggactgcctgcgcatccccagcaccaagagggtgtgcctggtgggcaagagcaggacctaccccagcagccgggaggcctctgtggatgagaagaggacccagtacatcaagagcagaagaggctgccctgtgagccccccaggctgggagctgagccccagcccccgctgggtggccgccggcagcgctggccactgtgatggccagcaggccctggatgcccgggtgggctgtgtgacccgggcctgggccgctgagcacggggccggcccccaggccgagggcccctggctgcccggcttccacccccgggagaaggccgagcgggtgaggaactgtgccgccctgccccgggacttcatcgaccaggtggtgctgcaggtggccaacctgctgctgggcggcaagcagctgaacaccaggagcagcagaaatggcagcctgaagacctggaatggaggagagagcctgagcctggccgaggtggccaatgagctggacacagagaccctgcggcggctgaagagagaatgtggcggcctgcagaccctgctgaggaacagccaccaggtgttccaggtggtgaatggccgggtgcacatccgggactggagggaggagaccctgtggaagaccaagcagcctgaggccaagcagaggctgctgtctgaggcctgcaagacccggctgtgctggttcttcatgcaccacccagatggctgtgccctgagcacagactgctgcccctttgcccacggccctgctgagctgcggccccccaggaccacccccaggaagaagatctcctag

SEQ ID NO: 243884 - DNA, 2799 bp, Artificial Sequence
  derived and/or modified sequence
atggctgaggtgggccgtaccgggatcagctacccaggcgcgcttctcccacagggcttctgggctgcggtcgaagtgtggctggagaggccgcaggtggcaaacaaacggctttgcggcgcccgcctggaggcccgctggagcgccgccctgccctgcgcggaggcccgcggccccgggactagcgcaggctcggagcagaaggagcggggtccgggacccggccagggttcccccggagggggcccgggtcccaggtcgctatcaggacccgagcagggcacggcatgttgcgaacttgaggaggcccagggccagtgccagcaagaggaggcacagagggaagccgcctcagtgcccctgagggactccgggcaccccggccatgctgaaggaagggagggcgacttccccgccgcagatctggattcgctttgggaggatttctcccaaagtctcgcccgtggcaattcggagttgctggccttcctcaccagctccggggcgggatcgcagccagaggcgcagcgtgagctcgacgtggttctcagaaccgtcatcccgaaaactagcccacattgcccccttacaactcccaggagggaaatagtcgtgcaagatgtcctcaatggaaccataacgtttttgcctttggaagaagatgatgaggggaacctaaaggttaagatgagcaatgtgtatcaaattcagctcagtcatagcaaagaagaatggttcatatctgttttaattttctgtccagaaagatggcattcagatggaatcgtgtatcccaaacccacgtggcttggagaagagttgctggccaagttggccaagtggtctgtagagaacaagaagagtgactttaaaagcaccctttccctcatctccattatgaagtatagcaaggcttaccaggaacttaaagagaagtataaggaaatggttaaggtgtggcctgaagtcactgatcctgagaagttcgtgtatgaagatgtggctatcgcagcatacctgctgattctatgggaagaagaaagggctgagaggagactaactgccaggcagtcctttgtggacctgggatgtggaaatggcctcctggtccacatcctgagcagtgaggggcatccaggcagagggattgatgtccgaagaagaaaaatctgggacatgtatggaccacaaactcagttagaggaagatgcaatcacacccaatgataagacccttttccctgatgttgattggttaatcggtaaccattctgatgaactcacaccatggatacctgtcattgcagccaggtcttcctacaattgccgcttctttgtcctcccctgctgcttctttgacttcattggaagatactcccggaggcagagtaagaagactcagtaccgggaataccttgacttcattaaagaagtgggcttcacctgtgggtttcacgtggacgaagactgcctcaggattccttcaaccaaaagagtctgtctcgttggaaaatccagaacatacccttcctccagagaagcttccgtggatgaaaagaggactcagtacattaagagcaggcggggctgccctgtaagcccacctggctgggagctttccccttctccacgctgggttgctgctggcagtgctggtcactgtgacggtcagcaagctctggacgccagggtcgggtgtgtaaccagggcctgggccgctgagcatggagcagggccccaggctgaaggaccctggctacctggatttcatcccagagaaaaggctgagcgtgtgaggaactgtgccgccctgccacgagattttattgaccaagtggttttgcaagtagcgaatttactgttaggtggaaagcaattaaacacaagaagttctcgaaatgggagtttgaagacctggaatgggggagagagcctatctctggcagaagtagccaacgagctggacacggagaccctgcggaggctgaagcgggagtgtgggggcctgcagacgctgctccggaacagccaccaggtgttccaagttgtgaatgggagagttcacatccgcgactggcgagaggagacactgtggaagacaaagcaaccggaagcgaaacagagactgctctctgaagcctgcaaaacccgcctctgctggttcttcatgcatcaccctgatggctgcgctctgtccacggactgctgcccgtttgcccatgggcctgcggagctgcggccaccccggaccaccccgaggaagaagatttcatgagctgcatccttgccagccgaggcctggttggggaggccaaaccaaggagagcttccccagcagtcgtcagtgctgtggtctctgctctggctgtgtttcagcccacctcctcccagctttctccacatcctcacagtgatgaaccgtatttcataaacatcacacgccagagaagccacagttactcggaagcccccagctgactgcctggcttgtttcagatgcagccgcttgaaacgtgcgcagcatcttcatatcataaagattgtgcacggatccttacaatgtctcctgggggagagcggctgaggctgccttgcacaggcccttcccagggcgctgtccgacgcctgccccaccatgtccacatctgtgaagaggatggggctcctcgagaagtaagaccgtatctgccagcgtttctcaccacactggagagcagctgctctggagcagggatccaccagattggtatttttaaaaaaggtgtcaggcttgctatgttgaggttgtttttagagttac

SEQ ID NO: 243885 - DNA, 2274 bp, Artificial Sequence
  derived and/or modified sequence
atggccgaggtgggccggaccggcatcagctaccccggcgccctgctgccccaaggcttctgggctgcagtggaggtgtggcttgagagaccccaggttgccaataaacgtctgtgcggggctcggcttgaggcacggtggtccgctgccctcccctgcgcggaagccagggggccaggcacatccgcaggctctgagcaaaaagagcgcggacctggccctggacaggggtctcctggcggaggtcccggcccaagaagtttgtccggacccgagcagggcacagcgtgctgcgaacttgaagaagcgcagggccagtgccagcaggaggaggcccagagggaagccgccagcgtgcctctgcgcgactctgggcaccctggccacgctgaagggcgagagggggacttccctgcagccgaccttgacagtctctgggaggattttagtcagtccttagctagaggaaactctgagctgttggccttcctcacaagtagtggggccggatcacaacctgaggcgcagagagaactcgacgtggttctgcgtacagtgattccaaaaactagcccccattgccctctcacaactccgcgacgcgaaattgtcgttcaggacgtactgaatgggaccataacttttctgccgttggaggaagacgatgagggtaatctaaaagtgaagatgtcaaatgtatatcagatacagctgtcgcattccaaggaggaatggttcatttccgtgctcatcttttgcccggagcgttggcatagcgatgggattgtctaccccaagcctacttggctaggcgaggagctgctggctaaactggccaagtggtcagttgaaaataagaagagcgattttaaatccacgctctcgctgatctcaataatgaaatactcaaaagcataccaggaactcaaggaaaagtacaaagagatggtaaaggtttggccagaagtcacggatcctgagaagtttgtgtacgaggatgtcgcaatcgcagcctacctgcttatcctgtgggaagaagagcgcgccgaacggaggctaacagcccgccagagctttgtggacttggggtgtggaaacggactcctggttcatatattgtcttcagaaggccaccctggaagggggatcgacgtgagacgccgcaaaatttgggacatgtatggtcctcagacccaactcgaggaagacgccatcactccaaacgataaaacactgttcccagacgttgattggttgatcggcaaccacagcgacgaactcacgccatggatacctgttattgcagcgaggtcctcatataactgtaggttcttcgttctcccttgctgcttcttcgacttcataggtcgctacagcagacgccagagtaagaaaacacaatatagggaatacctagactttattaaagaagtgggctttacctgtgggtttcacgttgacgaggattgtttgagaattccttccaccaagcgggtttgcctggtaggaaaatcaaggacgtatccgtcttcaagggaagccagtgtcgacgagaaacgcacacagtacatcaaatcacgcagggggtgtccagtgagcccacctgggtgggaattatctcctagccctaggtgggttgccgccggtagtgctggccactgtgatggccagcaagctctggatgctcgcgtcgggtgcgtgacacgagcctgggcggcggaacatggcgccggacctcaagctgagggaccgtggctcccgggatttcacccccgggagaaagccgaaagagtccgcaactgtgctgccttgcctagggatttcatcgatcaggtcgttctgcaagtggccaacttgttgttggggggtaagcagcttaatacccgaagttcccgcaatggctcactcaagacctggaatggcggtgagagcctgagcctagccgaggtcgctaatgaactggacacggagaccttaaggcggcttaaacgggaatgtggtggccttcagaccctcctccggaactctcaccaggttttccaggtcgtgaatggtcgggtgcacattagagattggcgggaggaaacgttgtggaagactaaacaacccgaagccaaacaaaggctgttatccgaggcctgtaagactaggttgtgctggttcttcatgcatcatcccgatggttgcgccttaagcacagattgttgtccctttgcccacggcccagcagagctgaggccaccacgcacaacgccacgcaagaaaataagctag

SEQ ID NO: 243886 - DNA, 2274 bp, Artificial Sequence
  derived and/or modified sequence
atggctgaggttggcagaacagggatttcttaccccggagccctgctgcctcagggtttttgggccgcagtggaagtatggctcgagcgccctcaggtcgcaaataagagactctgcggcgctagactggaggcacggtggagcgccgcactgccatgcgcagaagcgaggggtcccggaacctccgccggatctgaacagaaagaacggggtccaggaccgggacagggtagtcccggagggggacccggaccgaggtctctgtccggccctgaacagggcacagcctgttgcgaactcgaggaagctcagggacagtgccagcaggaagaggcacagcgggaagccgcttccgtgcctctgagggactcggggcatcctgggcatgccgagggcagggaaggtgactttcctgctgccgatctggatagcctctgggaagacttcagtcagagccttgccagaggtaactcagagctgcttgcctttctgacctctagtggggcaggcagccagcctgaggctcagcgagagttggatgttgtgcttaggacagtgattccaaaaaccagccctcactgcccccttaccaccccacggagggaaatcgtagtgcaggacgtcctgaatgggaccattacctttctgcccctagaggaggacgacgaggggaaccttaaggtgaagatgagtaatgtttaccagattcagttgtcccattccaaggaagagtggtttataagtgtgctcatcttctgccccgagcgctggcactccgacggaatcgtgtaccccaagcctacgtggctcggcgaggagcttctggcaaaactggctaagtggtcagtcgaaaacaagaagagtgattttaaatcaaccctaagtctcatttctattatgaaatactccaaggcctaccaagagctcaaggaaaaatataaagagatggtgaaggtctggcccgaggtgactgatcctgagaaatttgtgtacgaggacgtggctattgcggcatatttgctgatcctgtgggaggaagagcgcgcagagaggaggctgaccgcaagacaatcgttcgttgatctgggatgcggaaacggactgctggtccacatactctctagtgaagggcacccaggacgcggtatcgatgtccggcgaaggaagatctgggacatgtacggaccccagacccaactggaagaggacgccattacccctaacgataagaccttattccccgatgttgattggcttataggaaatcatagcgacgagctgaccccatggattcccgtgatagccgcacggtcctcctacaactgccgctttttcgtgcttccttgttgtttctttgatttcattggcaggtacagtaggagacaatctaaaaagacacagtatcgcgagtatctggacttcattaaagaggtcggattcacttgtggcttccatgtggatgaagactgcctgaggatacctagtacgaagcgcgtgtgcttggtcggaaaatccaggacatatcccagttcgagggaagcctcggtcgacgagaaaagaacacagtatatcaaatctagacgcggatgccctgtgtcccccccaggatgggagctgtcccctagccctaggtgggtagccgcaggctctgcgggtcactgtgatggtcagcaagccctcgatgcccgtgtggggtgtgtcacaagggcatgggcagccgagcacggtgccggtcctcaagcagagggtccatggctgccgggttttcatcccagagaaaaagcagagagggtgaggaactgcgctgccctgcctagggacttcatcgatcaagtcgtgctccaggtagctaatctccttctgggtggcaagcagctgaatacaaggtcatcgcgcaacgggagcctgaagacctggaacgggggtgaatcgctatctctggccgaagtggcaaatgagctggacactgagactctccggaggcttaagagagagtgcggtggacttcagaccctcttgcgcaactcacaccaggttttccaggtcgttaacggacgagtgcacattagggattggcgcgaggagacattgtggaaaacaaaacagcccgaggcaaagcaacggttgctcagcgaggcttgcaagacaaggctgtgttggttttttatgcatcaccctgacggctgcgccctctcgactgactgctgccccttcgcccacggacctgccgaactgcggcctccgagaaccacaccacgcaagaaaataagctag

SEQ ID NO: 243887 - DNA, 2274 bp, Artificial Sequence
  derived and/or modified sequence
atggccgaggtgggcagaaccggcatcagctaccccggcgccctgctgccccagggcttctgggccgccgtggaggtgtggctggagagaccccaggtggccaacaagagactgtgcggcgccagactggaggccagatggagcgccgccctgccctgcgccgaggccagaggccccggcaccagcgccggcagcgagcagaaggagagaggccccggccccggccagggcagccccggcggcggccccggccccagaagcctgagcggccccgagcagggcaccgcctgctgcgagctggaggaggcccagggccagtgccagcaggaggaggcccagagagaggccgccagcgtgcccctgagagacagcggccaccccggccacgccgagggcagagagggcgacttccccgccgccgacctggacagcctgtgggaggacttcagccagagcctggccagaggcaacagcgagctgctggccttcctgaccagcagcggcgccggcagccagcccgaggcccagagagagctggacgtggtgctgagaaccgtgatccccaagaccagcccccactgccccctgaccacccccagaagagagatcgtggtgcaggacgtgctgaacggcaccatcaccttcctgcccctggaggaggacgacgagggcaacctgaaggtgaagatgagcaacgtgtaccagatccagctgagccacagcaaggaggagtggttcatcagcgtgctgatcttctgccccgagagatggcacagcgacggcatcgtgtaccccaagcccacctggctgggcgaggagctgctggccaagctggccaagtggagcgtggagaacaagaagagcgacttcaagagcaccctgagcctgatcagcatcatgaagtacagcaaggcctaccaggagctgaaggagaagtacaaggagatggtgaaggtgtggcccgaggtgaccgaccccgagaagttcgtgtacgaggacgtggccatcgccgcctacctgctgatcctgtgggaggaggagagagccgagagaagactgaccgccagacagagcttcgtggacctgggctgcggcaacggcctgctggtgcacatcctgagcagcgagggccaccccggcagaggcatcgacgtgagaagaagaaagatctgggacatgtacggcccccagacccagctggaggaggacgccatcacccccaacgacaagaccctgttccccgacgtggactggctgatcggcaaccacagcgacgagctgaccccctggatccccgtgatcgccgccagaagcagctacaactgcagattcttcgtgctgccctgctgcttcttcgacttcatcggcagatacagcagaagacagagcaagaagacccagtacagagagtacctggacttcatcaaggaggtgggcttcacctgcggcttccacgtggacgaggactgcctgagaatccccagcaccaagagagtgtgcctggtgggcaagagcagaacctaccccagcagcagagaggccagcgtggacgagaagagaacccagtacatcaagagcagaagaggctgccccgtgagcccccccggctgggagctgagccccagccccagatgggtggccgccggcagcgccggccactgcgacggccagcaggccctggacgccagagtgggctgcgtgaccagagcctgggccgccgagcacggcgccggcccccaggccgagggcccctggctgcccggcttccaccccagagagaaggccgagagagtgagaaactgcgccgccctgcccagagacttcatcgaccaggtggtgctgcaggtggccaacctgctgctgggcggcaagcagctgaacaccagaagcagcagaaacggcagcctgaagacctggaacggcggcgagagcctgagcctggccgaggtggccaacgagctggacaccgagaccctgagaagactgaagagagagtgcggcggcctgcagaccctgctgagaaacagccaccaggtgttccaggtggtgaacggcagagtgcacatcagagactggagagaggagaccctgtggaagaccaagcagcccgaggccaagcagagactgctgagcgaggcctgcaagaccagactgtgctggttcttcatgcaccaccccgacggctgcgccctgagcaccgactgctgccccttcgcccacggccccgccgagctgagaccccccagaaccacccccagaaagaagatcagctag

SEQ ID NO: 243888 - protein, 429 aa, Artificial Sequence
  derived and/or modified sequence
MAQPGTLNLNNEVVKMRKEVKRIRVLVIRKLVRSVGRLKSKKGTEDALLKNQRRAQRLLEEIHAMKELKPDIVTKSALGDDINFEKIFKKPDSTATERAIARLAVHPLLKKKIDVLKAAVQAFKEARQNVAEVESSKNASEDNHSENTLYSNDNGSNLQREATVISEQKVKETKILAKKPIHNSKEKIAKMEHGPKAVTIANSPSKPSEKDSVVSLESQKTPADPKLKTLSQTKKNKGSDSSLSGNSDGGEEFCEEEKEYFDDSTEERFYKQSSMSEDSDSGDDFFIGKVRRTRKKESSCHSSVKEQKPLEKVFLKEDTGETHGDTRNDKIKPSTETRKLESVFFHSLSGSKSSRRNFKEQAPKTRSLDFPQNEPQIKNQFNKKLSGRLENTKQQLQLPLHPSWEASRRRKEQQSNIAVFQGKKITFDD

SEQ ID NO: 243889 - DNA, 1290 bp, Artificial Sequence
  derived and/or modified sequence
atggcacagccgggtaccttgaatttaaacaacgaggtggtgaagatgaggaaagaggtaaagcgaatccgggttctggtcatcagaaagctcgttagatctgtcgggcgacttaagtctaagaagggaactgaggacgctctgctgaagaatcagaggcgggctcaacgtctcttggaagagatccatgcaatgaaagagctcaaaccagatattgtaactaaatctgcgctcggcgacgatattaactttgaaaagatcttcaaaaagcctgacagtaccgccacagagcgagctatagctcgtcttgccgtgcacccactacttaagaagaagattgacgttctgaaggctgcagtgcaggcgtttaaggaggcccggcaaaacgtggcagaagtcgagagtagcaagaacgccagcgaagacaaccactcagagaatacactgtattctaatgacaatgggtccaacctgcagagggaggccacagtcataagtgaacagaaggtcaaggaaactaaaatcctcgccaagaagccaatccataatagcaaagagaaaattgctaagatggaacacgggccaaaagccgtcacgatcgccaacagcccttctaagccttctgagaaggacagcgtggtgtcactcgagagccagaagacacctgctgaccctaagttgaaaaccctttctcaaaccaaaaagaacaaagggagcgactcctccctgtctggtaattcagacggtggtgaggaattctgcgaagaagagaaggagtattttgatgactcaaccgaagaacgtttttataagcagtcaagcatgtctgaagacagcgactccggtgacgatttcttcatcggcaaagtcaggcgaactcgcaagaaggagagtagctgccactccagcgtcaaagagcagaagccattagagaaggtttttttgaaagaggacacaggagagacacacggcgatacacgaaatgataaaattaaaccctcaaccgagacgcgaaaattggagagtgtattcttccacagcctttccgggagcaagtccagcagaagaaactttaaggaacaggcacccaaaacgcgtagtcttgacttcccgcagaatgaacctcagatcaagaaccaattcaataagaagttatctgggaggttggaaaataccaaacagcaattgcagctgcctcttcatccctcatgggaagcttcccggagaagaaaagaacagcagtcaaacattgccgtgttccaggggaagaagattacgtttgacgactag

SEQ ID NO: 243890 - DNA, 1290 bp, Artificial Sequence
  derived and/or modified sequence
atggcccagcccggcaccctgaacctgaacaatgaggtggtgaagatgaggaaggaggtgaagaggatccgggtgctggtgatcaggaagctggtgcgctctgtgggccgcctgaagagcaagaagggcacagaagatgccctgctgaagaaccagaggcgggcccagaggctgctggaggagatccacgccatgaaggagctgaagccagacatcgtgaccaagagcgccctgggagatgacatcaactttgagaagatcttcaagaagccagacagcacagccacagagcgggccatcgcccggctggccgtgcaccccctgctgaagaagaagattgatgtgctgaaggctgctgtgcaggccttcaaggaggcccggcagaatgtggccgaggtggagagcagcaagaatgccagcgaggacaaccacagcgagaacaccctgtacagcaatgacaatggcagcaacctgcagcgggaggccaccgtcatcagcgagcagaaggtgaaggagaccaagatcctggccaagaagcccatccacaacagcaaggagaagatcgccaagatggagcacggccccaaggctgtgaccatcgccaacagccccagcaagcccagcgagaaggacagcgtggtgtccctggagagccagaagaccccagctgaccccaagctgaagaccctgagccagaccaagaagaacaagggcagtgacagcagcctgagcggcaacagtgatggaggagaggagttctgtgaggaggagaaggagtactttgatgacagcacagaggagcgcttctacaagcagagctccatgtctgaagattctgattctggagatgacttcttcatcggcaaggtgcggaggaccaggaagaaggagagcagctgccacagctctgtgaaggagcagaagcccctggagaaggtgttcctgaaggaggacacaggagagacccatggagacaccagaaatgacaagatcaagcccagcacagagaccaggaagctggagagcgtcttcttccacagcctgagcggcagcaagagcagcagaagaaacttcaaggagcaggcccccaagaccaggagcctggacttcccccagaatgagccccagatcaagaaccagttcaacaagaagctgagcggccgcctggagaacaccaagcagcagctgcagctgcccctgcaccccagctgggaggccagcagaagaaggaaggagcagcagagcaacattgctgtgttccagggcaagaagatcacctttgatgactag

SEQ ID NO: 243891 - DNA, 1290 bp, Artificial Sequence
  derived and/or modified sequence
atggcccagcccggcaccctgaacctgaacaacgaggtggtgaagatgagaaaggaggtgaagcgcattagagtgctggttatccgaaaactcgttagatctgttggccggctgaagagtaagaaagggactgaagatgcgctgctcaaaaatcaaagaagagcccagcggctcctggaggagattcatgccatgaaagagctgaaacctgacattgtaacaaaatctgccttgggtgacgacatcaatttcgagaagattttcaagaaacctgacagcacagccactgagagagcaatagcccggctggcagtccacccgctgctcaaaaaaaagatcgacgtgttgaaggctgccgtccaggcctttaaggaagcaagacagaacgtggccgaagtcgaaagctccaagaatgctagtgaggataatcattctgagaataccctctactcgaacgataatgggagcaatcttcaaagggaagccaccgtcataagtgaacagaaggtgaaagagactaagattctggcaaagaaacccatacacaattccaaagaaaagatcgccaaaatggaacacggaccaaaagcagtcacaatcgctaattctccatctaaaccctcagaaaaggacagcgtcgtgtcgctggagagccaaaaaactcccgcagacccaaaacttaagactctgtcccaaaccaagaagaacaagggttctgattccagcctgtctgggaactctgatggcggggaagaattctgtgaagaggagaaggaatacttcgacgactctacagaagaacggttctacaagcaaagctccatgtcagaggattccgacagcggggatgacttctttatcggtaaggtgaggaggacacgcaagaaggagtcctcttgtcactctagcgtgaaggaacagaagccattagaaaaagttttcctgaaagaagacactggcgaaacgcacggcgataccaggaatgacaaaatcaaacccagcactgaaaccaggaaacttgaaagtgtgttttttcactcactgagcggcagcaaatccagcagacgcaactttaaagagcaggcccctaaaacacgctcgctggattttccccagaatgagcctcagatcaaaaatcagttcaataaaaagttgtccggtagattagagaacacgaaacagcaactccaacttcccttgcacccatcctgggaggcaagcagacggagaaaagaacagcagtccaacatcgctgtcttccagggaaagaaaattacgtttgatgactag

SEQ ID NO: 243892 - DNA, 1290 bp, Artificial Sequence
  derived and/or modified sequence
atggctcagccaggcacactgaacctaaataatgaagtggtgaagatgcgaaaggaggttaaaaggattagagtgcttgtgatcaggaagcttgtgcggtctgtgggccgactgaaatccaagaaaggaacagaagatgccctattgaaaaaccagcgaagggcccagcggctattagaggaaatccacgccatgaaggagctcaagcccgacattgtcaccaagagcgccctcggcgatgatataaattttgagaaaatattcaaaaaaccagattcaactgccactgaacgcgctatagccaggctagccgtgcaccctctcctcaaaaagaagattgatgtcttgaaggccgctgttcaagcgttcaaagaggcgaggcagaatgtggctgaagtagagagctcgaagaacgcatccgaggacaaccattccgagaacaccctttactctaacgataatggcagcaacctgcagcgcgaggcgacggtgatcagcgaacagaaagtgaaggaaaccaagattcttgccaaaaagcctatccacaactctaaggaaaaaattgcaaagatggagcacggaccaaaagccgtcactatcgccaacagtccctcaaaaccttccgagaaggattctgtagtgtcacttgagtcccaaaagacacctgccgaccctaagctgaagaccctatcccaaacaaagaaaaataaaggaagcgattcttcattgagcgggaattccgacggcggtgaggaattctgcgaggaggaaaaagaatatttcgatgattccaccgaggaacggttctacaaacagtcatccatgtctgaagactcagactcaggggacgattttttcattggaaaggttaggcgcacgagaaaaaaggagtcatcttgccactccagcgttaaagagcagaagcccctggaaaaggtgtttctaaaagaggacacgggagagacccacggcgatacaagaaacgacaagatcaagcctagtactgagacacgcaagctggagtccgtcttctttcactctttgtctggctcaaaaagcagtagaagaaatttcaaagagcaggctcctaaaactagatccttggacttcccccaaaatgagcctcagataaaaaaccagttcaataagaaactgtcaggtcgattagagaacacaaagcagcagttgcagctcccgctgcacccaagctgggaggctagcagacgccgtaaagaacaacagtcaaatattgcggtctttcaaggtaagaagattactttcgatgattag

SEQ ID NO: 243893 - DNA, 2855 bp, Artificial Sequence
  derived and/or modified sequence
gtggcgacgcagccgcggtctgagagaccggttcacgtgcaggcagcggcggatcatattccttcatctaccatggctcagccgggaactctgaacctcaataacgaggttgtgaagatgagaaaagaagtgaagagaattcgagttttagttatccgaaaacttgtcaggagtgttggccgactgaagtcaaaaaagggtactgaagatgcactgttaaaaaaccaaagacgggcgcaaagattgcttgaagaaatccatgccatgaaggaattgaaacctgacatagtaactaaatctgctcttggtgatgatatcaactttgaaaaaatcttcaaaaagccagattctactgcaactgaaagagcaattgccagactagcagtacatcctcttctgaagaaaaagatagatgtgctaaaagctgctgtacaagcctttaaagaagcaagacaaaatgttgctgaagttgagtcatcaaagaatgcttcagaggacaatcattctgagaatactttgtattcaaatgataatggaagtaatttacagcgtgaagcaactgtcatcagtgagcaaaaagtcaaagaaaccaaaatattggcgaagaaaccaatacataattcaaaggaaaaaatagcaaagatggaacatggacctaaagcagtgactattgcaaattctccatcaaagccttcagaaaaggattctgtagtttcccttgagtcccagaagacacctgctgacccaaaactgaaaactctaagtcaaaccaaaaaaaacaaaggatctgatagctcactctctggtaacagtgatggcggagaagaattttgtgaagaggagaaggaatattttgatgatagcacagaagaaaggttttacaagcagtcttccatgtctgaagatagtgatagcggtgacgacttcttcattgggaaagtcagacggacacgaaagaaggaaagtagttgtcattcttcagttaaggaacaaaaaccactagaaaaagtgtttcttaaagaagatacaggtgaaactcatggggatacaagaaatgacaaaatcaagccaagtacagaaaccagaaagttagaatcagtgtttttccactctttatctggatctaaaagctctagaagaaatttcaaagaacaggctccaaaaacaagatccctagattttccacagaatgagcctcagatcaagaatcagtttaataagaagctatcaggaagacttgaaaatacaaaacagcaattgcagctgcctcttcatccttcatgggaagcaagcagaaggcgaaaagaacagcaatctaatattgctgtgtttcaggggaaaaaaattacgtttgatgattgattagtgcctctttctgcaaacttttccatctaaaaaaaaaaatgttttttttaagacaggatctcattctgttgcccagactagagtacaatattgcaatcacagctcactgcagcctcaaactcctgggctcaagtgatcctcccacctctgcctcccaaagggctgggactgcaggtgcatgcactaccatgcccagctttctcaccccaggctctgcagctattacttaaactcgtatttgaataagtctcttggggagaattatagaatgtttgtttttgtatttttttttaaagtaaattcaacttacgcttatataagcctttcacaaatccaatatgtacttaaattgatttttaataatatccctcagactgtttcccttatgaagtaatttggggattttagtgatctcatattttctctttagtgcttatcatgaaatgtgcttcactggttcagctctgttgtttccttaaacataaatgtcaatatatatttaaaataataatggaaacataggaaatcagctatttaaaccagatcacccttgttaaaaatcattcttgttagcaaactaaaatagtaacttttattatggatgtacagataaatattaattttattatagttttaagtacttgtgatcatgtactttttgattctaaaatagttgtctaggacaattttgggattcttaattatattttagttaagaaaattgtttaaatatagcaatacaaccaataatttgttttatgtttcactgcatataaatatttccattaaatcaagaatgtatattatctagtttttactatacttattttaaaatttttgaggaatcatagattctaatttttaagaacaaattctgaaggtggtaggattaaaagaatatttccactgatggctaagcaaagaagttgtaagatgactcactgaggaagggactgctttatacatcacagtactgctatttaaaaggaaaacagaaatttttaaatcccttcaaatgtttcacttttgctatgctgggaaaaattttgaagttcttggtaaactgaataatgctaatccatgtttcctgcacattagttcctttaatggcagggaaggccatctggttaacctgtattcacaaactctcaagagtttctacttatttcaggagcttaagaatttagataactcagccgggcgtggtgactcatgcctataatcccagcactttgggaggctgaggcgggtagatcgctagaggcaaggagttcaaaaccagcctgggcaacatggtgaaaccctgtctctactaaaaatacagaaaattatccaggcgtggtggccggcatctgtaattccagctactcagaaggctgaggcataagaattgcttgaacctgggaggtggaggttgcagtgagccaagattgcaccactgcactccagcctgggtgacagagtatgactgtctcaaaaaaaaaaaaaaa

SEQ ID NO: 243894 - DNA, 1290 bp, Artificial Sequence
  derived and/or modified sequence
atggcccagcccggcaccctgaacctgaacaacgaggtggtgaagatgagaaaggaggtgaagagaatcagagtgctggtgatcagaaagctggtgagaagcgtgggcagactgaagagcaagaagggcaccgaggacgccctgctgaagaaccagagaagagcccagagactgctggaggagatccacgccatgaaggagctgaagcccgacatcgtgaccaagagcgccctgggcgacgacatcaacttcgagaagatcttcaagaagcccgacagcaccgccaccgagagagccatcgccagactggccgtgcaccccctgctgaagaagaagatcgacgtgctgaaggccgccgtgcaggccttcaaggaggccagacagaacgtggccgaggtggagagcagcaagaacgccagcgaggacaaccacagcgagaacaccctgtacagcaacgacaacggcagcaacctgcagagagaggccaccgtgatcagcgagcagaaggtgaaggagaccaagatcctggccaagaagcccatccacaacagcaaggagaagatcgccaagatggagcacggccccaaggccgtgaccatcgccaacagccccagcaagcccagcgagaaggacagcgtggtgagcctggagagccagaagacccccgccgaccccaagctgaagaccctgagccagaccaagaagaacaagggcagcgacagcagcctgagcggcaacagcgacggcggcgaggagttctgcgaggaggagaaggagtacttcgacgacagcaccgaggagagattctacaagcagagcagcatgagcgaggacagcgacagcggcgacgacttcttcatcggcaaggtgagaagaaccagaaagaaggagagcagctgccacagcagcgtgaaggagcagaagcccctggagaaggtgttcctgaaggaggacaccggcgagacccacggcgacaccagaaacgacaagatcaagcccagcaccgagaccagaaagctggagagcgtgttcttccacagcctgagcggcagcaagagcagcagaagaaacttcaaggagcaggcccccaagaccagaagcctggacttcccccagaacgagccccagatcaagaaccagttcaacaagaagctgagcggcagactggagaacaccaagcagcagctgcagctgcccctgcaccccagctgggaggccagcagaagaagaaaggagcagcagagcaacatcgccgtgttccagggcaagaagatcaccttcgacgactag

SEQ ID NO: 243895 - protein, 452 aa, Artificial Sequence
  derived and/or modified sequence
MQLQFLGTLASSEKRKKSQRLFFKNIKSTKNKAGKASIMSSDTNVNKSASPTATAEEQPVEPDGPLPGSDNNQEKKVRLSPAKMSTKNSTDLVEYVDKSHAFLPIIPNTQRGQLEDRLNNQARTIAFLLEQAFRIKEDISACLQGTHGFRKEESLARKLLESHIQTITSIVKKLSQNIEILEDQIRARDQAATGTNFAVHEINIKHLQGVGDLRGRVARCDSSIVKLSGDIHLFRQEHRQIEKAIQEFVPALETLSKNLDMKVMQLLGKIETASPEQTSNLKMVQGDYRHEMNLLEFKFHSLSSNLYEEVENNKKWTENQFLKYRKDHLGHINECLKVLQEKLEKSENKMEEKLLQLSSKVENFINTQKQETQLSKVKHMENKLSKKMEQMEKQIWGELETMQNEYQSGFKSIHDSLSSLQQIQKTKMDLEKYKVQKDLKKLQRKIVELQEV

SEQ ID NO: 243896 - DNA, 1359 bp, Artificial Sequence
  derived and/or modified sequence
atgcagctgcagttcctgggcaccctggccagcagcgagaagagaaagaagagccagagactgttcttcaagaacatcaagagcaccaagaacaaggccggcaaggccagcatcatgagcagcgacaccaacgtgaacaagagcgccagccccaccgccaccgccgaggagcagcccgtggagcccgacggccccctgcccggcagcgacaacaaccaggagaagaaggtgagactgagccccgccaagatgagcaccaagaacagcaccgacctggtggagtacgtggacaagagccacgccttcctgcccatcatccccaacacccagagaggccagctggaggacagactgaacaaccaggccagaaccatcgccttcctgctggagcaggccttcagaatcaaggaggacatcagcgcctgcctgcagggcacccacggcttcagaaaggaggagagcctggccagaaagctgctggagagccacatccagaccatcaccagcatcgtgaagaagctgagccagaacatcgagatcctggaggaccagatcagagccagagaccaggccgccaccggcaccaacttcgccgtgcacgagatcaacatcaagcacctgcagggcgtgggcgacctgagaggcagagtggccagatgcgacagcagcatcgtgaagctgagcggcgacatccacctgttcagacaggagcacagacagatcgagaaggccatccaggagttcgtgcccgccctggagaccctgagcaagaacctggacatgaaggtgatgcagctgctgggcaagatcgagaccgccagccccgagcagaccagcaacctgaagatggtgcagggcgactacagacacgagatgaacctgctggagttcaagttccacagcctgagcagcaacctgtacgaggaggtggagaacaacaagaagtggaccgagaaccagttcctgaagtacagaaaggaccacctgggccacatcaacgagtgcctgaaggtgctgcaggagaagctggagaagagcgagaacaagatggaggagaagctgctgcagctgagcagcaaggtggagaacttcatcaacacccagaagcaggagacccagctgagcaaggtgaagcacatggagaacaagctgagcaagaagatggagcagatggagaagcagatctggggcgagctggagaccatgcagaacgagtaccagagcggcttcaagagcatccacgacagcctgagcagcctgcagcagatccagaagaccaagatggacctggagaagtacaaggtgcagaaggacctgaagaagctgcagagaaagatcgtggagctgcaggaggtgtag

SEQ ID NO: 243897 - DNA, 1359 bp, Artificial Sequence
  derived and/or modified sequence
atgcagttacaatttctcggaacattggcaagtagcgagaagcgaaaaaagtctcaaaggttgttcttcaagaacataaagagcaccaagaacaaggctgggaaggccagcattatgagtagcgatactaacgtgaataagagcgccagtcccaccgctaccgcagaggagcagccagtcgaacccgatgggccactcccgggttcagacaataaccaggaaaaaaaggtaaggctgtctccagccaagatgtctacaaaaaatagtacggacctcgtcgagtatgtcgacaagtcacacgcattcctgccaattattcctaacactcagagagggcaactggaagaccgcttgaataaccaagctaggactattgcgttcctattagaacaggcattcagaatcaaggaagatatcagcgcttgccttcaaggtacccacgggttccgcaaagaagagtctctcgcacgcaagctgttggagagccatatccagacaataacaagcatcgtgaaaaaactctctcagaatattgagatactggaagaccaaataagagctcgggatcaagccgccactggaactaacttcgccgtgcacgaaatcaacattaaacacctccagggagttggcgatttgaggggcagggtagcgcggtgtgactcttcgattgtgaagctgtccggtgacattcatttatttcgtcaggagcatcggcagattgaaaaggcgattcaggagttcgtgcctgccctggagacactgagcaagaacttggacatgaaagtgatgcagctcctagggaaaatcgagaccgcctctccggaacaaacttccaacttgaaaatggtgcagggggattatcgacacgaaatgaatctcctagagttcaaattccacagtctgtcatcaaatttgtatgaggaggtagaaaacaataaaaaatggacggagaaccagtttctgaagtaccgtaaggaccatctgggtcatattaacgaatgccttaaggtgctgcaggaaaagctcgagaagtcagagaacaaaatggaggagaaacttctccagctctctagcaaggttgagaacttcattaacactcagaaacaggagacccagcttagtaaggtgaaacacatggagaacaaactcagcaagaagatggagcagatggaaaagcagatatggggtgagctagagactatgcagaacgaatatcagagcgggttcaaatcaattcatgactcccttagcagtctgcaacagattcagaaaacaaaaatggatctggaaaagtacaaggtgcagaaagatcttaaaaagttacagaggaagatcgtcgaactgcaggaagtgtag

SEQ ID NO: 243898 - DNA, 1560 bp, Artificial Sequence
  derived and/or modified sequence
gtcacccttgggaagaggccccagaaacaggaagaccttagttaggatgcaattacaattccttggtacattggcttcctcagaaaaaagaaaaaaatcacagagattgtttttcaaaaatatcaaatctacaaaaaataaagctggaaaagcaagcatcatgagttcagatacaaatgtaaacaaaagtgcctctccaactgcgactgcagaggaacagccagttgaacctgatggcccccttcctggctcagacaataaccaagaaaagaaagtaagattatctccagccaaaatgtcaaccaagaattctacagatctagttgaatatgttgacaagagtcatgcttttctccccatcattccaaacacccagagaggtcagctagaagacagactgaacaaccaggcgcgtaccatagctttccttcttgaacaagccttccgcatcaaggaggacatctctgcttgcctgcaggggacccatggctttcgaaaagaggaatcgctcgccaggaagttactggaaagccacatccagaccatcaccagcatcgtcaaaaaactcagccaaaatattgagattttagaagaccaaataagagctcgagatcaggcggccacaggaactaactttgcagtacacgagataaacatcaaacacctacaaggagttggagatcttcgaggaagagtagccagatgtgattcaagcattgtgaagctttctggagacattcacttattcaggcaagagcaccggcaaattgagaaagccattcaagaattcgtgcccgccctggaaactctttccaagaacttggacatgaaggtgatgcagctcttaggaaagatagaaactgccagtcctgagcaaacctcgaatttaaagatggtccagggggattatcgccacgaaatgaaccttttggaattcaaatttcattcactttcaagtaatctgtacgaagaagttgagaataataaaaaatggacagaaaaccaatttctcaaatatagaaaagaccacctgggccatataaatgaatgtctgaaggtcctacaggagaaactggaaaagtctgaaaataaaatggaagaaaaactgctgcagctttcaagcaaagtagagaatttcattaacacacagaaacaggaaacacaactaagtaaagtaaagcatatggaaaataaattgtccaaaaagatggaacaaatggaaaagcagatctggggtgaattagagacaatgcagaatgaatatcaatcaggatttaaatcaattcatgactctctcagctccctccaacaaatacagaaaacaaagatggatttagagaaatataaagtacagaaagacctaaagaaattacagcgcaagatagtggaactccaggaagtataaaccttttcagtcatcttctttttcatcagccaatggagtgatttgttggaaaaagttctgaagaagaaagttactatctctgggatgtttactgcttctaatgtctccttttaaggagacgaatgtaccagaaaaataataaagcaaagaagctt

SEQ ID NO: 243899 - DNA, 1359 bp, Artificial Sequence
  derived and/or modified sequence
atgcagctgcagttcctgggcaccctggccagcagcgagaagaggaagaagagccagaggctcttcttcaagaacatcaagagcaccaagaacaaggccggcaaggccagcatcatgagcagtgacaccaacgtgaacaagagcgccagccccacagccacagctgaggagcagcctgtggagccagatggccccctgcccggcagtgacaacaaccaggagaagaaggtgcggctgagccctgccaagatgagcaccaagaacagcacagacctggtggagtatgtggacaagagccacgccttcctgcccatcatccccaacacccagaggggccagctggaggaccggctgaacaaccaggcccggaccatcgccttcctgctggagcaggccttccgcatcaaggaggacatcagcgcctgcctgcagggcacccacggcttcaggaaggaggagagcctggccaggaagctgctggagagccacatccagaccatcaccagcatcgtgaagaagctgagccagaacatcgagatcctggaggaccagatccgggcccgggaccaggccgccaccggcaccaactttgctgtgcatgagatcaacatcaagcacctgcagggcgtgggggacctgcggggccgggtggcccgctgtgacagcagcatcgtgaagctgagcggggacatccacctgttccggcaggagcaccggcagatcgagaaggccatccaggagtttgtgcctgccctggagaccctgagcaagaacctggacatgaaggtgatgcagctgctgggcaagattgaaacagccagccctgagcagaccagcaacctgaagatggtgcagggcgactacagacatgagatgaacctgctggagttcaagttccacagcctgagcagcaacctgtatgaggaggtggagaacaacaagaagtggacagagaaccagttcctgaagtacaggaaggaccacctgggccacatcaatgaatgtctgaaggtgctgcaggagaagctggagaagtctgagaacaagatggaggagaagctgctgcagctgagcagcaaggtggagaacttcatcaacacccagaagcaggagacccagctgagcaaggtgaagcacatggagaacaagctgagcaagaagatggagcagatggagaagcagatctggggcgagctggagaccatgcagaatgagtaccagagcggcttcaagagcatccatgacagcctgagcagcctgcagcagatccagaagaccaagatggacctggagaagtacaaggtgcagaaggacctgaagaagctgcagaggaagatcgtggagctgcaggaggtgtag

SEQ ID NO: 243900 - DNA, 1359 bp, Artificial Sequence
  derived and/or modified sequence
atgcagctgcagttcctgggcaccctggccagcagcgagaagcggaaaaagtcacagcggctgttttttaagaatattaagtccactaagaataaagcaggcaaagcctccattatgagctccgacacaaatgttaacaagtccgcaagccccaccgccaccgcagaagagcagcccgttgaaccagacgggcctctgcctggatccgacaacaaccaggaaaaaaaggtcaggctgagtcccgctaaaatgtcaacgaaaaattcaacagacctcgtggaatacgtggacaaaagtcacgcctttctcccgattattcctaacacccagagggggcaactggaggataggctgaataatcaggcgaggacaattgcctttctcctcgaacaagcctttagaattaaggaggacattagtgcatgtcttcaaggaacccacggcttccgaaaagaggaaagcctggccagaaagctgctggaaagccatattcagacaattacttccattgtgaagaaactgtctcagaacatcgagattctcgaagaccagatacgggctcgggaccaagcggctactgggacaaatttcgcagtgcacgaaataaacatcaagcacctccagggcgtgggtgaccttcgtggccgggttgcccgatgcgattcttctatcgttaagctgtcaggtgatatacacctattccgtcaggaacaccgccagatcgagaaggctatccaggagttcgtcccggctttagaaactctatccaagaacttagatatgaaggtgatgcaacttcttggaaagattgagacagcaagtccagagcagacttccaacttaaaaatggtccagggtgactataggcacgaaatgaacctcctcgagttcaagttccactccctcagcagtaacttgtatgaagaggtcgaaaataataaaaagtggacagagaatcagtttcttaaatataggaaagatcacctaggtcacattaacgagtgcttaaaggtcttacaggagaagctggaaaaaagcgagaacaagatggaggagaagctgctccagctgtcttccaaggtagaaaacttcatcaatacccaaaagcaggaaacccagctatccaaagtgaagcacatggagaacaaattgtctaagaagatggaacaaatggagaaacagatttggggtgagttggagactatgcagaacgaataccaaagcggattcaaaagcatacatgattctctctcctctttacagcagatccagaaaaccaagatggatctggagaagtataaggtacagaaagatttgaagaagcttcagcgaaaaatagtcgagcttcaggaggtttag

SEQ ID NO: 243901 - DNA, 1359 bp, Artificial Sequence
  derived and/or modified sequence
atgcagcttcagttccttggtaccctggcaagttctgagaagagaaagaagtcacagcgtctttttttcaaaaacattaagtccacaaagaacaaggctggtaaggccagcattatgagctctgacacaaacgtaaataagtctgcatccccaactgcaaccgcagaagaacagccagtcgagccggacggtccactgcctggcagcgataacaaccaagagaagaaggtgagattatccccagccaagatgtcaacaaagaatagtacagatctagtcgaatacgtggacaagtctcatgcttttttgcccatcatccctaacacccaaagagggcaattagaggatcggctcaataatcaggcaaggaccatcgcctttcttctggagcaagcctttcggatcaaagaagatatctctgcttgtctacagggcacgcacggattcaggaaagaggagtccctcgctaggaagctcctcgaaagccatattcagacaatcacaagtatagttaaaaagctttcacagaacatcgaaattctcgaggaccagattagagcgagagaccaggctgccacaggaactaacttcgcagtgcatgaaattaacataaagcacttgcagggcgtgggcgatctcagaggtcgggtagctagatgtgactcgtccattgttaagctgtcaggggacattcatcttttccggcaggaacaccgtcagattgagaaggccattcaggaattcgtgcccgctttggaaacattgtcaaagaacctggacatgaaggtgatgcagctgctcggtaaaattgaaacagcatccccagaacagacaagcaatctgaagatggttcagggggattatcgacatgagatgaacctgttggaattcaagttccactctttaagtagtaatctttatgaggaggtggagaacaataagaagtggacggaaaaccagttcctgaagtataggaaggaccacctgggtcacatcaatgaatgccttaaagtgctgcaagagaagcttgaaaagtccgaaaataaaatggaggaaaaactactccagctgtcttctaaggtggaaaatttcatcaacacccagaaacaggaaacccaattgtccaaggtgaaacacatggaaaataaactctccaaaaagatggaacagatggaaaagcagatttggggcgaactggaaacgatgcagaatgagtatcagtcaggctttaagtctattcacgatagcctgagctccctgcagcaaatacaaaaaaccaaaatggatctggagaagtacaaggtgcagaaagatctgaaaaaactccaaaggaagattgtggaactccaagaggtgtag

SEQ ID NO: 243902 - protein, 405 aa, Artificial Sequence
  derived and/or modified sequence
MEPGAGGRNTARAQRAGSPNTPPPREQERKLEQEKLSGVVKSVHRRLRKKYREVGDFDKIWREHCEDEETLCEYAVAMKNLADNHWAKTCEGEGRIEWCCSVCREYFQNGGKRKALEKDEKRAVLATKTTPALNMHESSQLEGHLTNLSFTNPEFITELLQASGKIRLLDVGSCFNPFLKFEEFLTVGIDIVPAVESVYKCDFLNLQLQQPLQLAQDAIDAFLKQLKNPIDSLPGELFHVVVFSLLLSYFPSPYQRWICCKKAHELLVLNGLLLIITPDSSHQNRHAMMMKSWKIAIESLGFKRFKYSKFSHMHLMAFRKISLKTTSDLVSRNYPGMLYIPQDFNSIEDEEYSNPSCYVRSDIEDEQLAYGFTELPDAPYDSDSGESQASSIPFYELEDPILLLS

SEQ ID NO: 243903 - protein, 352 aa, Artificial Sequence
  derived and/or modified sequence
MGDFDKIWREHCEDEETLCEYAVAMKNLADNHWAKTCEGEGRIEWCCSVCREYFQNGGKRKALEKDEKRAVLATKTTPALNMHESSQLEGHLTNLSFTNPEFITELLQASGKIRLLDVGSCFNPFLKFEEFLTVGIDIVPAVESVYKCDFLNLQLQQPLQLAQDAIDAFLKQLKNPIDSLPGELFHVVVFSLLLSYFPSPYQRWICCKKAHELLVLNGLLLIITPDSSHQNRHAMMMKSWKIAIESLGFKRFKYSKFSHMHLMAFRKISLKTTSDLVSRNYPGMLYIPQDFNSIEDEEYSNPSCYVRSDIEDEQLAYGFTELPDAPYDSDSGESQASSIPFYELEDPILLLS

SEQ ID NO: 243904 - DNA, 1218 bp, Artificial Sequence
  derived and/or modified sequence
atggagcccggcgccggcggcagaaacaccgccagagcccagagagccggcagccccaacacccccccccccagagagcaggagagaaagctggagcaggagaagctgagcggcgtggtgaagagcgtgcacagaagactgagaaagaagtacagagaggtgggcgacttcgacaagatctggagagagcactgcgaggacgaggagaccctgtgcgagtacgccgtggccatgaagaacctggccgacaaccactgggccaagacctgcgagggcgagggcagaatcgagtggtgctgcagcgtgtgcagagagtacttccagaacggcggcaagagaaaggccctggagaaggacgagaagagagccgtgctggccaccaagaccacccccgccctgaacatgcacgagagcagccagctggagggccacctgaccaacctgagcttcaccaaccccgagttcatcaccgagctgctgcaggccagcggcaagatcagactgctggacgtgggcagctgcttcaaccccttcctgaagttcgaggagttcctgaccgtgggcatcgacatcgtgcccgccgtggagagcgtgtacaagtgcgacttcctgaacctgcagctgcagcagcccctgcagctggcccaggacgccatcgacgccttcctgaagcagctgaagaaccccatcgacagcctgcccggcgagctgttccacgtggtggtgttcagcctgctgctgagctacttccccagcccctaccagagatggatctgctgcaagaaggcccacgagctgctggtgctgaacggcctgctgctgatcatcacccccgacagcagccaccagaacagacacgccatgatgatgaagagctggaagatcgccatcgagagcctgggcttcaagagattcaagtacagcaagttcagccacatgcacctgatggccttcagaaagatcagcctgaagaccaccagcgacctggtgagcagaaactaccccggcatgctgtacatcccccaggacttcaacagcatcgaggacgaggagtacagcaaccccagctgctacgtgagaagcgacatcgaggacgagcagctggcctacggcttcaccgagctgcccgacgccccctacgacagcgacagcggcgagagccaggccagcagcatccccttctacgagctggaggaccccatcctgctgctgagctag

SEQ ID NO: 243905 - DNA, 1059 bp, Artificial Sequence
  derived and/or modified sequence
atgggcgacttcgacaagatctggagagagcactgcgaggacgaggagaccctgtgcgagtacgccgtggccatgaagaacctggccgacaaccactgggccaagacctgcgagggcgagggcagaatcgagtggtgctgcagcgtgtgcagagagtacttccagaacggcggcaagagaaaggccctggagaaggacgagaagagagccgtgctggccaccaagaccacccccgccctgaacatgcacgagagcagccagctggagggccacctgaccaacctgagcttcaccaaccccgagttcatcaccgagctgctgcaggccagcggcaagatcagactgctggacgtgggcagctgcttcaaccccttcctgaagttcgaggagttcctgaccgtgggcatcgacatcgtgcccgccgtggagagcgtgtacaagtgcgacttcctgaacctgcagctgcagcagcccctgcagctggcccaggacgccatcgacgccttcctgaagcagctgaagaaccccatcgacagcctgcccggcgagctgttccacgtggtggtgttcagcctgctgctgagctacttccccagcccctaccagagatggatctgctgcaagaaggcccacgagctgctggtgctgaacggcctgctgctgatcatcacccccgacagcagccaccagaacagacacgccatgatgatgaagagctggaagatcgccatcgagagcctgggcttcaagagattcaagtacagcaagttcagccacatgcacctgatggccttcagaaagatcagcctgaagaccaccagcgacctggtgagcagaaactaccccggcatgctgtacatcccccaggacttcaacagcatcgaggacgaggagtacagcaaccccagctgctacgtgagaagcgacatcgaggacgagcagctggcctacggcttcaccgagctgcccgacgccccctacgacagcgacagcggcgagagccaggccagcagcatccccttctacgagctggaggaccccatcctgctgctgagctag

SEQ ID NO: 243906 - DNA, 3981 bp, Artificial Sequence
  derived and/or modified sequence
aatcagtttgcacttttgggtgagggtccacctccaaggctgtcgctccggttcctctgcctcctctggctgctgcctccgcagctccctcctcctaccccacctcctccatctggggagcgtctgcgggggcctgaggggcggcggcggcggcggcggctgcgatatggagccaggggccggcggccgaaatactgctcgtgcgcagagggccgggtccccgaacactccgccgccccgggagcaggagcggaaactggagcaggagaagctctccggtgtggtgaagagcgtccaccggcggctccgcaagaagtaccgagaagtgggagattttgataagatctggcgagaacactgtgaggatgaagaaactctttgtgaatatgccgttgcaatgaaaaatttggcagataatcattgggcaaaaacttgtgagggcgaaggtcgtattgaatggtgttgtagtgtatgcagagaatatttccaaaatggtgggaagagaaaagcacttgagaaagatgaaaaaagagctgtacttgccactaagaccactccagccttaaatatgcatgagtcttctcaacttgaaggtcatttaaccaacctcagctttacaaaccctgaatttataactgagttgctacaagcctcaggaaaaatcagattacttgatgttggcagctgctttaacccatttctgaagtttgaagaatttctaactgttggcatagatattgtacctgctgtagagagtgtctataaatgtgatttcctgaacttacagcttcagcaaccactccagcttgcacaggatgctatagatgcttttttgaagcagctgaaaaaccctattgattctcttcctggagagcttttccatgtggttgttttctctctccttctttcttattttccatctccttaccagcgatggatttgctgcaagaaagcccatgaactgttagtgttaaatggtttattactaatcatcacacctgattcctcccatcagaaccgtcatgctatgatgatgaaaagctggaagattgctatagagtccctgggctttaaacgcttcaagtactcaaaattttcacatatgcatctgatggcatttaggaaaatctctctaaaaaccacaagtgacttggttagtaggaactacccaggaatgttatatattcctcaagatttcaacagtatagaagatgaggaatattctaacccttcctgctatgttcgatcagatatagaagatgaacaactagcatatggtttcacagaactccctgatgcgccatatgactcagattctggagaaagtcaagccagctctattcctttctatgagctagaagaccccatattacttttaagttaatatagaagcaaaaagcccctttcagtccaggctcctaaactaattgcttacaccaattggaaatactaacatgaactcagtactgaaaacctggtttgcataaaagaaatgcagaggtttacagagtttgctatttttttctacttctcaattttaaaatttattcttatatagaaagcttaaagtttcatgcagagtgactcatgtcatagcagaaactactgttactttagcatttagcactatcatagaaaggtacctttttctctttagtgctattgtgaaaacaagcataatttgctatatgttttccttttcaacttttcagtgttgactataaaccattgaatggaaaactttaagatgtagaaagctgtagattgcactttgatgactcacaagttaaatgtgatacagaaaaatagatcggttagttgttttgtgatgcacttatctttttcttttttctaactaaaattgtgatgttacagaaagtcattttatgttccttttttgtctgatgatccaatatttactgaactttttgtaattggtgataattctttttatttcttccttatattaaaagctcatttgacagcatcagacattgggggagagatgtcccccaaagtgtgtattctaattttattagccctatccaataaacaccattgccaaagtagtattttcataactttcttgttgatttgggccttggtgtgaagtatatttacctgagagttcacttttacttttcttaaacttaggcttcatttacaaaatgttttatttaagcaaggaacaatgtaatactcaataatgacctaaaacacctttttgaaagggtttgcacttggaagagagtttatgttctgttgaaaccaactttgatagggtcctcacctttccgttaaggaggtgccgcactacaagtttcaaattatatggaaaaacctaaaattaaccctctgttggtgatctcataaaatggttttgaccttttggtatcttaatttctatctaaactttatcagaaaattttctttgaatatatcaattagttggctgtgggaattttccctttccacattaataaatgcctttctgtgtttctgaatcagaagcaaatgattagggaaaaatatatgtccaaacaagacaagattagtttaaacagttaagaacatttagtccacattgtcttgtcagccagcaattgtcatggaagctatcatttttaagagtgccactgtgtggatttttttttcaagtggttattacattaaaattacctcatactgaggtttttgcactgaaatatcacagtttcagatttcatggttaatgttgtgcgtatgtttgtatgtttttaaaggaaacttgcattttcaatagttgatcctaaatttcataaactgcacttctttactctggtaaagctgatgtttttgtgcttattgtgaattgccgtagtacctttgaatgtcaaactttatttagaaatataaaacttatcctttatgatataaatggttgagtgtatgtacccagtatttctaattaaatttcacatgctaaattaatgaaagtaacaagattgtaattttttaaagtcagttgattaaatgcaataaatattggttgctcaaatatgccacaaataactcgaaatttttcatttactttcaacagcataagattctttaatatttaggattgactgttctttccagttaagcactgaaggattatgtcttgtagcttccccaagagaaggggaaggaaaaaaaagcactatgttaaggataatacagaactcttttgaactattttggtagtaccttttaccatactgtttgctttttgatttgggtaaatatcttaagagcaaagaaaacaatacaccaaatgaaaatgctttgaaagtaaatgaaaacagcgcttttgaaaggctggtatagtatgaccctggagtcagcctttgtgttacagcgaaaatgttggtgctataaattctgattgtttacagatgttgattctgcttatgctccaaagtgtgcatgatgtattttacgtagtactctgaggaagtctctttataaaacctactaccacttagtataaatttgtttgaatttatatcatttgttactgtaaattcagcttattccaattaggttggcacagatttaaactgatacacattccacaaaaaccaattcagtgtataagtattgaagtataagcagtcattgcagcttgatgccagatcatgtatgtaataacaagtggaagttaatagggccttctaatactgtatgggtactcctaagaattatttcattttggatataaagaagttatgaggcctcctgtcacattcacagctggttctccaaaataatttggttgtttcaaaaacaaatggtaatcatttggttggattcttcagtatcatgactagatcatgtggttttaccatagttgccaagtggtgggaggtagcatacctgaaaatgtacgtgtgtgtttgttgtattttttcacattttgtgaacaaagcacatttattaaaaattttaaattttctagta

SEQ ID NO: 243907 - DNA, 1298 bp, Artificial Sequence
  derived and/or modified sequence
gggcctgaggggcggcggcggcggcggcggcggctccgcaagaagtaccgagaagtgggctttaaacacagctgctttaaaattttgaccaagtccaagaccttaagaaactttgaacagattcttttctcaatgggagattttgataagatctggcgagaacactgtgaggatgaagaaactctttgtgaatatgccgttgcaatgaaaaatttggcagataatcattgggcaaaaacttgtgagggcgaaggtcgtattgaatggtgttgtagtgtatgcagagaatatttccaaaatggtgggaagagaaaagcacttgagaaagatgaaaaaagagctgtacttgccactaagaccactccagccttaaatatgcatgagtcttctcaacttgaaggtcatttaaccaacctcagctttacaaaccctgaatttataactgagttgctacaagcctcaggaaaaatcagattacttgatgttggcagctgctttaacccatttctgaagtttgaagaatttctaactgttggcatagatattgtacctgctgtagagagtgtctataaatgtgatttcctgaacttacagcttcagcaaccactccagcttgcacaggatgctatagatgcttttttgaagcagctgaaaaaccctattgattctcttcctggagagcttttccatgtggttgttttctctctccttctttcttattttccatctccttaccagcgatggatttgctgcaagaaagcccatgaactgttagtgttaaatggtttattactaatcatcacacctgattcctcccatcagaaccgtcatgctatgatgatgaaaagctggaagattgctatagagtccctgggctttaaacgcttcaagtactcaaaattttcacatatgcatctgatggcatttaggaaaatctctctaaaaaccacaagtgacttggttagtaggaactacccaggaatgttatatattcctcaagatttcaacagtatagaagatgaggaatattctaacccttcctgctatgttcgatcagatatagaagatgaacaactagcatatggtttcacagaactccctgatgcgccatatgactcagattctggagaaagtcaagccagctctattcctttctatgagctagaagaccccatattacttttaagttaatatagaagcaaaaagcccctttcagtccaggctcctaaactaattgcttacaccaattggaaatactaacatgaactcagtactgaaaacctggtttgcataaaaga

SEQ ID NO: 243908 - DNA, 1218 bp, Artificial Sequence
  derived and/or modified sequence
atggagcccggggccggcggtagaaacacggcgcgagcccagcgggctgggtctcctaacacccccccaccaagggagcaggagcgaaagctagagcaggaaaagctgtccggagtcgttaagtccgtgcaccgaagactgaggaaaaagtatcgcgaagttggggacttcgacaaaatctggcgcgagcattgcgaagacgaggagaccctgtgtgagtacgccgtcgccatgaaaaatcttgccgataatcactgggccaagacctgtgagggtgagggtcggatcgagtggtgctgcagcgtctgtcgggaatacttccagaatgggggcaagagaaaggctttagagaaggacgaaaaaagagcagtccttgccaccaagacaactcccgcgctgaatatgcatgagtcttcccaactggaaggccacctgacaaacttgtcctttaccaacccagaatttatcacagagctcctccaggcgagcggcaagatccgcctgcttgacgtggggtcctgttttaacccgttccttaagttcgaggaattcctgacagtagggatcgatatcgtgccagcagtggagagtgtgtacaagtgcgatttcttaaacctgcaactgcagcaacctctgcagctggctcaggacgcaatcgacgccttcctgaagcagctgaagaatccaatcgacagtttacccggagaacttttccatgtcgtcgtgttcagtctgctcctgtcgtattttccaagcccgtaccagcgctggatttgttgtaagaaagcccacgagttgctcgtactaaacgggctgttgttgattatcacacctgactcctctcaccagaaccggcacgccatgatgatgaaaagctggaaaatcgccattgagagcctaggcttcaagcgttttaagtactccaagttttctcacatgcaccttatggcattccgcaaaattagcctaaagactacctccgacctagtgtcgcgcaattatcccggcatgttgtacattcctcaggactttaatagcatagaggacgaagaatacagcaatccatcctgctatgttcggagcgacatcgaagatgaacagctggcgtatgggtttaccgagttaccagacgccccttacgacagcgattcgggagaatcacaggcctcatcaattcctttctatgagctggaggaccccattctcttgctgtcgtag

SEQ ID NO: 243909 - DNA, 1059 bp, Artificial Sequence
  derived and/or modified sequence
atgggtgacttcgacaaaatctggcgggagcattgtgaggacgaggaaacactgtgcgagtacgctgtggctatgaagaatctggcagacaatcattgggcaaaaacctgcgaaggtgaaggtagaattgagtggtgttgtagcgtctgtagagaatattttcagaatggcgggaagcggaaagccttggagaaagatgagaagcgcgccgtgctcgcaacgaagacgacacccgccctcaacatgcatgagtccagtcagctggaaggacatttaaccaacctcagtttcaccaatcccgaattcattactgaacttttacaggcatcaggaaagatacgtttactggacgtggggtcctgcttcaatccgttcctgaagtttgaggagtttctcacagtgggtatcgacattgttcccgctgtggagtcagtgtacaaatgtgatttcctaaatctacaacttcagcaacccctgcagctggcccaagatgctatcgacgctttcttaaagcagctaaagaatcctatcgactcacttccgggagagctcttccatgtggtggtgttttctctcctcctgtcctactttcctagtccctatcagcggtggatttgctgcaagaaagctcacgagttgctagtgctaaatgggttgctgcttatcatcacccctgattcctcgcaccaaaacaggcatgccatgatgatgaaaagttggaagatcgcaattgaatccctgggctttaaaagattcaaatatagtaagttctcccacatgcacctgatggccttccgaaaaatatccttgaagactacctcagaccttgtgtctcgaaattacccaggcatgctctacattcctcaggatttcaactccattgaagacgaggagtactctaacccttcctgctatgtgagaagtgatatcgaagacgaacagttggcctatggcttcactgaactgccagacgctccttacgatagcgacagcggggagagccaggccagtagcatacccttttatgagctggaagaccctatcctgctcttgtcctag

SEQ ID NO: 243910 - DNA, 1218 bp, Artificial Sequence
  derived and/or modified sequence
atggagcctggagctgggggcaggaacacagcccgggcccagagagctggcagccccaacaccccaccaccccgggagcaggagaggaagctggagcaggagaagctgtctggagtggtgaagtctgtgcaccggcggctgaggaagaagtaccgggaggtgggggactttgacaagatctggagggagcactgtgaagatgaggagaccctgtgtgaatatgctgtggccatgaagaacctggccgacaaccactgggccaagacctgtgagggggagggccgcatcgagtggtgctgcagcgtgtgccgggagtacttccagaatggaggcaagaggaaggccctggagaaggatgagaagagagctgtgctggccaccaagaccaccccagccctgaacatgcatgagagcagccagctggagggccacctgaccaacctgtccttcaccaaccctgagttcatcacagagctgctgcaggccagcggcaagatccggctgctggatgtgggcagctgcttcaaccccttcctgaagtttgaggagttcctgactgtgggcattgatattgtgcctgctgtggagagcgtgtacaagtgtgacttcctgaacctgcagctgcagcagcccctgcagctggcccaggatgccattgatgccttcctgaagcagctgaagaaccccatcgacagcctgcccggggagctgttccacgtggtggtgttcagcctgctgctgagctacttccccagcccctaccagcgctggatctgctgcaagaaggcccacgagctgctggtgctgaatggcctgctgctgatcatcaccccagacagcagccaccagaacagacatgccatgatgatgaagtcctggaagatcgccatcgagagcctgggcttcaagcgcttcaagtacagcaagttcagccacatgcacctgatggccttcaggaagatcagcctgaagaccaccagtgacctggtgtccaggaactacccaggcatgctgtacatcccccaggacttcaacagcattgaagatgaggagtacagcaaccccagctgctacgtgcggagtgacattgaagatgagcagctggcctacggcttcacagagctgcctgatgccccctatgacagcgacagcggggagagccaggccagcagcatccccttctatgagctggaggaccccatcctgctgctgtcctag

SEQ ID NO: 243911 - DNA, 1059 bp, Artificial Sequence
  derived and/or modified sequence
atgggagactttgacaagatctggagggagcactgtgaagatgaggagaccctgtgtgaatatgctgtggccatgaagaacctggccgacaaccactgggccaagacctgtgagggggagggcagaattgagtggtgctgcagcgtgtgccgggagtacttccagaatggaggcaagaggaaggccctggagaaggatgagaagagagctgtgctggccaccaagaccaccccagccctgaacatgcatgagagcagccagctggagggccacctgaccaacctgtccttcaccaaccctgagttcatcacagagctgctgcaggccagcggcaagatccggctgctggatgtgggcagctgcttcaaccccttcctgaagtttgaggagttcctgactgtgggcatcgacatcgtgcctgctgtggagagcgtgtacaagtgtgacttcctgaacctgcagctgcagcagcccctgcagctggcccaggatgccattgatgccttcctgaagcagctgaagaaccccatcgacagcctgcctggagagctgttccacgtggtggtgttcagcctgctgctgagctacttccccagcccctaccagcgctggatctgctgcaagaaggcccacgagctgctggtgctgaatggcctgctgctgatcatcaccccagacagcagccaccagaacagacatgccatgatgatgaagtcctggaagatcgccatcgagagcctgggcttcaagcgcttcaagtacagcaagttcagccacatgcacctgatggccttcaggaagatcagcctgaagaccaccagtgacctggtgtccaggaactacccaggcatgctgtacatcccccaggacttcaacagcattgaagatgaggagtacagcaaccccagctgctacgtgcggagtgacattgaagatgagcagctggcctacggcttcacagagctgcctgatgccccctatgacagcgacagcggggagagccaggccagcagcatccccttctatgagctggaggaccccatcctgctgctgtcctag

SEQ ID NO: 243912 - DNA, 1218 bp, Artificial Sequence
  derived and/or modified sequence
atggagcccggcgccggcggccggaacaccgcccgggcccagcgggccggaagtccaaatacacctccaccccgagagcaggaacgtaagctggaacaggagaaactgtcaggcgtggttaagtctgtgcaccgccggctccgcaaaaagtaccgcgaagtgggagacttcgataagatatggagagaacactgcgaggacgaggagactctttgcgagtatgccgtcgctatgaagaatctcgcagacaaccactgggcaaagacgtgtgagggagaaggccgtatagaatggtgttgctcagtatgtcgggagtacttccaaaatggcggcaaacgtaaggctctcgagaaggatgagaagagggccgttctcgcaaccaagacgacgcctgccctaaatatgcatgagtctagtcagcttgaaggccacctgaccaacctgtcgttcaccaatccagaattcataacggagctcctgcaggcttccgggaaaattaggctcctcgatgtgggcagttgttttaacccatttctcaagtttgaggagtttcttacggtggggattgacattgtgcccgcagttgagagtgtgtataagtgtgatttcctgaacctgcaattacagcagccactgcagctggcccaggacgccattgatgcctttttaaaacaattaaaaaacccgatcgactccttgcctggagagctgtttcatgttgttgtgttcagtctcctactgagttattttccctcaccataccagaggtggatatgctgcaagaaagctcacgaactgctcgtgctgaatgggcttctcctgataatcactcctgacagctcccatcagaatcggcacgctatgatgatgaagtcatggaaaattgccatcgagagcctggggttcaaacggtttaaatacagcaagttcagccacatgcatctcatggctttccgtaagattagcttgaagaccacttctgatttggtgtccagaaattaccccggaatgctgtatatcccccaagattttaacagcatcgaggacgaggagtattctaatccctcctgctacgtgcgctccgatatcgaggacgaacagttagcctacgggtttaccgaattgccagatgcaccctatgacagcgattctggtgaatcacaggcttcaagtatcccattttacgaactggaggatcccattctcctactcagctag

SEQ ID NO: 243913 - DNA, 1059 bp, Artificial Sequence
  derived and/or modified sequence
atgggcgacttcgacaagatctggcgggagcactgcgaggacgaggaaaccttatgtgagtatgcagttgccatgaagaacttagcagacaatcactgggcgaagacgtgcgaaggagagggaagaattgagtggtgctgtagcgtgtgccgggagtacttccaaaatgggggtaaaagaaaggccctcgaaaaagacgaaaagagagcagtcctggcaaccaaaacaactccagctttgaacatgcacgaaagctcacagctagaaggacatctgacaaacctatctttcaccaaccctgagtttatcaccgagttattacaggccagtggtaagataagactgctggacgtaggcagttgtttcaacccctttctcaagttcgaagagtttctcacagttgggatcgatatcgtacctgccgtggagtctgtttataagtgtgactttctgaatctgcagttgcagcaacctctacagctggctcaggatgccattgacgctttcctgaagcaactgaagaaccctatcgactccctgccgggggaactctttcatgtggtggtctttagcctgctgctttcctattttccatctccctaccagcgatggatatgttgtaaaaaagctcacgaactgctagtgctcaatgggcttttattgatcatcactccagactcatcacaccagaaccgacacgctatgatgatgaaaagctggaagatcgcaattgagtccctgggattcaagagatttaaatactcgaagttctctcatatgcatctgatggcattccggaagattagtttaaagacaacatctgacttggtcagccgcaattacccaggaatgctgtatattccgcaggacttcaattccatcgaggacgaagaatatagtaatccaagctgctatgtgcgcagcgacatagaggatgagcagctcgcatatggatttaccgagctccctgacgcaccttatgactccgacagcggcgaaagccaggctagctccatccccttctatgagctcgaggaccccattttactgttgtcatag

SEQ ID NO: 243914 - DNA, 1218 bp, Artificial Sequence
  derived and/or modified sequence
atggagcctggcgctggtgggcgtaacactgctagggcccaaagagcgggaagtcctaacacaccacctcccagagaacaagaacgaaagctcgaacaagagaagctttctggagtcgtcaagagcgtgcatagaagactgcggaagaaatatcgtgaggtaggggatttcgacaagatttggagagaacactgcgaagatgaagagacactgtgcgagtacgcagtggcaatgaaaaacttggctgataatcactgggccaaaacctgtgagggagaagggaggatcgagtggtgttgctccgtgtgtcgggagtactttcagaatggaggaaaaaggaaagcactggaaaaggatgaaaagagagccgtgcttgctaccaagacaacacccgcattgaatatgcacgaatcgtcccagttagaagggcacctgacgaatctgtcctttaccaatcccgaatttatcactgagcttctccaagccagtggcaagataagactcctcgacgtgggatcttgttttaacccatttttgaaattcgaggagtttctgacagtcggaatcgatattgtacccgctgtcgagagcgtctataagtgtgacttcttgaacctgcagttacagcagccgctccagcttgcacaggacgccattgacgcattcctgaagcagctaaaaaacccaatcgatagcctgcccggagagctgtttcacgtggtagtgttctctctgctgctatcatattttccgtccccatatcaaaggtggatatgttgcaagaaggcccatgagctcctggttctgaacggcttactcctgatcataactcccgattcatcccaccagaacaggcacgccatgatgatgaagagctggaaaattgcaattgaaagtttgggattcaagagattcaaatattccaagttctcacacatgcacttgatggctttccgcaagatcagcctaaagacgactagcgacctggtgagccggaactatcctgggatgctatacattcctcaggatttcaacagcatagaggacgaggaatactccaatccatcatgctatgtcagaagcgatattgaggacgaacagcttgcttatggatttaccgagctcccggatgccccatacgacagcgactctggggaatcacaggcctcctccatccccttttatgagctggaggacccgatcctattattaagctag

SEQ ID NO: 243915 - DNA, 1059 bp, Artificial Sequence
  derived and/or modified sequence
atgggcgacttcgataagatttggagagagcactgcgaggatgaggagactctctgtgagtacgccgtagccatgaaaaatctggccgacaatcattgggcaaagacatgtgagggcgagggaaggattgaatggtgctgttccgtgtgcagagaatatttccagaacggtggtaaacggaaagcactcgagaaagatgagaaacgcgcagtactcgctaccaaaacgacccctgctctgaatatgcatgagtcctcccagttggagggacatctcaccaacctctctttcacaaacccagagttcataacagagctgcttcaagcctcagggaaaattagactgttagatgttgggagctgctttaacccattcctgaagttcgaggaattcctgactgttggtatcgacatcgtgccagccgtggagtcagtgtacaaatgtgattttctgaatctgcagctccagcaacctctgcagcttgcacaagatgcgatcgatgcttttctcaagcaattgaaaaatcccatcgattctctcccgggtgagctgttccacgttgttgtcttcagtttgctgctgtcttattttccttcaccataccagcggtggatatgttgtaagaaggcacacgaactgttggtccttaacgggttgcttcttatcataacccctgatagctcccatcagaaccgccacgctatgatgatgaaatcctggaaaattgccattgaatctcttggtttcaaaaggttcaagtactccaaattcagccatatgcacctcatggcttttcggaaaatctcccttaaaaccaccagcgacctggttagtaggaactaccctgggatgctgtatatccctcaggactttaactctatagaagatgaggagtacagtaatccaagttgctacgtcagatccgatattgaggacgagcaactagcatatggcttcacggagcttcctgatgctccatatgactcggacagtggagagtcgcaggcttccagcattcccttttatgaattggaagacccgattctcctcctaagttag

SEQ ID NO: 243916 - protein, 644 aa, Artificial Sequence
  derived and/or modified sequence
MAEAVAAPISPWTMAATIQAMERKIESQAARLLSLEGRTGMAEKKLADCEKTAVEFGNQLEGKWAVLGTLLQEYGLLQRRLENVENLLRNRNFWILRLPPGSKGESPKEWGKLEDWQKELYKHVMRGNYETLVSLDYAISKPEVLSQIEQGKEPCNWRRPGPKIPDVPVDPSPGSGPPVPAPDLLMQIKQEGELQLQEQQALGVEAWAAGQPDIGEEPWGLSQLDSGAGDISTDATSGVHSNFSTTIPPTSWQTDLPPHHPSSACSDGTLKLNTAASTEDVKIVIKTEVQEEEVVATPVHPTDLEAHGTLFGPGQATRFFPSPAQEGAWESQGSSFPSQDPVLGLREPARPERDMGELSPAVAQEETPPGDWLFGGVRWGWNFRCKPPVGLNPRTGPEGLPYSSPDNGEAILDPSQAPRPFNEPCKYPGRTKGFGHKPGLKKHPAAPPGGRPFTCATCGKSFQLQVSLSAHQRSCGAPDGSGPGTGGGGSGSGGGGGGSGGGSARDGSALRCGECGRCFTRPAHLIRHRMLHTGERPFPCTECEKRFTERSKLIDHYRTHTGVRPFTCTVCGKSFIRKDHLRKHQRNHAAGAKTPARGQPLPTPPAPPDPFKSPASKGPLASTDLVTDWTCGLSVLGPTDGGDM

SEQ ID NO: 243917 - DNA, 1935 bp, Artificial Sequence
  derived and/or modified sequence
atggccgaggccgtggccgcccccatcagcccctggaccatggccgccaccatccaggccatggagagaaagatcgagagccaggccgccagactgctgagcctggagggcagaaccggcatggccgagaagaagctggccgactgcgagaagaccgccgtggagttcggcaaccagctggagggcaagtgggccgtgctgggcaccctgctgcaggagtacggcctgctgcagagaagactggagaacgtggagaacctgctgagaaacagaaacttctggatcctgagactgccccccggcagcaagggcgagagccccaaggagtggggcaagctggaggactggcagaaggagctgtacaagcacgtgatgagaggcaactacgagaccctggtgagcctggactacgccatcagcaagcccgaggtgctgagccagatcgagcagggcaaggagccctgcaactggagaagacccggccccaagatccccgacgtgcccgtggaccccagccccggcagcggcccccccgtgcccgcccccgacctgctgatgcagatcaagcaggagggcgagctgcagctgcaggagcagcaggccctgggcgtggaggcctgggccgccggccagcccgacatcggcgaggagccctggggcctgagccagctggacagcggcgccggcgacatcagcaccgacgccaccagcggcgtgcacagcaacttcagcaccaccatcccccccaccagctggcagaccgacctgcccccccaccaccccagcagcgcctgcagcgacggcaccctgaagctgaacaccgccgccagcaccgaggacgtgaagatcgtgatcaagaccgaggtgcaggaggaggaggtggtggccacccccgtgcaccccaccgacctggaggcccacggcaccctgttcggccccggccaggccaccagattcttccccagccccgcccaggagggcgcctgggagagccagggcagcagcttccccagccaggaccccgtgctgggcctgagagagcccgccagacccgagagagacatgggcgagctgagccccgccgtggcccaggaggagaccccccccggcgactggctgttcggcggcgtgagatggggctggaacttcagatgcaagccccccgtgggcctgaaccccagaaccggccccgagggcctgccctacagcagccccgacaacggcgaggccatcctggaccccagccaggcccccagacccttcaacgagccctgcaagtaccccggcagaaccaagggcttcggccacaagcccggcctgaagaagcaccccgccgccccccccggcggcagacccttcacctgcgccacctgcggcaagagcttccagctgcaggtgagcctgagcgcccaccagagaagctgcggcgcccccgacggcagcggccccggcaccggcggcggcggcagcggcagcggcggcggcggcggcggcagcggcggcggcagcgccagagacggcagcgccctgagatgcggcgagtgcggcagatgcttcaccagacccgcccacctgatcagacacagaatgctgcacaccggcgagagacccttcccctgcaccgagtgcgagaagagattcaccgagagaagcaagctgatcgaccactacagaacccacaccggcgtgagacccttcacctgcaccgtgtgcggcaagagcttcatcagaaaggaccacctgagaaagcaccagagaaaccacgccgccggcgccaagacccccgccagaggccagcccctgcccaccccccccgccccccccgaccccttcaagagccccgccagcaagggccccctggccagcaccgacctggtgaccgactggacctgcggcctgagcgtgctgggccccaccgacggcggcgacatgtag

SEQ ID NO: 243918 - DNA, 1935 bp, Artificial Sequence
  derived and/or modified sequence
atggctgaagccgtggccgcgcccatcagtccatggactatggcagcgacaatccaagccatggagaggaaaatcgagtcccaggccgcccggttgcttagtctggaaggtaggactgggatggccgagaaaaagttggccgactgtgaaaagacagctgtcgaatttggtaaccaattagagggcaagtgggccgtcctcggcactttgctgcaggaatacggtcttctgcagcggcgactggagaatgttgaaaacctcctgcgcaataggaatttttggatccttcgcttaccccccggaagtaagggcgagtctcctaaagagtggggcaagctcgaagactggcagaaggaactgtataagcatgtcatgcgtggaaactatgagaccctcgtttctttggattacgctatttcaaagcccgaggtactctctcagatcgaacaaggcaaggagccctgtaattggcggcgcccaggtcccaagattcctgatgtccctgttgacccttctccaggttcaggacctcctgtaccagcgcctgacctgctcatgcagattaagcaggagggcgaattgcaattgcaggagcaacaggcactgggcgtcgaagcttgggccgcaggccagccggatatcggcgaggagccttggggcctgagccaactggatagtggagccggcgacatcagcactgacgctacaagtggcgtacacagtaattttagcacaacaatccctcccacctcctggcagacagacctgccaccacaccatccaagttcagcttgctcggacggcacccttaagctgaacacagccgcttcaaccgaggacgtcaaaatcgtcatcaaaacagaggtccaggaggaggaagtcgtggccactccagtacatccaacagatctcgaagcccacggcacccttttcggccccggtcaagcgactcgtttcttcccttcacctgctcaggagggcgcatgggagtcccagggatcctcattcccctctcaggaccccgtgcttggcctgagagaaccggcccgcccagagagagatatgggagagctgagcccagccgtggcgcaagaggagactccgcccggtgattggctctttggaggagtgaggtggggctggaactttcgatgtaaacccccagtaggtctgaacccgcgcactgggccggaagggctgccttacagcagcccagataatggtgaagccatattggaccctagtcaggcgccgaggccttttaatgagccctgtaaatacccaggccgcacaaaaggctttggccataagccaggtctgaagaaacatcctgcggccccgccaggcggccggccgtttacatgcgccacctgtggtaagtcctttcaactccaagtttcgctatctgctcatcagaggtcctgtggggctcctgacgggagcgggcctggaaccggtggtggcggaagcggttcaggaggcggcggaggtggctccggcggaggctctgccagggatgggtctgcactgcgctgtggagagtgtggcaggtgcttcacccgtcccgctcatttgattagacataggatgctgcatactggagagcgaccctttccatgtaccgagtgcgagaagagattcactgagcgttctaagttaattgaccactataggacacacactggcgtaagaccgttcacatgcacagtctgtggcaaatccttcatcagaaaggaccatctcagaaagcaccaacgaaatcatgccgcaggagctaagactccggccagaggtcagcctctccccacccctcccgcacctcctgacccattcaagagcccagccagcaaaggccctctcgccagcactgatctggttaccgattggacatgtggactctctgtgttgggccccaccgatgggggcgatatgtag

SEQ ID NO: 243919 - DNA, 1935 bp, Artificial Sequence
  derived and/or modified sequence
atggccgaggccgtggccgcccccatcagcccctggaccatggccgccaccatccaggccatggagaggaagattgagagccaggccgcccggctgctgagcctggagggccgcacaggcatggccgagaagaagctggccgactgtgagaagacagctgtggagtttggaaaccagctggagggcaagtgggccgtgctgggcaccctgctgcaggagtatggcctgctgcagaggcggctggagaatgtggagaacctgctgaggaacagaaacttctggatcctgcggctgcccccaggcagcaaaggagagagccccaaggagtggggcaagctggaggactggcagaaggagctgtacaagcacgtgatgaggggcaactatgagaccctggtgtccctggactatgccatcagcaagccagaggtgctgagccagatcgagcagggcaaggagccctgcaactggaggcggcccggccccaagatcccagatgtgcctgtggaccccagccctggcagcggcccccctgtgcctgccccagacctgctgatgcagatcaagcaggagggggagctgcagctgcaggagcagcaggccctgggcgtggaggcctgggccgccggccagcctgacatcggggaggagccctggggcctgagccagctggacagcggggccggggacatcagcacagatgccaccagcggcgtgcacagcaacttcagcaccaccatcccccccacctcctggcagacagacctgcccccccaccaccccagcagcgcctgcagtgatggcaccctgaagctgaacacagctgccagcacagaagatgtgaagatcgtcatcaagacagaggtgcaggaggaggaggtggtggccacccctgtgcaccccacagacctggaggcccacggcaccctgtttggacctggccaggccacccgcttcttccccagccctgcccaggagggcgcctgggagagccagggcagcagcttccccagccaggaccctgtgctgggcctgcgggagcccgcccggcctgagcgggacatgggagagctgagccctgctgtggcccaggaggagaccccacctggggactggctgtttggaggagtgcgctggggctggaacttccgctgcaagccccctgtgggcctgaaccccaggactggacctgagggcctgccctacagcagcccagacaatggagaggccatcctggaccccagccaggccccccggcccttcaatgagccctgcaagtacccaggccgcaccaagggcttcggccacaagccaggcctgaagaagcaccctgctgcccctcctgggggccggcccttcacctgtgccacctgtgggaagagcttccagctgcaggtgtccctgagcgcccaccagaggagctgtggggccccagatggcagcggccctggcactggaggcggcggcagcggcagcggcggcggcggcggcggcagcggcggcggcagcgccagagatggcagcgccctgcgctgtggggagtgtggccgctgcttcaccaggcctgcccacctgatccgccacaggatgctgcacactggagagcggcccttcccctgcacagaatgtgagaagcgcttcacagagaggagcaagctgattgaccactaccgcacccacactggagtgcggcccttcacctgcaccgtgtgtgggaagagcttcatcaggaaggaccacctgaggaagcaccagaggaaccacgccgccggggccaagaccccagcccggggccagcccctgcccaccccaccagcccccccagaccccttcaagagccctgccagcaagggccccctggccagcacagacctggtgacagactggacctgtggcctgtctgtgctgggccccacagatggaggagacatgtag

SEQ ID NO: 243920 - DNA, 1935 bp, Artificial Sequence
  derived and/or modified sequence
atggccgaggccgtggccgcccccatcagcccctggaccatggccgcaaccatccaagcaatggagagaaagatagaaagccaggctgccagactcctgtcgctcgaaggcagaactggcatggccgaaaagaaactggctgactgtgaaaaaaccgcggtcgaatttggaaaccagttggagggaaaatgggccgtactaggcactctgcttcaggagtacggcctgctgcagaggagactcgaaaacgttgagaatctgctgcgtaacagaaacttctggatcctcaggctgccccctgggtccaagggagagagccccaaagaatggggcaagttggaggattggcaaaaggaactgtataagcatgttatgagaggtaattacgaaacattggtttccctagactacgccatttccaagccagaagtgctgagtcagatcgagcaggggaaggaaccttgcaactggaggcgccccggacccaaaattcctgatgtgccagtggacccatccccgggatcgggccctcccgtacctgccccagaccttctcatgcagattaagcaggagggggagctacaactccaggagcagcaggcgttgggcgttgaagcttgggccgccggccagcctgacatcggagaagaaccgtggggattgagccagctcgactccggcgctggggatatcagcaccgatgctactagtggggtgcactcaaacttctctacaacaatccctcccacctcttggcagaccgatctgccccctcatcacccttccagtgcctgctccgacggtacgcttaagctcaatacagcggcgagcactgaggacgtgaaaatagttatcaagactgaagtccaggaggaggaagtcgtcgccacccccgtgcacccgactgatctggaagcccatggcacattgttcggtccaggacaggctacaagattttttccatcccctgcccaggagggcgcgtgggagagtcagggcagctcgttcccatcccaagacccggtgttgggactccgggaacctgcccgccctgagcgtgatatgggcgagctctcaccggccgtagcccaggaggaaacacctcccggtgactggctgtttggcggtgtaagatggggctggaactttagatgcaagcctccggtgggcctaaatcccagaaccgggcccgaggggctgccttatagctcccccgacaatggagaagcgattctggatccctcgcaagcaccaaggccatttaacgagccatgtaagtatcccgggagaactaaaggattcggccataagcccggtcttaagaagcaccctgccgccccgccagggggtcgcccctttacgtgtgctacatgcgggaaaagttttcagctacaggtgtcactgtcagctcaccaacgtagttgcggggcgcctgacggctcaggccccggcaccggcgggggcgggagtggatctgggggcggcggcggaggtagtgggggggggagtgcgcgcgacggatcagccctgagatgcggggaatgtggaaggtgctttaccagacctgcccatcttattagacacaggatgcttcacacgggggaacggccatttccgtgcactgagtgtgagaagcgtttcaccgaacggtccaagttgatcgaccactatcgcacacataccggcgtcagaccattcacctgcacggtatgcggtaaaagctttatccgcaaggatcacctgaggaaacaccagaggaatcatgccgctggggctaaaacacccgctcgtgggcagcccctgcccacaccacccgcccctcctgaccctttcaaatcgcctgcctcaaaaggaccacttgctagcaccgatttagtgacagactggacatgcgggctttctgttctgggccccacggacgggggagacatgtag

SEQ ID NO: 243921 - DNA, 1935 bp, Artificial Sequence
  derived and/or modified sequence
atggccgaggccgtggctgctccgatctctccctggactatggctgctaccatccaggccatggaacggaagattgagtcacaagccgctcgcctgctgtccctcgaaggccgaactgggatggctgagaagaagttagccgattgtgaaaagacagcagttgagtttgggaatcaactggaaggtaagtgggccgttctggggaccctgctgcaagagtacgggctcctgcagcggagactggaaaacgtcgaaaatctcctgcgtaaccgcaacttttggatcctgagattgccacctgggtccaaaggggagagcccgaaggagtgggggaaactggaggactggcaaaaggaactctacaagcacgtgatgcgcggaaactatgaaacccttgtgtcactcgactatgcaataagcaaacctgaagttctgtctcagattgaacaggggaaggaaccatgcaactggcggagacctggacccaagattccagatgtgcccgtggatcctagtcccggaagtggtcctcccgtgcccgcacccgacctgctcatgcagattaagcaagaaggggaactccaacttcaggagcagcaagcccttggggttgaggcttgggcagcgggacaacccgacatcggtgaagagccatggggcctgagccaactggattcaggagctggggacatcagtaccgacgcaacttccggcgttcactccaacttctccaccactattccaccaaccagctggcagacagatctgcctcctcatcatccctcctcagcatgttcagacggaacactgaaactgaatactgccgcttcaacagaggatgtcaaaattgtgattaagactgaagtccaggaggaggaggtggtggccacccccgtgcaccccacagacctagaagcgcacggtaccttatttggccctgggcaggctactcgatttttcccatccccggctcaagaaggggcttgggagtcacagggcagctcatttccatcccaggaccccgttcttgggctgagagaacctgcacgacccgagcgagatatgggcgagctgtctcccgctgtggctcaggaagaaacaccgcctggtgattggcttttcggtggcgttcgttggggttggaatttccggtgtaaaccacctgtagggttgaatcccaggaccggacctgaaggactgccatatagcagtccagacaatggagaggcaattctcgatccaagccaagctccacgtccttttaacgagccgtgcaagtaccccggacggacaaagggcttcggccacaaacccggtctcaaaaaacatcccgctgccccacccggtggcagaccattcacttgtgccacatgcggaaaatccttccagttacaagttagcctaagcgctcaccagcgatcctgcggagctcccgacgggtctggccctgggaccggcggaggcggatcagggtcagggggaggtggtggtggtagcgggggtggctccgccagagatggctccgctcttcggtgtggcgagtgtggaagatgcttcacaaggccggcacacctcatccgacatcggatgctgcacactggtgagcgacctttcccctgcacagagtgtgaaaagaggttcaccgagaggtccaagttaattgaccactatcgtacacacactggtgtgcggccttttacatgcacagtgtgtggaaagtctttcatcagaaaggaccatctgaggaagcatcaaagaaaccacgccgctggagctaagaccccagcacggggtcagccattgccgacgcccccagccccaccagatcccttcaaatcgccagcgtcaaaagggcctctggcttctactgacctggtgacggactggacttgtggactgagtgtcctcgggcctaccgacggaggcgacatgtag

SEQ ID NO: 243922 - DNA, 3806 bp, Artificial Sequence
  derived and/or modified sequence
gtggggctgtgcggccgcgctgcctccaggaagcctcacgggccttcgtctgccgggccgcggcgccggctcccaggatgcagtgtggaccggccgggcgctgacggaggcggcgcgactgcgggcggcgcggcgcaggggcagccagcgaggagcggcggcagaggaaaggccaggcaggcgccgcctgcggagagcaccgggcggccgggcctgcgtggtgccgcgcgcggcggcggcgacgacgacttcctccgggccgggcgggacagcgcagggccatggccgaggcggtcgcggctccgatttctccgtggacgatggcagccacgattcaggccatggagaggaagattgaatcgcaggctgctcgcctgctttccctagaaggtcgaaccgggatggccgagaagaagctggctgattgcgagaagacagccgtggagttcgggaaccagctggagggcaagtgggccgtgctggggaccctgctgcaggagtacgggctgctgcagaggcggctggagaacgtggagaacctgctgcgcaacaggaacttctggatcctgcggctgcccccgggcagcaagggggagtcccctaaggagtggggcaagctggaggactggcagaaggagctctacaagcacgtgatgaggggcaactacgagacgctggtctccctggactacgccatctccaagcccgaggtcctctcccagattgaacaagggaaggagccctgcaactggcgccgccctggccccaagattccagatgttcctgtggaccccagtccaggctcggggcccccagttcccgccccagacctcttgatgcagatcaagcaggagggtgagctccagctccaggagcagcaggccctgggcgtggaggcgtgggcagccgggcagccagatattggggaggagccctggggcctcagccagctggattccggagcaggagacatctccacggatgccacctctggtgtccattccaacttttccaccaccatcccgcccacctcctggcaaacggatctccctccccaccatccctcttcagcatgctcggacgggaccctgaagctcaacacagcagcctccacggaagatgtaaaaattgtaataaaaacagaagtccaggaagaggaggtggtggccacacccgtacatcctactgacctagaggctcacgggaccctgtttggaccaggccaagccacacggttcttccctagtcctgcccaggaaggagcctgggaaagccagggcagctccttccccagccaggaccctgtgctggggctgcgagagcccgcccggcctgagagggacatgggtgagctcagtcctgctgtggcccaggaggagacccctcctggggactggctcttcggaggggtccggtggggctggaatttccggtgtaaaccgccagtgggcctgaacccgaggacggggcccgaggggcttccttactcctccccggacaacggagaggccatcttggaccccagccaggccccaaggccattcaacgaaccctgtaaataccctggccggaccaaaggctttggccacaagccagggctgaagaagcaccccgcggcgccccccgggggccggcccttcacctgcgccacgtgtgggaagagcttccagctgcaagtcagcctgagcgcgcaccagcgcagctgtggggcgcccgacgggtcgggcccgggcacaggcggtggcggcagcggcagtggcggcggcggtggcggcagcggtgggggcagcgcacgggatggcagcgcccttcggtgtggggagtgcggccgttgcttcacgcgccccgcgcacctcatccgccatcgcatgctgcacaccggcgagcggcccttcccctgcaccgagtgtgagaagcgcttcaccgaacgctccaagctcatcgaccactaccgaacgcacacgggcgtgcggcccttcacctgcaccgtctgcggcaaaagcttcatccgcaaggaccacctccgcaagcaccagcgcaaccatgcagcgggcgccaagaccccggcccgaggccagccactcccgacgccgcccgcacctcctgatcccttcaagagccccgcctccaaaggacctttggcctccacagaccttgtgaccgactggacttgtggcctcagcgtcctgggacccaccgatggcggggacatgtgagcgcctccagccccatagcccctgccggccgcacgtgtaaaaagccccgtgtgcaggcagcagggcggcgtggaagcttcaggcagacgcgggacggggagaaccaaatgtccaagttgctgaactgatgatcactggagaaagagaaactatccaccaggacagctgccacctctaaaccaagtagaattctctgtgaaatgggagcgccgtagaattttaagtaatttaattgcaaacctgttttgttttttgttttttgtttttttttaattcttgaggaaaaagctggaaaatagtaatagggctatttaaattttgtaggtacttttggttttcagggcgtgcatttctgtcactatctcactgagtctgatagtgtgttggaaggttggccagttggggacccctggcccactgactcctggggatggggtcctgtgtgtgcccctgctctgcccagttgggctgagtgggcctagcgcaccaagcccctgggcagtgagggccattgggtcccttggagcacacctcagtgcagcaggaaggacccctccgggagtagcggttgcatttcccagcttgcctctcctgaaaaggccccccaaaagtgctggccccaacttttctctattttgggccatctgtggtacccgtcccaagggcacttggtggtgtcccctagtgtgtgactccctggcctcataaggacgagttgtctgaaatcccagcgttaggtctggggagatggagaagctgaaactggggagctgcaccacaaacgtctagctctcagcagagctgggagcaaagcctggccgcccaccccaacctggggctgcctcccactccgtgagatgcttctgtctcctgttcactttgtgtggtagtttcttattttcaaaatgcatctcatttgatcattactgtgaccttgggaagcagcaggacagggatttctttttagaggtgcaaactgctcagaggggacacacctcagcctctcactgtgggtacacgtggcgtgccatgagtggggaagagcaacaggcgagatgcctcattctactggaacatcactgtgggtgaacagagatttccaggttttccctcttaaaatatttgtcccacaccgacaagagtccagtcaccaggcctcaaaggaacttctgcttgtagcagccgcctcccctgtgccccagcctccttaatgtgtgcactctcagagggcacagctcgcgaggctgggtttgggggccaagtggcttgttcattccagcatctaacatcataaaggtgggcccagatttcttgattcgaccacagtgctgttcctaccacacaaatatccattcctgttttgttgaagcagccactggtcctcttgtttcccctgcagacggagggacctggcagtgcccattcattcagccccctcatgcatacttttattaggcgatagactagttaagaaaattgtttctatgtactgtatattttgtacctgtttacacttctaatattgatataactgatattttgaaaaataagagaaaacatcctgttaaaataaaacctaaccagcaccaa

SEQ ID NO: 243923 - protein, 1023 aa, Artificial Sequence
  derived and/or modified sequence
MDANSKDKPPETKESAMNNAGNASFILGTGKIVTPQKHAELPPNPCTPDTFKSPLNFSTVTVEQLGITPESFVRNSAGKSSSYLKKCRRRSAVGARGSPETNHLIRFIARQQNIKNARKSPLAQDSPSQGSPALYRNVNTLRERISAFQSAFHSIKENEKMTGCLEFSEAGKESEMTDLTRKEGLSACQQSGFPAVLSSKRRRISYQRDSDENLTDAEGKVIGLQIFNIDTDRACAVETSVDLSEISSKLGSTQSGFLVEESLPLSELTETSNALKVADCVVGKGSSDAVSPDTFTAEVSSDAVPDVRSPATPACRRDLPTPKTFVLRSVLKKPSVKMCLESLQEHCNNLYDDDGTHPSLISNLPNCCKEKEAEDEENFEAPAFLNMRKRKRVTFGEDLSPEVFDESLPANTPLRKGGTPVCKKDFSGLSSLLLEQSPVPEPLPQPDFDDKGENLENIEPLQVSFAVLSSPNKSSISETLSGTDTFSSSNNHEKISSPKVGRITRTSNRRNQLVSVVEESVCNLLNTEVQPCKEKKINRRKSQETKCTKRALPKKSQVLKSCRKKKGKGKKSVQKSLYGERDIASKKPLLSPIPELPEVPEMTPSIPSIRRLGSGYFSSNGKLEEVKTPKNPVKRKDLLRHDPDLHMHQGYDKYDVSEFCSYIKSSSSLGNATSDEDPNTNIMNINENKNIPKAKNKSESENEPKAGTDSPVSCASVTEERVASDSPKPALTLQQGQEFSAGGQNAENLCQFFKISPDLNIKCERKDDFLGAAEGKLQCNRLMPNSQKDCHCLGDVLIENTKESKSQSEDLGRKPMESSSVVSCRDRKDRRRSMCYSDGRSLHLEKNGNHTPSSSVGSSVEISLENSELFKDLSDAIEQTFQRRNSETKVRRSTRLQKDLENEGLVWISLPLPSTSQKAKRRTICTFDSSGFESMSPIKETVSSRQKPQMAPPVSDPENSQGPAAGSSDEPGKRRKSFCISTLANTKATSQFKGYRRRSSLNGKGESSLTALERIEHNGERKQ

SEQ ID NO: 243924 - protein, 68 aa, Artificial Sequence
  derived and/or modified sequence
MDANSKDKPPETKESAMNNAGNASFILGTGKIVTPQKHAELPPNPCTPDTFKSPLNFSTVTVEQLGIN

SEQ ID NO: 243925 - DNA, 3072 bp, Artificial Sequence
  derived and/or modified sequence
atggacgccaacagcaaggacaagccccccgagaccaaggagagcgccatgaacaacgccggcaacgccagcttcatcctgggcaccggcaagatcgtgaccccccagaagcacgccgagctgccccccaacccctgcacccccgacaccttcaagagccccctgaacttcagcaccgtgaccgtggagcagctgggcatcacccccgagagcttcgtgagaaacagcgccggcaagagcagcagctacctgaagaagtgcagaagaagaagcgccgtgggcgccagaggcagccccgagaccaaccacctgatcagattcatcgccagacagcagaacatcaagaacgccagaaagagccccctggcccaggacagccccagccagggcagccccgccctgtacagaaacgtgaacaccctgagagagagaatcagcgccttccagagcgccttccacagcatcaaggagaacgagaagatgaccggctgcctggagttcagcgaggccggcaaggagagcgagatgaccgacctgaccagaaaggagggcctgagcgcctgccagcagagcggcttccccgccgtgctgagcagcaagagaagaagaatcagctaccagagagacagcgacgagaacctgaccgacgccgagggcaaggtgatcggcctgcagatcttcaacatcgacaccgacagagcctgcgccgtggagaccagcgtggacctgagcgagatcagcagcaagctgggcagcacccagagcggcttcctggtggaggagagcctgcccctgagcgagctgaccgagaccagcaacgccctgaaggtggccgactgcgtggtgggcaagggcagcagcgacgccgtgagccccgacaccttcaccgccgaggtgagcagcgacgccgtgcccgacgtgagaagccccgccacccccgcctgcagaagagacctgcccacccccaagaccttcgtgctgagaagcgtgctgaagaagcccagcgtgaagatgtgcctggagagcctgcaggagcactgcaacaacctgtacgacgacgacggcacccaccccagcctgatcagcaacctgcccaactgctgcaaggagaaggaggccgaggacgaggagaacttcgaggcccccgccttcctgaacatgagaaagagaaagagagtgaccttcggcgaggacctgagccccgaggtgttcgacgagagcctgcccgccaacacccccctgagaaagggcggcacccccgtgtgcaagaaggacttcagcggcctgagcagcctgctgctggagcagagccccgtgcccgagcccctgccccagcccgacttcgacgacaagggcgagaacctggagaacatcgagcccctgcaggtgagcttcgccgtgctgagcagccccaacaagagcagcatcagcgagaccctgagcggcaccgacaccttcagcagcagcaacaaccacgagaagatcagcagccccaaggtgggcagaatcaccagaaccagcaacagaagaaaccagctggtgagcgtggtggaggagagcgtgtgcaacctgctgaacaccgaggtgcagccctgcaaggagaagaagatcaacagaagaaagagccaggagaccaagtgcaccaagagagccctgcccaagaagagccaggtgctgaagagctgcagaaagaagaagggcaagggcaagaagagcgtgcagaagagcctgtacggcgagagagacatcgccagcaagaagcccctgctgagccccatccccgagctgcccgaggtgcccgagatgacccccagcatccccagcatcagaagactgggcagcggctacttcagcagcaacggcaagctggaggaggtgaagacccccaagaaccccgtgaagagaaaggacctgctgagacacgaccccgacctgcacatgcaccagggctacgacaagtacgacgtgagcgagttctgcagctacatcaagagcagcagcagcctgggcaacgccaccagcgacgaggaccccaacaccaacatcatgaacatcaacgagaacaagaacatccccaaggccaagaacaagagcgagagcgagaacgagcccaaggccggcaccgacagccccgtgagctgcgccagcgtgaccgaggagagagtggccagcgacagccccaagcccgccctgaccctgcagcagggccaggagttcagcgccggcggccagaacgccgagaacctgtgccagttcttcaagatcagccccgacctgaacatcaagtgcgagagaaaggacgacttcctgggcgccgccgagggcaagctgcagtgcaacagactgatgcccaacagccagaaggactgccactgcctgggcgacgtgctgatcgagaacaccaaggagagcaagagccagagcgaggacctgggcagaaagcccatggagagcagcagcgtggtgagctgcagagacagaaaggacagaagaagaagcatgtgctacagcgacggcagaagcctgcacctggagaagaacggcaaccacacccccagcagcagcgtgggcagcagcgtggagatcagcctggagaacagcgagctgttcaaggacctgagcgacgccatcgagcagaccttccagagaagaaacagcgagaccaaggtgagaagaagcaccagactgcagaaggacctggagaacgagggcctggtgtggatcagcctgcccctgcccagcaccagccagaaggccaagagaagaaccatctgcaccttcgacagcagcggcttcgagagcatgagccccatcaaggagaccgtgagcagcagacagaagccccagatggccccccccgtgagcgaccccgagaacagccagggccccgccgccggcagcagcgacgagcccggcaagagaagaaagagcttctgcatcagcaccctggccaacaccaaggccaccagccagttcaagggctacagaagaagaagcagcctgaacggcaagggcgagagcagcctgaccgccctggagagaatcgagcacaacggcgagagaaagcagtag

SEQ ID NO: 243926 - DNA, 3731 bp, Artificial Sequence
  derived and/or modified sequence
agtccccgaggtcacaaggcagtggcaggtgtctgtagtcctcgggttgactgcagctcgcggtggtccctctccgagcccaggaagccactccagtgccgagggagaggcctgggagcgctcggagtgtgcgcggactggagaagggggaggtggcggagtgattcgtagagtaaattcggtaccgaggggcggggtcggggatttgaatcggtcggcgggcggaggaggcgggtggaggaggctgccgggcagagcgcaggccaggatcagcgcaggctgtgagtccaggtcagccgtcgggacctcgggctccgggttcgaagagcggctcccggctgcgggtgctttgccaggagagcccttccggacagaggagccggggtctggaaggagcggccgacgcgacgctcgcctgccacggggctctgggagtaagcctgtctgcctggcgggccttcaggtgcggcgtgagagatggatgccaattcaaaagacaagccccctgaaaccaaggagtctgcaatgaataatgctggaaatgcctctttcattttgggaactgggaagattgtgactcctcagaagcatgccgaattacctcctaatccttgcacaccagatacttttaaatcacctttgaacttttccacagtaaccgtagagcaattgggaattacacctgaaagctttgttaggaactctgcaggaaagtcatcatcctaccttaaaaaatgtagacgacgttctgcagtcggtgctcggggctctcctgaaacaaaccatctgattcgtttcattgctcggcagcaaaatataaagaatgctaggaaatctcctttggcacaagattctccttcccagggcagccctgcactgtatcgaaatgttaacactttaagagaacgaatatcagccttccagtcagcttttcactccataaaggaaaatgagaaaatgaccggctgtctggaattctcagaggcaggaaaagagtccgagatgacagacttgaccagaaaggaaggtctcagcgcttgccagcagtctgggttccctgcagtgttgtcctccaaacgtcggagaatatcctatcagagagactctgatgaaaatctgacggatgctgaaggaaaagtaattggtctccagatattcaatattgatacagacagagcatgtgcagttgaaacttctgtagatctttctgagatatcatctaaacttggttcaacacagtctggatttttagttgaagagtctcttcccctttcagagctcacagagacttcaaatgcactaaaggttgctgactgtgtagtgggcaaaggatcaagtgatgccgtttcgcctgacacgttcacagcagaagtgagctcagacgcagtccctgatgtcaggtcaccagctactccagcctgcaggagggaccttcccacccccaagacctttgtacttcgttctgtactgaagaaaccctctgttaagatgtgtctagagagcttacaggaacactgtaacaacctctatgatgatgatgggactcatccgagcttaatctcaaatctcccaaactgttgcaaagagaaagaagcagaagatgaagaaaattttgaagcacctgcctttctaaatatgaggaagaggaagagagttacttttggagaggacttaagcccggaagtgtttgatgaatctttgccagcaaatactccattgcgtaaaggaggaacacctgtttgtaaaaaagacttcagtggtctcagttccctgctgcttgagcagtcacctgttcctgagccattacctcaaccagattttgatgacaagggggagaatcttgaaaacatagaaccacttcaagtatcatttgccgttctcagttctcctaataaatcatcaatctctgagaccctttcaggcactgatacctttagttcttcaaataaccatgagaaaatatcctctcctaaagttggtagaataacaaggacttctaacagaagaaatcaattggtcagtgttgtagaagagagtgtttgcaacttattgaatacagaagttcagccttgtaaagaaaagaaaattaataggaggaagtctcaagaaacaaagtgtacaaagagagcacttcctaagaagagtcaggttttaaaaagttgcagaaagaagaaaggaaagggaaagaaaagtgttcagaaatctttatatggggaaagagacattgcttctaagaagcccctcctcagtcctattcccgagctgcctgaagtccctgagatgacaccttccattccgagcatccgaagactgggttcaggttatttcagttcaaatggcaaactggaagaagtgaagactcctaaaaatccagtgaaaagaaaggatcttttgcgtcatgacccagatttgcatatgcatcaaggctatgataaatatgatgtctctgaattctgctcttatataaaaagttcctcatcgcttggcaatgctacttctgatgaagatccaaatacaaatataatgaacattaatgaaaataaaaatattccaaaagcaaaaaataagtcagaaagtgaaaatgaaccaaaagctggaactgacagtcctgtttcttgtgcttctgtaactgaagaacgtgtggcatcagatagtcccaaacctgctctgaccctgcagcagggtcaagaattttctgctggtggtcaaaatgcagaaaacctttgtcagttctttaaaatttcaccagatttaaacataaagtgtgaaagaaaggatgacttcttaggagctgcagaaggaaaactgcaatgcaatcgtttaatgcctaattcacaaaaagactgtcattgtttaggagatgtcttaattgaaaatacgaaagaatctaaaagccagagtgaggatttgggaagaaaacccatggaaagtagcagtgttgtgagttgcagagacaggaaagatagaagacgttccatgtgttattctgatggtcgaagtttacatttggaaaaaaatggaaatcacacaccatcctccagtgtgggcagctctgtagaaattagtttagaaaattctgaactgtttaaagatttgtctgatgccattgagcaaacctttcagaggagaaatagtgaaaccaaagtgcgacgtagcacgaggctacagaaggatttagaaaacgaaggtcttgtatggatttcacttccacttccttccacttcccaaaaagccaaaagaagaacaatatgtacatttgacagcagtggatttgaaagtatgtctcccataaaagaaactgtgtcctccagacaaaaaccgcagatggcacctcccgtctcagatccagaaaacagccagggccctgctgctggttcttccgatgaacctggtaagaggaggaagagcttttgtatatctacacttgcaaatactaaagccacttcccagttcaaaggctaccggagaagatcctctcttaatgggaagggagagagctctctgactgccttggaaaggattgaacataatggagaaagaaagcagtaattgacatttcctgcagagtctgtggcaagagggaaagtaaccatctatgctgaaatgatctgtctagttcccattctctgttcaacctcagtgtttcaaaagttcctaataaataaactcatttgagttgaacctacttttatgtagaaataaataagtttcttcatcattcagatagaaaa

SEQ ID NO: 243927 - DNA, 3072 bp, Artificial Sequence
  derived and/or modified sequence
atggatgccaattccaaggacaagccacccgagactaaagagagcgcaatgaacaacgcaggcaacgcaagcttcatattgggtacaggaaagatcgtgaccccccaaaaacatgccgaattgcctccaaatccatgcactcctgacacgttcaaaagccctctcaacttcagcacagtgactgtggaacagcttggcattacaccagagtcttttgtgcggaattctgcgggcaaaagctcaagctatctgaagaaatgtcgacggcgcagcgcggtaggtgccagaggtagtccagagaccaaccaccttattagattcattgcccggcaacagaatatcaaaaatgcaaggaaaagtcctttggcacaagacagcccttcacaaggcagcccggctctataccgcaacgtaaacacactccgcgaaaggatatcagcgttccagagcgccttccatagtataaaagagaatgagaaaatgactgggtgcctcgagttcagtgaggcgggaaaggaaagcgagatgacggatttaacccgcaaggagggactctcggcttgccagcagagcgggtttccagctgtcctgtcgagcaaaagacgaaggatttcctaccagcgcgattccgatgagaacttgacagatgcggaggggaaagtgataggtctgcagattttcaacattgatacggacagagcatgcgctgtggagacgtccgtagatcttagtgaaatctcctcgaagctgggaagcacacaaagcgggtttctcgtggaggaaagcctaccactgagcgagttgaccgagacgtctaatgctttgaaggttgccgattgtgtcgttggcaagggctcgtccgatgccgtttcccctgatacgtttaccgcagaggtaagctccgacgctgtgcccgatgttcgcagccccgccacaccagcctgtcgccgagatctgccgacacccaaaacgttcgtcctgaggagtgtcctgaaaaagccatccgtaaaaatgtgccttgagagtctacaggaacattgtaacaacttgtacgacgatgatggtacacacccttccctgatctctaacctgcccaactgttgcaaggaaaaggaggcagaagatgaagagaacttcgaggctcctgctttcctgaacatgcgcaagcggaaacgcgttacctttggggaggacttatctcccgaggtttttgacgagtctttaccagccaatacaccactgcgaaaaggcggcacccctgtgtgtaagaaagacttctctggactcagcagtctgctgttggagcaaagcccagtcccagagccactgccccagccggattttgacgataagggcgaaaatttggaaaacatagaaccactacaggtgagctttgcggtgctatctagcccgaataagagctctatcagtgaaacccttagcggcactgatacatttagcagttccaacaaccatgagaagataagcagtcctaaggtgggacggatcacaagaacgtccaatagacgaaaccagttagtatctgtggtggaggagtcagtgtgtaacctattgaatactgaagtgcaaccttgcaaggaaaagaagattaaccgacgcaagtcacaggaaaccaaatgcacgaagagggcactgcccaaaaagtctcaggtcttaaagtcctgcaggaagaagaaaggtaagggcaaaaagagcgttcagaagtcactctatggggagcgagacattgctagtaaaaagcccctgctctccccaatccctgagctgcccgaggtacccgaaatgacaccatccataccttccatccgacggctcggctcagggtatttcagcagtaatggtaagctggaggaggttaagacgcctaaaaaccccgtgaaaaggaaagatctcctgcgccatgatcccgatcttcatatgcaccagggatatgataaatatgacgtgtctgaattttgcagttatatcaagtcatcttcctccttgggcaacgctacttccgacgaggacccaaatactaacatcatgaatatcaatgagaataagaacatccccaaagctaagaataagtcagagtcagaaaatgagcccaaagcagggaccgactcccccgtctcttgcgcgtcagttaccgaggagagggtggcctcagactccccaaaaccagcgctcaccctgcagcaaggtcaagaattctccgccggaggccaaaatgctgagaatctttgccagttcttcaagatatcccccgatctcaatattaaatgcgagcggaaggatgattttctcggggccgcagaaggaaagcttcagtgcaatcgactgatgccaaactctcaaaaagattgccactgcttgggcgatgttttgattgagaatactaaggagtccaagtctcagagtgaagatctgggcaggaagccaatggaaagttctagtgtggtgtcatgcagggatcggaaagataggcgccgctccatgtgttattcagatgggagaagtctccatctggagaaaaatggaaaccatacccccagttcatcggtgggaagcagcgtggagatttctctggagaacagtgaactttttaaggacctttcagatgccattgagcagaccttccagcggcgcaacagcgagacaaaggtgaggaggtctaccaggctgcaaaaagacctggagaatgagggactggtgtggataagtttaccccttccctctacaagccagaaggcaaagagaagaactatctgtacatttgacagtagcggcttcgagtccatgtcgcctatcaaggagacagtttctagccggcagaaaccccaaatggccccacccgtcagcgaccccgagaatagccagggtccagcagccggttcctcagacgagcccgggaagagacggaagtccttctgtatctctactctggctaacacaaaggcgacaagccaatttaaagggtatcggcgacgctcaagcctgaacggaaagggggagtcgtctctgacagccctcgagcggatagagcacaatggggaaagaaaacagtag

SEQ ID NO: 243928 - DNA, 3072 bp, Artificial Sequence
  derived and/or modified sequence
atggatgccaacagcaaggacaagcccccagagaccaaggagagcgccatgaacaatgctggaaatgccagcttcatcctgggcaccgggaagatcgtgaccccccagaagcatgctgagctgccccccaacccctgcaccccagacaccttcaagagccccctgaacttcagcacagtgacagtggagcagctgggcatcaccccagagagctttgtgaggaacagcgctgggaagagcagcagctacctgaagaagtgcagaagaagatctgctgtgggcgcccggggcagccctgagaccaaccacctgatccgcttcatcgcccggcagcagaacatcaagaatgccaggaagagccccctggcccaggacagccccagccagggcagccctgccctgtacagaaatgtgaacaccctgcgggagcgcatcagcgccttccagagcgccttccacagcatcaaggaaaatgagaagatgacaggctgcctggagttcagcgaggccggcaaggagagcgagatgacagacctgaccaggaaggagggcctgagcgcctgccagcagagcggcttccctgctgtgctgagcagcaagagaagacgcatctcctaccagagggacagtgatgagaacctgacagatgctgagggcaaggtgattggcctgcagatcttcaacatcgacacagaccgggcctgtgctgtggagacctctgtggacctgtctgagatcagcagcaagctgggcagcacccagagcggcttcctggtggaggagagcctgcccctgtctgagctgacagagaccagcaatgccctgaaggtggccgactgtgtggtgggcaagggcagcagtgatgctgtgtccccagacaccttcaccgctgaggtgtccagtgatgctgtgcctgatgtgcgcagccctgccaccccagcctgccggcgggacctgcccacccccaagacctttgtgctgcggtctgtgctgaagaagcccagcgtgaagatgtgcctggagagcctgcaggagcactgcaacaacctgtatgatgatgatggcacccaccccagcctcatcagcaacctgcccaactgctgcaaggagaaggaggccgaggatgaagaaaattttgaggccccagccttcctgaacatgaggaagaggaagagggtgacctttggagaggacctgagccctgaggtgtttgatgagagcctgcctgccaacacccccctgaggaagggcggcacccctgtgtgcaagaaggacttcagcggcctgagcagcctgctgctggagcagagccctgtgcctgagcccctgccccagcctgactttgatgacaagggggagaacctggagaacatcgagcccctgcaggtgtcctttgctgtgctgagcagccccaacaagagcagcatcagcgagaccctgtctggaacagacaccttcagcagcagcaacaaccacgagaagatcagcagccccaaggtgggccgcatcaccaggaccagcaacagaagaaaccagctggtgtctgtggtggaggagagcgtgtgcaacctgctgaacacagaggtgcagccctgcaaggagaagaagatcaacagaaggaagagccaggagaccaagtgcaccaagagggccctgcccaagaagagccaggtgctgaagagctgcaggaagaagaagggcaagggcaagaagtctgtgcagaagagcctgtatggagagcgggacatcgccagcaagaagcccctgctgagccccatccctgagctgcctgaggtgcctgagatgacccccagcatccccagcatccggcggctgggcagcggctacttcagcagcaatggcaagctggaggaggtgaagacccccaagaaccctgtgaagaggaaggacctgctgcggcatgaccctgacctgcacatgcaccagggctatgacaagtatgatgtgtctgagttctgcagctacatcaagagcagcagcagcctgggcaatgccaccagtgatgaggaccccaacaccaacatcatgaacatcaatgaaaacaagaacatccccaaggccaagaacaagtctgagagtgaaaatgagcccaaggccggcacagacagccctgtgtcctgtgcctctgtgacagaggagcgggtggccagtgacagccccaagccagccctgaccctgcagcagggccaggagttctctgctgggggccagaatgctgagaacctgtgccagttcttcaagatcagcccagacctgaacatcaagtgtgagaggaaggatgacttcctgggcgctgctgagggcaagctgcagtgcaaccggctgatgcccaacagccagaaggactgccactgcctgggagatgtgctgattgagaacaccaaggagagcaagagccagagcgaggacctgggcaggaagcccatggagagcagctctgtggtgtcctgccgggacaggaaggacagaagaagatccatgtgctacagtgatggccgcagcctgcacctggagaagaatggaaaccacacccccagcagctctgtgggcagctctgtggagatcagcctggagaacagcgagctgttcaaggacctgagtgatgccatcgagcagaccttccagaggaggaacagcgagaccaaggtgagaagaagcacccggctgcagaaggacctggagaatgaaggcctggtgtggatcagcctgcccctgcccagcaccagccagaaggccaagaggaggaccatctgcacctttgacagcagcggctttgagagcatgagccccatcaaggagaccgtgagcagccggcagaagccccagatggcccctcctgtgtctgaccctgagaacagccagggccctgctgctggcagcagtgatgagcccgggaagaggaggaagagcttctgcatcagcaccctggccaacaccaaggccaccagccagttcaagggctacagaagaagaagcagcctgaatggcaagggggagagcagcctgacagccctggagagaattgagcacaacggggagaggaagcagtag

SEQ ID NO: 243929 - DNA, 3072 bp, Artificial Sequence
  derived and/or modified sequence
atggacgccaacagcaaggacaagccccccgagaccaaggagagcgcaatgaacaacgccggcaacgctagcttcattctgggcaccggaaagatcgtgactccccagaagcacgctgaactgccacccaatccatgcacgcccgataccttcaaatctcccttgaatttttctacagtgaccgtggagcagctgggaattacccccgaatcatttgtacgcaattctgcgggaaagtcctcttcctatctgaaaaaatgcagacggaggtctgccgtcggagcacggggatcgcccgaaactaatcaccttatcaggtttattgccagacagcagaacatcaagaatgctcgtaagtcccctttggcccaggattctccatcgcaggggtcccccgccctctaccgcaatgtgaacaccctgagggagagaatttcagcctttcagtccgcctttcactccatcaaggagaatgagaagatgacaggatgcctggagttttccgaggcgggaaaggaatccgagatgactgacctgacgaggaaagagggcttgtctgcatgtcagcagtccggtttccccgctgtactcagcagtaaacgccgaagaatctcttaccagcgagactcagacgagaatctgacagacgcggagggcaaagtcatagggctgcagatttttaatattgataccgaccgggcctgtgctgtcgagacgtcagtcgatctctctgaaatttctagcaagctcggttccacccagagcgggtttctagtagaagaatcactccctctcagtgaactgaccgagaccagcaacgccctgaaggtggcagactgcgttgtcggtaagggaagcagcgatgctgtttcccccgatacctttacagcggaggtgtcttcagacgctgtccccgacgtccggtcacccgctacaccagcttgcaggagggacctccctacccccaagacattcgttctgagatcagtgctgaagaagccttcagtgaagatgtgtctggagagcttacaggagcactgtaataacctgtacgacgatgatggtacccatccgtctctgattagtaacctgcccaattgctgtaaagaaaaggaggccgaggatgaggagaacttcgaagcacctgcattcctcaatatgcggaaacgcaagagggtcacttttggtgaggacctgtcccccgaagtatttgacgaatccttgcccgcaaataccccacttaggaaaggagggactccagtctgtaaaaaagacttttccggcctgtccagcctcctgttggaacagtctccagttcctgagcctctacctcaacccgatttcgatgacaagggcgagaatcttgagaatatcgagccccttcaagtgagttttgctgtgctctcgtcgcctaataagagctccattagcgaaacactcagtgggaccgacacatttagctcgagcaataatcacgaaaagattagctcacccaaggtaggcaggattactagaacatccaatcggcgaaaccagctggtcagcgtagtcgaagaaagcgtgtgtaacttgctgaataccgaagtccagccgtgtaaggaaaaaaagattaacagacggaagagccaggaaaccaagtgtaccaaaagagcactaccgaaaaaatctcaggttttgaagagttgccgcaagaagaaaggcaagggcaagaagtcagtgcagaagagcctatacggagagcgagacattgcgtcaaagaagcccctgctctcacctattcctgagctgcctgaggtgcccgagatgaccccctccattccctcaatccgaaggctgggctccggctacttttcaagcaacgggaaactcgaggaagttaagactcctaaaaatcctgtcaaaagaaaggacctgttgcgccatgaccccgacctccacatgcaccagggatacgataagtacgatgtctctgagttctgtagctacattaaatcgagctccagcctcggcaacgccacttccgacgaggatcctaacaccaatatcatgaatatcaacgagaataagaacatcccgaaggctaagaataagtccgagtctgaaaacgaaccaaaggccggtacagacagccccgtctcatgtgccagcgtcactgaagagagggtcgcaagcgactcacccaaaccagccctgaccctgcagcagggacaagaattctctgccggaggccagaacgccgagaacttgtgtcagtttttcaaaatctcacccgatctgaatatcaagtgcgagcgcaaagacgactttttaggtgccgctgaagggaaactccagtgcaatcggctgatgcctaattctcagaaagattgtcattgcctgggagatgtactgattgaaaacacaaaagagtccaagtcgcagtcagaggatttgggacgcaagccaatggagtcatccagtgttgtgtcgtgccgcgatagaaaggaccgacgccggtccatgtgctattcagacggacgctcactgcatctcgagaagaacggtaaccacacacctagctccagcgtaggaagcagcgtcgagatttccctggagaactccgaactcttcaaggatctgagtgacgctattgagcagacatttcagaggcgaaattccgaaacgaaagtccgcaggtctaccaggctccagaaagacctcgagaatgagggcctcgtttggatctccctcccactgccctccaccagtcagaaggcaaagcgtcgaactatctgcactttcgactcatctgggtttgaaagcatgtctcctatcaaagaaaccgtgtcctccagacagaaaccgcaaatggcccccccagtgtccgaccccgagaacagtcaggggcccgccgccggtagttccgacgaacccgggaagcgtagaaaaagcttctgcatttctacacttgcaaatactaaggctaccagtcagtttaagggctaccgacgcagatccagcctgaatgggaaaggcgagtcctctctgaccgctctggagcgaatcgaacacaatggagaacgaaaacagtag

SEQ ID NO: 243930 - DNA, 3072 bp, Artificial Sequence
  derived and/or modified sequence
atggatgccaatagcaaggacaaacccccagaaactaaggagtccgcaatgaacaacgcaggaaacgccagctttattctaggcaccggcaagatcgtgacacctcagaagcacgccgagctgccaccgaatccatgtacgcctgacacctttaagtctcccttaaactttagcacggtgacggtggagcaattggggattaccccagaatccttcgtgaggaactcagccggtaagtcatcctcctacctgaagaagtgtcgtcgtcgttcagcagtcggcgctcggggatcccctgaaaccaaccatctaatccgtttcattgcacggcagcaaaatattaagaacgctaggaagagtcctctggcccaggacagcccatctcaggggagccccgctctttaccgtaatgtgaatactcttcgcgagcgcattagcgccttccagtccgcatttcattcaattaaggaaaacgaaaagatgaccgggtgcctggaattctctgaagccggtaaggaaagtgaaatgactgatctgactaggaaggagggcttaagtgcttgccagcagtcaggctttcctgccgtgctgtcttccaaaagaagaaggatctcatatcaacgggatagtgacgaaaacctgactgacgccgaaggcaaggtgattggcttgcagatctttaacatagacaccgatcgagcctgtgccgtggagacttctgtggatctcagcgagatcagctccaaactggggtcaactcagtcaggctttctggtggaggagtctctgccactttcagaattgaccgaaacgtcgaacgctctcaaggtggccgactgcgtggtcggaaagggtagttccgacgccgtgtcacctgataccttcaccgccgaggtgagttcagacgccgtgccggatgtgaggtctcctgcaactcccgcatgtcggagggacttacccactcccaagacctttgtgctgcgcagtgtgctgaaaaagccaagcgtcaagatgtgcctcgagagtctgcaggaacactgcaataacctgtacgacgatgatggcacacacccatctctgatctcaaatcttccaaactgttgtaaagagaaggaagccgaggacgaagaaaattttgaagcccctgccttcctgaatatgaggaaacgaaaacgcgtaacatttggcgaggacctgtctcccgaggtcttcgatgagagcctcccagcgaacacccctctgaggaaaggtggtacacccgtgtgcaaaaaagacttctcgggactgtcgtcactccttctggagcagagtcctgtgcctgaaccgttgccccagccagacttcgacgacaagggggagaaccttgagaatatcgagcccctccaagtcagtttcgctgtgctttcgagtcccaataagtccagcatcagcgagacactgagcggcactgatactttttctagcagcaacaatcacgagaaaatctcctccccaaaagttggccgtatcacacgtacatcgaaccgcagaaaccagttggtgtccgtcgtcgaggagtcggtgtgtaaccttttaaacactgaagtgcagccttgtaaagaaaaaaagatcaatcggcgaaaaagccaggaaaccaagtgtacgaaacgggctttgcccaagaaaagccaggtgttgaaaagttgtcgaaaaaaaaaaggaaaaggtaagaagagcgtgcagaagtcactgtatggagagcgagatatcgcatctaaaaaaccactgttgtcccctatccccgagctcccagaggtgccagaaatgaccccatccatcccatctattaggcggctgggttccggatatttctcttctaacggaaagcttgaagaagtgaaaacgcctaagaatccggtgaagagaaaagacttgcttcgccacgaccccgacttgcacatgcatcagggctatgacaaatatgatgtctccgaattttgctcctatattaagtcgtctagctctcttgggaacgcaacaagcgacgaggaccccaatactaatatcatgaacatcaacgagaataagaacatccctaaagctaaaaacaagtctgaatccgagaacgagcctaaggccggaacagattctcccgtgtcgtgcgcttctgtaactgaggagcgggtggccagcgattctccgaagccagcgctaactttacagcaggggcaggagttcagtgccggtggtcagaacgctgagaatctttgccagtttttcaaaatttctcctgaccttaacatcaagtgcgagcgcaaggatgattttctcggcgctgccgaaggaaagcttcaatgcaaccgactaatgcccaatagccagaaagactgccactgcttgggcgacgtgctgatagagaacaccaaggagtctaaaagccagtccgaggacttaggcaggaagccgatggagtcgtcgtccgtggtgagttgccgtgatcgcaaggaccgccgtcgcagcatgtgctattccgatgggcgtagtctacacttagagaaaaatggtaaccacactccgtcctcatccgtcggatcctccgtcgaaatcagtctggagaactcggagctttttaaggacctcagcgatgcaatcgaacagacgttccagcggaggaattccgagacaaaggtccgcaggtccactcgccttcagaaggatcttgagaacgagggcctggtttggatttctctgcccttgccttctacatcacagaaggcaaagcggagaaccatatgcactttcgatagctcgggcttcgaatccatgtcaccgatcaaagaaacagtctcatcccgccagaaaccccagatggcgccacccgtctccgatccagaaaactcgcaaggacccgcagcgggatcatctgatgagcctggaaagcgccgaaagagcttttgcatctccacactggctaacaccaaggccactagccaatttaagggctaccgacggaggtcctcactcaatgggaagggcgagagttcgctcaccgccttggagcgaattgagcataacggcgaaaggaaacaatag

SEQ ID NO: 243931 - protein, 3997 aa, Artificial Sequence
  derived and/or modified sequence
MLESYVTPILMSYVNRYIKNLKPSDLQLSLWGGDVVLSKLELKLDVLEQELKLPFTFLSGHIHELRIHVPWTKLGSEPVVITINTMECILKLKDGIQDDHESCGSNSTNRSTAESTKSSIKPRRMQQAAPTDPDLPPGYVQSLIRRVVNNVNIVINNLILKYVEDDIVLSVNITSAECYTVGELWDRAFMDISATDLVLRKVINFSDCTVCLDKRNASGKIEFYQDPLLYKCSFRTRLHFTYENLNSKMPSVIKIHTLVESLKLSITDQQLPMFIRIMQLGIALYYGEIGNFKEGEIEDLTCHNKDMLGNITGSEDETRIDMQYPAQHKGQELYSQQDEEQPQGWVSWAWSFVPAIVSYDDGEEDFVGNDPASTMHQQKAQTLKDPIVSIGFYCTKATVTFKLTEMQVESSYYSPQKVKSKEVLCWEQEGTTVEALMMGEPFFDCQIGFVGCRAMCLKGIMGVKDFEENMNRSETEACFFICGDNLSTKGFTYLTNSLFDYRSPENNGTRAEFILDSTHHKETYTEIAGMQRFGAFYMDYLYTMENTSGKGSTNQQDFSSGKSEDLGTVQEKSTKSLVIGPLDFRLDSSAVHRILKMIVCALEHEYEPYSRLKSDIKDENETILNPEEVALLEEYIPTRHTSVTLLKCTCTISMAEFNLLDHLLPVIMGEKNSSNFMNTTNFQSLRPLPSIRILVDKINLEHSVPMYAEQLVHVVSSLTQPSDNLLHYCYVHCYLKIFGFQAGLTSLDCSGSYCLPVPVIPSFSTALYGKLLKLPTCWTKRSQIAITEGIFELPNLTIQATRAQTLLLQAIYQSWSHLGNVSSSAVIEALINEIFLSIGVKSKNPLPTLEGSIQNVELKYCSTSLVKCASGTMGSIKICAKAPVDSGKEKLIPLLQGPSDTKDLHSTKWLNESRKPESLLAPDLMAFTIQVPQYIDYCHNSGAVLLCSIQGLAVNIDPILYTWLIYQPQKRTSRHMQQQPVVAVPLVMPVCRRKEDEVSIGSAPLAKQQSYQASEYASSPVKTKTVTESRPLSVPVKAMLNISESCRSPEERMKEFIGIVWNAVKHLTLQLEVQSCCVFIPNDSLPSPSTIVSGDIPGTVRSWYHGQTSMPGTLVLCLPQIKIISAGHKYMEPLQEIPFVIPRPILEEGDAFPWTISLHNFSIYTLLGKQVTLCLVEPMGCTSTLAVTSQKLLATGPDTRHSFVVCLHVDLESLEIKCSNPQVQLFYELTDIMNKVWNKIQKRGNLNLSPTSPETMAGPVPTSPVRSSIGTAPPDTSTCSPSADIGTTTEGDSIQAGEESPFSDSVTLEQTTSNIGGTSGRVSLWMQWVLPKITIKLFAPDPENKGTEVCMVSELEDLSASIDVQDVYTKVKCKIESFNIDHYRSRPGEGWQSGHFEGVFLQCKEKSVTTTKLLDGTHQQHGFLSLTYTKAVTKNVRHKLTSRNERRSFHKLSEGLMDGSPHFLHEILLSAQAFDIVLYFPLLNAIASIFQAKLPKTQKEKRKSPGQPMRTHTLTSRNLPLIYVNTSVIRIFIPKTEEMQPTVEANQAAKEDTVVLKIGSVAMAPQADNPLGRSVLRKDIYQRALNLGILRDPGSEIEDRQYQIDLQSINIGTAQWHQLKPEKESVSGGVVTETERNSQNPALEWNMASSIRRHQERRAILTPVLTDFSVRITGAPAVIFTKVVSPENLHTEEILVCGHSLEVNITTNLDFFLSVAQVQLLHQLIVANMTGLEPSNKAAEISKQEQKKVDIFDGGMAETSSRYSGAQDSGIGSDSVKIRIVQIEQHSGASQHRIARPSRQSSIVKNLNFIPFDIFITASRISLMTYSCMALSKSKSQEQKNNEKTDKSSLNLPEVDSDVAKPNQACISTVTAEDLLRSSISFPSGKKIGVLSLESLHASTRSSARQALGITIVRQPGRRGTGDLQLEPFLYFIVSQPSLLLSCHHRKQRVEVSIFDAVLKGVASDYKCIDPGKTLPEALDYCTVWLQTVPGEIDSKSGIPPSFITLQIKDFLNGPADVNLDISKPLKANLSFTKLDQINLFLKKIKNAHSLAHSEETSAMSNTMVNKDDLPVSKYYRGKLSKPKIHGDGVQKISAQENMWRAVSCFQKISVQTTQIVISMETVPHTSKPCLLASLSNLNGSLSVKATQKVPGIILGSSFLLSINDFLLKTSLKERSRILIGPCCATANLEAKWCKHSGNPGPEQSIPKISIDLRGGLLQVFWGQEHLNCLVLLHELLNGYLNEEGNFEVQVSEPVPQMSSPVEKNQTFKSEQSSDDLRTGLFQYVQDAESLKLPGVYEVLFYNETEDCPGMMLWRYPEPRVLTLVRITPVPFNTTEDPDISTADLGDVLQVPCSLEYWDELQKVFVAFREFNLSESKVCELQLPDINLVNDQKKLVSSDLWRIVLNSSQNGADDQSSASESGSQSTCDPLVTPTALAACTRVDSCFTPWFVPSLCVSFQFAHLEFHLCHHLDQLGTAAPQYLQPFVSDRNMPSELEYMIVSFREPHMYLRQWNNGSVCQEIQFLAQADCKLLECRNVTMQSVVKPFSIFGQMAVSSDVVEKLLDCTVIVDSVFVNLGQHVVHSLNTAIQAWQQNKCPEVEELVFSHFVICNDTQETLRFGQVDTDENILLASLHSHQYSWRSHKSPQLLHICIEGWGNWRWSEPFSVDHAGTFIRTIQYRGRTASLIIKVQQLNGVQKQIIICGRQIICSYLSQSIELKVVQHYIGQDGQAVVREHFDCLTAKQKLPSYILENNELTELCVKAKGDEDWSRDVCLESKAPEYSIVIQVPSSNSSIIYVWCTVLTLEPNSQVQQRMIVFSPLFIMRSHLPDPIIIHLEKRSLGLSETQIIPGKGQEKPLQNIEPDLVHHLTFQAREEYDPSDCAVPISTSLIKQIATKVHPGGTVNQILDEFYGPEKSLQPIWPYNKKDSDRNEQLSQWDSPMRVKLSIWKPYVRTLLIELLPWALLINESKWDLWLFEGEKIVLQVPAGKIIIPPNFQEAFQIGIYWANTNTVHKSVAIKLVHNLTSPKWKDGGNGEVVTLDEEAFVDTEIRLGAFPGHQKLCQFCISSMVQQGIQIIQIEDKTTIINNTPYQIFYKPQLSVCNPHSGKEYFRVPDSATFSICPGGEQPAMKSSSLPCWDLMPDISQSVLDASLLQKQIMLGFSPAPGADSSQCWSLPAIVRPEFPRQSVAVPLGNFRENGFCTRAIVLTYQEHLGVTYLTLSEDPSPRVIIHNRCPVKMLIKENIKDIPKFEVYCKKIPSECSIHHELYHQISSYPDCKTKDLLPSLLLRVEPLDEVTTEWSDAIDINSQGTQVVFLTGFGYVYVDVVHQCGTVFITVAPEGKAGPILTNTNRAPEKIVTFKMFITQLSLAVFDDLTHHKASAELLRLTLDNIFLCVAPGAGPLPGEEPVAALFELYCVEICCGDLQLDNQLYNKSNFHFAVLVCQGEKAEPIQCSKMQSLLISNKELEEYKEKCFIKLCITLNEGKSILCDINEFSFELKPARLYVEDTFVYYIKTLFDTYLPNSRLAGHSTHLSGGKQVLPMQVTQHARALVNPVKLRKLVIQPVNLLVSIHASLKLYIASDHTPLSFSVFERGPIFTTARQLVHALAMHYAAGALFRAGWVVGSLDILGSPASLVRSIGNGVADFFRLPYEGLTRGPGAFVSGVSRGTTSFVKHISKGTLTSITNLATSLARNMDRLSLDEEHYNRQEEWRRQLPESLGEGLRQGLSRLGISLLGAIAGIVDQPMQNFQKTSEAQASAGHKAKGVISGVGKGIMGVFTKPIGGAAELVSQTGYGILHGAGLSQLPKQRHQPSDLHADQAPNSHVKYVWKMLQSLGRPEVHMALDVVLVRGSGQEHEGCLLLTSEVLFVVSVSEDTQQQAFPVTEIDCAQDSKQNNLLTVQLKQPRVACDVEVDGVRERLSEQQYNRLVDYITKTSCHLAPSCSSMQIPCPVVAAEPPPSTVKTYHYLVDPHFAQVFLSKFTMVKNKALRKGFP

SEQ ID NO: 243932 - protein, 1427 aa, Artificial Sequence
  derived and/or modified sequence
MLESYVTPILMSYVNRYIKNLKPSDLQLSLWGGDVVLSKLELKLDVLEQELKLPFTFLSGHIHELRIHVPWTKLGSEPVVITINTMECILKLKDGIQDDHESCGSNSTNRSTAESTKSSIKPRRMQQAAPTDPDLPPGYVQSLIRRVVNNVNIVINNLILKYVEDDIVLSVNITSAECYTVGELWDRAFMDISATDLVLRKVINFSDCTVCLDKRNASGKIEFYQDPLLYKCSFRTRLHFTYENLNSKMPSVIKIHTLVESLKLSITDQQLPMFIRIMQLGIALYYGEIGNFKEGEIEDLTCHNKDMLGNITGSEDETRIDMQYPAQHKGQELYSQQDEEQPQGWVSWAWSFVPAIVSYDDGEEDFVGNDPASTMHQQKAQTLKDPIVSIGFYCTKATVTFKLTEMQVESSYYSPQKVKSKEVLCWEQEGTTVEALMMGEPFFDCQIGFVGCRAMCLKGIMGVKDFEENMNRSETEACFFICGDNLSTKGFTYLTNSLFDYRSPENNGTRAEFILDSTHHKETYTEIAGMQRFGAFYMDYLYTMENTSGKGSTNQQDFSSGKSEDLGTVQEKSTKSLVIGPLDFRLDSSAVHRILKMIVCALEHEYEPYSRLKSDIKDENETILNPEEVALLEEYIPTRHTSVTLLKCTCTISMAEFNLLDHLLPVIMGEKNSSNFMNTTNFQSLRPLPSIRILVDKINLEHSVPMYAEQLVHVVSSLTQPSDNLLHYCYVHCYLKIFGFQAGLTSLDCSGSYCLPVPVIPSFSTALYGKLLKLPTCWTKRSQIAITEGIFELPNLTIQATRAQTLLLQAIYQSWSHLGNVSSSAVIEALINEIFLSIGVKSKNPLPTLEGSIQNVELKYCSTSLVKCASGTMGSIKICAKAPVDSGKEKLIPLLQGPSDTKDLHSTKWLNESRKPESLLAPDLMAFTIQVPQYIDYCHNSGAVLLCSIQGLAVNIDPILYTWLIYQPQKRTSRHMQQQPVVAVPLVMPVCRRKEDEVSIGSAPLAKQQSYQASEYASSPVKTKTVTESRPLSVPVKAMLNISESCRSPEERMKEFIGIVWNAVKHLTLQLEVQSCCVFIPNDSLPSPSTIVSGDIPGTVRSWYHGQTSMPGTLVLCLPQIKIISAGHKYMEPLQEIPFVIPRPILEEGDAFPWTISLHNFSIYTLLGKQVTLCLVEPMGCTSTLAVTSQKLLATGPDTRHSFVVCLHVDLESLEIKCSNPQVQLFYELTDIMNKVWNKIQKRGNLNLSPTSPETMAGPVPTSPVRSSIGTAPPDTSTCSPSADIGTTTEGDSIQAGEESPFSDSVTLEQTTSNIGGTSGRVSLWMQWVLPKITIKLFAPDPENKGTEVCMVSELEDLSASIDVQDVYTKVKCKIESFNIDHYRSRPGEGWQSGHFEGVFLQCKEKSVPWGRVLVFGAMWRCLPFLY

SEQ ID NO: 243933 - DNA, 11994 bp, Artificial Sequence
  derived and/or modified sequence
atgctggagagctacgtgacccccatcctgatgagctacgtgaacagatacatcaagaacctgaagcccagcgacctgcagctgagcctgtggggcggcgacgtggtgctgagcaagctggagctgaagctggacgtgctggagcaggagctgaagctgcccttcaccttcctgagcggccacatccacgagctgagaatccacgtgccctggaccaagctgggcagcgagcccgtggtgatcaccatcaacaccatggagtgcatcctgaagctgaaggacggcatccaggacgaccacgagagctgcggcagcaacagcaccaacagaagcaccgccgagagcaccaagagcagcatcaagcccagaagaatgcagcaggccgcccccaccgaccccgacctgccccccggctacgtgcagagcctgatcagaagagtggtgaacaacgtgaacatcgtgatcaacaacctgatcctgaagtacgtggaggacgacatcgtgctgagcgtgaacatcaccagcgccgagtgctacaccgtgggcgagctgtgggacagagccttcatggacatcagcgccaccgacctggtgctgagaaaggtgatcaacttcagcgactgcaccgtgtgcctggacaagagaaacgccagcggcaagatcgagttctaccaggaccccctgctgtacaagtgcagcttcagaaccagactgcacttcacctacgagaacctgaacagcaagatgcccagcgtgatcaagatccacaccctggtggagagcctgaagctgagcatcaccgaccagcagctgcccatgttcatcagaatcatgcagctgggcatcgccctgtactacggcgagatcggcaacttcaaggagggcgagatcgaggacctgacctgccacaacaaggacatgctgggcaacatcaccggcagcgaggacgagaccagaatcgacatgcagtaccccgcccagcacaagggccaggagctgtacagccagcaggacgaggagcagccccagggctgggtgagctgggcctggagcttcgtgcccgccatcgtgagctacgacgacggcgaggaggacttcgtgggcaacgaccccgccagcaccatgcaccagcagaaggcccagaccctgaaggaccccatcgtgagcatcggcttctactgcaccaaggccaccgtgaccttcaagctgaccgagatgcaggtggagagcagctactacagcccccagaaggtgaagagcaaggaggtgctgtgctgggagcaggagggcaccaccgtggaggccctgatgatgggcgagcccttcttcgactgccagatcggcttcgtgggctgcagagccatgtgcctgaagggcatcatgggcgtgaaggacttcgaggagaacatgaacagaagcgagaccgaggcctgcttcttcatctgcggcgacaacctgagcaccaagggcttcacctacctgaccaacagcctgttcgactacagaagccccgagaacaacggcaccagagccgagttcatcctggacagcacccaccacaaggagacctacaccgagatcgccggcatgcagagattcggcgccttctacatggactacctgtacaccatggagaacaccagcggcaagggcagcaccaaccagcaggacttcagcagcggcaagagcgaggacctgggcaccgtgcaggagaagagcaccaagagcctggtgatcggccccctggacttcagactggacagcagcgccgtgcacagaatcctgaagatgatcgtgtgcgccctggagcacgagtacgagccctacagcagactgaagagcgacatcaaggacgagaacgagaccatcctgaaccccgaggaggtggccctgctggaggagtacatccccaccagacacaccagcgtgaccctgctgaagtgcacctgcaccatcagcatggccgagttcaacctgctggaccacctgctgcccgtgatcatgggcgagaagaacagcagcaacttcatgaacaccaccaacttccagagcctgagacccctgcccagcatcagaatcctggtggacaagatcaacctggagcacagcgtgcccatgtacgccgagcagctggtgcacgtggtgagcagcctgacccagcccagcgacaacctgctgcactactgctacgtgcactgctacctgaagatcttcggcttccaggccggcctgaccagcctggactgcagcggcagctactgcctgcccgtgcccgtgatccccagcttcagcaccgccctgtacggcaagctgctgaagctgcccacctgctggaccaagagaagccagatcgccatcaccgagggcatcttcgagctgcccaacctgaccatccaggccaccagagcccagaccctgctgctgcaggccatctaccagagctggagccacctgggcaacgtgagcagcagcgccgtgatcgaggccctgatcaacgagatcttcctgagcatcggcgtgaagagcaagaaccccctgcccaccctggagggcagcatccagaacgtggagctgaagtactgcagcaccagcctggtgaagtgcgccagcggcaccatgggcagcatcaagatctgcgccaaggcccccgtggacagcggcaaggagaagctgatccccctgctgcagggccccagcgacaccaaggacctgcacagcaccaagtggctgaacgagagcagaaagcccgagagcctgctggcccccgacctgatggccttcaccatccaggtgccccagtacatcgactactgccacaacagcggcgccgtgctgctgtgcagcatccagggcctggccgtgaacatcgaccccatcctgtacacctggctgatctaccagccccagaagagaaccagcagacacatgcagcagcagcccgtggtggccgtgcccctggtgatgcccgtgtgcagaagaaaggaggacgaggtgagcatcggcagcgcccccctggccaagcagcagagctaccaggccagcgagtacgccagcagccccgtgaagaccaagaccgtgaccgagagcagacccctgagcgtgcccgtgaaggccatgctgaacatcagcgagagctgcagaagccccgaggagagaatgaaggagttcatcggcatcgtgtggaacgccgtgaagcacctgaccctgcagctggaggtgcagagctgctgcgtgttcatccccaacgacagcctgcccagccccagcaccatcgtgagcggcgacatccccggcaccgtgagaagctggtaccacggccagaccagcatgcccggcaccctggtgctgtgcctgccccagatcaagatcatcagcgccggccacaagtacatggagcccctgcaggagatccccttcgtgatccccagacccatcctggaggagggcgacgccttcccctggaccatcagcctgcacaacttcagcatctacaccctgctgggcaagcaggtgaccctgtgcctggtggagcccatgggctgcaccagcaccctggccgtgaccagccagaagctgctggccaccggccccgacaccagacacagcttcgtggtgtgcctgcacgtggacctggagagcctggagatcaagtgcagcaacccccaggtgcagctgttctacgagctgaccgacatcatgaacaaggtgtggaacaagatccagaagagaggcaacctgaacctgagccccaccagccccgagaccatggccggccccgtgcccaccagccccgtgagaagcagcatcggcaccgccccccccgacaccagcacctgcagccccagcgccgacatcggcaccaccaccgagggcgacagcatccaggccggcgaggagagccccttcagcgacagcgtgaccctggagcagaccaccagcaacatcggcggcaccagcggcagagtgagcctgtggatgcagtgggtgctgcccaagatcaccatcaagctgttcgcccccgaccccgagaacaagggcaccgaggtgtgcatggtgagcgagctggaggacctgagcgccagcatcgacgtgcaggacgtgtacaccaaggtgaagtgcaagatcgagagcttcaacatcgaccactacagaagcagacccggcgagggctggcagagcggccacttcgagggcgtgttcctgcagtgcaaggagaagagcgtgaccaccaccaagctgctggacggcacccaccagcagcacggcttcctgagcctgacctacaccaaggccgtgaccaagaacgtgagacacaagctgaccagcagaaacgagagaagaagcttccacaagctgagcgagggcctgatggacggcagcccccacttcctgcacgagatcctgctgagcgcccaggccttcgacatcgtgctgtacttccccctgctgaacgccatcgccagcatcttccaggccaagctgcccaagacccagaaggagaagagaaagagccccggccagcccatgagaacccacaccctgaccagcagaaacctgcccctgatctacgtgaacaccagcgtgatcagaatcttcatccccaagaccgaggagatgcagcccaccgtggaggccaaccaggccgccaaggaggacaccgtggtgctgaagatcggcagcgtggccatggccccccaggccgacaaccccctgggcagaagcgtgctgagaaaggacatctaccagagagccctgaacctgggcatcctgagagaccccggcagcgagatcgaggacagacagtaccagatcgacctgcagagcatcaacatcggcaccgcccagtggcaccagctgaagcccgagaaggagagcgtgagcggcggcgtggtgaccgagaccgagagaaacagccagaaccccgccctggagtggaacatggccagcagcatcagaagacaccaggagagaagagccatcctgacccccgtgctgaccgacttcagcgtgagaatcaccggcgcccccgccgtgatcttcaccaaggtggtgagccccgagaacctgcacaccgaggagatcctggtgtgcggccacagcctggaggtgaacatcaccaccaacctggacttcttcctgagcgtggcccaggtgcagctgctgcaccagctgatcgtggccaacatgaccggcctggagcccagcaacaaggccgccgagatcagcaagcaggagcagaagaaggtggacatcttcgacggcggcatggccgagaccagcagcagatacagcggcgcccaggacagcggcatcggcagcgacagcgtgaagatcagaatcgtgcagatcgagcagcacagcggcgccagccagcacagaatcgccagacccagcagacagagcagcatcgtgaagaacctgaacttcatccccttcgacatcttcatcaccgccagcagaatcagcctgatgacctacagctgcatggccctgagcaagagcaagagccaggagcagaagaacaacgagaagaccgacaagagcagcctgaacctgcccgaggtggacagcgacgtggccaagcccaaccaggcctgcatcagcaccgtgaccgccgaggacctgctgagaagcagcatcagcttccccagcggcaagaagatcggcgtgctgagcctggagagcctgcacgccagcaccagaagcagcgccagacaggccctgggcatcaccatcgtgagacagcccggcagaagaggcaccggcgacctgcagctggagcccttcctgtacttcatcgtgagccagcccagcctgctgctgagctgccaccacagaaagcagagagtggaggtgagcatcttcgacgccgtgctgaagggcgtggccagcgactacaagtgcatcgaccccggcaagaccctgcccgaggccctggactactgcaccgtgtggctgcagaccgtgcccggcgagatcgacagcaagagcggcatcccccccagcttcatcaccctgcagatcaaggacttcctgaacggccccgccgacgtgaacctggacatcagcaagcccctgaaggccaacctgagcttcaccaagctggaccagatcaacctgttcctgaagaagatcaagaacgcccacagcctggcccacagcgaggagaccagcgccatgagcaacaccatggtgaacaaggacgacctgcccgtgagcaagtactacagaggcaagctgagcaagcccaagatccacggcgacggcgtgcagaagatcagcgcccaggagaacatgtggagagccgtgagctgcttccagaagatcagcgtgcagaccacccagatcgtgatcagcatggagaccgtgccccacaccagcaagccctgcctgctggccagcctgagcaacctgaacggcagcctgagcgtgaaggccacccagaaggtgcccggcatcatcctgggcagcagcttcctgctgagcatcaacgacttcctgctgaagaccagcctgaaggagagaagcagaatcctgatcggcccctgctgcgccaccgccaacctggaggccaagtggtgcaagcacagcggcaaccccggccccgagcagagcatccccaagatcagcatcgacctgagaggcggcctgctgcaggtgttctggggccaggagcacctgaactgcctggtgctgctgcacgagctgctgaacggctacctgaacgaggagggcaacttcgaggtgcaggtgagcgagcccgtgccccagatgagcagccccgtggagaagaaccagaccttcaagagcgagcagagcagcgacgacctgagaaccggcctgttccagtacgtgcaggacgccgagagcctgaagctgcccggcgtgtacgaggtgctgttctacaacgagaccgaggactgccccggcatgatgctgtggagataccccgagcccagagtgctgaccctggtgagaatcacccccgtgcccttcaacaccaccgaggaccccgacatcagcaccgccgacctgggcgacgtgctgcaggtgccctgcagcctggagtactgggacgagctgcagaaggtgttcgtggccttcagagagttcaacctgagcgagagcaaggtgtgcgagctgcagctgcccgacatcaacctggtgaacgaccagaagaagctggtgagcagcgacctgtggagaatcgtgctgaacagcagccagaacggcgccgacgaccagagcagcgccagcgagagcggcagccagagcacctgcgaccccctggtgacccccaccgccctggccgcctgcaccagagtggacagctgcttcaccccctggttcgtgcccagcctgtgcgtgagcttccagttcgcccacctggagttccacctgtgccaccacctggaccagctgggcaccgccgccccccagtacctgcagcccttcgtgagcgacagaaacatgcccagcgagctggagtacatgatcgtgagcttcagagagccccacatgtacctgagacagtggaacaacggcagcgtgtgccaggagatccagttcctggcccaggccgactgcaagctgctggagtgcagaaacgtgaccatgcagagcgtggtgaagcccttcagcatcttcggccagatggccgtgagcagcgacgtggtggagaagctgctggactgcaccgtgatcgtggacagcgtgttcgtgaacctgggccagcacgtggtgcacagcctgaacaccgccatccaggcctggcagcagaacaagtgccccgaggtggaggagctggtgttcagccacttcgtgatctgcaacgacacccaggagaccctgagattcggccaggtggacaccgacgagaacatcctgctggccagcctgcacagccaccagtacagctggagaagccacaagagcccccagctgctgcacatctgcatcgagggctggggcaactggagatggagcgagcccttcagcgtggaccacgccggcaccttcatcagaaccatccagtacagaggcagaaccgccagcctgatcatcaaggtgcagcagctgaacggcgtgcagaagcagatcatcatctgcggcagacagatcatctgcagctacctgagccagagcatcgagctgaaggtggtgcagcactacatcggccaggacggccaggccgtggtgagagagcacttcgactgcctgaccgccaagcagaagctgcccagctacatcctggagaacaacgagctgaccgagctgtgcgtgaaggccaagggcgacgaggactggagcagagacgtgtgcctggagagcaaggcccccgagtacagcatcgtgatccaggtgcccagcagcaacagcagcatcatctacgtgtggtgcaccgtgctgaccctggagcccaacagccaggtgcagcagagaatgatcgtgttcagccccctgttcatcatgagaagccacctgcccgaccccatcatcatccacctggagaagagaagcctgggcctgagcgagacccagatcatccccggcaagggccaggagaagcccctgcagaacatcgagcccgacctggtgcaccacctgaccttccaggccagagaggagtacgaccccagcgactgcgccgtgcccatcagcaccagcctgatcaagcagatcgccaccaaggtgcaccccggcggcaccgtgaaccagatcctggacgagttctacggccccgagaagagcctgcagcccatctggccctacaacaagaaggacagcgacagaaacgagcagctgagccagtgggacagccccatgagagtgaagctgagcatctggaagccctacgtgagaaccctgctgatcgagctgctgccctgggccctgctgatcaacgagagcaagtgggacctgtggctgttcgagggcgagaagatcgtgctgcaggtgcccgccggcaagatcatcatcccccccaacttccaggaggccttccagatcggcatctactgggccaacaccaacaccgtgcacaagagcgtggccatcaagctggtgcacaacctgaccagccccaagtggaaggacggcggcaacggcgaggtggtgaccctggacgaggaggccttcgtggacaccgagatcagactgggcgccttccccggccaccagaagctgtgccagttctgcatcagcagcatggtgcagcagggcatccagatcatccagatcgaggacaagaccaccatcatcaacaacaccccctaccagatcttctacaagccccagctgagcgtgtgcaacccccacagcggcaaggagtacttcagagtgcccgacagcgccaccttcagcatctgccccggcggcgagcagcccgccatgaagagcagcagcctgccctgctgggacctgatgcccgacatcagccagagcgtgctggacgccagcctgctgcagaagcagatcatgctgggcttcagccccgcccccggcgccgacagcagccagtgctggagcctgcccgccatcgtgagacccgagttccccagacagagcgtggccgtgcccctgggcaacttcagagagaacggcttctgcaccagagccatcgtgctgacctaccaggagcacctgggcgtgacctacctgaccctgagcgaggaccccagccccagagtgatcatccacaacagatgccccgtgaagatgctgatcaaggagaacatcaaggacatccccaagttcgaggtgtactgcaagaagatccccagcgagtgcagcatccaccacgagctgtaccaccagatcagcagctaccccgactgcaagaccaaggacctgctgcccagcctgctgctgagagtggagcccctggacgaggtgaccaccgagtggagcgacgccatcgacatcaacagccagggcacccaggtggtgttcctgaccggcttcggctacgtgtacgtggacgtggtgcaccagtgcggcaccgtgttcatcaccgtggcccccgagggcaaggccggccccatcctgaccaacaccaacagagcccccgagaagatcgtgaccttcaagatgttcatcacccagctgagcctggccgtgttcgacgacctgacccaccacaaggccagcgccgagctgctgagactgaccctggacaacatcttcctgtgcgtggcccccggcgccggccccctgcccggcgaggagcccgtggccgccctgttcgagctgtactgcgtggagatctgctgcggcgacctgcagctggacaaccagctgtacaacaagagcaacttccacttcgccgtgctggtgtgccagggcgagaaggccgagcccatccagtgcagcaagatgcagagcctgctgatcagcaacaaggagctggaggagtacaaggagaagtgcttcatcaagctgtgcatcaccctgaacgagggcaagagcatcctgtgcgacatcaacgagttcagcttcgagctgaagcccgccagactgtacgtggaggacaccttcgtgtactacatcaagaccctgttcgacacctacctgcccaacagcagactggccggccacagcacccacctgagcggcggcaagcaggtgctgcccatgcaggtgacccagcacgccagagccctggtgaaccccgtgaagctgagaaagctggtgatccagcccgtgaacctgctggtgagcatccacgccagcctgaagctgtacatcgccagcgaccacacccccctgagcttcagcgtgttcgagagaggccccatcttcaccaccgccagacagctggtgcacgccctggccatgcactacgccgccggcgccctgttcagagccggctgggtggtgggcagcctggacatcctgggcagccccgccagcctggtgagaagcatcggcaacggcgtggccgacttcttcagactgccctacgagggcctgaccagaggccccggcgccttcgtgagcggcgtgagcagaggcaccaccagcttcgtgaagcacatcagcaagggcaccctgaccagcatcaccaacctggccaccagcctggccagaaacatggacagactgagcctggacgaggagcactacaacagacaggaggagtggagaagacagctgcccgagagcctgggcgagggcctgagacagggcctgagcagactgggcatcagcctgctgggcgccatcgccggcatcgtggaccagcccatgcagaacttccagaagaccagcgaggcccaggccagcgccggccacaaggccaagggcgtgatcagcggcgtgggcaagggcatcatgggcgtgttcaccaagcccatcggcggcgccgccgagctggtgagccagaccggctacggcatcctgcacggcgccggcctgagccagctgcccaagcagagacaccagcccagcgacctgcacgccgaccaggcccccaacagccacgtgaagtacgtgtggaagatgctgcagagcctgggcagacccgaggtgcacatggccctggacgtggtgctggtgagaggcagcggccaggagcacgagggctgcctgctgctgaccagcgaggtgctgttcgtggtgagcgtgagcgaggacacccagcagcaggccttccccgtgaccgagatcgactgcgcccaggacagcaagcagaacaacctgctgaccgtgcagctgaagcagcccagagtggcctgcgacgtggaggtggacggcgtgagagagagactgagcgagcagcagtacaacagactggtggactacatcaccaagaccagctgccacctggcccccagctgcagcagcatgcagatcccctgccccgtggtggccgccgagcccccccccagcaccgtgaagacctaccactacctggtggacccccacttcgcccaggtgttcctgagcaagttcaccatggtgaagaacaaggccctgagaaagggcttcccctag

SEQ ID NO: 243934 - DNA, 11994 bp, Artificial Sequence
  derived and/or modified sequence
atgctggagtcctacgtaacccctatccttatgagttacgtgaaccggtacatcaagaacctgaagccttcagaccttcagctgtcactgtggggaggtgacgtagtgttgagtaagcttgaactcaagctggatgtgcttgaacaggaattaaagctgcccttcacattcctgagtggccacatccacgagcttagaattcacgtcccttggaccaagcttggatccgaacctgttgttattaccattaatactatggagtgcattctgaagctcaaggacgggatccaagacgaccacgaaagctgtggaagcaatagcacgaaccgctctacggccgagtcaaccaagtctagcatcaaaccccggagaatgcagcaggcggcgcccacagaccctgatctccctcccgggtacgtacagtccttaataaggagagtggtcaataacgttaacatcgtcattaacaacctgatcttaaagtatgtagaggacgatatcgtcctgtctgtaaacattacctccgccgagtgttacactgttggcgagctgtgggacagggccttcatggatataagtgctacagacctcgtactcaggaaagtcatcaattttagtgattgcactgtgtgcctggacaagagaaatgcatcgggcaaaatcgagttttatcaggatccgctcctgtacaaatgctcattccgaaccaggctgcactttacatacgagaatctgaatagcaagatgcctagtgtgatcaaaatacacactctggtggagtctctgaagctctctatcaccgaccagcagttgccaatgttcattcgaattatgcagctgggtattgccttgtattacggcgagataggcaactttaaagaaggcgagattgaagatttgacttgccacaacaaagacatgttaggcaacatcaccggctccgaagatgaaacccgtattgacatgcaatatcctgcccagcacaaagggcaggagctatattcccagcaagatgaggaacagccccaaggttgggtctcctgggcatggagttttgtccctgcaatcgtaagttatgatgacggagaggaggatttcgtagggaacgaccctgcctcgacgatgcaccaacaaaaagcacaaactcttaaggatcctatagtttcaatcggtttctattgcactaaagccaccgtcaccttcaagcttaccgaaatgcaggtggaatcctcctactactcaccacagaaggtgaaatctaaggaagttctgtgttgggagcaggagggcacaacggttgaggctctgatgatgggggaacccttcttcgactgtcagatcggatttgtgggatgcagggcaatgtgcttaaaggggatcatgggggtaaaggactttgaggagaatatgaatagaagcgaaactgaagcttgttttttcatctgtggagataacctgagtacaaaagggttcacctatctgacgaattctctctttgactaccggagtcctgagaacaacgggactcgtgccgaattcatactggattctacccaccacaaggagacttatacagaaatcgccggtatgcagcgattcggagcattctacatggattacttgtacacaatggaaaacacgtcagggaaaggttccacaaatcagcaagatttttcctccggcaagtcagaagacctcggcactgtccaggagaaatcaaccaagtctctcgttatagggcctctggacttccggctcgacagctccgctgtccaccgcattctaaaaatgattgtgtgtgccctggagcatgagtatgaaccatactctagacttaagagcgatattaaagacgagaacgagactattctgaatcccgaggaagtggctcttttagaggagtatataccgactcgccataccagtgtgactctgttgaagtgtacctgcactataagtatggctgagttcaacttgctcgatcacctgttacccgtgataatgggggagaaaaatagcagcaacttcatgaacactaccaatttccagtctttgcgccctttgccatcaattcgcatcctggttgataaaatcaacttggaacactccgttccaatgtatgccgaacaactggtccacgtcgtgtctagtctgacacagccctccgataatttgttgcattattgctacgtgcattgttacctgaaaatttttgggtttcaggccggccttacttccctggattgctccggttcctattgccttcctgtaccagtgatccccagcttctccacagccctgtatggaaaactgctgaagctgccaacgtgctggacaaagaggagtcagatcgctatcacagaaggaattttcgaactgcctaatctgacaatccaggcaacgagagcccagaccctgcttttacaagcaatatatcagtcttggtcccacctgggaaacgtgagtagtagcgcagtgattgaagccctaattaacgagattttcttgtccatcggcgtgaaatcgaaaaacccacttcccaccttggaaggcagcattcagaatgttgagctgaagtattgctctaccagcctcgtgaaatgcgctagtgggactatgggcagcatcaagatttgtgccaaggcacccgtcgattccggcaaagaaaagctaatccccctactgcagggcccctccgatactaaggacctacacagtactaagtggctcaatgagagccgcaaacccgagtctttactggctcctgacctgatggccttcacaattcaggtgccccaatatatcgattactgtcacaattcgggtgccgtgctgctgtgtagcatccaaggtctcgctgtgaacattgatcctatcctgtacacctggctgatctaccagcctcagaagagaaccagcagacacatgcagcaacagccagtggtcgccgtccctctggtgatgcctgtttgtagacgtaaagaggatgaagtgtctatcggctcagcgccactggctaaacagcaaagctaccaggcctccgaatatgcatctagccccgtgaagaccaagactgtcacggaaagtagaccacttagtgtgcccgtaaaggcgatgttaaatatctccgaaagttgccgttctcctgaggaacgtatgaaagaatttataggtatcgtctggaatgccgttaagcatctgacacttcagcttgaggtgcagtcatgctgtgtgttcatccccaacgactctcttcctagcccaagcactatcgtcagcggcgacatcccggggaccgtccggtcatggtatcacggacagacgagcatgccaggaaccctggttctttgtcttccccagatcaagattatttctgcaggccacaaatacatggagccacttcaggagattcccttcgtgatcccaagacccatacttgaggagggcgatgcgttcccttggaccatcagcctccacaatttcagcatctacacactgctggggaagcaggtcactctgtgtctggtggagcccatggggtgcaccagcactctggctgtgacctctcagaaactgctggccacagggcccgatacccgacacagcttcgtggtatgcctgcacgttgatctcgagagcttagagattaagtgctccaatccacaggtgcagctcttctatgagttaacagacatcatgaataaggtgtggaataagatccaaaagaggggtaacttgaacctgtcccccacttcacctgagacaatggctggccccgttcccaccagtcccgtaaggtcatctattggaactgcgccgccggacacatcaacttgctcgccttctgctgatatcgggacgaccacagagggcgattcgatccaggcgggggaagagagccccttttccgacagtgtgactctggagcagaccacctctaatatcggaggcacatctgggcgcgtaagcctatggatgcagtgggtgttgccaaagattacaatcaagttattcgcccccgatcctgaaaataagggcacagaggtctgtatggtctctgagctcgaggatctcagtgccagtatagatgtgcaggatgtatacacaaaagttaagtgtaagatcgagagcttcaatatcgaccactaccgatcccgaccaggagagggctggcaaagcggtcacttcgagggggtcttccttcagtgtaaggaaaagagcgtgactaccactaagctgcttgatggcactcatcagcagcacgggtttctgtctttgacatacacaaaggctgtcaccaagaatgtgcgtcataaactgacatcacgcaatgagaggagatccttccataagctttccgaaggcttaatggatggttctccccattttcttcatgaaatattgctctctgctcaggccttcgatatcgtgctgtacttccctctgctcaacgccatcgcttccatttttcaggcaaagcttccaaagacacagaaggagaagaggaaaagccctggccaaccgatgcgcacacacaccctgacatctaggaacctgcctctgatctatgtcaacacctctgtcattagaatcttcattcctaaaacagaagagatgcaacctacagtcgaggccaatcaagcagccaaagaagatacagtagtattaaagataggaagtgtggccatggccccccaagccgacaacccgcttggccgttctgttctacggaaggacatttatcagcgggcactaaatcttggcatccttcgggaccccggcagcgagattgaagaccgacagtatcaaatcgacctgcaaagtatcaatattggaacagcacagtggcaccagctgaagccagaaaaggaatccgtgagcggcggagtggtgaccgagactgagcgtaatagccagaatcctgccctcgaatggaacatggcatcatcgattcggcgtcatcaggaacgcagggcaattctgacaccagtactgacagatttctccgtcagaatcacgggtgcccctgccgtcatttttactaaggtggtaagtccagagaacttgcacacagaggagatcttagtgtgcggtcactctttggaagtcaacatcactaccaacctcgatttcttcctgagcgtggcccaggtgcaacttctacatcaattgatcgtggcaaatatgacgggtcttgagccatctaataaggctgccgaaatttctaaacaggagcagaagaaggtcgacattttcgacggaggaatggctgaaacctcttcccgatattcgggggcccaggattccgggatcgggagcgacagcgtgaagatcagaattgttcaaatcgagcagcactcaggagccagccagcatcgaatcgctaggccatcaaggcaatctagtattgtcaaaaacttaaacttcattccctttgacatctttatcaccgcctctcgcattagcttgatgacgtacagttgcatggccctgagcaaatccaagagccaggagcaaaaaaacaacgaaaagactgacaagtcttcactgaatctgcctgaagtcgacagcgacgtggctaagcctaaccaggcctgtatctcaaccgtcaccgcggaggatctgctgcggtccagcatttctttcccctcggggaaaaagatcggggtcctgtccttagaaagcctgcacgcttctaccagaagtagtgctaggcaagctttgggcatcaccatcgtacggcagcccggccgtcgcggaacaggtgacctgcaactggaacccttcctatattttatagtgagccagccatctctactactctcctgccaccatcggaagcagcgtgtagaagtgagtattttcgacgccgtgctgaagggggtcgctagcgactataaatgtatcgacccagggaagaccctgcccgaggccctagattattgtacagtctggttgcagacagttccaggagagatcgacagtaaatccggtatcccgccatcttttattactttgcaaattaaagactttctcaacgggccagctgatgtgaacctggatatctcgaagcctctgaaggccaatctgtctttcaccaaattggaccagattaatctctttctgaaaaaaatcaagaacgctcattcactagcccattccgaggagaccagcgccatgagcaataccatggttaataaggatgacctccccgtctctaaatactatagaggtaagctgtcgaaacctaagatacatggagacggcgtgcagaaaatatctgctcaggaaaacatgtggagggcagtatcctgtttccagaagatcagcgtacaaaccacccaaatcgtgataagcatggagaccgtgccacacacctccaagccatgtctcctggctagtctgtctaatctgaacgggtccctctccgtaaaagccactcagaaggtcccaggcattattctaggctcgtccttcctcctatccatcaacgacttcctgttaaagacgtccctgaaggagcgcagcaggatcctcatcggaccctgttgcgctacagcgaacttggaggcgaagtggtgcaagcattcaggcaatcccgggcctgaacaatccatccctaaaatctctatcgacctgagaggcgggttgcttcaagtcttctggggccaggagcacctcaactgtctggtgttgttacacgagctgttaaacggctatctgaacgaggaggggaactttgaggtgcaggtcagcgagccagtgccacagatgagctctccagtggaaaagaaccagacatttaagtccgagcagagttctgatgacctgcggacgggactgtttcaatatgttcaggacgctgagtctcttaaactccctggggtgtatgaggtgctgttctataatgagaccgaggactgcccaggtatgatgctgtggagataccctgaaccacgggttttaactctggtccggataacccctgtcccatttaacacgacagaggacccagatataagcactgcagatttgggggatgtcctgcaagtcccctgtagcttagaatactgggacgagctgcagaaggtcttcgtggctttccgcgaatttaacttatcagagtctaaggtgtgcgagctccagttgcccgatatcaatctagtgaatgatcagaagaagctcgtgtccagtgacctgtggcgaatagttctgaattcatcgcagaatggcgcggacgaccaaagttccgcgtcagagtccggatctcagagcacatgtgatccgttggtgacaccaactgcgctggcagcctgtactcgtgtggacagctgctttacgccttggtttgtgccttctctttgcgtctcctttcaatttgcccacctggagtttcacctttgtcatcacctggatcagctcggcactgctgctcctcagtatctgcagccgttcgtctccgataggaatatgccgagcgaacttgagtacatgatcgtctcctttcgggagccgcacatgtacctaaggcagtggaataacggcagtgtttgccaggagatacagttccttgcccaagcagactgcaagctgctggaatgccgcaacgtgacaatgcaatccgtggtcaagcctttctcaatctttggccagatggctgtctctagtgacgtggtggaaaagctgctggattgcaccgttattgttgacagtgtgtttgtcaatttgggccagcatgttgtccatagcctgaacaccgccattcaggcatggcagcagaacaagtgccccgaagtggaagaactggttttctcgcacttcgtgatttgcaatgacacccaggagacactcagatttgggcaggttgacacagacgagaacatcctacttgctagcttacacagccaccagtacagctggcgttcccataaatccccacagcttctgcatatctgcatcgagggatggggcaattggaggtggtctgagccttttagcgtggatcatgccgggacttttattaggacaatccagtataggggacgtaccgcttcactgatcatcaaagtccagcaactgaatggggttcaaaaacagattatcatctgcggccgccaaatcatatgctcttacctgtcccaatctatcgagctcaaagtggtgcagcattacataggccaggatggacaagccgttgtgcgcgagcactttgattgcctgacagctaagcagaagctgccctcatatattctggaaaataatgaattaacggagctctgcgtaaaggccaaaggagacgaggactggagccgggacgtgtgtctcgagagcaaggctccagaatactccattgtgattcaagtgccaagttccaacagttctatcatttatgtctggtgtacagttctcactctagaacccaactcccaggtacagcagcgtatgattgtgttctctccgttatttattatgagatctcatcttccagaccctatcattatccacctggagaagcgatcactcggcttgtccgagactcaaattatcccaggtaagggtcaggagaagcctttacaaaacatcgaacctgacctggtgcatcacttgacattccaggcccgcgaggaatacgatccctccgactgtgcggtgcctatttccacaagtttaatcaagcagatcgcgactaaagtgcaccccgggggtacagtcaaccagatcctagacgagttttacggaccagaaaagagcttgcagccgatctggccctacaacaaaaaagactctgatcggaacgagcagctgagtcaatgggattctccaatgcgggtgaaactgagtatttggaaaccatacgtacgcaccttgcttatagaattgctcccctgggccctgttgataaatgagagcaaatgggacctttggttgtttgaaggcgagaaaatagtcctccaagtcccagcggggaagatcatcattccccctaatttccaggaggcctttcaaatcggcatttactgggccaacactaatactgtacacaagagcgttgcaattaagttagtgcataatctaaccagccctaaatggaaagatggaggcaacggagaggtagtcactctcgatgaggaggcttttgtagacaccgagatcaggctgggcgcgttccccggtcatcaaaaactctgtcagttttgcatatccagtatggtgcaacagggcatccagatcatccagatcgaagataagacaacaataatcaacaacactccgtatcaaatcttctacaagccacaactaagtgtctgtaatccccattccggaaaagagtatttcagagtcccggactctgctacattctccatatgtcccgggggcgagcagccggccatgaaaagcagctcactaccctgctgggacctgatgccagatataagtcagagcgtgctggacgctagcttgctccagaaacagatcatgctggggtttagccctgcccctggcgccgactcgtctcagtgttggtcactccccgccatcgttagaccagagttcccaagacagagcgttgcagtacctttgggcaattttcgcgagaatgggttctgtacacgcgcaattgtacttacttatcaggaacacctgggcgttacgtatctgaccctgtccgaagacccatcacctagggtaataattcacaaccgctgtcccgtgaagatgctgattaaagaaaatatcaaggacatccccaaatttgaagtgtactgcaaaaagatcccatcagagtgcagcatccatcatgagctgtatcatcagatatcatcctaccctgattgcaaaaccaaggatttactcccaagcctcctcttgcgagtcgagccactggacgaggtgaccaccgagtggtctgacgctatagacattaacagccagggaacacaggtggtctttttgacaggctttggctacgtgtacgtggatgtcgtccaccagtgtggcacggtgtttattaccgttgcccctgagggaaaggccggccccattctcactaacacaaaccgggcccccgaaaaaatcgttacatttaagatgtttatcacacagctgtcactggctgtgtttgatgaccttacacaccataaagcgtcagccgaattgctcagactgacgcttgacaatatctttctttgtgtagcgcccggagctggaccattgcctggggaagaacctgtggccgccttgttcgaactctattgtgttgagatttgctgtggtgacctccagctggacaatcagctgtacaacaaatcaaacttccactttgctgtgttggtttgccaaggcgagaaagctgaaccaattcagtgctccaaaatgcaatccctgcttatttctaataaggaactggaggagtacaaagagaagtgcttcattaaactctgtattacactgaacgaaggaaagtctatcctgtgcgatataaacgaattctctttcgagctgaaaccagctcggttgtacgtggaagatacttttgtgtactatattaaaacactctttgatacgtacctaccgaactcaagactggctggccactctacacacctgagcggcggcaagcaagtcttgccaatgcaggtgacccagcatgcacgagccttggtaaatcccgtaaagctgcgcaagctagtgattcagcccgtcaacctcctggtctctatacacgcctccctgaagctgtatattgcatccgatcacacaccactgtctttcagtgtctttgagaggggccctattttcaccaccgccagacagctcgtccacgccttggccatgcattatgccgccggagccctttttcgcgctggctgggtggtaggctccctcgacattttgggctcacctgcttcactggtgcgatcgatcgggaacggagtcgcagattttttccgactcccttatgagggcctaacacgggggcccggcgcctttgtttccggcgtgagcaggggtaccacgagcttcgtgaagcacatctccaaaggaacacttacatctattactaatctggctacttcccttgcacgaaatatggacagactgagtttagacgaagaacactataaccggcaggaggaatggagacgccagctgccggagtccctgggagaaggtctcaggcaggggcttagcagactggggatttcgctcctgggagccattgccggcatcgtggaccagcctatgcagaatttccagaagacttcagaggcccaggccagtgctggacacaaggcaaagggggtcatttcgggcgtggggaaaggcataatgggcgtctttaccaaaccaatcggcggggcggccgagttagtatcacaaaccggctatggcattctccacggagcgggactgtcacagttgcccaagcagcggcatcaaccctccgatctccacgcggaccaggctcctaattcccacgtcaaatatgtttggaagatgctgcaatctctgggccggcctgaggtgcatatggccttggacgtggtgctggtgcgagggagtggccaggagcatgaagggtgcctgttactcactagcgaggttctctttgtggtgtctgtgtctgaggacactcagcaacaggcgttcccggttaccgaaatcgactgtgcacaagattccaaacagaacaaccttctcaccgtacagttgaaacaacctcgggtagcgtgcgacgtggaagtggatggtgtccgggagagactgagcgaacagcagtataatcggttggtggactacattacaaaaacgagttgtcatctcgctccttcatgcagctcgatgcaaataccatgccccgtcgtggctgccgaacccccgcccagcaccgtgaagacctatcactaccttgtcgatccccactttgcacaggtgttcttgagcaagtttaccatggtcaaaaacaaggccctgcggaaaggattcccttag

SEQ ID NO: 243935 - DNA, 11994 bp, Artificial Sequence
  derived and/or modified sequence
atgctggagagctatgtgacccccatcctgatgtcctatgtgaaccgctacatcaagaacctgaagcccagcgacctgcagctgagcctgtggggcggagatgtggtgctgagcaagctggagctgaagctggatgtgctggagcaggagctgaagctgcccttcaccttcctgagcggccacatccacgagctgcgcatccacgtgccctggaccaagctgggcagcgagcctgtggtgatcaccatcaacaccatggagtgcatcctgaagctgaaggatggcatccaggatgaccacgagagctgtggcagcaacagcaccaacagaagcacagctgagagcaccaagagcagcatcaagcccaggaggatgcagcaggccgcccccacagatcctgacctgcccccaggctacgtgcagagcctcatcagaagagtggtgaacaacgtgaacatcgtcatcaacaacctgatcctgaagtatgtggaggatgacatcgtgctgtctgtgaacatcaccagcgctgagtgctacacagtgggggagctgtgggaccgggccttcatggacatcagcgccacagacctggtgctgaggaaggtgatcaacttcagtgactgcaccgtgtgcctggacaagagaaatgccagcggcaagattgagttctaccaggaccccctgctgtacaagtgcagcttccgcacccggctgcacttcacctatgagaacctgaacagcaagatgcccagcgtcatcaagatccacaccctggtggagagcctgaagctgagcatcacagaccagcagctgcccatgttcatccgcatcatgcagctgggcatcgccctgtactacggggagatcggcaacttcaaggagggggagattgaggacctgacctgccacaacaaggacatgctgggcaacatcaccggctctgaagatgagaccagaattgacatgcagtacccagcccagcacaagggccaggagctgtacagccagcaggatgaggagcagccccagggctgggtgtcctgggcctggagctttgtgcctgccatcgtgtcctatgatgatggagaggaggactttgtgggcaatgaccctgccagcaccatgcaccagcagaaggcccagaccctgaaggaccccatcgtgtccatcggcttctactgcaccaaggccaccgtgaccttcaagctgacagagatgcaggtggagagcagctactacagcccccagaaggtgaagagcaaggaggtgctgtgctgggagcaggagggcaccaccgtggaggccctgatgatgggagagcccttctttgactgccagattggatttgtgggctgccgggccatgtgcctgaagggcatcatgggcgtgaaggactttgaggagaacatgaacagaagtgaaacagaggcctgcttcttcatctgtggggacaacctgagcaccaagggcttcacctacctgaccaacagcctgtttgactaccgcagcccagaaaataatggcaccagggctgagttcatcctggacagcacccaccacaaggagacctacacagaaattgctggcatgcagagatttggagccttctacatggactacctgtacaccatggagaacaccagcggcaagggcagcaccaaccagcaggacttcagcagcggcaagtctgaggacctgggcaccgtgcaggagaagagcaccaagagcctggtgattggccccctggacttccggctggacagcagcgctgtgcaccgcatcctgaagatgattgtgtgtgccctggagcacgagtatgagccctacagccggctgaagagtgacatcaaggatgaaaatgagaccatcctgaaccctgaggaggtggccctgctggaggagtacatccccaccaggcacacctctgtgaccctgctgaagtgcacctgcaccatctccatggccgagttcaacctgctggaccacctgctgcctgtgatcatgggagagaagaacagcagcaacttcatgaacaccaccaacttccagagcctgcggcccctgcccagcatccgcatcctggtggacaagatcaacctggagcacagcgtgcccatgtatgcagagcagctggtgcacgtggtgagcagcctgacccagcccagcgacaacctgctgcactactgctacgtgcactgctacctgaagatcttcggcttccaggccggcctgaccagcctggactgcagcggcagctactgcctgcctgtgcctgtgatccccagcttcagcacagccctgtatggcaagctgctgaagctgcccacctgctggaccaagaggagccagatcgccatcacagagggcatctttgagctgcccaacctgaccatccaggccacccgggcccagaccctgctgctgcaggccatctaccagagctggagccacctgggcaatgtgagcagcagcgctgtgattgaggccctgatcaatgagatcttcctgagcattggagtgaagagcaagaaccccctgcccaccctggagggcagcatccagaatgtggagctgaagtactgcagcaccagcctggtgaagtgtgccagcggcaccatgggcagcatcaagatctgtgccaaggcccctgtggacagcggcaaggagaagctgatccccctgctgcagggccccagcgacaccaaggacctgcacagcaccaagtggctgaatgaaagcaggaagccagagagcctgctggccccagacctgatggccttcaccatccaggtgccccagtacatcgactactgccacaacagcggggctgtgctgctgtgcagcatccagggcctggccgtgaacatcgaccccatcctgtacacctggctgatctaccagccccagaagaggaccagccgccacatgcagcagcagcctgtggtggccgtgcccctggtgatgcctgtgtgcaggaggaaagaagatgaggtgtccatcggcagcgcccccctggccaagcagcagagctaccaggcctctgaatatgccagcagccctgtgaagaccaagacagtgacagagagccggcccctgtctgtgcctgtgaaggccatgctgaacatcagcgagagctgccgcagccctgaggagaggatgaaggagttcatcggcatcgtgtggaatgctgtgaagcacctgaccctgcagctggaggtgcagagctgctgcgtgttcatccccaatgacagcctgcccagccccagcaccatcgtgtctggggacatccctggcaccgtgcgctcctggtaccacggccagacctccatgcctggcaccctggtgctgtgcctgccccagatcaagatcatctctgctggccacaagtacatggagcccctgcaggagatcccctttgtgatcccccggcccatcctggaggagggagatgccttcccctggaccatcagcctgcacaacttcagcatctacaccctgctgggcaagcaggtgaccctgtgcctggtggagcccatgggctgcaccagcaccctggccgtgaccagccagaagctgctggccactggaccagacaccaggcacagctttgtggtgtgcctgcacgtggacctggagagcctggagatcaagtgcagcaacccccaggtgcagctgttctatgagctgacagacatcatgaacaaggtgtggaacaagatccagaagaggggcaacctgaacctgagccccaccagccctgagaccatggccggccctgtgcccaccagccctgtgcgcagcagcattggaacagcccccccagacaccagcacctgcagccccagcgctgacatcggcaccaccacagaaggagacagcatccaggccggggaggagagccccttcagtgacagcgtgaccctggagcagaccaccagcaacattggaggcaccagcggccgggtgtccctgtggatgcagtgggtgctgcccaagatcaccatcaagctgtttgccccagaccctgaaaataaaggaacagaggtgtgcatggtgtctgagctggaggacctgagcgccagcattgatgtgcaggatgtgtacaccaaggtgaagtgcaagattgagagcttcaacatcgaccactaccgcagcaggcctggagagggctggcagagcggccactttgagggcgtcttcctgcagtgcaaggagaagtctgtgaccaccaccaagctgctggatggcacccaccagcagcacggcttcctgagcctgacctacaccaaggctgtgaccaagaatgtgcgccacaagctgaccagcagaaatgaaagaagaagcttccacaagctgtctgagggcctgatggatggcagcccccacttcctgcacgagatcctgctgagcgcccaggcctttgacatcgtgctgtacttccccctgctgaatgccatcgccagcatcttccaggccaagctgcccaagacccagaaggagaagaggaagagccctggccagcccatgaggacccacaccctgaccagcaggaacctgcccctcatctacgtgaacaccagcgtcatccgcatcttcatccccaagacagaggagatgcagcccaccgtggaggccaaccaggccgccaaggaggacacagtggtgctgaagattggctctgtggccatggccccccaggccgacaaccccctgggccgctctgtgctgaggaaggacatctaccagagggccctgaacctgggcatcctgcgggaccccggcagcgagattgaggaccggcagtaccagattgacctgcagagcatcaacattggaacagcccagtggcaccagctgaagccagagaaggagagcgtgtctggaggagtggtgacagaaacagagaggaacagccagaacccagccctggagtggaacatggccagcagcatccgccgccaccaggagcggcgggccatcctgacccctgtgctgacagacttctctgtgcgcatcactggagccccagctgtgatcttcaccaaggtggtgtccccagagaacctgcacacagaggagatcctggtgtgtggccacagcctggaggtgaacatcaccaccaacctggacttcttcctgtctgtggcccaggtgcagctgctgcaccagctgattgtggccaacatgacaggcctggagcccagcaacaaggctgctgagatcagcaagcaggagcagaagaaggtggacatctttgatggcggcatggccgagaccagcagccgctacagcggggcccaggacagcggcattggaagtgacagcgtgaagatccgcatcgtgcagatcgagcagcacagcggggccagccagcaccgcatcgcccggcccagccggcagagcagcatcgtgaagaacctgaacttcatcccctttgacatcttcatcacagccagccgcatcagcctgatgacctacagctgcatggccctgagcaagagcaagagccaggagcagaagaacaatgagaagacagacaagagcagcctgaacctgcctgaggtggacagtgatgtggccaagcccaaccaggcctgcatcagcacagtgacagctgaggacctgctgcggagcagcatctccttccccagcggcaagaagattggagtgctgagcctggagagcctgcacgccagcaccaggagcagcgcccggcaggccctgggcatcaccatcgtgcggcagcccggccggcggggcactggagacctgcagctggagcccttcctgtacttcatcgtgtcccagcccagcctgctgctgagctgccaccacaggaagcagagggtggaggtgtccatctttgatgctgtgctgaagggcgtggccagtgactacaagtgcattgatcctgggaagaccctgcctgaggccctggactactgcaccgtgtggctgcagacagtgcctggagaaattgacagcaagagcggcatcccccccagcttcatcaccctgcagatcaaggacttcctgaatggaccagcagatgtgaacctggacatcagcaagcccctgaaggccaacctgtccttcaccaagctggaccagatcaacctcttcctgaagaagatcaagaatgcccacagcctggcccacagcgaggagaccagcgccatgagcaacaccatggtgaacaaggatgacctgcctgtgtccaagtactaccggggcaagctgagcaagcccaagatccatggagatggagtgcagaagatcagcgcccaggagaacatgtggagggctgtgtcctgcttccagaagatctctgtgcagaccacccagatcgtcatctccatggagaccgtgccccacaccagcaagccctgcctgctggccagcctgagcaacctgaatggcagcctgtctgtgaaggccacccagaaggtgcccggcatcatcctgggcagcagcttcctgctgagcatcaatgacttcctgctgaagaccagcctgaaggagaggagccgcatcctgattggcccctgctgtgccacagccaacctggaggccaagtggtgcaagcacagcggcaaccctggccctgagcagagcatccccaagatcagcattgacctgcggggcggcctgctgcaggtgttctggggccaggagcacctgaactgcctggtgctgctgcacgagctgctgaatggctacctgaatgaggagggcaactttgaggtgcaggtgtctgagcctgtgccccagatgagcagccctgtggagaagaaccagaccttcaagtctgagcagagcagtgatgacctgaggacaggcctcttccagtatgtgcaggatgctgagagcctgaagctgcccggggtgtatgaggtgctcttctacaatgaaacagaggactgccccggcatgatgctgtggagatacccagagccccgggtgctgaccctggtgcgcatcacccctgtgcccttcaacaccacagaggaccctgacatcagcacagctgacctgggagatgtgctgcaggtgccctgcagcctggagtactgggatgagctgcagaaggtgtttgtggccttccgggagttcaacctgtctgagagcaaggtgtgtgagctgcagctgcctgacatcaacctggtgaatgaccagaagaagctggtgtccagtgacctgtggagaattgtgctgaacagcagccagaatggagcagatgaccagagcagcgccagcgagagcggcagccagagcacctgtgaccccctggtgacccccacagccctggccgcctgcaccagggtggacagctgcttcaccccctggtttgtgcccagcctgtgtgtgtccttccagtttgcccacctggagttccacctgtgccaccacctggaccagctgggcacagctgccccccagtacctgcagccctttgtgtctgacaggaacatgcccagcgagctggagtacatgattgtgtccttccgggagccccacatgtacctgcggcagtggaacaacggctctgtgtgccaggagatccagttcctggcccaggccgactgcaagctgctggagtgcagaaatgtgaccatgcagagcgtggtgaagcccttcagcatcttcggccagatggctgtgtccagtgatgtggtggagaagctgctggactgcaccgtcatcgtggacagcgtgtttgtgaacctgggccagcacgtggtgcacagcctgaacacagccatccaggcctggcagcagaacaagtgcccagaggtggaggagctggtgttcagccactttgtgatctgcaatgacacccaggagaccctgcgcttcggccaggtggacacagatgagaacatcctgctggccagcctgcacagccaccagtacagctggaggagccacaagagcccccagctgctgcacatctgcatcgagggctggggcaactggcgctggagcgagcccttctctgtggaccacgccggcaccttcatccgcaccatccagtaccggggccgcacagccagcctcatcatcaaggtgcagcagctgaatggagtgcagaagcagatcatcatctgtggccggcagatcatctgcagctacctgagccagagcattgagctgaaggtggtgcagcactacatcggccaggacggccaggccgtggtgcgggagcactttgactgcctgacagccaagcagaagctgcccagctacatcctggagaacaatgagctgacagagctgtgtgtgaaggccaagggagatgaggactggagcagagatgtgtgcctggagagcaaggcccctgagtacagcatcgtcatccaggtgcccagcagcaacagcagcatcatctacgtgtggtgcaccgtgctgaccctggagcccaacagccaggtgcagcagaggatgattgtgttcagccccctcttcatcatgaggagccacctgcctgaccccatcatcatccacctggagaagaggagcctgggcctgtctgagacccagatcatccctgggaagggccaggagaagcccctgcagaacattgaaccagacctggtgcaccacctgaccttccaggcccgggaggagtatgaccccagcgactgtgctgtgcccatcagcaccagcctcatcaagcagatcgccaccaaggtgcaccctgggggcaccgtgaaccagatcctggatgagttctacggccctgagaagagcctgcagcccatctggccctacaacaagaaggacagcgacagaaatgagcagctgagccagtgggacagccccatgagggtgaagctgagcatctggaagccctacgtgaggaccctgctgattgagctgctgccctgggccctgctgatcaatgaaagcaagtgggacctgtggctgtttgaaggagagaagatcgtgctgcaggtgcctgctgggaagatcatcatcccccccaacttccaggaggccttccagatcggcatctactgggccaacaccaacacagtgcacaagtctgtggccatcaagctggtgcacaacctgaccagccccaagtggaaggatggcggcaatggagaggtggtgaccctggatgaggaggcctttgtggacacagagatccggctgggcgccttccctggccaccagaagctgtgccagttctgcatcagctccatggtgcagcagggcatccagatcatccagatcgaggacaagaccaccatcatcaacaacaccccctaccagatcttctacaagccccagctgtctgtgtgcaacccccacagcggcaaggagtacttccgggtgcctgattctgccaccttcagcatctgccctggaggagagcagcctgccatgaagagcagcagcctgccctgctgggacctgatgccagacatcagccagagcgtgctggatgccagcctgctgcagaagcagatcatgctgggcttctccccagcccctggagctgacagcagccagtgctggagcctgcctgccatcgtgcggcctgagttcccccggcagagcgtggccgtgcccctgggcaacttcagagaaaatggcttctgcacccgggccatcgtgctgacctaccaggagcacctgggcgtgacctacctgaccctgtctgaggaccccagccccagggtcatcatccacaaccgctgccctgtgaagatgctgatcaaggagaacatcaaggacatccccaagtttgaggtgtactgcaagaagatccccagcgagtgcagcatccaccacgagctgtaccaccagatcagcagctacccagactgcaagaccaaggacctgctgcccagcctgctgctgcgggtggagcccctggatgaggtgaccacagagtggagcgatgccatcgacatcaacagccagggcacccaggtggtgttcctgactggatttggctacgtgtatgtggatgtggtgcaccagtgtggcaccgtcttcatcaccgtggcccctgagggcaaggccggccccatcctgaccaacaccaacagagcccctgagaagatcgtgaccttcaagatgttcatcacccagctgagcctggccgtgtttgatgacctgacccaccacaaggccagcgctgagctgctgcggctgaccctggacaacatcttcctgtgtgtggcccctggggccggccccctgcccggggaggagcctgtggccgccctgtttgagctgtactgtgtggagatctgctgcggggacctgcagctggacaaccagctgtacaacaagagcaacttccactttgctgtgctggtgtgccagggcgagaaggccgagcccatccagtgcagcaagatgcagagcctgctgatcagcaacaaggagctggaggagtacaaggagaagtgcttcatcaagctgtgcatcaccctgaatgaaggcaagagcatcctgtgtgacatcaatgagttctcctttgagctgaagccagcccggctgtatgtggaggacacctttgtgtactacatcaagaccctgtttgacacctacctgcccaacagccggctggccggccacagcacccacctgagcggcggcaagcaggtgctgcccatgcaggtgacccagcacgcccgggccctggtgaaccctgtgaagctgaggaagctggtgatccagcctgtgaacctgctggtgtccatccacgccagcctgaagctgtacatcgccagtgaccacacccccctgtccttctctgtgtttgagcggggccccatcttcaccacagcccggcagctggtgcacgccctggccatgcactatgctgctggggccctcttccgggccggctgggtggtgggcagcctggacatcctgggcagccctgccagcctggtgcgcagcattggaaatggagtggccgacttcttccggctgccctatgagggcctgacccggggccctggggcctttgtgtctggagtgtcccggggcaccaccagctttgtgaagcacatcagcaagggcaccctgaccagcatcaccaacctggccaccagcctggccaggaacatggaccggctgagcctggatgaggagcactacaaccggcaggaggagtggaggcggcagctgcctgagagcctgggggagggcctgcggcagggcctgagccggctgggcatcagcctgctgggcgccatcgccggcatcgtggaccagcccatgcagaacttccagaagaccagcgaggcccaggccagcgctggccacaaggccaagggcgtcatctctggagtgggcaagggcatcatgggcgtcttcaccaagcccatcggcggcgctgctgagctggtgtcccagacaggctacggcatcctgcatggagctggcctgagccagctgcccaagcagaggcaccagcccagcgacctgcacgccgaccaggcccccaacagccacgtgaagtatgtgtggaagatgctgcagagcctgggccggcctgaggtgcacatggccctggatgtggtgctggtgcggggcagcggccaggagcacgagggctgcctgctgctgaccagcgaggtgctgtttgtggtgtctgtgtctgaggacacccagcagcaggccttccctgtgacagaaattgactgtgcccaggacagcaagcagaacaacctgctgactgtgcagctgaagcagccccgggtggcctgtgatgtggaggtggatggagtgcgggagcggctgtctgagcagcagtacaaccggctggtggactacatcaccaagaccagctgccacctggcccccagctgcagctccatgcagatcccctgccctgtggtggccgctgagcccccacccagcacagtgaagacctaccactacctggtggacccccactttgcccaggtgttcctgagcaagttcaccatggtgaagaacaaggccctgaggaagggcttcccctag

SEQ ID NO: 243936 - DNA, 11994 bp, Artificial Sequence
  derived and/or modified sequence
atgctggagagctacgtgacccccatcctgatgagctacgtgaacagatacatcaaaaacctgaagccctctgacttgcagctaagcctgtggggcggtgacgtggttttgtctaagctagagttaaaactggatgtcctggaacaggaactcaaattgcccttcacgtttctatccggccacattcatgagttaagaatccatgtcccgtggaccaaactgggttctgaacccgtcgtaatcacgataaacacaatggaatgcattcttaagctgaaagacggaatacaagacgatcatgaaagctgcggatctaattcaactaaccgctccaccgctgaatccaccaagtcttcaataaagcccagacgcatgcagcaggctgcccccaccgatccagacctcccacctggctacgttcagtccctgatccggagagtggtcaacaacgtaaacattgtgatcaacaacctgatattaaaatacgttgaggacgacatcgtgctgtcggtgaatattacctctgcggaatgctacaccgtcggcgagttatgggaccgcgccttcatggacatctccgctacagacctggtcttgaggaaagtcattaactttagcgattgcaccgtgtgcctggataaaagaaacgccagcggcaaaattgagttttaccaggaccccctgctgtacaaatgctccttccggacacggttgcatttcacatatgagaacctgaatagcaaaatgcccagcgtgatcaagatccatactctcgtggaatcacttaaattaagcatcaccgaccagcagctccccatgttcattagaatcatgcagctggggatagccttgtactatggcgaaatcgggaactttaaggagggcgagatcgaggatctcacctgtcacaacaaggatatgctcgggaacattactgggtcagaggatgaaacccgcattgacatgcagtaccctgctcaacacaaaggacaggaactatactctcagcaggatgaagagcagcctcaggggtgggtgtcctgggcttggtccttcgttccggctatagtgagttatgacgacggcgaggaagacttcgtgggtaatgacccagcttcaacaatgcatcagcagaaagcccaaacccttaaagatcccatcgtgagtattggcttctactgcaccaaggcgactgttacctttaagttaactgaaatgcaggtcgagtcaagttactactctcctcagaaggtgaagtccaaggaggtgctgtgctgggaacaagaagggacaacagtcgaggctcttatgatgggcgaaccattttttgattgccagatcggattcgtgggctgccgtgctatgtgtctgaaagggatcatgggcgtcaaagacttcgaagaaaatatgaaccgttcagaaacagaagcctgcttttttatatgtggcgacaacctttccaccaaaggcttcacatacctcacaaacagcctttttgattaccggtccccggagaacaacggtaccagagcagagttcattcttgatagcactcaccataaagagacatacaccgagatcgccggcatgcagaggttcggagctttctacatggactacctgtatacgatggaaaacacgtcagggaagggcagcaccaaccagcaggactttagttcgggaaagtcagaagacctgggcactgttcaagagaagtccaccaaatccttagtcatcgggccccttgatttccgcctggactcttctgccgtgcaccggatcctgaagatgattgtctgtgccctggagcatgaatacgaaccatactcgcgcttaaagtcagatataaaggacgaaaatgagactattcttaacccagaggaggtggcgctgttagaggagtacataccaactaggcatacatcagtaactctactaaagtgtacctgtaccatctctatggccgagtttaatctcttggatcaccttctgccagtgattatgggggagaagaactccagtaatttcatgaataccaccaattttcagagcctgaggccactgccctcaatccgaattctcgtggacaaaatcaacctggagcactcagtccctatgtatgccgaacagttggtgcatgtagtttcaagcctgactcagccgtcggataatctactgcactactgttacgtccattgctacttaaagatcttcgggtttcaggccggcctcacttccttggattgttccggctcttattgcctgcccgttcctgtgatcccatctttttcgacagcattgtatggcaagctgctaaagttgccaacttgttggacaaaaaggtctcagatcgccatcacagagggcatttttgagctacctaatttgactatacaggcgaccagagcccagaccctcctcctacaagcaatctatcagagttggagtcatctcggcaatgtcagcagctctgcagttatagaggctctgatcaacgagatctttctttccattggggtgaagtcgaaaaaccccctacctacgttggagggcagcatacagaacgtggaactcaaatattgctctacctcgctagtgaaatgtgctagcggcaccatgggcagcattaaaatttgtgctaaagcacctgtagattctggaaaggagaagttaatcccactcttacagggcccttctgatacaaaagatcttcattccactaaatggcttaatgagagccgaaaacctgagagtttgctggccccagatcttatggcatttacgattcaagtgccacagtatatagattattgccacaacagtggggctgtcttattatgctcaatccaaggactcgcagtgaatattgaccctatattgtacacatggctcatctaccagccacagaaaagaacgagccgccacatgcagcagcagcctgtagtcgcagtgcccctggtgatgcccgtctgtaggcggaaagaggatgaagtgagtatcggaagcgctcccctcgcaaagcagcagagctatcaggcttccgaatacgctagctcacccgttaagactaaaacggtgactgagtcgagaccgttgagtgtgccagtgaaagcgatgctcaatatctcagaatcttgccgctcccctgaggagcgtatgaaggagtttattggcatcgtgtggaacgcagtgaagcatctaacgctgcagctcgaggtgcagtcctgttgcgttttcatccctaatgattccctgccttctccaagtaccatcgtctcaggcgacattcccgggaccgttcgcagttggtaccatggccagactagcatgcccggtactctcgtgctgtgcctgccccaaataaagattatttcagctgggcacaaatatatggaaccactccaggagattccctttgtgatccctcgcccaatcttggaagagggagacgcatttccttggacaatcagccttcacaacttttcaatctataccttgcttgggaaacaggtgaccttatgtctggttgaacctatgggttgcacgtccaccctagccgtgacatcacagaagctcctggcaacaggtcccgatactcgtcattcctttgttgtatgcctacacgttgacctcgagagtctcgagattaagtgcagtaaccctcaggtgcagcttttctacgagctcactgacatcatgaacaaagtgtggaacaaaatccagaaaaggggcaatctgaatctctctcctacatcccccgagacaatggcaggccctgtgcctacatcccctgttagatcatcgatcgggaccgcccccccagacacaagtacttgtagtccatccgccgatatcgggaccacgactgaaggtgactcaattcaggccggcgaagaatctccattctcagactctgtgacgttggagcaaaccacttctaatattggtgggaccagcggacgcgtgtctctctggatgcagtgggtgctgcctaagatcacaatcaagctgttcgcccccgatccggagaataaaggcactgaggtatgtatggttagcgaactcgaggaccttagcgcttctattgatgtccaggacgtttacactaaggtaaagtgcaagatcgagtccttcaacattgaccactaccggtcaaggcccggcgaggggtggcaatctggtcatttcgaaggggtatttttacagtgtaaggagaagagtgtgacaacgacaaagctactagacggaacccaccagcaacatggcttcctttcactgacctacactaaagcagtcaccaagaatgtgagacacaaactgaccagcagaaacgagcgccgttcctttcataaattgtctgagggcctcatggatggctcccctcacttccttcatgaaatcctcctaagcgcccaagccttcgatatcgtcctgtacttccccctactgaacgcgattgcatcaattttccaggctaaacttcccaagacgcaaaaggagaaacggaagagccctggtcagcctatgcgtacccacactctgacaagcagaaacctgcctctaatttacgtcaacacttctgtgattcgcatctttatcccaaaaaccgaggagatgcaacccacagttgaggccaaccaggcggccaaagaggatacagtcgtgctgaaaatcgggtcagtagccatggccccccaggctgataaccctttaggacggagtgtcctacgcaaggatatttaccagcgcgccctgaatctgggcattctcagagatcccggctcggaaatcgaggaccgacaataccagatcgatctccagtccatcaacattggaactgcacagtggcatcagcttaagccagagaaggaatccgtgagtgggggggtggtgactgagactgagcggaatagtcagaatccagctcttgagtggaacatggcttcttccatccggcgccaccaagagagacgcgccattcttacccccgtgttaactgatttcagcgttcgcatcaccggcgctccggctgtgatcttcaccaaggtggtgagccctgagaacctgcacaccgaggagattttggtttgcggccacagcctggaagtgaatattaccactaatctcgactttttcctgtccgtcgcccaggtgcaactgttacaccagctgattgtggccaatatgaccggcctggaaccttctaataaagcagcggagatttcaaaacaggagcagaagaaggtggacatctttgatggaggcatggccgaaacttcatcaaggtatagtggagctcaagactctggaattggctcagactccgtaaagatacgcattgtccagatcgagcagcactcaggcgcatctcagcatagaattgctcggccctcccgccagtccagcatagttaagaacctcaatttcatcccctttgatatctttattaccgccagtaggatctcacttatgacatactcgtgcatggcgctgtccaagtctaaatctcaggaacagaagaacaatgaaaaaacggacaaatcaagcctgaatctccccgaggtggatagcgatgtggccaagccaaatcaggcttgcatatccacagtgactgccgaggatctcctccggtcctctatcagctttccgagtggaaagaagatcggcgtcctgtcccttgaaagcttgcacgcctcaactcgttcctctgccaggcaggcactcggaatcacaattgtacgacagcccggaaggagagggaccggcgacctccagctcgagcccttcttatattttattgtcagccagccatccctgttactaagctgccaccaccgcaagcagcgggtggaggttagcatcttcgatgccgtccttaagggagtggcttctgactacaagtgtatcgacccaggtaagaccctgccggaagccctggactattgtacagtatggctgcaaacagtgcccggggagatagacagcaagtctggcatcccccctagctttattaccttacagatcaaggattttttaaatggccccgccgacgtgaacctagacatctcgaaacccctcaaagctaacctcagctttaccaagcttgaccagataaacctgtttcttaagaagataaagaatgcacactccctggctcactccgaggaaacgagtgcaatgtccaatacgatggttaacaaagatgacctgccagtttctaagtattatagaggaaaactgagcaaaccaaagatccatggggatggcgtgcagaagatcagcgctcaggagaacatgtggagggccgtcagctgctttcagaagatctccgttcagactacacaaattgtcatatctatggagactgtgccccatacgagcaagccatgtctcctcgcaagtctgagtaacctgaacgggtctctctcagtcaaggccactcagaaagttcccggcattattctgggaagctcatttcttctctctatcaatgacttcttgctaaaaacgagtcttaaagaacgttctcggattttgatcggtccgtgctgtgcaacagctaatctggaggccaaatggtgcaagcattcggggaaccccgggcccgagcagagcatcccgaaaatttcaattgatcttcgggggggattacttcaagtcttttgggggcaggaacacttaaattgcttagtactgctccatgagctgctgaacggctatctcaacgaagagggtaatttcgaggtccaggtgagcgagcctgtgccacagatgtcttctcccgtggaaaaaaaccagaccttcaaaagcgagcagagttccgatgacttaagaacaggcctgtttcagtatgtccaggatgcggaaagcctcaaattgcctggtgtctacgaagtgcttttctataatgagacagaggactgccccggcatgatgctttggcgctacccggaacctagagtgcttacccttgtccgcatcacacccgtgcccttcaacacaacagaagaccccgacattagtactgccgacctgggagatgtgcttcaggtgccatgttctcttgagtattgggatgaactgcagaaagtctttgtcgctttccgggagttcaatttgagcgagagcaaggtttgcgaactccagctgcctgatatcaatcttgtaaacgatcagaagaaattagtaagtagtgacctgtggcggattgtgctaaactcatctcagaacggggccgacgaccaaagcagcgcctccgaatccggtagccaatccacatgcgatcctctggtcacacccactgctctcgccgcctgtacccgggttgattcttgtttcacaccatggtttgtgccatccctgtgcgtgagttttcagtttgcacacctggaattccacttatgtcatcatctcgaccagttaggaacagctgctcctcaatatctccagccttttgttagtgaccggaacatgccaagcgagctggagtatatgattgtgagtttccgagagccccacatgtacttgcgccaatggaacaacggctccgtctgtcaggaaattcagtttctcgcgcaggccgactgtaaacttctggagtgccggaacgtgacgatgcagtctgtggtgaaacccttcagcatcttcgggcagatggcagttagctccgacgtggtcgaaaagctcctggactgcactgtgatcgtagactccgtatttgtgaacctggggcagcacgtcgtccacagcttgaatacggctatacaggcgtggcagcagaacaaatgccccgaggtggaagagctggtgttttcccactttgttatctgtaacgacacccaggagacactgagatttggacaggtggatactgacgagaatattctgcttgcgtccttgcacagccaccagtactcttggcgcagccacaagtctcctcagcttctgcatatatgtatcgaaggctggggaaactggcggtggagcgaacctttcagcgtggaccatgcagggacttttatcagaacaatccagtatcgcggcagaacagcctctctgatcatcaaggtgcagcagttgaacggggtacagaaacagataatcatctgcggtcggcagatcatttgttcctacctcagccagtccatcgaattaaaggtggtgcagcattacataggacaggacggtcaggccgtagtgagggaacactttgattgccttaccgccaaacagaaacttccctcctatattctggagaacaacgagcttaccgaactgtgcgtaaaggcaaaaggcgatgaggattggagccgggatgtgtgcctcgaatcaaaggcccctgaatactctattgtgatacaggtgccgagttccaacagcagcatcatctatgtttggtgcacggtactgacgcttgaacctaactctcaggtgcagcagaggatgatcgtgttcagccctctgtttattatgcgttctcacctgccggaccctatcattatccacttggagaagaggagcctgggcctcagtgaaacccaaatcatacctggcaagggccaggagaagccccttcagaatatcgagccagacttggtgcaccacctaaccttccaggctcgagaagagtatgacccaagcgactgtgccgttcctatcagcaccagcttaatcaaacagattgcaactaaggtgcaccctggcgggacagtaaatcagatcctggacgaattctacggtcccgagaaatctctccaacctatatggccatacaataagaaggactccgatagaaatgagcagctttcccaatgggactcaccaatgcgagtcaagcttagtatctggaagccttacgtgcgcaccctgctgatcgagctgctcccctgggctctgctgataaacgagtcaaagtgggacctgtggctgtttgagggcgagaaaatcgtgctgcaggtgccagccggaaagatcatcatcccccctaactttcaggaagcgttccaaattggaatttattgggccaacacaaacaccgtgcataagtcagtcgctattaaactggtgcataatctgacaagtcctaagtggaaagatggagggaacggagaagttgtaaccctggatgaggaggctttcgtcgacacagagattaggctgggtgcctttcccggccatcagaagttatgtcagttctgtatttcttctatggtccagcaaggtattcagattattcagatcgaagacaaaaccaccatcatcaataatacaccttaccagatattttacaaacctcagctgtcggtatgtaatccacatagtggaaaggagtactttcgcgtaccggatagtgctacattctctatctgcccaggcggggaacagccggctatgaagtcatccagcctgccctgttgggatttaatgcccgacatttcacagagtgtgctggatgccagcttactgcaaaaacagatcatgttgggcttctcccccgcgcctggcgccgattcatcccagtgctggagcctgcccgccatcgttaggccggaattcccaaggcagagcgtggccgtacccctcggcaactttagagagaacgggttctgtaccagagccatcgtactgacttaccaggaacacctgggcgtgacctatctcacactctccgaggacccaagcccaagggttatcatacacaacagatgccccgttaaaatgttaatcaaagagaacatcaaagacatccccaagtttgaagtgtattgcaaaaagattccaagtgagtgctcaatccaccacgagctctaccaccagatttcctcttatcccgattgcaagacaaaggatctcctgcctagccttctactgcgcgtggagccgcttgacgaggttactaccgagtggtctgatgccatcgacatcaactcccaaggcacccaagtggtgtttctgactggattcggatacgtgtatgtggacgtggtccaccagtgcggaactgtattcattaccgtggcccctgaaggcaaggctggccctatcctgacgaatacaaaccgagcacctgaaaaaatagtcaccttcaaaatgttcatcacacagctgtcgctggcggttttcgatgatctcacgcatcacaaagccagcgcagaactgctcagattaacactcgacaatatttttttgtgtgtggcccctggtgccgggcctctgccaggggaggagcctgtggccgcactatttgaattgtactgcgtcgaaatctgctgtggagacctgcagcttgacaatcaactgtacaacaaaagcaactttcatttcgcggtgctggtgtgccagggtgaaaaggccgagccgattcagtgctctaagatgcagagccttctcatctcgaataaggaactcgaggaatacaaggagaagtgttttattaagctctgcatcaccctcaatgagggcaagtccatcctttgtgatattaatgaatttagtttcgagctcaagcctgccaggttatacgtggaggatactttcgtatattatatcaagacactgtttgacacttatcttccaaacagtcggcttgccgggcatagcactcacttgagcggcggaaagcaagttcttcccatgcaggtgacgcagcacgccagagccctggtgaatcccgttaagctgcgaaaactcgttattcagcccgtgaatctcctggtaagcatccatgcatctcttaagctgtacatcgcctcagatcatacacccctctccttcagtgtcttcgagagggggcccatctttaccactgcgcgccagctagtgcatgccctagctatgcactacgccgctggagctctctttcgtgctggatgggtcgtgggttccctggatattttgggatcacctgcgagcctagttagatctataggtaatggagtagcggacttcttccggctgccttacgaaggtctcactaggggacccggagccttcgtttcaggcgtgtcacgaggtaccacgtcattcgtgaagcatatctccaaagggacactgacgagcataacaaacctagcgacttcactggccagaaacatggataggctctctcttgatgaagagcactataatagacaagaagagtggaggcgacaactacccgaaagccttggcgagggactcaggcagggactcagcagactgggcatctcgctgctcggagcaattgccggcatcgtagatcagccaatgcaaaactttcagaagaccagtgaagctcaggctagtgccgggcacaaggcgaagggcgttatcagcggcgtgggaaaaggaattatgggagtttttaccaaacccattggaggggccgccgagctcgtttcccagacgggctacgggatcttacatggagctggcttatcccagctgcccaaacaacgacatcaaccatctgatctgcacgctgaccaggctcctaactcccatgtgaaatacgtctggaaaatgctgcagtctctgggccgtcctgaagtgcacatggccctcgatgtcgtccttgtgcgtggctcaggacaggagcacgaaggatgcttgctccttacatcggaagttttgttcgtggtatctgtgtcggaagacacccagcagcaggctttccccgttactgaaatcgactgcgcacaggattccaagcaaaacaatttactaaccgtgcaactcaagcaacctagagtggcctgcgacgttgaggtggatggtgtaagggagagactgtcagagcaacagtacaataggcttgttgattacataactaagacatcttgccatcttgctccgtcttgctccagcatgcagatcccttgccctgtggtggccgctgagcccccacccagtacggtaaagacctaccattacctggttgacccccacttcgctcaggtatttttgtctaagtttacaatggtgaaaaacaaggccttacgcaaaggcttcccgtag

SEQ ID NO: 243937 - DNA, 11994 bp, Artificial Sequence
  derived and/or modified sequence
atgctcgaatcctatgtgacccctattttgatgtcctacgtgaacaggtatattaagaatctaaagcccagcgatttgcaactgagcctgtggggcggagacgttgttctgagcaagctggaactaaagcttgatgttttggagcaggagctcaaattgccttttacctttcttagcggccacattcatgagctacggattcacgtgccttggaccaagctgggctccgaacccgtggtcataaccattaacaccatggaatgcatactcaagctgaaagatggaatccaagacgaccatgaatcttgtggcagtaatagtactaaccgatctacagccgagtccacaaagtcgtcaatcaaacccaggcgcatgcagcaggcagcacctacagatcctgatttgccgcctgggtacgttcagtctctgatcagaagggtggtgaacaacgttaatattgtgattaacaatctcatcctgaagtatgtggaagacgacatagtgctgagcgtgaacattacaagcgctgaatgttacacagttggcgagctgtgggaccgagcctttatggacatctcagctacagacttagtcttgcgcaaggttatcaacttctcggattgcacggtctgcttggataaaagaaacgcaagcgggaagattgagttttatcaggatcccctactatataaatgttctttcagaaccagactccattttacttacgaaaacctcaattccaagatgcctagcgtcattaagatccataccctggtagaaagcctgaagctgtctataaccgatcagcagttacccatgtttatacgaattatgcagctaggtatcgcactctattatggggagataggtaactttaaggaaggcgagattgaggacctgacatgccacaataaagacatgctgggaaacattacggggtccgaggatgagacccgtatcgacatgcaatacccggctcagcataagggtcaggaactgtacagccagcaggacgaggaacagcctcagggttgggtctcatgggcatggagtttcgtgcccgcaatcgtatcctacgatgacggggaagaagactttgtgggaaatgatccagccagcacaatgcaccagcaaaaagcccagacacttaaggaccccatcgtgagcatagggttttattgcaccaaggctacggtaacattcaagctgaccgagatgcaggtggaaagctcctattatagtccacagaaagtgaagtcgaaggaggtgctgtgttgggagcaggaggggaccaccgtagaggctcttatgatgggcgagcccttcttcgattgccaaattggcttcgttggttgcagggcaatgtgtctgaagggcatcatgggcgtcaaggactttgaagaaaacatgaatagaagcgaaactgaagcgtgcttctttatttgtggtgacaatctcagcaccaaaggttttacttacttgacaaatagtcttttcgattacagaagcccagaaaacaacgggacgcgagccgaatttattcttgattcaactcatcacaaagagacctacaccgaaattgccggtatgcagagatttggagccttctatatggattacctctacactatggaaaatacctctggaaaaggttcaaccaatcagcaggatttctcaagcggaaagtcagaagacctggggactgtccaggaaaaatccaccaagtccctagtgattggacccctcgattttaggctggacagtagtgccgtccacagaattctgaagatgatcgtatgcgccctggaacacgagtacgagccatatagtcgactcaaatccgatatcaaagatgagaatgaaacaattctcaatccagaagaggtggcactacttgaggagtatatcccaacgcggcacacatctgtcaccctgctgaagtgcacttgcacaatttcaatggccgagtttaatctgctcgatcacctgctgcccgttataatgggcgaaaaaaatagcagcaattttatgaatactaccaacttccagtcgctgagacccctgcctagcatccggatcctggtcgacaagattaatctcgagcacagtgttcccatgtatgcagaacagttggtacatgtagtctcctcactgacgcagccaagtgacaacctattgcactactgttatgttcactgttatttaaaaatatttggtttccaagccggacttacctctctcgattgtagcggaagctactgtctgcctgtgcccgtgatccccagcttttcaacggccctttacggaaaactcctgaagcttccgacctgttggacaaaaaggtcccagatagccattacagaaggaatctttgagcttcctaacctcaccatccaggccactcgggctcaaaccctgctgttacaagccatatatcaatcttggtcccacctgggcaacgtatccagcagtgcagtcatagaggcactaattaacgagatattcctcagtatcggagtcaaaagcaagaaccctctgccaactttggagggtagcattcagaacgtggagctgaagtactgtagcacttccctggttaaatgcgcaagcgggaccatgggttcaatcaagatttgcgccaaagctccagtcgatagcggcaaagaaaaattgattccgcttctacaggggccaagtgataccaaagatctgcacagcacaaagtggcttaatgaatccaggaagcctgagagccttttggccccagaccttatggcatttaccatacaggtacctcagtatatcgattattgccacaattcaggcgcagtgctgctctgttctatacagggcttagcagtaaacattgacccaatcctgtacacctggctgatctaccagccacagaagagaactagcagacacatgcagcaacagcccgtcgtggccgtcccactcgtgatgcccgtttgccggcgtaaggaggacgaggtgagtatcgggagcgcgcctctggcaaagcagcaatcttatcaagccagcgagtacgcctcttccccagttaagacgaagaccgttacagaaagtcggcctctgagcgtgcctgtgaaagccatgctcaatataagcgagtcctgcaggagcccagaggagagaatgaaagaattcatcggtatagtttggaacgctgtcaaacaccttactctgcaactggaagtgcagagctgttgcgtgttcattcctaatgattctctgcccagcccctccacgattgtgagtggagacatccctggaacagtgcggtcttggtatcacggacaaacttctatgccaggaactctggtgctatgcctaccccaaatcaagatcatttccgctggccacaaatacatggagcccctccaggaaattccgttcgttattccacggcctatcctcgaggaaggcgacgcatttccttggacaatctctctccacaatttcagcatctacactttgctgggcaagcaagtaaccctatgtctggtcgagcctatgggctgtaccagtaccctggctgtgaccagccagaagcttctcgccacagggcctgacactcgccatagtttcgtggtttgcttgcatgtggacctcgagtctctcgaaattaagtgctccaaccctcaggtacaactgttctacgaactgaccgatattatgaacaaggtctggaacaagatccagaaaagaggtaatctgaacctcagcccaacttcccccgagaccatggcaggccctgttccaacctcgcccgtacgaagcagcattggcacagctcccccagatacgtccacttgcagcccatcagcagacattggaaccaccacagaaggtgattcaattcaggcaggagaggaatctccgttctctgattctgtcactttggaacagacaacttcaaatataggaggcactagcgggcgtgtgtcactgtggatgcagtgggtcttgccaaaaatcactataaagctgttcgctcctgaccctgagaataagggaacagaggtgtgtatggtatccgagctcgaggatctctcagccagtatagatgtgcaggacgtatacaccaaagtgaagtgcaagattgaatcttttaacatcgaccactaccggagccgtcctggcgaaggatggcagtctggccacttcgagggagtcttcctgcagtgcaaagaaaaaagcgtgacaactaccaagctcctagatgggacccaccagcagcatggttttttgtcactcacttatactaaagcagtgaccaaaaatgtgaggcacaaactgacctcacgcaatgaacgccgtagttttcacaagctgtccgaaggtctaatggatggatccccccactttctgcacgagattctgctatccgcccaagcttttgatattgttctgtactttcccctgctgaatgccatagcgtcaattttccaggccaagcttcctaagacgcagaaggagaaacgcaaaagccccggtcaacccatgcgcacccacaccctcacttctagaaatcttccccttatctatgttaatacgtccgtgatccgaattttcatccccaagaccgaggagatgcagcccaccgtggaggccaaccaggccgcaaaggaggacactgtggtgctcaaaatcggcagtgtggctatggcgccacaggcagataaccccctgggtcgaagcgttctcaggaaagatatttatcaacgtgcgttaaaccttgggatactgcgagatcccggtagcgagatagaggaccgtcaataccagatcgacctgcagagtatcaatattggcaccgctcagtggcatcagctcaagccagaaaaggaatctgtcagcggcggagtagttacagaaaccgagagaaactcacagaatcctgcccttgagtggaatatggcaagctctatcagacggcaccaagagaggcgagctattctcacccctgtgctgacggatttcagtgtcaggatcactggcgctcctgcagtgattttcaccaaggtggtgagcccagagaatctgcatactgaagagatactggtttgtggccactcgttagaggtcaatattacaacaaaccttgatttctttctatccgtggcccaggtccagctactccatcagctaatcgtcgccaacatgacagggctcgaaccaagcaacaaggcggcagagatctctaagcaggagcaaaagaaagtcgacatcttcgacgggggtatggccgagaccagctccagatactccggcgctcaggacagtgggatcggctctgactccgtcaagatccggatcgtgcagatagaacagcactccggggcttcccagcataggattgccagacccagccgccaatcatcaattgtcaaaaatttgaattttattccctttgacatattcataacggcttccaggatctctttaatgacatatagctgcatggccctgtctaagtccaagtcacaggaacagaaaaataacgagaagactgataagtctagcttaaatctgccagaagtagactccgatgtcgccaagcccaaccaggcctgcatatcaactgtcacggctgaagacttgttaaggtcctcaataagtttcccttctggtaaaaagattggagtgttgtctctagaatctcttcacgcaagcacacggagttcagcaaggcaggccctcggaatcacgattgttagacagcctgggcgtcgaggaacaggcgatttacaactcgaaccctttctgtactttatcgtcagccagccgagcctgctcctttcctgccaccataggaaacagcgggtggaagtcagcatcttcgacgccgtcctgaaaggagtggccagcgactacaagtgtatcgaccccggaaagaccctgccagaagcactggactattgcaccgtttggctgcaaacagtgccaggagaaatagattcaaagtcagggattcctccaagttttatcaccctccaaatcaaagacttcctgaatggccctgccgacgtgaacttggacatcagcaaacccttaaaggccaacctttcgttcacaaaactagaccagattaacctgtttctcaagaagatcaagaatgctcatagtctggcgcactcagaagaaacttccgcaatgagtaacaccatggtcaataaagatgatctgcccgtgagtaagtattaccgtggaaagcttagtaaacctaaaattcatggagacggtgtgcagaaaatctccgctcaagaaaatatgtggcgagctgtcagctgctttcagaaaatttccgtgcaaacaacacaaattgttatcagcatggagacggtgcctcacacctccaagccatgcttattggccagtctgagcaacctgaacgggtccctttccgtcaaggcgacccaaaaggtgccaggtatcatcctgggatcaagctttctcctgtccatcaatgattttttgctcaagacctctctcaaggagaggtcgagaattctcattggcccttgctgcgccactgccaacttggaggcgaaatggtgcaaacacagcggaaaccccggaccagaacagagcatccctaagataagcatcgatcttcggggtggcttactgcaagtattttggggccaggagcatctgaactgtctggtcttattacacgagctactgaacggttacctgaatgaggaggggaactttgaagttcaagtctccgaacccgtgccacaaatgtcgtcacccgtggagaagaaccagactttcaagtccgagcaatcaagcgatgatctcagaacaggacttttccaatatgtccaggacgcagagtccctgaagctgcccggtgtgtatgaagttttgttctacaatgagactgaggattgcccaggcatgatgttatggagatacccagaaccccgagtgttgactctagtccggatcactcccgttcccttcaataccacggaagatcccgacatctctaccgccgacctgggagacgtcctgcaggtgccatgtagtctggaatactgggatgagctgcaaaaggtgtttgtagcattccgcgaatttaacctgagcgagtctaaggtgtgcgagcttcaactgccagacatcaacctggtgaatgatcagaagaaactggtgtcatccgacctgtggaggattgttttaaattctagtcagaatggcgcagacgatcagagctccgcctcagaaagcggatctcagagtacctgcgatccactcgtcactcccactgcgctggccgcttgtacgagagtggattcatgcttcacaccttggtttgtgcctagcctatgtgtttcgttccagttcgcccatctcgagttccatctgtgccaccacctcgatcagcttggtaccgctgcccctcaatatctgcagccgtttgtgtctgaccggaacatgccatcagaacttgaatacatgatcgttagcttcagggaaccacacatgtacctccgccagtggaataacgggtccgtctgtcaggaaatacagtttctggcacaagcggattgcaagctgttggagtgcaggaatgttactatgcagtcagtggtcaagccgttcagcatattcggacaaatggcggtctctagcgacgtggtggagaagctcctggattgtaccgtgatcgtggactccgtgttcgtcaacttagggcagcacgtggtgcactcactgaacaccgccatccaggcttggcaacaaaataagtgccccgaggtggaggaactggtgttttcgcactttgttatctgtaatgatacacaggagaccctccggtttggccaggtggacaccgacgagaacatccttctcgcaagtctgcattcacaccagtactcctggagaagccacaaatctcctcaactgctgcacatatgcattgaaggatggggcaattggcgctggagtgagccatttagcgttgaccatgcaggcacgttcatcagaacaattcagtaccgaggcaggactgcctctttgatcattaaggtccagcagctgaacggtgtccaaaagcagatcatcatatgtggcagacaaatcatttgctcctacctatctcagagcatcgagctgaaagtggtacaacactatattggacaagatggccaggcagtcgtgcgagaacactttgattgtctgactgctaaacagaaactgccctcctacattctcgaaaacaacgaattaacagaactgtgtgtgaaggccaagggtgatgaggactggtctagagacgtctgtctagaatcaaaggcaccagagtactcaatagtgatccaggtgccttcttcaaattccagtattatttatgtgtggtgcaccgtgctgactctagagccaaatagccaggttcagcagcggatgatcgtctttagtcccctttttatcatgcgctcacacctgcccgatcccattatcatccatctcgaaaaacggagtttgggtttgagcgaaacccaaattatccccggaaaagggcaggagaagcccctgcaaaacatcgaacctgacctagtccatcacctgaccttccaggcacgggaagagtacgatccttccgattgcgcggttcctatctccacttcactaatcaagcagattgcgacaaaggtgcaccccggtggcacggtgaatcagatcctggacgaattctacggaccagagaagagcctgcagcccatctggccttacaataagaaggattcggaccgtaacgagcagctgtcccagtgggattcacccatgagggtgaagctgagtatctggaagccttatgtgaggaccttactcatcgaactcctcccctgggccttgctaatcaatgagagtaaatgggacctttggttatttgagggagaaaaaattgtactgcaagtccctgccggtaagatcattatcccacctaacttccaggaggcctttcagatagggatttactgggcaaacacaaacactgttcacaagagtgtggctatcaaattagtccataacctcacatctcccaagtggaaggacggaggtaatggcgaagtggttacactcgatgaagaagcgttcgtggacacggagattagactgggagcctttcctggacaccagaagctctgccagttttgcatttccagtatggtgcagcagggaatccagatcatccaaatcgaagacaagaccaccatcattaataacactccttaccaaatcttctataagccccaactgtcagtatgcaacccccactctgggaaagagtattttcgggttccagacagcgctactttcagcatctgtccaggaggggagcagcccgctatgaagtcctcatcactcccatgctgggatctgatgccagacatatctcagtcggtgttagatgcatcccttctccagaaacagatcatgctcggattcagccctgctccgggagcagattcctcacaatgttggagtctgcccgcaatcgtcagacccgaattccctagacagagcgtcgctgttccactgggcaatttcagagagaacggcttctgcacacgcgctatcgtgctgacctatcaggagcacctcggggtgacatacttgaccctcagcgaagacccatctcccagggttatcatccataaccgctgccctgtaaagatgttgattaaggaaaacatcaaagatattcctaaattcgaagtgtattgcaagaaaataccttctgagtgctccatccaccatgaactctatcatcagatctcatcttaccccgactgtaaaactaaggatctcctgccttccctcctgctgcgcgtggaacctctcgacgaggttaccacagagtggagtgacgcgatcgacatcaactcccaaggaacacaggtcgtcttccttacgggcttcgggtacgtgtacgttgacgtcgtgcaccagtgcggcacggtctttatcactgtcgctcctgaaggaaaagcgggtcctatactcaccaataccaaccgcgcacctgagaagatcgtaacattcaagatgttcatcacccagttatccctggctgttttcgatgatttgacgcaccacaaggctagtgccgagctgctgcggctgacccttgataacattttcctctgtgtggcccctggggctgggccattgcctggggaagaaccagtggccgctctctttgaactgtactgcgtggaaatctgttgcggggatctgcaactagataaccagctttataacaaatctaattttcatttcgcggttctcgtgtgccaaggagagaaagccgagcccatacagtgttctaaaatgcaaagcctgttgattagtaataaggagctggaagaatacaaggagaaatgctttataaagttatgtatcactctcaacgagggcaaaagtatcctgtgcgacatcaacgaattctctttcgaactgaagccagccagactgtacgtagaggatacattcgtgtactatatcaagaccttattcgacacctacctccccaactcaagactcgcagggcacagcacacacctgtccggcggaaagcaggtcctgccaatgcaggtcactcagcacgcacgggctctcgtgaaccccgtaaagctacgcaagctcgtaattcagccagtgaacctgctcgtgagcatacacgcctccctgaagctgtatatcgcttccgaccacacccccctcagtttttcagtctttgaaagaggcccaatcttcacgactgcacgtcaactggtccacgctctcgctatgcattacgccgctggagcactgttcagggccggttgggtcgtcggctctctggacatcctgggctcacctgccagcctcgtgcgcagcattggaaacggggtcgccgatttctttagactaccctatgagggtctgactcggggtccaggagcctttgtcagcggagtaagccggggtaccacaagcttcgttaaacacatatccaagggtacactcacatctatcaccaacctggcaacttcgctagcccgtaacatggacaggctgtctctcgacgaagagcattacaataggcaggaggagtggagacggcagctccctgagagtctgggcgaagggttgcgtcagggtctctcacggctgggcatatccttgctcggtgccatcgcaggtatcgtcgaccagcccatgcaaaacttccagaaaacctccgaggctcaagctagtgcaggtcacaaggcaaaaggagtgatttccggagttggcaaggggatcatgggcgtgtttaccaaaccgattggcggagcagcggagctggtctcccagaccggctacggaatcttacacggagctggcctgtcccagctgcccaagcagcgccaccagccaagtgacttgcacgctgaccaggccccaaattcgcacgttaaatacgtgtggaaaatgctgcagtctctggggaggcctgaagtacatatggcacttgacgtggttttggtgagaggttcgggacaggagcacgaaggctgtcttttgttgacctctgaagtcctgttcgtggtgtctgtgtccgaggacacacagcagcaggcgttcccagtgaccgaaatcgattgcgctcaggactcaaagcaaaacaacctacttacagtgcagctgaaacagccacgcgttgcctgtgacgtcgaggtagacggagtgcgtgaacgcttgtctgaacagcaatataatcggttggtggactacatcacaaagacatcatgtcacttagctcccagttgtagcagcatgcagatcccatgcccggttgtggccgcagaacctcctccaagcaccgtgaagacctatcactaccttgtggacccccactttgcccaggtatttctaagcaagtttaccatggtcaaaaacaaagcccttagaaaaggctttccatag

SEQ ID NO: 243938 - DNA, 14019 bp, Artificial Sequence
  derived and/or modified sequence
ggcgcggtacaggagcagcactgccggcgggggcgggtgccagggacttggaggtggaggggacgcggcggtactctggcgtcttccgacttcgactccttaccttaaaagatgctggagtcatatgtaactccaattttaatgagctatgtgaatcgctacatcaagaacttaaagccgtcggatctacagctttcactatggggtggagacgtggtactcagcaagctcgagttaaagttggatgtgctggaacaggaactgaaattaccattcacttttttaagtggacatattcatgaattgaggattcatgtaccatggacaaaactgggttcagaaccagtggtaattaccatcaatactatggaatgcattttgaaacttaaggatgggatacaggatgaccatgaaagctgtggttctaattctaccaaccgtagtactgctgagagcacaaaatcatcaatcaaaccgcggagaatgcagcaggctgctcctacagatcctgacttaccaccaggttatgtgcagagtctgattagacgagttgtaaataatgtaaacattgtgataaataatctcatactaaaatatgttgaagatgatatcgtcctttccgtcaatatcacttctgcagaatgttatacagtaggtgaattatgggatcgtgcattcatggatatttctgcaactgatttggtgctgagaaaggttatcaatttttctgactgtacagtttgtcttgataaacggaatgccagtggtaaaatagaattttaccaggatcctttattatacaaatgttccttcagaactcgtcttcattttacatatgaaaacctaaattccaagatgccatctgttattaaaattcatactttagtggaaagtttgaaactttctatcacagatcaacaactgcctatgtttattcgtataatgcaacttggaattgctctttactatggagaaataggcaattttaaagaaggcgaaatagaggaccttacttgtcataataaagatatgctaggaaacattacaggttctgaagatgaaacaagaatagatatgcaatatcctgctcagcataaaggtcaagagttatattcacagcaagatgaggagcagccacagggatgggtgtcatgggcctggtcctttgtgcctgcaattgtgagttatgacgatggcgaggaagactttgttgggaacgatcctgcatcaaccatgcatcaacaaaaagcacagactttgaaggatcctattgtttctataggattttattgcacaaaggcaacggtgactttcaaactcacagaaatgcaagttgagagtagttattacagtccacagaaagtaaaatctaaagaagtattgtgttgggaacaagaaggaactacagttgaggcccttatgatgggagaacctttctttgattgccagattgggtttgttggttgcagagccatgtgccttaaaggaattatgggtgttaaagattttgaagagaatatgaatagaagtgaaactgaagcctgtttcttcatttgtggtgacaatttgagtacgaaaggtttcacataccttacaaattcattgtttgattaccgaagcccagaaaataatggtactcgcgcagaatttatcttggattcaactcatcataaggagacatacactgagatagctggaatgcaacggtttggggctttttatatggattacctgtatacaatggagaacactagtggcaaaggttccacaaatcaacaagacttttcttcagggaaaagtgaagatttgggaacagttcaggagaagtccaccaaaagccttgttataggtcctcttgattttcgtttggatagcagtgcggtgcataggattttgaaaatgattgtgtgtgccttggaacatgaatatgaaccatatagcaggctaaaatcagatattaaggatgaaaatgaaacaatactgaatcctgaagaggtggctcttctggaggaatatattcctactcgacatacaagtgttactctcctcaaatgtacctgcacaatttccatggctgaattcaacttgctggaccatttactacctgtcattatgggagaaaagaactcaagtaacttcatgaatactacaaacttccagtctcttcggcctttgccatccattcgaatattggtggataaaattaatctggaacattcagtgccaatgtatgctgaacagttggtgcatgtggtcagcagccttactcaaccttctgataacctgcttcattattgttatgtacactgctatcttaagatatttggtttccaggcaggactgacgtctttggattgcagtggatcttactgcttacctgtaccagttattccctctttcagcactgctctttatgggaaacttctgaaactccccacatgctggaccaaaagatctcagattgctataactgaaggtatatttgaacttccaaatctcacaattcaagctacaagagcacagacacttctcttgcaagcaatatatcaaagttggtctcatcttggaaatgtcagctcttccgcagtgattgaagctttgataaatgaaatcttcctaagtataggtgtgaaatctaagaatcccctgccaactcttgagggctcaatccagaatgttgaattgaagtactgcagcacatcattggtcaaatgtgcctctgggaccatgggatcaataaaaatttgtgccaaagccccagttgatagtggaaaagagaagttgattcccttgcttcagggtccttctgacactaaagaccttcatagcaccaagtggctcaatgagagtagaaagccagagtctctcttagctccagatttgatggccttcacaatccaagttccacaatatattgactactgccacaattccggtgctgtacttctttgcagtatacaaggactagcagttaatattgacccaatcttatatacgtggctcatctatcagcctcagaaacgaacaagtagacatatgcaacagcagcctgtggtagctgttcctcttgttatgccagtttgtagaaggaaagaggatgaggtgtctattggaagtgcccccttggcaaagcagcaatcatatcaggcctctgaatatgccagcagccctgtaaaaacaaaaacggtaacagaatcccgcccattgtcagttcctgttaaagccatgttgaatatatctgaaagctgtagaagtcctgaagaaagaatgaaggaatttattggaattgtttggaatgcagtgaagcatctcacactacagcttgaagtacaatcttgttgtgtgtttattccaaatgatagcctgccttccccaagtacaattgtatctggtgacattcctggaacagtaagaagttggtaccatggacaaaccagcatgccgggaacacttgtcctctgtttgcctcaaataaagattattagtgctgggcacaagtatatggaacctctgcaggagattccatttgttatcccacgacccatccttgaagaaggtgatgcttttccttggacgatcagcttgcataatttcagcatatatacccttcttggaaaacaagtgacactttgcctagtggaacctatgggttgcacctccactctagctgtcacgtctcaaaaactgcttgctacgggacctgatacacgacattcatttgttgtctgtctccatgttgacctagagtcactagagataaaatgctctaatccccaggtccagctcttctatgaactaactgatatcatgaataaggtctggaacaagattcagaagagaggcaatctcaacctatctccaacctctccagagaccatggcagggcctgttcctacttctccagttagaagcagtataggcacagctcctccagataccagcacatgcagcccatctgctgacattgggactactactgagggagattctatacaagcaggtgaggaatcaccattctcagattctgtgaccttggaacaaactacaagtaatattggaggaaccagtggacgtgttagtttatggatgcagtgggtgcttcccaaaattactataaagctctttgctccagatcctgaaaataaaggcacagaggtttgtatggtcagtgaactagaagatctcagtgcttccatagatgtccaggatgtatataccaaagtgaaatgtaaaatagagagtttcaatattgatcactatagaagcaggccaggggaaggttggcagtcaggacattttgaaggagtatttctacaatgcaaagaaaaatctgtgacaactacaaaacttctagatggcactcatcagcagcatggattcctctctctgacatacacaaaagctgtaacaaaaaatgtccgccacaagttaacatcaagaaatgagcgaagaagttttcataagttatctgaaggcctaatggatggttctcctcattttcttcatgaaattcttctttcagcacaagcttttgatattgttctttattttcctttacttaatgccattgcaagtatatttcaagcaaaactaccaaagacccaaaaagagaaaagaaaatctcctggtcagcccatgaggacccatacactgacatcccgcaatttacctttgatttatgtcaacacaagtgtaatcagaatttttattccaaaaacagaagaaatgcagccaactgttgaagctaatcaggcagcaaaagaagacactgtggttttgaagattggctctgttgccatggctccccaggctgacaatccccttggcagatctgtccttaggaaagatatttaccagagagccttgaacttaggaattcttcgagatcctggatcagaaatcgaagacagacaataccaaatagatctgcagtccatcaatattggtactgcacagtggcatcaactaaaaccagagaaggaaagtgtctcaggaggggtggtaacagagactgaaaggaattctcaaaatccagcccttgagtggaatatggccagcagcatacggcggcatcaagaaaggagagcaattttgacccccgttttgacagatttttctgtccgaataactggagcacctgctgtcattttcaccaaagtagtttctccagaaaatttgcatactgaggagattttagtgtgtggccattccttagaagtgaatataaccacaaacctggacttcttcctaagtgtggctcaagttcaactcttacatcagttaatagtagcaaatatgactggactggaaccatcaaacaaggctgcagagatctctaaacaagaacagaaaaaagtggatatatttgatggaggcatggctgaaacctcatctcgctacagtggtgctcaggatagtggaattggcagtgacagtgttaaaatcagaatagtgcaaatagagcagcacagtggtgccagtcagcatcgcattgcccgtccctcacgccagtcatcaattgtaaaaaatctaaattttattccctttgacatatttattactgcaagtagaatctcactaatgacctattcctgtatggccttatccaaatcgaaatcacaagaacagaagaataatgaaaaaacagacaagagttcattaaatctcccagaagttgattcagatgttgctaagcccaaccaggcatgtatttccacggtgacagcagaagatctcttaaggagcagcatttcttttccttcagggaaaaaaataggggtcctctctcttgaaagtcttcatgcatccacaaggtcatctgctagacaagcacttggtataactattgttcggcagcctggtcgaagaggaactggtgacttacagctagagccttttctgtactttattgtgtcccagccttccttgcttctgagttgtcaccacagaaagcagcgagtggaagtatccatttttgatgctgtgcttaaaggggtggcctctgattacaaatgtatagatcctgggaagactctgcctgaagcccttgattattgcactgtttggctacagacagtgcctggagaaatagacagcaaaagtggtattccaccttcctttataacactacagattaaagactttctgaatggaccagcggatgtcaatttggatatatcaaagcctttgaaagcaaacctgagtttcaccaaactggatcagataaacctttttttaaagaagataaaaaatgcacacagtttggcacatagtgaagagacttcagccatgtccaacaccatggtgaataaggatgatcttccagtctccaaatattaccgtggaaagttgtctaaacccaaaattcatggtgatggagtgcaaaagatttcagctcaagaaaacatgtggagagctgtttcctgctttcaaaaaatttctgttcaaactactcagattgtgatctccatggaaactgtaccccataccagcaaaccatgcctgttagcatctctctcaaacctcaatggaagccttagtgtcaaggcaacacaaaaagtacctggcataattcttgggtcatcatttctactcagtataaacgattttctccttaaaacaagtctcaaagaaagaagccgcattctgataggaccatgttgtgctactgccaatctggaagctaagtggtgtaaacacagcgggaatccaggcccagaacaatccataccaaaaatatccattgacttaagaggaggtctactacaggtcttctggggtcaagaacatttgaattgtttagttcttctacatgaattactcaatggataccttaatgaggagggaaattttgaagtacaagtttctgaaccagtgcctcaaatgtcatctcctgtggaaaagaatcagacatttaaaagtgaacaaagttcagatgacctacggacaggtctatttcagtatgtacaggatgctgaatctttgaaattgcctggggtctatgaagtcttattttataatgaaactgaagattgcccagggatgatgttatggagatatccagaacctagagtactcacccttgtacgaataactcctgtaccttttaacaccacagaggatccagatattagcacagcagaccttggtgatgtgctacaggttccttgtagcttggaatactgggatgaactccagaaggtttttgttgcatttagagaatttaatctgtctgaaagcaaagtttgtgaactgcagttgccggatatcaatctcgtgaatgaccagaagaaattagtatcttcagatctttggagaattgtcttgaacagcagtcaaaatggagctgatgaccaaagctctgcaagtgagtctggttctcaaagcacttgtgatccacttgtgactccaacagccctggctgcctgtaccagagttgactcctgctttaccccatggtttgtcccatccctttgcgtttctttccagtttgctcacctggaattccatctttgtcatcaccttgaccaactaggcacagctgcaccacagtacctacagccatttgtttccgacagaaatatgccatctgaactagaatacatgattgtttccttcagagaaccacacatgtatcttcgacagtggaataatggttctgtctgtcaggagatccagttcttagctcaagcagactgtaaacttctagagtgcagaaatgtcactatgcaaagtgtggtgaaacccttcagcatcttcgggcagatggcagtttccagcgatgtagtggaaaagctgcttgactgcaccgtgatagttgattctgtatttgtaaaccttggacagcatgtagtccattcactaaacactgcaatacaagcttggcaacagaacaaatgccctgaggtagaggagttggtcttcagccattttgtgatctgtaatgacacacaggagacactgcggtttggccaggtggatactgatgaaaatattctgctggcgagtctccacagtcaccagtacagctggcgctctcacaaatccccacagctgttacacatctgtattgaaggttggggcaactggcgttggtcagagcctttcagtgtggaccatgccgggacttttattagaacaattcagtacaggggtcgaactgcttctctcatcatcaaggttcagcaactcaatggagtacaaaaacagattatcatctgtggaagacagatcatctgtagttacttgtctcaaagcatagaactaaaagtcgttcagcattacattggtcaagatggacaagctgtagttcgggaacattttgactgcctcacagccaaacagaaattgccttcgtacatactagaaaacaatgaactgacggagctgtgtgtgaaggccaaaggagatgaagactggtcaagagatgtgtgcctggaatccaaagcccctgagtacagcattgtcattcaggtgccatcttcaaacagttccattatttatgtctggtgcacagttttgactttagaacccaactctcaagtgcaacaacgaatgattgtgttcagccctctttttatcatgaggagtcatcttccagaccccattatcatacatttggagaaaaggagtctgggattgagtgaaacacaaattattccaggaaaagggcaggaaaaaccactgcaaaacatagaacctgaccttgtacatcacctgacattccaagcaagagaagaatatgatccttcagattgtgcagttcccatctcaacatccctcattaagcaaatagccactaaggtacaccctggaggcacagttaatcagatccttgacgaattctatgggccagaaaagtcgcttcaacccatatggccctataataagaaggattctgacaggaatgaacagctaagtcagtgggatagcccaatgcgagtgaagctgtcaatctggaagccatatgttagaactttgttgatagaacttctgccctgggccctgcttatcaatgaatccaaatgggacctctggctatttgaaggagagaaaattgttctacaggttcctgctggcaaaattattattcctcctaattttcaggaagcttttcaaattggaatatactgggcaaatacaaacactgtgcacaagtcagtagcaattaaactggtccataacctgacatctccaaagtggaaagatggaggtaatggtgaagttgtgacactggatgaagaagcgtttgttgatactgaaataagacttggtgcttttccaggacatcagaagttatgtcagttctgcatttcctccatggtacagcaaggtatacaaattattcagattgaagacaagactacaataatcaataatacaccatatcaaatattttataaaccacagctatctgtctgcaatccccattctggaaaggagtattttcgtgttccagacagtgctacttttagcatttgcccaggtggagagcagcctgctatgaaatccagctcccttccttgctgggacttgatgcctgacatcagtcagtcagtactggatgcatccctgcttcagaaacagatcatgctgggcttttctcctgccccaggtgctgacagctcacagtgctggagcctgccagctatagttagaccagagtttcccagacagagtgtggcagtacccctcgggaatttccgggaaaatggattctgtaccagggctatagtgctgacatatcaagaacacctcggagtgacttatttaaccctctcagaagaccctagtcctcgagtaattatccacaatagatgtccagtaaaaatgcttataaaggaaaacattaaagatattccaaagtttgaggtttattgcaaaaaaattccctccgagtgctcaattcatcatgagctgtatcatcagatttccagttatccggactgcaagaccaaagacttacttccaagcctacttttgagagttgaacctctagatgaagtaacaactgagtggagtgatgccattgacatcaacagtcagggaacacaggttgtgttcctgactggctttggctatgtgtatgtggatgttgtacatcagtgtggcacagtcttcatcactgtggccccagaaggaaaagcaggacctattttaaccaataccaacagagcgccagagaagattgttacatttaaaatgttcatcactcagttaagcctggcagtgtttgatgacctcacccaccacaaagcatcagctgagcttctgagactcacactggacaacatttttctctgtgtggccccgggagctggtcccctccctggggaagagcctgtggctgcgttgtttgaactttactgtgtggagatctgctgtggggacctgcagctagacaaccagctttataacaagtccaatttccactttgctgtcttagtctgccagggagaaaaagcagaacccattcagtgttccaaaatgcagagtctcctcatatccaacaaagagttggaagaatacaaggaaaaatgttttatcaaactttgcatcaccttaaatgaaggcaagagcatcctctgtgatattaatgagttcagctttgaattaaaacctgctcggttatacgtggaagacacatttgtatactacatcaagactttgtttgacacctaccttcctaacagcaggttggctggtcactccacacacctctccgggggtaaacaggtgttgcccatgcaggtcacacagcacgccagggccttggtgaatcctgtgaagttacggaaactggtgatccagccagtaaatttgctcgtcagcatccacgcttccctcaagctgtacatagcctcagaccacactcctctctccttctcggtgtttgaaagaggacccatcttcaccactgcgaggcagcttgtgcacgccctggcaatgcactatgccgctggggccctttttagagcaggctgggtagttgggtctctggatattcttggcagccctgcaagcctggtgagaagcatcgggaacggggtcgccgacttcttcaggcttccgtatgaggggctgacccggggccctggagccttcgtgagtggcgtctccagagggaccacatcgtttgtaaagcacatctccaaaggtaccctcacatccatcaccaacctcgccacaagcctggcccggaacatggaccggctctcactggatgaggagcactacaaccggcaggaggagtggcggcggcagctccccgagagcctgggcgaggggcttcgacagggcctgtcccggctgggcatcagcctgcttggtgcaattgctggtatagttgatcagccgatgcagaacttccagaaaacatctgaggcacaggcttcagcaggacacaaggccaagggtgtcatctcgggtgtggggaaaggaatcatgggggtgttcacaaagcccatcggaggagctgctgagctggtgtcacagactggctatggtattttacatggagctggactttctcagcttcccaaacagcgccatcagccaagtgatctacatgctgaccaggctccaaacagccatgtcaaatatgtctggaaaatgcttcagtctctgggcagaccagaagtccacatggccctggacgtggttctggtgaggggctcaggccaggagcatgaagggtgcttgctgctgacatcagaagtgctcttcgtggtgagtgtcagtgaggacacacagcagcaggccttccccgtcacagaaatcgactgtgcacaggacagcaagcagaacaacttactcacagtgcagctcaagcagccaagagtggcctgtgatgtggaggtagatggagtccgagagagactgtcagagcaacagtacaacagactggtggactacatcacaaagacatcttgtcacctggcccccagctgttcttccatgcaaataccatgccctgtggtggctgcagaacctcccccctccactgttaaaacataccattacctggttgatccacattttgctcaggtcttccttagtaaatttaccatggtgaaaaataaagccctgaggaaagggtttccttgagtcccctctgaggtgtttattcctgcttgtgtgatttagtttttgggtttctttgagacagggtctcactgcattgcccttgctgacctcaaattctggggttcaagcaatcctcccacctcaacccacaagtagctacgactgcaagcacctgccaccataaagggctgcattttgccaccataaagggctgcatttttttaaaaagcctaggcagctctaacatcatctgatatggacacaaggccaacagtttccttatttacatccttacctctaaaagatacttcaaagtgacaaaaacgtgttccttccccacttagagacaatgattaacagggccctatatgttcttaccacatacagaggatgcatttatttttgctctatgacacttgcaaaaatctctactgtaattaatttgggtctattattaactctctgttccatcatagaatgtggccaggccttacaatggagagccagagttaaaacttcaagttgcatctgtttttgggctgagtcaccacctttgcctcatgctcctttgtctgcaaaggcctaggattctttctttaaatgaaatgcttaggactttgtggcttgttacatttgtcatttaactgcagtgctattctttgaaagctgctatgtgtattttctctgaagtctgcattttactaaaatttacaacagtctgatgattgattgattactgtccaggtacattttagaaaaagtgttcttcttccagtttgttttactaagcaaactttgagtaaatcctttgtcctatattgaatccagtcccaaagtgttcaggtgagtttctctagttccataaacaaaacatacatagtgggaactccctggtatgccatagagcacacaagaaccccaatattaatgctaacaattataccagtccattttgtttattctgtggaattgacttgacaaagcatgaagatattcccagtgtctgtctgataatattttgcatctaagaatgggtttgactcaagatcttgggttaccaagatgtcttaaatgttcagtaaatatctttcttacagtccagtagcttagagcatgtttgctgattgatattacatttaaacttggggctacagcttgttacctagaattttgagatactaagagaatgcaattttaaatgcccactggttttatttgttttggagagagggtctcattctgtcacccaggctagagtacagtgggaacagtcatggctcactgcagcttaagctcactgcctgggctcaagtgatcttactccagcctcccaagcagctgggactacaccaccacaggtatgcaccaccatacctggctgatttttaaaattttttctagagatgaggtctcactatgttgcccagctggtctcatactcctcagttcacgcattcctcccacctccacctcccaaactgctgggattacaggtgtgagccaccatgcccaacacccactgatctttaactctcacatgttgggcataagaagtcactatataattgttactggaaagcaagacttaacgaacaattctgactatgaaaaatgtctctttcagtttgttctgtaaatatttagaaaagtgacagctgtcaacctcagagtaactatttctaaaaatgtaaatatgtattaatccttgtatcttttatggtaattttgcatattgatatgaattatataaaattgtttaaaataaaaggtgtccttgaattactgaccacccatagatgtctactgttaccaggttttacaatgcaaattttcactaatacctgggtttaatacagctcacatcactgaatgttacacatgagtttaaatgggtaatatacaggttttgttataataaagttactgattaaatta

SEQ ID NO: 243939 - protein, 295 aa, Artificial Sequence
  derived and/or modified sequence
MRHSVARPTRLPRRLSPFWDPATCKNLEGGAGEVVRGRDPRRLRTSRSTEILGEDLAGPSAGAAARPAAPPPQPREPGAPGLRRAPPRTRMDSSGLGPCSEAPLHTSAGLSGRNLRAAGGVLPVDLERERAALCARQSGHGPPAVRWLLGSRGAESGGLARRRVAAEHAQPSANLVCRSALETSAFPPSKPKSPRGRVRARSSDGRLRHPAWRAGSGGRGGRGPSAELASRYWGRRRALPGAADLRPKGARADDRRPLRAGRKLHLPEAARLPGNVGKSGEPHKAGEVGNHPRDS

SEQ ID NO: 243940 - DNA, 888 bp, Artificial Sequence
  derived and/or modified sequence
atgagacacagcgtggccagacccaccagactgcccagaagactgagccccttctgggaccccgccacctgcaagaacctggagggcggcgccggcgaggtggtgagaggcagagaccccagaagactgagaaccagcagaagcaccgagatcctgggcgaggacctggccggccccagcgccggcgccgccgccagacccgccgccccccccccccagcccagagagcccggcgcccccggcctgagaagagccccccccagaaccagaatggacagcagcggcctgggcccctgcagcgaggcccccctgcacaccagcgccggcctgagcggcagaaacctgagagccgccggcggcgtgctgcccgtggacctggagagagagagagccgccctgtgcgccagacagagcggccacggcccccccgccgtgagatggctgctgggcagcagaggcgccgagagcggcggcctggccagaagaagagtggccgccgagcacgcccagcccagcgccaacctggtgtgcagaagcgccctggagaccagcgccttcccccccagcaagcccaagagccccagaggcagagtgagagccagaagcagcgacggcagactgagacaccccgcctggagagccggcagcggcggcagaggcggcagaggccccagcgccgagctggccagcagatactggggcagaagaagagccctgcccggcgccgccgacctgagacccaagggcgccagagccgacgacagaagacccctgagagccggcagaaagctgcacctgcccgaggccgccagactgcccggcaacgtgggcaagagcggcgagccccacaaggccggcgaggtgggcaaccaccccagagacagctag

SEQ ID NO: 243941 - DNA, 2786 bp, Artificial Sequence
  derived and/or modified sequence
attatcttttaactagacagtctagctttctcagggcaagacaaaaatgtcccaattacttgtcagcagtttttagtggaggaaaaactgcagttaaagcacctttactgagaactttgagcagtaaatgtgcttacatatttagtttgtgcaactttgattaggaattggatggtgagttgggatcccccagtccttagctttttgctggagttctgtaaatctcaaaatgtcagccacaggccatttcttttggtttatttaagtgtagattttttaaaaaatcactttttccacttcatggctcctttggaccagggtataaaaatagcgatgccaccaggagccaagctctttctggaataatgaagcaggcgaggacggagccttgctcaggacgacagaaggcttgcagcctgcctcaaacgcaactctaatttcagccacttcacttcttccccccgcgctcagacttgcctcaaaggaaggagccgtttatgagacactccgtggcgcgcccaacacggttacccaggcgcctatcacccttctgggacccggccacctgtaagaacctggagggcggagcgggcgaggttgttcggggaagggatccccggcggctgaggacatccaggagcaccgagattcttggggaggacctcgccgggcccagcgcaggagccgccgcgcgtccagcggctccaccgccgcagcctcgggaaccgggcgccccaggtctcaggcgcgccccgccgcggacgcgaatggactcgtccggcctcggcccctgcagcgaagctccgcttcacaccagcgctgggctgtccggccgcaacctgcgcgccgcggggggcgtcttacctgttgatcttgagcgcgaacgcgcggcgctctgcgctcggcagagtggccatggcccgccggcggttcggtggcttctagggtcgcggggtgcggaaagcgggggcctggcgcgccgcagagtagccgcggaacatgcccagccaagcgcaaacctcgtctgtcggtcggcgctggaaacttccgcatttccaccttctaagccgaaatcaccccgggggagggtccgagctcggagcagcgacggccggctccgccacccggcctggcgcgcaggcagcggcgggcgaggagggcgtgggcccagcgcggaactggcctcccgatactggggcagacggcgcgctctgcccggggccgccgacctccggccgaagggagcgcgggcggacgacaggcgaccactgcgcgcaggccggaagctccatctgcccgaagctgcgaggctgccagggaatgtaggcaagtcgggggagccccacaaagctggcgaggtcgggaatcaccccagggattcgtaaggctaggtgttattaagggttgacaccattctcgaagaaggcagccaaaaaaaaagacaaaaaagttagtggaatctatcaggattcaaatcaacttttgcaagcaatatgcccatcatccttcctgagacactaaataaatataatggattcatccaaggaataaacattatgagttctcaaaaaatgttttcgtcacaacctggcgtgaatgcttttctccggagaaacactgaaggcggcgttcttgcgattcaagggtacgctgcgtccaggtttatttcagtttcagactgaggtctgctaagaagcccggcctcaaactcaagataaaaacagaaaagtcccagtgttgacgggagtggaggagcccgtgttcgcttcaaggtgccggcgtgctgctctaacctgtgctatatatactcgagcactctccatataatgcctccatttaccaacttgctcttaaaaaataccaaagcaggccgggcgcggtggctcacgcctgtgatcccagcactttgggaggccgaggcgggcgcatcacgaggtcaggagatcgagaccatcctggccaacgtggtgaaaccccgtctctactaaaatacaaaaaattagccgggcgtggtggcgcacgccttagtcccagctacttgggaggctgaggcaggggaatcacttgaacccgggaggcggagcttgcagtgaaccgagatctgccactgcactccagcctggcgacagagcaagtctccgtctaaaagaaaaaaaaaaaaacaaccaaagcgaagtatttttggttcaaacctgcactatttaatatgatagccactagccacatgtggctattgaccactcggcattatggttagtctgaattgcccactgctggatgtgtaaaatgtacactggaatttaaagacagcgcagaaaacatcgtgtaaaatgtcttgttaatgattttcatgttgattgcatgttaaatgatactttggatataaaaaatatattattaaagttaatttcacctgtttgttttccccttttaaaaatgtggtttgcatttttaaaaatgtaaaattacacatgtggctcacatttgtgagcctcattatattcctattggacagtgccagtccaatacaacctaatttgtcacctaatactaaaatccacctaaggactatattcagtctcttcctgatacagccttccttcctggtttcagctgtgtcaggtagtttagtaacttttcagtactggttaggtaactccccgccccccaatgcccaccaaatatcagtgcccttttaagcatataagacaaagttcactgcatagactacaatagactacatacgaaaacaaacccaaagaaaaataaagcttttttgaaattta

SEQ ID NO: 243942 - DNA, 888 bp, Artificial Sequence
  derived and/or modified sequence
atgagacactctgtggctcggcccacacgattacccaggagactgtcaccattctgggatcccgctacttgcaagaacctggaggggggtgctggtgaggtcgtacggggccgggatccgcggaggctgaggacgtcccgtagcacggagatcttgggagaagacctggcaggtccctctgccggagccgccgccaggcctgccgctccccccccacaaccaagagaacccggcgccccagggctcagacgggctccaccaaggacacgcatggactcctctggcctggggccatgttctgaggcaccgctacacaccagcgctggcctatccgggcgcaatctgagggccgcaggtggggtgcttcccgtggacctggagagggaaagagctgcgctgtgcgcaaggcagtcaggacatggccccccagccgtgagatggctgctcggatcccgtggagctgaatccgggggcctggcaagaaggagggtggctgccgagcacgcacagccgtccgccaatttggtctgcaggagtgctctggagactagtgctttccctccaagcaagcctaaaagtccccggggtcgggttcgcgctagatcaagcgacggcaggctcagacaccccgcttggagggccggctcaggcgggagaggaggcagaggtccgtccgccgagctcgcgtcccgctattggggcagaagaagagccttgcccggggccgccgatttgagacctaagggtgcccgcgctgatgaccgacgtcctcttagggctggtcgtaaattgcaccttccagaggcggcgagacttcctggaaacgtgggcaagagcggtgagccacacaaggctggggaggtgggaaatcacccccgcgattcctag

SEQ ID NO: 243943 - DNA, 888 bp, Artificial Sequence
  derived and/or modified sequence
atgaggcacagcgtggcccggcccacccggctgccccggcggctgagccccttctgggaccctgccacctgcaagaacctggagggcggggccggggaggtggtgcggggccgggacccccggcggctgcggaccagccgcagcacagagatcctgggggaggacctggccggccccagcgctggagctgctgcccggcctgctgcccccccaccccagccccgggagcccggggcccctggcctgcggcgggccccacccaggaccaggatggacagcagcggcctgggcccctgcagcgaggcccccctgcacaccagcgctggcctgtctggaagaaacctgcgggccgccggcggcgtgctgcctgtggacctggagcgggagagagctgccctgtgtgcccggcagagcggccacggccccccagctgtgcgctggctgctgggcagcagaggagctgagagcggcggcctggcccggcggcgggtggccgctgagcacgcccagcccagcgccaacctggtgtgccgcagcgccctggagaccagcgccttcccccccagcaagcccaagagcccccggggccgggtgcgggcccggagcagtgatggccgcctgcggcacccagcctggagggctggcagcggcggccggggcggccggggccccagcgctgagctggccagccgctactggggcagaagaagagccctgcccggggctgctgacctgcggcccaagggggcccgggcagatgacagaagacccctgcgggccggcaggaagctgcacctgcctgaggccgcccggctgcctggaaatgtgggcaagtctggagagccccacaaggccggggaggtgggcaaccacccccgggacagctag

SEQ ID NO: 243944 - DNA, 888 bp, Artificial Sequence
  derived and/or modified sequence
atgcggcacagcgtggcccggcccacccggctgccccggcggctgagccccttttgggaccctgcgacctgtaaaaacctcgaggggggggcgggagaggtcgtccgtgggcgcgacccccggaggctgcggacatctaggtcgaccgaaatcctgggcgaagatttggcaggcccctcagccggagccgccgcccggccagcagctcccccacctcaaccaagagagcctggagctcccggcctgagacgcgcccctcctagaacccggatggattcctctggactaggaccttgttcagaagctccactgcacacaagcgccggcctgtccggtaggaatttaagagctgcagggggggtcctgcccgtcgacctggagcgtgagagggccgctctttgtgctagacaaagcggccatggaccaccagcggtacgctggttattgggttcaagaggtgctgaatccggggggcttgccagaagaagagtggccgccgagcacgcacaacccagtgcgaatcttgtctgcaggtccgcactggagacatcagctttccccccatccaagcctaagtcaccacggggacgggtccgcgcccgatcatccgacggccggcttagacacccagcctggcgcgccggtagcgggggccggggcgggcgcggcccatctgctgagctagcgtcccgctactgggggcgcagaagggcgttgccgggggccgcggacctacgacctaaaggtgctcgggccgacgatcgaagaccattgagggcggggaggaagcttcatctgcccgaggccgctaggctgcccggaaacgttgggaagtccggagaacctcacaaggccggcgaagttggaaatcacccacgagattcttag

SEQ ID NO: 243945 - DNA, 888 bp, Artificial Sequence
  derived and/or modified sequence
atgaggcactctgtggcccgtcccacgcggttgcctcgcagattgagcccgttttgggaccctgccacctgcaaaaacctggaagggggagccggtgaggttgtgagagggagggacccaagacggcttcgtacttcgcgcagtaccgaaatcctgggcgaagacctggccggaccgagcgctggtgccgctgctagaccagcagcaccaccccctcagccgagggaaccgggagcaccgggtctgcggagggccccacccagaaccagaatggatagctcgggactgggcccatgcagtgaggcaccattgcacaccagcgcaggccttagcggtcgtaacttacgagctgccggaggtgtgttacctgttgacctcgagcgcgagagggccgcactgtgtgccaggcagtctggacatgggcctccagctgtccgctggctccttggatcacgtggagccgagtccgggggactggcgaggcgcagggtagccgctgaacacgctcaaccctccgccaatctagtgtgtcgctccgctcttgagacttcagctttccctcccagcaagcccaagtctcccaggggacgggttcgcgcacggtctagcgacgggcgtctgaggcatccagcctggcgggctggatctggcggacgtggaggcagaggcccttccgcagaactcgcaagtagatactggggcagacggagggcacttcccggagctgcggacctgcgaccaaagggcgcacgcgcagacgatcgacgccctctgcgagctggcaggaaactgcacctgccagaagccgctagactgccaggcaatgttgggaagtccggggagccccacaaggctggcgaggtcggcaatcaccctagagactcgtag

SEQ ID NO: 243946 - protein, 479 aa, Artificial Sequence
  derived and/or modified sequence
MDATIAPHRIPPEMPQYGEENHIFELMQNMLEQLLIHQPEDPIPFMIQHLHRDNDNVPRIVILGPPASGKTTIAMWLCKHLNSSLLTLENLILNEFSYTATEARRLYLQRKTVPSALLVQLIQERLAEEDCIKQGWILDGIPETREQALRIQTLGITPRHVIVLSAPDTVLIERNLGKRIDPQTGEIYHTTFDWPPESEIQNRLMVPEDISELETAQKLLEYHRNIVRVIPSYPKILKVISADQPCVDVFYQALTYVQSNHRTNAPFTPRVLLLGPVGSGKSLQAALLAQKYRLVNVCCGQLLKEAVADRTTFGELIQPFFEKEMAVPDSLLMKVLSQRLDQQDCIQKGWVLHGVPRDLDQAHLLNRLGYNPNRVFFLNVPFDSIMERLTLRRIDPVTGERYHLMYKPPPTMEIQARLLQNPKDAEEQVKLKMDLFYRNSADLEQLYGSAITLNGDQDPYTVFEYIESGIINPLPKKIP

SEQ ID NO: 243947 - DNA, 1440 bp, Artificial Sequence
  derived and/or modified sequence
atggatgcgaccattgctcctcatcggataccgccggagatgcctcagtatggggaggagaaccacatcttcgaactgatgcaaaatatgctggaacagcttctgatccaccagcctgaggaccctatcccctttatgatacagcatctgcatagggacaatgacaacgtaccccggattgtgatacttggtcctcctgcatctgggaaaactacaattgctatgtggctgtgtaagcacctgaactccagtctgcttacgttagaaaatctgatcctgaacgaattttcctacaccgccaccgaggcacgccgcctctacctgcaacggaaaaccgtgccaagcgctctgctggtccagttaatacaggaaaggttggctgaggaggactgcattaaacagggatggatcctcgatggaattcctgagacccgcgagcaggcccttaggatccagaccctcggaataacaccacgccatgtgattgttctgagcgccccagataccgtgctgatagaacgaaacctcggaaagagaattgatccccagacaggagaaatttaccatacaactttcgactggcctcctgagtccgaaatccaaaacaggctgatggtccctgaagatatcagtgagttagaaaccgcccagaagctgttggagtatcatcgaaacatcgtaagagtgatcccttcataccctaaaatcctcaaggtgatttccgccgatcagccgtgtgtggatgtgttctaccaggcactcacctatgtgcagtccaaccatagaaccaacgcaccattcacaccacgcgtactgctgttggggccagtcgggagtggcaaaagtcttcaggctgcccttcttgctcaaaagtatcggctagtcaacgtctgctgcggacagctattgaaagaggccgtggccgataggaccacatttggagaactaatccaaccttttttcgaaaaggagatggcagtgcctgattcactactgatgaaagtgctcagccaacgtctcgatcagcaggattgtatccagaagggctgggtgctgcatggcgttccgcgagacctcgaccaggcccacttgctcaacaggcttggttacaatccgaatcgagtgttcttccttaacgtgccgtttgacagtataatggaacggctgactctcagaaggattgatccagtgacaggtgagcgataccaccttatgtataagcccccacccaccatggagattcaagccagacttctacagaatcctaaagatgcagaagagcaggtcaagttgaaaatggatttattctacaggaacagcgcagatttggaacagctttacggctctgcgattacacttaatggagatcaggacccatatactgtcttcgagtacattgagagtggtatcattaatcccctgcctaagaaaatcccttag

SEQ ID NO: 243948 - DNA, 1440 bp, Artificial Sequence
  derived and/or modified sequence
atggatgccaccatcgccccccaccgcatccccccagagatgccccagtatggagaggagaaccacatctttgagctgatgcagaacatgctggagcagctgctgatccaccagcctgaggaccccatccccttcatgatccagcacctgcaccgggacaatgacaacgtgccccgcatcgtcatcctgggccccccagccagcggcaagaccaccatcgccatgtggctgtgcaagcacctgaacagcagcctgctgaccctggagaacctgatcctgaatgagttctcctacacagccacagaggcccggcggctgtacctgcagaggaagacagtgcccagcgccctgctggtgcagctgatccaggagcggctggccgaggaggactgcatcaagcagggctggatcctggatggcatccctgagacccgggagcaggccctgcgcatccagaccctgggcatcacccccaggcatgtgattgtgctgagcgccccagacacagtgctgattgaaagaaacctgggcaagagaattgacccccagacaggagagatctaccacaccacctttgactggcccccagagagcgagatccagaaccggctgatggtgcctgaggacatcagcgagctggagacagcccagaagctgctggagtaccacaggaacatcgtgcgggtcatccccagctaccccaagatcctgaaggtgatctctgctgaccagccctgtgtggatgtgttctaccaggccctgacctacgtgcagagcaaccacaggaccaatgcccccttcaccccccgggtgctgctgctgggccctgtgggcagcggcaagagcctgcaggccgccctgctggcccagaagtaccgcctggtgaatgtgtgctgcggccagctgctgaaggaggccgtggccgacaggaccacctttggagagctgatccagcccttctttgagaaggagatggctgtgcctgacagcctgctgatgaaggtgctgagccagaggctggaccagcaggactgcatccagaagggctgggtgctgcatggagtgccccgggacctggaccaggcccacctgctgaaccggctgggctacaaccccaacagagtcttcttcctgaatgtgccctttgacagcatcatggagcggctgaccctgcggagaattgatcctgtgactggagagcgctaccacctgatgtacaagcccccacccaccatggagatccaggcccggctgctgcagaaccccaaggatgctgaggagcaggtgaagctgaagatggacctcttctacagaaacagcgctgacctggagcagctgtatggcagcgccatcaccctgaatggagaccaggacccctacacagtgtttgagtacatcgagagcggcatcatcaaccccctgcccaagaagatcccctag

SEQ ID NO: 243949 - DNA, 1440 bp, Artificial Sequence
  derived and/or modified sequence
atggacgccaccatcgccccccaccggatcccccccgagatgccccaatatggcgaggaaaaccacatattcgaattgatgcagaatatgctagagcagttactgattcatcaaccagaggatcctattccgttcatgatacagcacctgcaccgggacaatgataacgttccccgcattgtcattctgggaccccccgcatcgggaaagacaactatcgcaatgtggctgtgtaaacaccttaacagcagcctactgacccttgagaatctgattctgaatgagttctcctacacggctaccgaggcccggaggctgtatctgcagagaaagacagtgccaagtgcattacttgttcagctgatccaggagcgccttgctgaggaagattgtataaaacagggctggatcttagatggaatccccgagacaagggagcaagcccttaggatccagaccctcgggatcactccgcgccacgttattgtcctgagcgctccagacaccgtgcttattgaacgcaatttgggaaagcggattgaccctcagactggcgaaatatatcataccacctttgattggccccccgagtccgagatccagaaccgcctgatggtccccgaggatatcagcgaactcgagacagcccagaagttgctggaatatcaccggaacatcgtccgagtgattccctcctatccaaagattctgaaagtaatcagtgcagatcagccatgcgttgatgtcttttatcaggctctgacatacgtccaaagcaaccataggaccaatgcaccattcaccccgcgggtccttctgctgggacctgtaggaagcggcaagagtttgcaggcagcgctcctggctcagaaatataggttggtgaacgtctgctgcgggcagctgctgaaagaagcagtggcagaccgaacaaccttcggtgagctcatccagcccttcttcgaaaaggagatggccgttcctgacagtttattgatgaaagtgttatcacaacggctcgatcagcaggattgtattcaaaaaggatgggtcctccacggggtgccgcgcgatctcgaccaagctcacctcctgaaccgcttgggatataacccgaatcgcgttttttttctgaacgttccatttgactccataatggaaaggcttacattacgccgaatagatcctgtgacaggggaacggtaccacctgatgtacaaaccgccccccaccatggagatccaggcgagattactgcagaatccaaaggatgctgaggaacaggtcaagctgaagatggacctcttctaccgaaactcagccgatctggaacagctctacggaagcgccatcacacttaacggggaccaggacccctacacggtgttcgagtacatcgaaagcggcattataaacccattgccaaagaaaataccctag

SEQ ID NO: 243950 - DNA, 1440 bp, Artificial Sequence
  derived and/or modified sequence
atggacgcaacgatagcaccacatcggatacccccagaaatgccacagtatggggaggagaatcacatctttgagctgatgcagaatatgcttgagcagctgctcattcatcaacccgaagatccaataccatttatgatccagcacctccacagggataatgacaatgtgccccgaattgttatccttggtcctccagcctcaggtaaaacgactatcgcgatgtggctgtgcaaacatcttaacagcagcctgcttacactggagaatctcattttaaacgagttcagctatacggctaccgaagccagaaggctctatctgcagagaaagaccgtcccctcagccttattagttcaattgattcaggagcggttggcggaggaagattgcattaaacagggttggattttggacggtattcccgagactcgggaacaagctctgcggatccagaccctaggaatcacacccaggcacgttatcgtgctgagtgcacctgatacggtgttgatcgagagaaatctcggcaaaagaatcgacccacaaaccggtgaaatataccacacaaccttcgattggcctcccgaatctgaaattcagaatagattaatggttcctgaagatataagcgaactcgaaaccgcacaaaaacttctggaataccataggaatattgtgcgcgtgattccttcctaccccaagatccttaaagttatctctgccgaccagccgtgcgtggatgttttttaccaggccctgacctacgtgcaaagcaatcacaggactaatgcaccatttactccgagggtactcctcctggggcctgtggggagcggaaaatccttgcaggctgctttactggcccagaagtataggctggtgaatgtgtgctgcgggcagctgctgaaggaggcagtggccgaccgcaccactttcggcgaattgatccagccgtttttcgagaaagaaatggctgtcccggatagtctcctcatgaaagtgcttagtcagagactagatcaacaggactgtatacagaaaggatgggtcttacatggggtgcccagagacctcgaccaggctcacctcctcaataggctcggctacaatccaaacagagtgttttttctgaacgtcccattcgactccatcatggagagattgacactgcgtcggattgatcctgtaaccggcgagcggtaccacctaatgtataagccacctcctaccatggaaattcaagccagacttctccagaatccaaaagatgctgaggaacaagtgaagctgaagatggacttgttttaccgcaacagcgcagacctggaacagctttacggtagtgctattacgctcaatggtgatcaggacccttataccgtgtttgaatatatcgaatctgggatcatcaatccactgcctaagaaaatcccatag

SEQ ID NO: 243951 - DNA, 2072 bp, Artificial Sequence
  derived and/or modified sequence
cggggctcgactctaggagttgggctgaggatttccacccgatcctcgaacctccggcccatctcatggacgcccctcccccttcaaacaccctcccccacatttattcccgcgtctgttttaaagatgggtaaactgaggcacagggagccgggccggggagcactgacagaaccagaagcaggttctgcctcccgtcccctcggagggccgacttgccccttctgggtttcgtcgggggtctcagatacgaggaggcccagctggaagccacctgagggtgtcccccgctaagatgcgcaaatgggaaaagcgaggccggggttggggaaagaacttgcccgagccgcagagcgcgtcagccggggaggtcggggcgggggcgacccgcgcgaccgaggatcgggtatctgggcccggcgcggagcctgcagggcggggccgcggcgcgtgctgatgacgcagtcggcgcggcggccctagcgacgcggttactagggagcggcgagccgagacggctacatggacgccactatcgccccgcaccgtatcccccccgagatgccccagtacggggaggagaaccacatcttcgagttgatgcagaacatgctggagcaactcctgatccaccagcccgaagatcccatccccttcatgatccagcacttgcatagagacaacgacaatgtgcccaggattgtaatattaggtccacccgcctcagggaaaacaacaatagcaatgtggctctgcaaacatctgaacagcagtctcctcaccctggagaacctgatcttaaatgagttttcctatacggccaccgaagccagaaggctttatctgcaaaggaagacagttcccagcgcgctgctcgtccagctgattcaggaacgcctggctgaagaggattgcatcaagcagggctggattctggatggcatccctgagacgcgtgagcaggctctgaggatccagaccctggggatcacacccagacacgtcattgtgctgagtgctccagacacggtcctgatcgagagaaacttggggaagagaatcgaccctcaaactggagagatttatcacaccacctttgactggccacccgaatctgaaatccagaaccgtctcatggtgccagaggacatctcagagctggagacggctcagaaactgctggagtatcataggaacatcgtcagggtcattccctcctaccccaaaatcctcaaagtcatcagtgctgaccagccatgtgtggacgtcttctaccaggctctgacctatgtccaaagcaaccatcgtactaatgccccgttcaccccgagggtgctgctgctcgggcctgtgggcagtgggaaaagtctgcaggccgccctcctggcccagaaatacaggcttgtcaatgtctgctgtgggcaactgctgaaagaggctgtggcagataggaccacgtttggcgagctcatccagcccttctttgaaaaggagatggcagttcctgacagcctcctcatgaaggtgctgagccagcgcctggaccagcaggactgcatccagaaaggctgggtgctacacggcgtcccgcgggacctcgaccaggcacacctgctgaaccgcctgggctacaatcccaacagggtgtttttcctgaatgtgccatttgattccatcatggagcggctgactctgagaagaattgatccagtcactggggaaaggtaccacctcatgtacaagccacctcccaccatggagatccaggctcgcctcctgcagaacccaaaggatgctgaagagcaggtcaagctgaaaatggacctgttctacaggaactcagctgacttggagcagttgtatgggtcggccatcaccctcaatggggaccaggacccatacacagtcttcgaatacatcgagagtgggatcattaatcccctgcccaagaaaatcccctgatgggttcagagccaggagcgctgccccagggaaagagttaatcccctgcccccagccccccagcctcggcacagctcccctaaaaagccaataaagcctgctggatacag

SEQ ID NO: 243952 - DNA, 1440 bp, Artificial Sequence
  derived and/or modified sequence
atggacgccaccatcgccccccacagaatcccccccgagatgccccagtacggcgaggagaaccacatcttcgagctgatgcagaacatgctggagcagctgctgatccaccagcccgaggaccccatccccttcatgatccagcacctgcacagagacaacgacaacgtgcccagaatcgtgatcctgggcccccccgccagcggcaagaccaccatcgccatgtggctgtgcaagcacctgaacagcagcctgctgaccctggagaacctgatcctgaacgagttcagctacaccgccaccgaggccagaagactgtacctgcagagaaagaccgtgcccagcgccctgctggtgcagctgatccaggagagactggccgaggaggactgcatcaagcagggctggatcctggacggcatccccgagaccagagagcaggccctgagaatccagaccctgggcatcacccccagacacgtgatcgtgctgagcgcccccgacaccgtgctgatcgagagaaacctgggcaagagaatcgacccccagaccggcgagatctaccacaccaccttcgactggccccccgagagcgagatccagaacagactgatggtgcccgaggacatcagcgagctggagaccgcccagaagctgctggagtaccacagaaacatcgtgagagtgatccccagctaccccaagatcctgaaggtgatcagcgccgaccagccctgcgtggacgtgttctaccaggccctgacctacgtgcagagcaaccacagaaccaacgcccccttcacccccagagtgctgctgctgggccccgtgggcagcggcaagagcctgcaggccgccctgctggcccagaagtacagactggtgaacgtgtgctgcggccagctgctgaaggaggccgtggccgacagaaccaccttcggcgagctgatccagcccttcttcgagaaggagatggccgtgcccgacagcctgctgatgaaggtgctgagccagagactggaccagcaggactgcatccagaagggctgggtgctgcacggcgtgcccagagacctggaccaggcccacctgctgaacagactgggctacaaccccaacagagtgttcttcctgaacgtgcccttcgacagcatcatggagagactgaccctgagaagaatcgaccccgtgaccggcgagagataccacctgatgtacaagcccccccccaccatggagatccaggccagactgctgcagaaccccaaggacgccgaggagcaggtgaagctgaagatggacctgttctacagaaacagcgccgacctggagcagctgtacggcagcgccatcaccctgaacggcgaccaggacccctacaccgtgttcgagtacatcgagagcggcatcatcaaccccctgcccaagaagatcccctag

SEQ ID NO: 243953 - protein, 189 aa, Artificial Sequence
  derived and/or modified sequence
MEADGDGEELARLRSVFAACDANRSGRLEREEFRALCTELRVRPADAEAVFQRLDADRDGAITFQEFARGFLGSLRGGRRRDWGPLDPAPAVSEAGPETHDSEEDEGDEDAAAALATSCGPASPGRAWQDFQARLGDEAKFIPRFGYTISKPAFVFVRHLITLCALSWAKKEGRETLWTIEEGGAKMAE

SEQ ID NO: 243954 - protein, 740 aa, Artificial Sequence
  derived and/or modified sequence
MEADGDGEELARLRSVFAACDANRSGRLEREEFRALCTELRVRPADAEAVFQRLDADRDGAITFQEFARGFLGSLRGGRRRDWGPLDPAPAVSEAGPETHDSEEDEGDEDAAAALATSCGPASPGRAWQDFQARLGDEAKFIPREEQVSTLYQNINLVEPRLIQPYEHVIKNFIREIRLQSTEMENLAIAVKRAQDKAAMQLSELEEEMDQRIQAAEHKTRKDEKRKAEEALSDLRRQYETEVGDLQVTIKKLRKLEEQSKRVSQKEDVAALKKQIYDLSMENQKVKKDLLEAQTNIAFLQSELDALKSDYADQSLNTERDLEIIRAYTEDRNSLERQIEILQTANRKLHDSNDGLRSALENSYSKFNRSLHINNISPGNTISRSSPKFIGHSPQPLGYDRSSRSSYVDEDCDSLALCDPLQRTNCEVDSLPESCFDSGLSTLRDPNEYDSEVEYKHQRGFQRSHGVQESFGGDASDTDVPDIRDEETFGLEDVASVLDWKPQGSVSEGSIVSSSRKPISALSPQTDLVDDNAKSFSSQKAYKIVLAGDAAVGKSSFLMRLCKNEFRENISATLGVDFQMKTLIVDGERTVLQLWDTAGQERFRSIAKSYFRKADGVLLLYDVTCEKSFLNIREWVDMIEDAAHETVPIMLVGNKADIRDTAATEGQKCVPGHFGEKLAMTYGALFCETSAKDGSNIVEAVLHLAREVKKRTDKDDSRSITNLTGTNSKKSPQMKNCCNG

SEQ ID NO: 243955 - DNA, 2223 bp, Artificial Sequence
  derived and/or modified sequence
atggaggccgacggcgacggcgaggagctggccagactgagaagcgtgttcgccgcctgcgacgccaacagaagcggcagactggagagagaggagttcagagccctgtgcaccgagctgagagtgagacccgccgacgccgaggccgtgttccagagactggacgccgacagagacggcgccatcaccttccaggagttcgccagaggcttcctgggcagcctgagaggcggcagaagaagagactggggccccctggaccccgcccccgccgtgagcgaggccggccccgagacccacgacagcgaggaggacgagggcgacgaggacgccgccgccgccctggccaccagctgcggccccgccagccccggcagagcctggcaggacttccaggccagactgggcgacgaggccaagttcatccccagagaggagcaggtgagcaccctgtaccagaacatcaacctggtggagcccagactgatccagccctacgagcacgtgatcaagaacttcatcagagagatcagactgcagagcaccgagatggagaacctggccatcgccgtgaagagagcccaggacaaggccgccatgcagctgagcgagctggaggaggagatggaccagagaatccaggccgccgagcacaagaccagaaaggacgagaagagaaaggccgaggaggccctgagcgacctgagaagacagtacgagaccgaggtgggcgacctgcaggtgaccatcaagaagctgagaaagctggaggagcagagcaagagagtgagccagaaggaggacgtggccgccctgaagaagcagatctacgacctgagcatggagaaccagaaggtgaagaaggacctgctggaggcccagaccaacatcgccttcctgcagagcgagctggacgccctgaagagcgactacgccgaccagagcctgaacaccgagagagacctggagatcatcagagcctacaccgaggacagaaacagcctggagagacagatcgagatcctgcagaccgccaacagaaagctgcacgacagcaacgacggcctgagaagcgccctggagaacagctacagcaagttcaacagaagcctgcacatcaacaacatcagccccggcaacaccatcagcagaagcagccccaagttcatcggccacagcccccagcccctgggctacgacagaagcagcagaagcagctacgtggacgaggactgcgacagcctggccctgtgcgaccccctgcagagaaccaactgcgaggtggacagcctgcccgagagctgcttcgacagcggcctgagcaccctgagagaccccaacgagtacgacagcgaggtggagtacaagcaccagagaggcttccagagaagccacggcgtgcaggagagcttcggcggcgacgccagcgacaccgacgtgcccgacatcagagacgaggagaccttcggcctggaggacgtggccagcgtgctggactggaagccccagggcagcgtgagcgagggcagcatcgtgagcagcagcagaaagcccatcagcgccctgagcccccagaccgacctggtggacgacaacgccaagagcttcagcagccagaaggcctacaagatcgtgctggccggcgacgccgccgtgggcaagagcagcttcctgatgagactgtgcaagaacgagttcagagagaacatcagcgccaccctgggcgtggacttccagatgaagaccctgatcgtggacggcgagagaaccgtgctgcagctgtgggacaccgccggccaggagagattcagaagcatcgccaagagctacttcagaaaggccgacggcgtgctgctgctgtacgacgtgacctgcgagaagagcttcctgaacatcagagagtgggtggacatgatcgaggacgccgcccacgagaccgtgcccatcatgctggtgggcaacaaggccgacatcagagacaccgccgccaccgagggccagaagtgcgtgcccggccacttcggcgagaagctggccatgacctacggcgccctgttctgcgagaccagcgccaaggacggcagcaacatcgtggaggccgtgctgcacctggccagagaggtgaagaagagaaccgacaaggacgacagcagaagcatcaccaacctgaccggcaccaacagcaagaagagcccccagatgaagaactgctgcaacggctag

SEQ ID NO: 243956 - DNA, 2223 bp, Artificial Sequence
  derived and/or modified sequence
atggaggcagacggagacggggaggaattggcacgtctccgctcagtgtttgcagcctgcgatgccaacaggagtggacggctggaacgcgaagaatttcgtgccctttgtacggaactgagggttcgccccgctgatgctgaggctgttttccaaagactggacgccgacagggacggcgctatcaccttccaggaatttgcaagaggctttctgggtagcctacgaggcggtcgcagacgggactggggccccctggaccctgcacccgccgtgtccgaggccgggcctgagacccacgacagcgaagaggatgagggtgatgaagacgccgcggccgcactggcgacatcctgtggtcccgccagccctggccgtgcgtggcaggactttcaggcaaggctcggcgacgaagccaagttcattcccagagaagagcaggtgagtacactctaccagaatatcaatttggtcgagcctcgtttaattcaaccttatgagcacgtgattaaaaatttcattagggagatccgactccagtcgacggagatggaaaacttggccattgccgtcaagcgtgcccaggacaaagccgccatgcagcttagtgagctcgaagaggagatggaccagcgcatccaagcggcggagcataagacgcgaaaagatgaaaagcgcaaagccgaagaggcactgtctgacttacgccgacagtatgagaccgaggtgggagacttgcaggtcactattaaaaaactgcgaaaactggaggaacagtcgaagcgggtgtcccagaaagaggacgtggctgctcttaagaagcagatttatgacttgtcgatggaaaaccaaaaagtgaagaaggatcttttagaagcccaaaccaacatcgccttcttgcagagcgaattagatgcactgaagagcgactatgccgaccagtccctgaacaccgagcgtgatctcgaaatcatccgggcttataccgaagatagaaacagcttggaaaggcagatcgaaattcttcagactgccaatagaaaactgcacgattctaatgacggcttaagaagcgctctagagaattcatattctaaattcaaccggtccctccacatcaacaacattagcccaggtaacacgatctcaaggagcagtcctaaattcatcggacatagtccacagccattaggctatgaccggtcatccaggagtagttacgtcgatgaggactgcgattccctcgcattgtgcgaccctttgcagcgcacgaactgtgaggtggattctctgcccgagagctgttttgatagtgggctatcaaccctcagggatcccaatgagtacgattcggaggtcgagtataagcatcagagaggttttcaacggagtcacggcgttcaagaatccttcggtggagatgcatccgataccgacgtccctgatatccgggatgaagagacttttgggttggaagacgtcgcctctgtcctggactggaaacctcagggtagcgtttcagaagggagcattgtgtcatcctcgcggaaacccatatcagccctatctccgcaaactgaccttgtggacgataacgcaaagagcttttcctcccaaaaggcctacaagatcgttttagcaggcgacgccgccgtggggaagtcatcattcctcatgcggctttgtaaaaatgagtttagggagaatatcagcgcgaccttaggggtggattttcagatgaaaaccttgattgtggatggagagaggacagtgctccaactttgggacacagccggccaagagcggttccggtcaattgccaaaagttatttccggaaggcagacggagtgctgctgctctacgacgtgacttgtgagaagtccttccttaacattcgggaatgggttgatatgatcgaagacgcagcccatgaaactgtgcctatcatgttggttggaaacaaagctgatatccgggacaccgccgcaacagagggacaaaagtgtgtccctggccacttcggtgaaaagctagctatgacatacggcgcactgttttgcgaaaccagcgcgaaggatgggagcaacatagtcgaggctgtgctgcatctggcgagggaagtcaaaaaacggacagacaaggacgattcgaggtccattactaacctgacgggcactaattcaaaaaagtcacctcagatgaaaaattgttgtaatggctag

SEQ ID NO: 243957 - DNA, 5576 bp, Artificial Sequence
  derived and/or modified sequence
ctccttggcggtgcctggagcccgggcgcaccccaccgctcccgggacctgttgggggctggcccgaaccgtcgtcgaagggagccgctcggccacccccgacgttcctcgccccgcccgacgttccctcaagtggccgaaccagccggacgagccaaactcgccgggcctcccggcggcagcaggtggccccgtccttccagggagggccctgcgccccgcggcgctccggagccctctcggccgcccccgccaggcgggatggaggcggatggggacggagaggagctggcccggctgcgctcagtcttcgccgcctgcgacgcgaaccgctcggggcgcctggagcgcgaggagttccgggcactgtgcacggagctgcgggtgcggccggccgacgccgaggcagtattccagcggctggacgccgaccgtgacggcgccatcaccttccaggagttcgcgcgtggcttcctcgggtccctccgcggggggcggcgccgggactggggtcctctggatcccgcgcccgccgtgtctgaggcggggccggagacacacgacagcgaggaggacgaaggcgacgaggacgcggcggcggcgctggccacctcgtgcggcccggcgagtcccggccgggcttggcaggatttccaggcgcgacttggggacgaagccaagttcattcccagagaagagcaagttagtaccttgtaccaaaacatcaaccttgtggagccaagattaattcagccatatgaacatgttataaagaacttcatccgtgagatcagacttcaaagcacagaaatggaaaatttggccattgcggtgaagagagcccaggacaaggcagctatgcagttgagtgagttggaagaggaaatggatcagaggattcaggctgcagaacataagacacggaaagacgaaaaacgcaaagctgaggaagccctcagtgacctcagacgtcagtatgaaactgaagtaggagatctgcaggtgaccattaaaaagctaagaaagctcgaagaacaatcaaaacgcgtaagtcaaaaggaagatgtggctgcattgaaaaaacaaatttatgatttatcaatggaaaaccagaaagttaagaaagaccttttagaagcacagacaaacatagcctttcttcagagtgagttagatgctttgaaaagtgattatgctgatcagagtctgaatactgaaagggatctggaaataatccgagcatacacagaagatcgaaatagtcttgagaggcaaattgaaatactccaaacagctaaccggaagctacatgacagtaatgatggccttagaagtgcccttgaaaacagttatagcaagttcaacagatctttgcatataaataatatctcaccagggaatacaatttctagaagcagtcccaaattcattggtcattcccctcaacctctaggctatgacaggtcatcccgctcttcctatgtggatgaggactgtgactccctggccctctgtgatcctctgcagaggacaaattgtgaagttgacagcctgcctgaaagctgcttcgacagcggcttgtctaccttgagagatcccaatgagtatgactcagaagtggaatacaagcaccagaggggatttcagaggtcacacggggtgcaggagagctttggaggtgatgcttcagacacagatgttcctgacataagggatgaagagacatttggtttagaagatgtggcttccgtcttagactggaagccccaagggtctgttagtgaaggcagcattgttagttcatcaagaaagcccatctcagcactctcgccccagacagacctggtagatgacaacgctaaatcttttagctcacagaaggcttacaagattgtacttgctggggacgctgcagtggggaagtctagtttcctcatgagactttgcaagaatgaatttcgagaaaatataagcgccaccctgggagttgatttccaaatgaaaaccctcattgtggatggagaacgaacagttctgcagctctgggatacagctggtcaggagagattcagaagtattgccaagtcttacttcagaaaggcagatggtgttttgctgctgtatgatgttacatgtgagaaaagctttcttaacatacgagaatgggtagatatgattgaggatgcagcccatgagactgttcccattatgctggtaggaaacaaggctgacattcgtgacactgctgctacagagggacaaaaatgtgtcccagggcactttggagagaaactggccatgacgtatggggcattattctgtgaaacaagtgccaaagatggttctaacatagtggaggctgttctgcaccttgctcgagaagtgaaaaagagaactgacaaggatgacagcagatccattaccaatctaaccgggaccaattccaaaaagtcaccacagatgaagaattgttgcaatggctaaatcccaaacatccttggcctgtgaagtcttcatttccagaatactgaatttgtgtgacttatttggctcttaacagagtggcacatcctactgacactgtcctatggagagttacagtgcaggaaacctgaacccagctctcaggtccctctggaactttggctcttctttgttttgtctcagtgagtgatttgggccctctggctaaatagactagtcatgtccttacaggtcttaaaagataacatgtaaatgtttttaaaatggtaaaaaaaaagaaaagaaaagaaatcacatgctcagatcaaagctgtagaggaaactgacataattagattcatgtggtagctgaattaggttacccacaaagtcagcatttaaatatttgatactaaagttctagtaagaagggattctcatcctagctttgctgttaactggccttgtgaccttggacatgtcacaagcccatgtcggatctgtttcttcatctgtaaaatgtgcagcttgccctcaaaggccttgcagcccttggcacctcagattctgtgggaagcagtaggacagagagtgtggtggcccacagttaataatagaactatggttattcctgctttttaatattggagtattgatttttctcacttctgaaataaggacagaatttgattaaaaaatggaaacagaaatatctattttttatgtataaagaaacatgtttgagacaaaaatagttgtatataaaaggatatttcataatctcagaatagttacaaagctcactgcttgaatttggtgttaaaaattctaatggaaacatgtaaagccacatactactgaaagcacaatgcccaggaaagttgtcactcttcacttaagggagtggttgccaggggctgagaaagggaggatggggagtgactgctaataggtatgtggtttctttgggcgatgatgagaatgttctggaattggaatagtggtgatagttgtataactgtttgaatgtactaggaaccactgaattgtatactttgaaagggtgaattttatggttgtgaattatctcactaaaaaaaatgctagtacttagagtgatgtaacattttgcaaaattttcattttcgtatccctgctgatttcaaaccttcccatggtttagaagcataacctgtaatgtaatgcaagtcccctaactccctggttgctaacattaacttccttaagtaataatcaatgaaagaaattctatgcatggttttgaaataatatccttgaaagaggaatcaccattaggaaaggtgagtcagggtcctttgtttaatgtgactagtggctcatcatcaccagtgacctggttgggcctactctccttccagaacctgcattgcttcccagacctccccactgagatgcctctaagagccaaaggagtcaacacttgagcctagggtgggctacaacaaaagattctaatttaccttgcttcatctaggtccaggccccaagtagcttgctgaaggaacttaaaaagtagctgttatttattgtattgtataagctaaaaacatttatttttgttgaatcgaaacaattccatgtagcaatcttttttctgttcacggtgtttgtgatagaaccttaaattccgcaagcatcagttttttgaaaaaatgggaattgaccggatagttacaggcaaagattataaatagctacaacatcatttaacttttataaacatgccttctctctattgaagacatctgatatttttgctggaaagttggatctatcctcagtaactctgccatgaattcctgtttcctggttccagaaaaagaaaagattacatttctgatcataaagaatgtcttgcatatgggaaatttttcaaaataaggggggtattatttatgtggcatgggaaaacttttgccatggctgtttgtcttagtggcatcttttgatgacattggatcagatatatgtagatgctgatatatgggacacatgtttaggttttggtgcagttgcacaaaactgtgttagtttatatgttactgtgttgcctttatttattctctccaaagtgtctctttatatttgttttacaatctgtgaaagagtataccataatacagaagtattttcatagtctttacctctggattgtcctgtcagtatagccacgttgatgagattacaccagtgcctttgatggtcaaccaatcatctttaagtatttgagccctgataaatattttggtaacataatccaaattagagacttagagctctggttagcaatcatgtttaaagagaagcttcttaaagctctgtatgctgggagattcatgattattaccaacgttttgatttcatgaaggtgttctcaaatttaaagcacattttcagtaagaacaaaaatatttaatgtttttatcttagacttgatacatttgcatattactatggaagttattcaccttgtccctgtttttctttaagatattttaaaatcatagttatactacagtccttttttaaatgtatcctgatacattgtaaaatattttaatttcattgtggaaaataatgttggataaggagatatttttcactgttaacttttagcccatgcattttcataatttatttttttcacttgctgctttatatgacatatgtgacatttgattatttaacacttgatgtgatctgcataaacccaagttgcacaaccctcctgctgaagataaaattgaggttaaagataaagatttattttcatatttgtacagtgatcggcttcagtgatggtttttgtgggcatttattgtgtgtgtgtaagaaatttcatatgtatatattaagtaggcctctgagtattgaataattgttttatgattttgatttatatggtttacattttcattgtgtgggccatatttcgtttatactgtttatttctcttcaaaccttaataattataccataaagtgtaatttttatagcaatgcaaatgtctaaggaactacaaatattttctacgttgtaaattcaataaagcttgcttcctttggcctttt

SEQ ID NO: 243958 - DNA, 2223 bp, Artificial Sequence
  derived and/or modified sequence
atggaggctgatggagatggagaggagctggcccggctgcggtctgtgtttgctgcctgtgatgccaacagaagtggccgcctggagcgggaggagttccgggccctgtgcacagagctgcgggtgcggccagcagatgctgaggccgtgttccagaggctggatgctgacagagatggagccatcaccttccaggagtttgcccggggcttcctgggcagcctgcggggcggcagaagaagagactggggccccctggaccctgccccagctgtgtctgaggccggccctgagacccatgacagcgaggaggatgaaggagatgaagatgctgctgctgccctggccaccagctgtggccctgccagccctggccgggcctggcaggacttccaggcccggctgggagatgaggccaagttcatcccccgggaggagcaggtgtccaccctgtaccagaacatcaacctggtggagcccaggctcatccagccctatgagcacgtgatcaagaacttcatccgggagatccggctgcagagcacagagatggagaacctggccatcgctgtgaagagggcccaggacaaggccgccatgcagctgtctgagctggaggaggagatggaccagaggatccaggccgctgagcacaagaccaggaaggatgagaagaggaaggccgaggaggccctgagtgacctgcggcggcagtatgaaacagaggtgggggacctgcaggtgaccatcaagaagctgaggaagctggaggagcagagcaagagggtgtcccagaaggaggatgtggccgccctgaagaagcagatctatgacctgtccatggagaaccagaaggtgaagaaggacctgctggaggcccagaccaacatcgccttcctgcagagcgagctggatgccctgaagagtgactatgctgaccagagcctgaacacagagcgggacctggagatcatccgggcctacacagaggacaggaacagcctggagcggcagatcgagatcctgcagacagccaacaggaagctgcatgacagcaatgatggcctgcggagcgccctggagaacagctacagcaagttcaacagaagcctgcacatcaacaacatcagccctggcaacaccatcagccgcagcagccccaagttcatcggccacagcccccagcccctgggctatgacaggagcagccgcagcagctatgtggatgaggactgtgacagcctggccctgtgtgaccccctgcagaggaccaactgtgaggtggacagcctgcctgagagctgctttgacagcggcctgagcaccctgcgggaccccaatgaatatgattctgaggtggagtacaagcaccagaggggcttccagaggagccatggagtgcaggagagctttggaggagatgccagtgacacagatgtgcctgacatcagagatgaggagaccttcggcctggaggatgtggcctctgtgctggactggaagccccagggctctgtgtctgagggcagcatcgtgagcagcagcaggaagcccatcagcgccctgagcccccagacagacctggtggatgacaatgccaagagcttcagcagccagaaggcctacaagatcgtgctggccggagatgctgctgtgggcaagagcagcttcctgatgaggctgtgcaagaatgagttccgggagaacatcagcgccaccctgggcgtggacttccagatgaagaccctcatcgtggatggagagaggacagtgctgcagctgtgggacacagctggccaggagcgcttccgcagcatcgccaagagctacttcaggaaggcagatggagtgctgctgctgtatgatgtgacctgtgagaagagcttcctgaacatccgggagtgggtggacatgattgaagatgctgcccacgagaccgtgcccatcatgctggtgggcaacaaggctgacatccgggacacagctgccacagagggccagaagtgtgtgcccggccactttggagagaagctggccatgacctacggggccctcttctgtgagaccagcgccaaggatggcagcaacatcgtggaggccgtgctgcacctggcccgggaggtgaagaagaggacagacaaggatgacagccgcagcatcaccaacctgaccggcaccaacagcaagaagagcccccagatgaagaactgctgcaatggatag

SEQ ID NO: 243959 - DNA, 2223 bp, Artificial Sequence
  derived and/or modified sequence
atggaggccgacggcgacggcgaggagctggcccggctgcggagcgttttcgcagcttgcgacgctaaccgcagcggccgtctggaaagagaagaattccgggcactttgcaccgaactccgggtcaggcctgctgacgcagaggccgtgtttcagagactggacgccgaccgagatggggccataaccttccaagagttcgcgagagggtttctcggatccctgcgcgggggccgtcggcgcgattggggacccctcgatccagctcccgccgtctcggaggccgggcctgaaacccatgactctgaggaggacgaaggcgacgaggacgcagccgccgcccttgcaaccagttgcggccccgccagtccgggccgagcctggcaggacttccaagccaggctgggggatgaggcaaagtttattccacgcgaagagcaggtgtctacgctgtatcagaacattaacctcgtggaaccccggctgattcaaccgtatgagcacgtgatcaaaaattttatccgagagattcgattgcagtccaccgaaatggagaacctagccatcgcggtgaaacgtgcacaagataaagcggctatgcaactttcggagcttgaagaagaaatggaccagcggattcaagccgccgagcacaagacacgcaaagacgagaaacggaaggcggaagaggccctttctgacttgagacgccaatacgagacagaagtgggagacctgcaggtgactatcaagaagctgcgaaaattagaggaacaatccaagagggtttctcaaaaggaagatgtggccgcccttaagaaacaaatctacgacctgtcgatggaaaatcagaaggttaaaaaggatctcttagaagcccagacaaatattgcatttctgcagagcgagctggatgccctcaaatccgattatgcagatcagtcactgaatacagagcgcgatctggaaataattcgcgcttataccgaggatagaaattccctggagcggcagatcgaaatcctacaaactgccaacagaaagctgcatgactccaatgatggtttaagaagtgctttggagaatagctattccaagttcaatcgtagcctccacattaataatatctcaccaggcaatactatttcccgaagtagtccgaaattcatcggccacagtccacagccactgggatacgaccgaagcagcagatcttcctatgtggatgaggattgcgatagcctggccctctgtgatccactgcagaggaccaactgcgaagtcgattctctgcctgaatcctgctttgacagtggcctctctactctcagggacccaaacgagtacgatagcgaagtggaatataagcaccagcgaggcttccagcggtcccatggcgtgcaggaaagtttcggcggtgatgcgtcggataccgatgtccccgatataagagacgaggaaacatttggcctcgaggatgtggcgagcgtacttgattggaagcctcagggttccgtctccgaggggtctatcgtttccagttctaggaagcctattagtgccctatccccccagaccgatctcgtggacgacaacgcaaagtccttttcttctcagaaggcatacaagattgtgctggccggggacgcagccgtgggtaaatcaagttttctgatgcgactgtgtaagaatgagttccgagagaatatctccgccaccctaggggtggacttccaaatgaagacactcatcgtggatggtgagaggacagtgctgcaattatgggataccgccgggcaagagcggttccgctctattgctaagtcctactttcgtaaggcagacggtgtacttttgttgtacgacgttacatgtgagaaatctttcttgaacattagggagtgggttgacatgatcgaggacgctgcccacgagaccgtgcccattatgcttgttggcaataaagcggacatccgagacactgctgcaacggaggggcaaaaatgcgtgccgggacacttcggtgagaagttggccatgacctatggagccttgttttgtgagacgtccgccaaagatggcagtaacatcgtagaggccgtactgcatctagcgagggaggttaaaaaacgcacggacaaggatgattcacggtccattaccaacctgaccggcacgaacagtaagaagagccctcagatgaaaaactgctgcaatgggtag

SEQ ID NO: 243960 - DNA, 2223 bp, Artificial Sequence
  derived and/or modified sequence
atggaggcagacggcgacggagaggaactggcacgtctccgctcggttttcgctgcgtgtgacgcgaatagatcagggaggttggagagagaggagtttcgcgcactatgcacggagctgcgagttcggcctgctgacgccgaagctgttttccagcgtctcgatgctgacagggatggtgccatcaccttccaggagttcgcgaggggtttccttggtagcctgcgaggaggacggaggagggactggggaccgctcgatcctgcccctgccgtgtctgaggccggtcccgagacccatgactcggaggaagatgaaggcgatgaagacgcggctgcagctctggcaacatcttgcggacctgcttcacccggtagagcgtggcaggattttcaggctcgactgggcgacgaggctaaatttatcccccgtgaggagcaggtgtcaacactgtatcaaaatataaatttagttgagccgagactgatccaaccctacgaacacgtcattaagaatttcatccgagagattcggctgcagagcacagagatggagaacttggctatagctgtgaagagggcacaggacaaggccgctatgcaactgtccgaactcgaggaagaaatggatcagagaattcaggctgctgaacataagacgcgcaaggatgagaaacgaaaagctgaggaggctctgagcgatctccggagacaatacgagactgaggtgggggatctgcaagttaccattaagaaactgcggaagttggaggaacagagtaagagggtgagtcagaaagaagatgttgcagcactgaagaaacagatctatgacctgtcgatggaaaatcaaaaggtgaagaaagacctgctggaagcccagacaaacatcgccttcctgcagtctgagctggatgcccttaaatctgactatgccgaccagtccctgaatactgagagagacttagagatcatccgcgcatataccgaagaccgcaattcgctcgaacggcaaattgagatcctgcagacggcaaatcgaaaactgcacgattctaatgacgggcttcgcagtgctttggagaattcatattctaagttcaaccgatccttgcatataaataacatcagcccaggtaatacaattagcagatcctcacctaaattcataggacactcccctcagcctctgggttatgataggtcctcacgttcaagctatgttgatgaggattgcgattccctggcactgtgcgatccacttcagagaacaaactgtgaggtggattccctgcccgaatcatgctttgactcgggactaagtacgctgcgagaccctaatgagtacgattctgaagtggagtataagcaccagagaggatttcaaaggagccacggggtacaagaaagctttggcggagacgccagcgacacagatgtgccagacatacgagatgaggagacctttggcttggaagatgttgcctctgtgctggactggaagcctcaaggctccgtgtctgaagggagtatagtgagtagttctcgcaagccaatttccgccctttcccctcagaccgaccttgtggacgacaatgcgaagagcttcagctcccagaaagcgtataagatcgtcctcgccggtgacgccgctgtgggaaagagtagcttcctgatgcggctttgcaagaacgagttccgcgaaaacatttctgcgaccctaggagtggatttccaaatgaaaactttaatcgtcgacggagagcgcactgttctccaactttgggataccgcagggcaggagaggtttagaagtatcgccaagagttactttagaaaagccgatggtgtcctgttgctttacgacgtcacatgtgagaagagctttcttaacatccgggaatgggttgacatgatcgaagacgctgcccatgagactgtgccaattatgttagtgggcaacaaagctgatattagagacacagcggcaactgagggtcagaagtgcgtgcccggtcactttggagaaaagctggcaatgacctacggagccctcttctgcgaaacatctgcaaaagatggaagcaacatcgtggaagcagtgctacacctggctagggaggtgaaaaaacgaacagacaaggatgacagcaggagcatcacaaacctcacaggcactaacagcaagaagtcgccacagatgaaaaattgctgcaatggatag

SEQ ID NO: 243961 - protein, 616 aa, Artificial Sequence
  derived and/or modified sequence
MALLGSRAELEADEDVFEDALETISISSHSDMATSSLHFASCDTQQAPRQRGASTVSSSSSTKVDLKSGLEECAVALNLFLSNKFTDALELLRPWAKESMYHALGYSTIVVLQAVLTFEQQDIQNGISAMKDALQTCQKYRKKYTVVESFSSLLSRGSLEQLSEEEMHAEICYAECLLQKAALTFVQDENMINFIKGGLKIRTSYQIYKECLSILHEIQKNKLQQEFFYEFEGGVKLGSGAFNLMLSLLPARIIRLLEFIGFSGNRELGLLQLREGASGRSMRSALCCLTILAFHTYISLILGTGEVNVAEAERLLAPFLQQFPNGSLVLFYHARIELLKGNLEEAQEVFQKCISVQEEWKQFHHLCYWELMWINVFQQNWMQAYYYSDLLCKESKWSKATYVFLKAAILSMLPEEDVVATNENVVTLFRQVDSLKQRIAGKSIPTEKFAVRKARRYSASLPAPVKLILPALEMMYVWNGFSIVSKRKDLSENLLVTVEKAEAALQSQNFNSFSVDDECLVKLLKGCCLKNLQRPLQAELCYNHVVESEKLLKYDHYLVPFTLFELASLYKSQGEIDKAIKFLETARNNYKDYSLESRLHFRIQAALHLWRKPSSD

SEQ ID NO: 243962 - protein, 682 aa, Artificial Sequence
  derived and/or modified sequence
MDAVLACRLRGRGNRVAALRPRPRPGGSAGPSPFALLCAGLSPEPRAGVGSEFPAWFLGGSSQRRNMALLGSRAELEADEDVFEDALETISISSHSDMATSSLHFASCDTQQAPRQRGASTVSSSSSTKVDLKSGLEECAVALNLFLSNKFTDALELLRPWAKESMYHALGYSTIVVLQAVLTFEQQDIQNGISAMKDALQTCQKYRKKYTVVESFSSLLSRGSLEQLSEEEMHAEICYAECLLQKAALTFVQDENMINFIKGGLKIRTSYQIYKECLSILHEIQKNKLQQEFFYEFEGGVKLGSGAFNLMLSLLPARIIRLLEFIGFSGNRELGLLQLREGASGRSMRSALCCLTILAFHTYISLILGTGEVNVAEAERLLAPFLQQFPNGSLVLFYHARIELLKGNLEEAQEVFQKCISVQEEWKQFHHLCYWELMWINVFQQNWMQAYYYSDLLCKESKWSKATYVFLKAAILSMLPEEDVVATNENVVTLFRQVDSLKQRIAGKSIPTEKFAVRKARRYSASLPAPVKLILPALEMMYVWNGFSIVSKRKDLSENLLVTVEKAEAALQSQNFNSFSVDDECLVKLLKGCCLKNLQRPLQAELCYNHVVESEKLLKYDHYLVPFTLFELASLYKSQGEIDKAIKFLETARNNYKDYSLESRLHFRIQAALHLWRKPSSD

SEQ ID NO: 243963 - DNA, 1851 bp, Artificial Sequence
  derived and/or modified sequence
atggccctgctgggcagcagagccgagctggaggccgacgaggacgtgttcgaggacgccctggagaccatcagcatcagcagccacagcgacatggccaccagcagcctgcacttcgccagctgcgacacccagcaggcccccagacagagaggcgccagcaccgtgagcagcagcagcagcaccaaggtggacctgaagagcggcctggaggagtgcgccgtggccctgaacctgttcctgagcaacaagttcaccgacgccctggagctgctgagaccctgggccaaggagagcatgtaccacgccctgggctacagcaccatcgtggtgctgcaggccgtgctgaccttcgagcagcaggacatccagaacggcatcagcgccatgaaggacgccctgcagacctgccagaagtacagaaagaagtacaccgtggtggagagcttcagcagcctgctgagcagaggcagcctggagcagctgagcgaggaggagatgcacgccgagatctgctacgccgagtgcctgctgcagaaggccgccctgaccttcgtgcaggacgagaacatgatcaacttcatcaagggcggcctgaagatcagaaccagctaccagatctacaaggagtgcctgagcatcctgcacgagatccagaagaacaagctgcagcaggagttcttctacgagttcgagggcggcgtgaagctgggcagcggcgccttcaacctgatgctgagcctgctgcccgccagaatcatcagactgctggagttcatcggcttcagcggcaacagagagctgggcctgctgcagctgagagagggcgccagcggcagaagcatgagaagcgccctgtgctgcctgaccatcctggccttccacacctacatcagcctgatcctgggcaccggcgaggtgaacgtggccgaggccgagagactgctggcccccttcctgcagcagttccccaacggcagcctggtgctgttctaccacgccagaatcgagctgctgaagggcaacctggaggaggcccaggaggtgttccagaagtgcatcagcgtgcaggaggagtggaagcagttccaccacctgtgctactgggagctgatgtggatcaacgtgttccagcagaactggatgcaggcctactactacagcgacctgctgtgcaaggagagcaagtggagcaaggccacctacgtgttcctgaaggccgccatcctgagcatgctgcccgaggaggacgtggtggccaccaacgagaacgtggtgaccctgttcagacaggtggacagcctgaagcagagaatcgccggcaagagcatccccaccgagaagttcgccgtgagaaaggccagaagatacagcgccagcctgcccgcccccgtgaagctgatcctgcccgccctggagatgatgtacgtgtggaacggcttcagcatcgtgagcaagagaaaggacctgagcgagaacctgctggtgaccgtggagaaggccgaggccgccctgcagagccagaacttcaacagcttcagcgtggacgacgagtgcctggtgaagctgctgaagggctgctgcctgaagaacctgcagagacccctgcaggccgagctgtgctacaaccacgtggtggagagcgagaagctgctgaagtacgaccactacctggtgcccttcaccctgttcgagctggccagcctgtacaagagccagggcgagatcgacaaggccatcaagttcctggagaccgccagaaacaactacaaggactacagcctggagagcagactgcacttcagaatccaggccgccctgcacctgtggagaaagcccagcagcgactag

SEQ ID NO: 243964 - DNA, 2049 bp, Artificial Sequence
  derived and/or modified sequence
atggacgccgtgctggcctgcagactgagaggcagaggcaacagagtggccgccctgagacccagacccagacccggcggcagcgccggccccagccccttcgccctgctgtgcgccggcctgagccccgagcccagagccggcgtgggcagcgagttccccgcctggttcctgggcggcagcagccagagaagaaacatggccctgctgggcagcagagccgagctggaggccgacgaggacgtgttcgaggacgccctggagaccatcagcatcagcagccacagcgacatggccaccagcagcctgcacttcgccagctgcgacacccagcaggcccccagacagagaggcgccagcaccgtgagcagcagcagcagcaccaaggtggacctgaagagcggcctggaggagtgcgccgtggccctgaacctgttcctgagcaacaagttcaccgacgccctggagctgctgagaccctgggccaaggagagcatgtaccacgccctgggctacagcaccatcgtggtgctgcaggccgtgctgaccttcgagcagcaggacatccagaacggcatcagcgccatgaaggacgccctgcagacctgccagaagtacagaaagaagtacaccgtggtggagagcttcagcagcctgctgagcagaggcagcctggagcagctgagcgaggaggagatgcacgccgagatctgctacgccgagtgcctgctgcagaaggccgccctgaccttcgtgcaggacgagaacatgatcaacttcatcaagggcggcctgaagatcagaaccagctaccagatctacaaggagtgcctgagcatcctgcacgagatccagaagaacaagctgcagcaggagttcttctacgagttcgagggcggcgtgaagctgggcagcggcgccttcaacctgatgctgagcctgctgcccgccagaatcatcagactgctggagttcatcggcttcagcggcaacagagagctgggcctgctgcagctgagagagggcgccagcggcagaagcatgagaagcgccctgtgctgcctgaccatcctggccttccacacctacatcagcctgatcctgggcaccggcgaggtgaacgtggccgaggccgagagactgctggcccccttcctgcagcagttccccaacggcagcctggtgctgttctaccacgccagaatcgagctgctgaagggcaacctggaggaggcccaggaggtgttccagaagtgcatcagcgtgcaggaggagtggaagcagttccaccacctgtgctactgggagctgatgtggatcaacgtgttccagcagaactggatgcaggcctactactacagcgacctgctgtgcaaggagagcaagtggagcaaggccacctacgtgttcctgaaggccgccatcctgagcatgctgcccgaggaggacgtggtggccaccaacgagaacgtggtgaccctgttcagacaggtggacagcctgaagcagagaatcgccggcaagagcatccccaccgagaagttcgccgtgagaaaggccagaagatacagcgccagcctgcccgcccccgtgaagctgatcctgcccgccctggagatgatgtacgtgtggaacggcttcagcatcgtgagcaagagaaaggacctgagcgagaacctgctggtgaccgtggagaaggccgaggccgccctgcagagccagaacttcaacagcttcagcgtggacgacgagtgcctggtgaagctgctgaagggctgctgcctgaagaacctgcagagacccctgcaggccgagctgtgctacaaccacgtggtggagagcgagaagctgctgaagtacgaccactacctggtgcccttcaccctgttcgagctggccagcctgtacaagagccagggcgagatcgacaaggccatcaagttcctggagaccgccagaaacaactacaaggactacagcctggagagcagactgcacttcagaatccaggccgccctgcacctgtggagaaagcccagcagcgactag

SEQ ID NO: 243965 - DNA, 1851 bp, Artificial Sequence
  derived and/or modified sequence
atggcgcttctaggaagccgcgctgaactggaagcagacgaggatgtcttcgaagatgcgctggagaccatttccatatcgtcccactcagatatggctacttcaagcctccactttgcttcatgtgatacccagcaagcacctaggcagagaggcgctagtaccgtctccagcagttccagtacgaaggttgatcttaaaagtgggctcgaggagtgcgcagttgctttaaatctgtttctctccaacaagttcactgatgccctggaactcctgcgaccgtgggcaaaggaaagtatgtaccatgccctgggctacagcaccattgtggtgctccaagccgtactgaccttcgaacagcaggacattcagaatggaatctctgctatgaaggacgctctgcaaacatgccaaaaataccgcaagaagtacacagtcgtcgagtcgttctctagcttgctttctagaggaagcctggagcagttgtctgaagaggaaatgcacgccgaaatatgctacgcggagtgtttgttacagaaggcagcacttacctttgtgcaagacgaaaatatgatcaacttcatcaaagggggactgaaaatccgcactagctaccagatatataaagaatgtctctctatcctgcacgagattcagaagaacaaactgcagcaggaattcttttatgaattcgaaggcggcgtcaaactgggctccggggcatttaatctcatgctttctttgttaccggcacgtataatcaggttgctcgagtttatcgggtttagcgggaaccgcgaacttgggctcctccagctgcgggagggcgcttctggtcgctctatgagatccgccttgtgttgtctcacaatcctggcttttcacacatacatatcacttatattgggtacaggagaagtgaacgttgctgaagcggagcgcttgttagcgccatttctgcaacagttccccaacggctcgttagtgttgttttaccacgcaaggatcgaattgctgaagggaaatctggaggaggcccaggaggtgttccagaagtgtattagcgtacaagaagaatggaagcagttccaccatctttgttattgggagctgatgtggattaacgtgttccagcaaaactggatgcaagcatattactatagtgacctgctgtgtaaagagtctaagtggtcgaaagcgacttatgtatttctgaaagctgctatcctgagtatgctgccagaagaagatgtggtcgctacgaatgaaaacgtagtgacccttttcaggcaggtggatagcctaaagcaaaggatagcagggaaaagcattccgacggagaaatttgcagtgaggaaggcaaggaggtacagtgcctctctgcccgcccctgtaaaactcattctgcctgctcttgagatgatgtacgtgtggaacggcttcagtattgtaagcaagcgcaaggacctgagcgagaacctcctggtgaccgtcgaaaaagcagaggccgcgttacaatctcagaacttcaactcctttagtgtggatgatgaatgcttggtaaaacttcttaagggatgctgccttaaaaacctgcaaaggcctctgcaggccgagctgtgctataatcatgtagttgaaagcgagaagctccttaaatacgaccattacctggtgccattcactctgttcgagctcgccagcttatacaaaagccagggcgaaattgataaagccatcaagttcttggagaccgcacgtaacaactataaggactatagccttgagtcgcggctccattttagaatccaggcggctctgcacctatggcggaagccatccagcgattag

SEQ ID NO: 243966 - DNA, 2049 bp, Artificial Sequence
  derived and/or modified sequence
atggatgctgtgctggcttgtcgcctgcgcggccgcggcaatagagtggccgcactacggccccgccctcgtccagggggatctgcgggtccttctccattcgcattgctgtgtgcgggattatcacccgagcctcgggccggagtgggatctgagttcccagcatggtttctaggcggttcaagccagcggcgcaacatggcattgctggggagtcgagccgagcttgaggctgacgaggacgtatttgaggatgcactagaaactatttccatctccagccacagcgatatggccacttcatccctgcactttgcctcctgcgacacgcagcaggcccctagacagcggggcgcatccaccgtatcttccagttcttcgacaaaggtggacctcaagtccggacttgaagaatgtgcagtggctctcaacctctttctctccaacaaatttactgacgctctagaactgctgcgcccctgggcaaaggagtctatgtatcacgcgctgggctactctacaatagtcgtattacaggctgtgcttacctttgagcaacaggatatccagaacggaatcagtgctatgaaggacgctctgcagacatgccaaaaatataggaagaagtacacggttgttgaaagtttcagctctctcctgtcccggggctctctggaacaactttctgaagaagaaatgcatgcagagatctgttatgcagaatgtctccttcagaaagctgctctgacctttgtgcaggacgaaaatatgatcaactttattaaaggtggcttgaagatacgtacatcttaccagatttacaaggaatgcctctctatcctgcacgaaatacagaaaaataaactccagcaagaattcttctacgaattcgagggtggcgttaagctggggagcggcgccttcaacctcatgctctctttgctccccgcacgtattattagattgctggagtttatcggattctccggtaaccgcgagctgggacttttacaactccgggaaggggcctcaggcaggagcatgaggagcgctctgtgctgtttgaccattttggcctttcatacttatatctctctcatactaggaacaggcgaggtgaatgtcgcggaagcggagagactcctcgccccattcttacagcaattccctaacggttctttggtcctcttttaccacgcaagaattgaactcctgaaaggtaatctggaagaagctcaggaagtatttcagaagtgtatctcagtacaagaagaatggaagcagttccaccacctgtgttattgggagttgatgtggatcaacgtgtttcagcagaattggatgcaggcttactattactccgatcttctctgcaaggaaagcaaatggagcaaagcaacatatgtttttcttaaggccgcaatcctctccatgctgcctgaagaggatgttgtcgccactaatgaaaacgttgttactttatttcgacaggttgactcccttaaacagcggatcgctgggaagagtatccctactgaaaagttcgccgtgcgcaaggcacgccgttactctgcatcacttccagctcccgttaaactgattctgcctgcactggaaatgatgtacgtgtggaacggcttttcgattgtctcaaagcggaaggatctgtctgaaaacctccttgttacagtggaaaaagccgaagcggcgcttcaatcgcaaaacttcaatagttttagcgtggacgatgagtgtctcgtaaagctgttgaagggatgttgtctgaagaacctgcagagacctctacaggccgagctatgttataatcatgtcgtcgagtctgagaagttgctgaagtacgatcactacctggtgcctttcaccttatttgagctcgcctccctctataaatcccagggagaaatcgacaaagccattaaattccttgaaacagctcgcaacaactataaggactactctctggagtccagactgcactttagaatacaggcagctttgcacctgtggagaaagcctagcagtgactag

SEQ ID NO: 243967 - DNA, 1851 bp, Artificial Sequence
  derived and/or modified sequence
atggccctgctgggcagcagagctgagctggaggctgatgaagatgtgtttgaagatgccctggagaccatcagcatcagcagccacagcgacatggccaccagcagcctgcactttgccagctgtgacacccagcaggccccccggcagagaggagccagcacagtgagcagcagcagcagcaccaaggtggacctgaagagcggcctggaggagtgtgctgtggccctgaacctcttcctgagcaacaagttcacagatgccctggagctgctgcggccctgggccaaggagagcatgtaccacgccctgggctacagcaccatcgtggtgctgcaggccgtgctgacctttgagcagcaggacatccagaatggcatcagcgccatgaaggatgccctgcagacctgccagaagtacaggaagaagtacacagtggtggagagcttcagcagcctgctgagccggggcagcctggagcagctgtctgaggaggagatgcatgctgagatctgctacgcagaatgtctgctgcagaaggccgccctgacctttgtgcaggatgagaacatgatcaacttcatcaagggcggcctgaagatccgcaccagctaccagatctacaaggagtgcctgagcatcctgcacgagatccagaagaacaagctgcagcaggagttcttctatgaatttgaaggaggagtgaagctgggcagcggggccttcaacctgatgctgagcctgctgcctgcccgcatcatccggctgctggagttcatcggcttcagcggcaaccgggagctgggcctgctgcagctgcgggagggcgccagcggccgctccatgaggtctgccctgtgctgcctgaccatcctggccttccacacctacatcagcctcatcctgggcaccggggaggtgaatgtggccgaggccgagcggctgctggcccccttcctgcagcagttccccaacggcagcctggtgctcttctaccacgcccgcatcgagctgctgaagggcaacctggaggaggcccaggaggtgttccagaagtgcatctctgtgcaggaggagtggaagcagttccaccacctgtgctactgggagctgatgtggatcaacgtgttccagcagaactggatgcaggcctactactacagcgacctgctgtgcaaggagagcaagtggagcaaggccacctacgtgttcctgaaggccgccatcctgtccatgctgcctgaggaggatgtggtggccaccaatgaaaatgtggtgaccctcttccggcaggtggacagcctgaagcagagaattgctgggaagagcatccccacagagaagtttgctgtgaggaaggcccggcgctacagcgccagcctgcctgcccctgtgaagctgatcctgcctgccctggagatgatgtatgtgtggaatggcttcagcatcgtgtccaagaggaaggacctgtctgagaacctgctggtgacagtggagaaggccgaggccgccctgcagagccagaacttcaacagcttctctgtggatgatgagtgcctggtgaagctgctgaagggctgctgcctgaagaacctgcagaggcccctgcaggccgagctgtgctacaaccacgtggtggagagcgagaagctgctgaagtatgaccactacctggtgcccttcaccctgtttgagctggccagcctgtacaagagccagggcgagattgacaaggccatcaagttcctggagacagccaggaacaactacaaggactacagcctggagagccggctgcacttccgcatccaggccgccctgcacctgtggaggaagcccagcagtgactag

SEQ ID NO: 243968 - DNA, 2049 bp, Artificial Sequence
  derived and/or modified sequence
atggatgctgtgctggcctgccgcctgcggggccggggcaacagagtggccgccctgcggccccggcccaggcctgggggcagcgctggccccagcccctttgccctgctgtgtgccggcctgagccctgagcccagggctggggtgggcagcgagttccctgcctggttcctgggcggcagcagccagaggaggaacatggccctgctgggcagcagagctgagctggaggctgatgaagatgtgtttgaagatgccctggagaccatcagcatcagcagccacagcgacatggccaccagcagcctgcactttgccagctgtgacacccagcaggccccccggcagagaggagccagcacagtgagcagcagcagcagcaccaaggtggacctgaagagcggcctggaggagtgtgctgtggccctgaacctcttcctgagcaacaagttcacagatgccctggagctgctgcggccctgggccaaggagagcatgtaccacgccctgggctacagcaccatcgtggtgctgcaggccgtgctgacctttgagcagcaggacatccagaatggcatcagcgccatgaaggatgccctgcagacctgccagaagtacaggaagaagtacacagtggtggagagcttcagcagcctgctgagccggggcagcctggagcagctgtctgaggaggagatgcatgctgagatctgctacgcagaatgtctgctgcagaaggccgccctgacctttgtgcaggatgagaacatgatcaacttcatcaagggcggcctgaagatccgcaccagctaccagatctacaaggagtgcctgagcatcctgcacgagatccagaagaacaagctgcagcaggagttcttctatgaatttgaaggaggagtgaagctgggcagcggggccttcaacctgatgctgagcctgctgcctgcccgcatcatccggctgctggagttcatcggcttcagcggcaaccgggagctgggcctgctgcagctgcgggagggcgccagcggccgctccatgaggtctgccctgtgctgcctgaccatcctggccttccacacctacatcagcctcatcctgggcaccggggaggtgaatgtggccgaggccgagcggctgctggcccccttcctgcagcagttccccaacggcagcctggtgctcttctaccacgcccgcatcgagctgctgaagggcaacctggaggaggcccaggaggtgttccagaagtgcatctctgtgcaggaggagtggaagcagttccaccacctgtgctactgggagctgatgtggatcaacgtgttccagcagaactggatgcaggcctactactacagcgacctgctgtgcaaggagagcaagtggagcaaggccacctacgtgttcctgaaggccgccatcctgtccatgctgcctgaggaggatgtggtggccaccaatgaaaatgtggtgaccctcttccggcaggtggacagcctgaagcagagaattgctgggaagagcatccccacagagaagtttgctgtgaggaaggcccggcgctacagcgccagcctgcctgcccctgtgaagctgatcctgcctgccctggagatgatgtatgtgtggaatggcttcagcatcgtgtccaagaggaaggacctgtctgagaacctgctggtgacagtggagaaggccgaggccgccctgcagagccagaacttcaacagcttctctgtggatgatgagtgcctggtgaagctgctgaagggctgctgcctgaagaacctgcagaggcccctgcaggccgagctgtgctacaaccacgtggtggagagcgagaagctgctgaagtatgaccactacctggtgcccttcaccctgtttgagctggccagcctgtacaagagccagggcgagattgacaaggccatcaagttcctggagacagccaggaacaactacaaggactacagcctggagagccggctgcacttccgcatccaggccgccctgcacctgtggaggaagcccagcagtgactag

SEQ ID NO: 243969 - DNA, 1851 bp, Artificial Sequence
  derived and/or modified sequence
atggccctgctgggcagccgggccgagctggaggccgacgaggacgtattcgaggatgccctggagaccattagcattagtagccactctgatatggctacttcatctttacacttcgccagctgtgatactcagcaggccccgcgccagagaggggcctcgacagtatctagtagctccagcacaaaggtggaccttaagtctggactggaggaatgtgccgtggccctgaacttgtttttgtccaacaaattcacagacgcacttgaactgctgcgcccctgggccaaagaatccatgtatcatgctctggggtattctactatcgtcgtcttgcaggcagtgttaacatttgagcagcaggacattcagaacggtatctctgccatgaaggatgctctgcagacatgtcagaaatataggaaaaaatacacggtcgtcgagagcttctcgtcgcttttgtcaagaggaagtctagaacagttgtccgaagaggagatgcacgccgaaatttgctacgctgagtgtctgctccagaaggcagcgctgactttcgtccaggatgagaacatgatcaacttcattaaagggggcctgaagatcagaaccagctatcagatatataaggagtgtctctccattctgcacgaaatacaaaagaacaagctccagcaggaattcttttacgagtttgaaggcggcgttaagctcggcagcggggcttttaacctcatgctgagtctcttgcccgctagaattatacggctcctggagttcataggctttagcgggaacagggaacttggcctgctgcagctccgagagggcgcctcaggcagatcaatgaggtcagctctgtgttgcctgactattttggcgttccatacttacatatctttgattctgggcacgggggaagttaacgtcgcagaggctgaacgcctcctggccccctttctacagcagtttcccaatgggtctctggtgcttttttaccatgctcggattgagctgttgaagggcaatcttgaagaagcgcaggaggtgttccaaaagtgtatctctgttcaggaggagtggaagcaatttcaccatctttgttactgggaactgatgtggataaacgtttttcagcagaactggatgcaggcctactactactccgatctgctctgtaaagagagcaaatggtccaaggccacttacgtgtttcttaaggcagccattttgtccatgcttcctgaggaggatgttgttgcaaccaatgagaatgttgttacgttgtttcgccaggtggattcactcaagcagagaattgccggtaaaagtattcctacagagaagtttgcagtcagaaaagcaaggagatactctgcgtcattgccagctcccgtaaagctgatacttcccgcactggagatgatgtacgtttggaacggctttagtatagtcagtaaaaggaaagatctttcggagaacctgctcgtgaccgtggaaaaggctgaggccgctctacagagccagaacttcaattcattcagcgttgacgatgaatgtttagtcaagctgttgaaaggctgttgccttaagaatttgcagaggccactgcaagcagagttatgctataatcatgtcgtcgaatcagagaagctgctcaaatacgatcactatcttgtccctttcactctgtttgagcttgccagcttgtacaagagtcaaggcgaaattgacaaggcgatcaaattcctggagactgccagaaacaactataaagactattccctggagtcaagactccactttagaatccaagccgctctgcacctgtggcgaaaacctagcagtgactag

SEQ ID NO: 243970 - DNA, 2049 bp, Artificial Sequence
  derived and/or modified sequence
atggacgccgtgctggcctgccggctgcggggccggggcaaccgggtcgccgccctccgacctcggccgaggcctggaggaagtgcgggtccatcccctttcgctctgctttgcgcggggttgtcaccagagccaagagctggcgttggcagtgaatttcctgcctggttcctaggcggaagttcccagcgcaggaatatggccttgttagggtcaagggctgagctggaggccgacgaagacgtgtttgaagacgcgctcgaaacaatttctatcagttcccacagcgacatggctacaagtagcctacatttcgctagctgtgacactcaacaggcaccacgccagcggggggctagtacggtgtctagctcgagctcaacgaaagtcgatcttaagtcaggtcttgaggagtgcgcggttgctcttaacctcttcctctcgaacaaattcactgacgccttagagttactgaggccttgggcaaaagagtcaatgtatcacgccctgggttatagcaccattgtggtactgcaggcagtactgaccttcgagcagcaggatattcagaatggaatttccgctatgaaggacgccctgcagacatgccaaaagtatcgtaaaaagtacaccgtcgtagagagctttagcagtttgctgtctcgcggtagcctggagcaactgagtgaagaagagatgcatgccgaaatctgttacgctgagtgcctgttgcagaaagccgcattaactttcgtgcaggacgaaaacatgattaattttattaagggaggcctcaagattagaaccagctaccagatctataaagagtgccttagcattcttcacgaaatccagaaaaacaaacttcagcaagagtttttctacgagtttgaggggggcgtcaaactgggtagcggtgccttcaatctgatgctaagtctgcttcctgcacgtatcattagattgctggagttcatcggatttagtgggaaccgagaacttgggctgttgcaactcagggagggcgctagtggaaggagcatgcggagcgcactctgttgcctaactatccttgccttccatacttatattagtctgatccttggaacaggcgaagtcaatgttgcggaagccgaacgccttttagctccgttccttcagcaatttccgaatggaagtctggttctcttctaccatgcccgcatagagctcctgaaggggaacctagaggaagctcaggaggtatttcaaaagtgtatcagcgtgcaggaggagtggaagcaatttcaccatctgtgttactgggagcttatgtggataaacgtgttccagcagaactggatgcaagcctactattactctgatttattgtgcaaggagtctaagtggagtaaggcaacgtatgtgtttttgaaagccgctatcctgtcgatgcttcccgaggaggacgttgtggcaaccaacgagaacgtagtgaccctgttccgccaggtagattccctgaagcagaggatagcgggtaaaagcatccctaccgagaagtttgcagttagaaaagctagacgatactctgccagtctccccgctcccgtgaaactgatattacctgctctggaaatgatgtatgtgtggaatggcttttcaattgtcagtaaaaggaaggatcttagtgaaaacctgctcgttaccgttgaaaaagcagaagcagccctgcagagtcaaaactttaattcattttccgtcgacgacgagtgcctcgtgaagctcctgaagggctgctgtctgaagaatctgcagagaccccttcaggcagagctgtgctacaaccatgtggtcgaatccgagaaactgctgaagtacgatcactatctggtccccttcaccctgtttgaattggccagcctctacaagtcccagggggagatcgacaaggccataaagtttctggaaaccgctaggaacaactataaagactacagcttggagtctcggctgcacttccgcattcaggccgcactccacctttggaggaaaccaagttcagattag

SEQ ID NO: 243971 - DNA, 1851 bp, Artificial Sequence
  derived and/or modified sequence
atggcacttctgggatctcgcgctgagctggaagccgatgaagatgtgttcgaggatgcgcttgagaccatcagtatctcatcgcattccgacatggccactagctccctgcattttgcgtcatgtgacacccagcaagcacctcggcagcgaggggcttctaccgtgtcttcgagtagcagtactaaggtggacctgaagagcggcttggaggagtgtgcagtggctttgaatttgtttctcagtaacaagtttacagatgctctggagctcttgcgcccatgggcaaaggaatcaatgtaccatgcacttggctactccacaatagtggtgctgcaggccgtgctcactttcgaacaacaagatattcagaacggaatctctgccatgaaagacgctctccaaacatgtcagaagtacaggaagaagtacaccgttgtcgagagtttctctagcctcctctctcggggaagcctggagcagctctccgaggaagagatgcatgccgagatttgttacgccgaatgtctgctccagaaggcagcccttacgtttgtccaggatgagaacatgattaatttcatcaaaggaggtctgaaaatacgaacttcttaccaaatttacaaggagtgcttgtccatcttgcacgagatacaaaagaataagctacagcaagaatttttctatgagtttgaaggaggagtcaagctgggcagtggcgcattcaacctaatgttgtccctcctgcccgcaaggatcattagattgctggagtttatcggattctctggtaaccgagaactgggactgctgcagcttagagaaggggcatcaggacgaagcatgaggagcgctttatgctgtcttaccattttggccttccatacttatatatcgttgattctgggaactggcgaggtcaatgtggccgaggcagaaaggctcctcgctccctttctacagcagttccctaacgggtctcttgttctcttctaccatgcaagaatcgagctcctgaaaggcaaccttgaggaagcgcaagaagtctttcaaaaatgcattagcgttcaggaggagtggaaacaatttcatcacctgtgttactgggagttaatgtggatcaacgtatttcagcagaactggatgcaggcatattattactcagatttactgtgcaaggagagcaagtggtccaaggcgacttacgttttcctgaaggccgcaatcttgtccatgctgcccgaggaagatgttgtggccaccaatgagaacgttgtcactctttttaggcaggtagacagtctcaagcaaagaatcgccggtaagtctatcccaacggaaaaattcgcagtcaggaaggcacgcaggtattcagcctccctgccagctccagttaagcttattctcccagctttagagatgatgtatgtgtggaatggattttctatcgtgagcaaaagaaaggaccttagtgagaacctgctagttaccgtggaaaaggcagaagcggctctgcagtctcagaattttaactctttctcagtggatgacgaatgcttggttaaattattgaaaggatgctgtcttaagaatctgcagcggccactccaagctgaattatgctataaccacgtcgtggaaagcgaaaagctgctgaaatatgaccattatctggtgcctttcacactgttcgaactcgcaagcctatacaaatcgcagggagagatagataaggccattaaattcctagagaccgccaggaacaattataaggactactccctggagtcaagactccactttcgaatccaggccgctttgcacttgtggcggaagccctcctctgattag

SEQ ID NO: 243972 - DNA, 2049 bp, Artificial Sequence
  derived and/or modified sequence
atggacgccgttctcgcatgccgcttgcgaggtcgcggaaacagagtggcggcactcagacctcggccacgacctggcggaagcgcaggcccatcgcctttcgcgttactgtgcgccggtctttctcccgaacccagagctggcgtgggcagcgagttccctgcatggtttttgggcggaagctcgcagaggcggaacatggccctgctgggcagccgggctgagctcgaggctgacgaggacgtttttgaagatgccctcgagactatatctattagtagtcactctgacatggctacctctagcctgcacttcgcctcctgcgacacacagcaggcccctcggcagcggggtgcctccacagtttcgagctcaagctcgacaaaggtggacttgaagagcgggctggaagagtgtgccgtggcgctaaacctcttcttatctaataagttcacggacgcgctggaactgcttagaccctgggccaaagagtcaatgtatcatgcccttgggtactcaacgatcgtcgtgcttcaggccgtgttgacattcgaacaacaggatattcagaatggcatcagcgccatgaaggacgctctacaaacctgccaaaaatatcgcaagaaatacactgtggtcgaaagctttagctcacttctgtccagaggatccctcgagcagctctcagaggaggaaatgcatgccgagatctgctacgcagagtgcctccttcaaaaggcggcacttactttcgtgcaagacgaaaacatgataaatttcattaagggagggctaaagatcagaacctcatatcaaatttacaaggaatgcctttcaatattacacgaaattcagaagaataagctgcagcaggaatttttctatgaattcgagggaggggtaaaactcggcagcggagcttttaatctgatgctctctctgctgcctgccaggatcattcggcttctggagttcatcggctttagtgggaacagggagctgggcctgctgcagttgagggaaggagctagtgggcgtagcatgcgtagtgcactgtgctgtctgaccattttggcgttccacacttacattagcctgattctgggtactggagaagtgaacgtggccgaggctgagcgactgctggcaccattcctgcagcagtttccaaatggctctctcgttttgttttaccacgctaggatagaactccttaagggcaacctggaggaggcacaagaagtgttccagaaatgcatttcagtgcaggaggaatggaagcagtttcaccacctctgctattgggagctgatgtggatcaacgtgttccagcagaattggatgcaggcctactactattcggatctcctgtgcaaggagtcaaagtggtccaaggcaacgtacgtgttcctgaaggccgctattctgtcgatgctgcccgaggaggacgtggtggccacaaatgaaaacgttgttacccttttcagacaagttgattcattgaagcagaggatagcaggtaagtcgatccccaccgaaaaatttgcagtgcggaaggcgaggcgctactcagcttctctcccggcaccagtgaagcttatactgcccgcactggaaatgatgtatgtgtggaatggcttctccatagtcagtaagcggaaggatctgagtgaaaacctgctcgtgacggtcgaaaaagccgaagcagctttacagtcacaaaatttcaacagctttagcgtcgatgatgaatgcctggtcaagctgctaaaagggtgctgtctgaagaacctgcagaggcctctgcaggctgagctgtgttacaaccacgttgtggaatcagaaaagctgttgaaatacgatcattaccttgttcccttcacactcttcgaacttgcatccctgtataaatcccagggcgaaatcgataaagcgattaaatttctcgagaccgccagaaacaactataaagattattctctcgagtccaggctccattttaggatccaggcagcgctgcacctgtggcggaaaccttccagcgactag

SEQ ID NO: 243973 - DNA, 3260 bp, Artificial Sequence
  derived and/or modified sequence
aagtggcccggccagcggcgcggcgtccggggaggaaatggatgctgtgctggcctgccggctccgggggcggggaaatcgagtagctgcactcaggccccgcccgagacccggagggagcgccgggccgtccccttttgccctcctttgcgctgggctgagcccagagccgagagcaggagtcggctctgagttccctgcttggtttttgggtggcagcagccagaggaggaatatggcgctcttaggcagccgagcggagctggaagcggacgaggacgttttcgaagatgccttggaaaccatctcaatatcttctcactcagatatggcaacaagcagccttcactttgcatcatgtgatacacaacaggcgcccagacagcgcggagcgtctactgtcagcagttcatcatcaaccaaggtggatctcaagagtggcctcgaagaatgtgctgtggcattgaacttatttctaagcaacaaatttacagacgccttagaattgcttcgcccctgggctaaggagagtatgtaccatgccttgggctacagtaccattgtggtgttgcaggctgtcctgaccttcgagcaacaggacatccagaacggcatttctgccatgaaggacgctttacaaacctgccaaaaatacaggaaaaaatacacagttgtagaatctttctcaagtcttctttctagaggatccctggagcaactgagtgaagaggaaatgcatgctgaaatctgttatgccgagtgtctcctacagaaagctgcactcacgtttgtgcaggatgaaaatatgatcaacttcatcaaaggtggactcaaaattagaacaagttaccaaatatataaagaatgtctttctatcctgcatgaaattcagaagaacaaacttcagcaggaattcttctatgagtttgaagggggtgtcaagcttggcagtggggcctttaatttgatgctgtcccttttaccagcaaggattatcagactactagaatttattggattttctgggaatagggagttgggcctcctgcagttacgtgaaggtgcttcaggaaggagcatgaggtctgcactgtgctgcttaaccatcttagcttttcatacttacatctccctaatacttggtacaggagaagtgaatgttgcggaagcagagcgtctcctggcacccttcctccagcagtttccaaatggctcactcgtgttgttttatcatgcccgaatagagttgctgaaagggaatcttgaagaggcacaagaagtatttcaaaaatgcatttcagttcaagaagaatggaaacagtttcaccatctctgctactgggagctaatgtggattaatgttttccaacaaaactggatgcaggcatattactattcagatctgctttgcaaagagagtaaatggtccaaggcaacttatgtgttcttgaaagcagcaattttgagtatgcttccagaggaggatgtagtagcaacgaatgagaatgtggtaactttattcagacaggtggacagcttgaagcagagaattgccgggaaatctatccctactgagaagtttgctgtgaggaaggctcggcgttactccgcctccttacctgcacctgtgaagctcatcttacctgccctggaaatgatgtatgtctggaatggtttttcaatagtgagcaaaagaaaagacctttctgaaaatctgttagtaactgttgaaaaagctgaggcagctttacaaagtcaaaattttaacagcttctctgtggatgatgagtgcttagtgaagttacttaaaggatgttgcctcaagaacttacagcggcccttgcaagctgaactatgttacaatcatgttgtggaaagtgaaaagctactgaagtatgaccactacctagtgccgttcactctatttgaattggcatctttgtataaaagccagggggaaattgacaaggccataaagttcctagaaactgcaaggaacaactacaaagattactccctggagtccagactacacttcagaattcaggcagctcttcacctctggagaaaaccttcctcagattgatcagaacttgaaggatggaatttttcctcaattagcatcggcatctgctatagattcaaccttatattaaagtggaaaaatgatcttgtgaataagagacaaaaaaacagtttttttggtcaatattttctatcatctgagagatttactgttggtctacataattttttttcctatggaatggcattctatattatctagaaaattcttatattttgcctcccccaaaagaatttcatattatttgaattagggggcgaagaagtcttttgaaagacttgcagatgcaatagtctaattagattatttatttttttaatgtgaaaattaatattgtttagcaaatagcttacaagttgagccaattttggatttgttgggtagttaaacttcagagatattttgttgcctgtatttaaatttcagaagataaataaatatcattgcatttaaaatagcttaacagtgaccttcagaagacttctgaaaaagacagtctgagaacatgaacacggatcgatataatgtacttcatgggttgaagagacctttctctataaaggatgatgcagtattcagttagtggttttttactcttcatttgattaaaggtggtgacgttttggagagactgattttgaatgtacttaagtctattataataacaaaattcaaaacccctgtgtatctaaagggaaggaagtgtcatattttaggaatttttcttaaccttagcaatgagagcctaaaatacatacatggattatttttcttctaggaagtaaatttcctgctgctttaaatgatatgtaaaatatcaataatttttacacttaagatgttggtaagacctagttttctaatctctctagcactgtgatgtctccttgtagataatctggaccttgcttagtcctttagttgggaaacagaatcagggcatagagcagaagagagcttgacactccatatggtcctggttctgctacccattagcgattagtgaggagacctttagggagtccactgtgccctgtgtgtcaccacattttcttctgtgaaatcaagattaaagaacagatgactttcaaggtctttttcagttttataactgtgagtctatgtattaggtatttattttcaacaaatgactttaaaatgtcgaatgcaaacc

SEQ ID NO: 243974 - DNA, 2542 bp, Artificial Sequence
  derived and/or modified sequence
aagtggcccggccagcggcgcggcgtccggggaggaaatggatgctgtgctggcctgccggctccgggggcggggaaatcgagtagctgcactcaggccccgcccgagacccggagggagcgccgggccgtccccttttgccctcctttgcgctgggctgagcccagagccgagagcaggagtcggctctgagttccctgcttggtttttgggtggcagcagccagaggaggaatatggcgctcttaggcagccgagcggagctggaagcggacgaggacgttttcgaagatgccttggaaaccatctcaatatcttctcactcagatatggcaacaagcagccttcactttgcatcatgtgatacacaacaggcgcccagacagcgcggagcgtctactgtcagcagttcatcatcaaccaaggtggatctcaagagtggcctcgaagaatgtgctgtggcattgaacttatttctaagcaacaaatttacagacgccttagaattgcttcgcccctgggctaaggagagtatgtaccatgccttgggctacagtaccattgtggtgttgcaggctgtcctgaccttcgagcaacaggacatccagaacggcatttctgccatgaaggacgctttacaaacctgccaaaaatacaggaaaaaatacacagttgtagaatctttctcaagtcttctttctagaggatccctggagcaactgagtgaagaggaaatgcatgctgaaatctgttatgccgagtgtctcctacagaaagctgcactcacgtttgtgcaggatgaaaatatgatcaacttcatcaaaggtggactcaaaattagaacaagttaccaaatatataaagaatgtctttctatcctgcatgaaattcagaagaacaaacttcagcaggaattcttctatgagtttgaagggggtgtcaagcttggcagtggggcctttaatttgatgctgtcccttttaccagcaaggattatcagactactagaatttattggattttctgggaatagggagttgggcctcctgcagttacgtgaaggtgcttcaggaaggagcatgaggtctgcactgtgctgcttaaccatcttagcttttcatacttacatctccctaatacttggtacaggagaagtgaatgttgcggaagcagagcgtctcctggcacccttcctccagcagtttccaaatggctcactcgtgttgttttatcatgcccgaatagagttgctgaaagggaatcttgaagaggcacaagaagtatttcaaaaatgcatttcagttcaagaagaatggaaacagtttcaccatctctgctactgggagctaatgtggattaatgttttccaacaaaactggatgcaggcatattactattcagatctgctttgcaaagagagtaaatggtccaaggcaacttatgtgttcttgaaagcagcaattttgagtatgcttccagaggaggatgtagtagcaacgaatgagaatgtggtaactttattcagacaggtggacagcttgaagcagagaattgccgggaaatctatccctactgagaagtttgctgtgaggaaggctcggcgttactccgcctccttacctgcacctgtgaagctcatcttacctgccctggaaatgatgtatgtctggaatggtttttcaatagtgagcaaaagaaaagacctttctgaaaatctgttagtaactgttgaaaaagctgaggcagctttacaaagtcaaaattttaacagcttctctgtggatgatgagtgcttagtgaagttacttaaaggatgttgcctcaagaacttacagcggcccttgcaagctgaactatgttacaatcatgttgtggaaagtgaaaagctactgaagtatgaccactacctagtgccgttcactctatttgaattggcatctttgtataaaagccagggggaaattgacaaggccataaagttcctagaaactgcaaggaacaactacaaagattactccctggagtccagactacacttcagaattcaggcagctcttcacctctggagaaaaccttcctcagattgatcagaacttgaaggatggaatttttcctcaattagcatcggcatctgctatagattcaaccttatattaaagtggaaaaatgatcttgtgaataagagacaaaaaaacagtttttttggtcaatattttctatcatctgagagatttactgttggtctacataattttttttcctatggaatggcattctatattatctagaaaattcttatattttgcctcccccaaaagaatttcatattatttgaattagggggcgaagaagtcttttgaaagacttgcagatgcaatagtctaattagattatttatttttttaatgtgaaaattaatattgtttagcaaatagcttacaagttgagccaattttggatttgttgggtagttaaacttcagagatattttgttgcctgtatttaaatttcagaagataaataaatatcattgcatttaaaat

SEQ ID NO: 243975 - DNA, 927 bp, Artificial Sequence
  derived and/or modified sequence
gcgctgggctgagcccagagccgagagcaggagtcggctctgagttccctgcttggtttttgggtggcagcagccagaggaggaatatggcgctcttaggcagccgagcggagctggaagcggacgaggacgttttcgaagatgccttggaaaccatctcaatatcttctcactcagatatggcaacaagcagccttcactttgcatcatgtgatacacaacaggcgcccagacagcgcggagcgtctactgtcagcagttcatcatcaaccaaggtggatctcaagagtggcctcgaagaatgtgctgtggcattgaacttatttctaagcaacaaatttacagacgccttagaattgcttcgcccctgggctaaggagagtatgtaccatgccttgggctacagtaccattgtggtgttgcaggctgtcctgaccttcgagcaacaggacatccagaacggcatttctgccatgaaggacgctttacaaacctgccaaaaatacaggaaaaaatacacagttgtagaatctttctcaagtcttctttctagaggatccctggagcaactgagtgaagaggaaatgcatgctgaaatctgttatgccgagtgtctcctacagaaagctgcactcacgtttgtgcagagaatgtctttctatcctgcatgaaattcagaagaacaaacttcagcaggaattcttctatgagtttgaagggggtgtcaagcttggcagtggggcctttaatttgatgctgtcccttttaccagcaaggattatcagactactagaatttattggattttctgggaatagggagttgggcctcctgcagttacgtgaaggtgcttcaggaaggagcatgaggtctgcactgtgctgcttaaccatcttagcttttcatacttacatctccctaatactt

SEQ ID NO: 243976 - protein, 425 aa, Artificial Sequence
  derived and/or modified sequence
MNKMPAGEQECEYNKEGKYYSKGVKLVRKKKKIPGYRWGDIKINIIGEKDDLPIHFCDKCDLPIKIYGRIIPCKHAFCYHCANLYDKVGYKVCPRCRYPVLRIEAHKRGSVFMCSIVQQCKRTYLSQKSLQAHIKRRHKRARKQVTSASLEKVRPHIAPPQTEISDIPKRLQDRDHLSYIPPEQHTMVSLPSVQHMLQEQHNQPHKDIQAPPPELSLSLPFPIQWETVSIFTRKHGNLTVDHIQNNSDSGAKKPTPPDYYPECQSQPAVSSPHHIIPQKQHYAPPPSPSSPVNHQMPYPPQDVVTPNSVRSQVPALTTTYDPSSGYIIVKVPPDMNSPPLRAPQSQNGNPSASEFASHHYNLNILPQFTENQETLSPQFTQTDAMDHRRWPAWKRLSPCPPTRSPPPSTLHGRSHHSHQRRHRRY

SEQ ID NO: 243977 - DNA, 1278 bp, Artificial Sequence
  derived and/or modified sequence
atgaacaaaatgccagccggcgagcaagaatgcgagtataataaagaggggaaatactactcaaagggagtaaaactcgtgcgcaagaagaaaaaaattcctgggtaccgatggggagatattaaaattaacattattggtgagaaagacgacttacccattcatttctgcgataaatgtgatctaccaatcaaaatatatgggcggataatcccctgcaagcatgctttttgttaccattgtgctaatctgtatgataaagtcgggtacaaagtttgccctcgctgtcggtatcctgtcttaagaatcgaagcccataagagaggaagtgtgtttatgtgttccattgttcagcaatgtaagaggacttacctgagtcagaaatccctgcaggcacatataaagcggagacacaaaagggctcgaaagcaagtcacgtccgcgtctcttgaaaaggtacgcccccacattgccccaccacaaactgagatctcagatattccaaaacggctccaggaccgcgatcatctgagctacattcctcccgaacagcataccatggtgagcttgccatcagtgcagcatatgttacaggagcaacataaccagcctcataaggatatccaggcaccgccccccgagctcagtttaagcttgccattcccgatccagtgggaaacggtcagtatcttcacccgaaagcatggcaaccttaccgtcgaccacattcagaacaactcagattccggagcaaaaaagccaactcctcccgactattacccggaatgccagtcacagccggccgtctcttccccacatcacattatccctcagaagcagcactacgctcctcctccctctccgtcgagccccgtgaatcaccagatgccctacccccctcaggatgtggtgaccccaaatagcgttcggagtcaggtaccggccctcacgacaacctacgacccctcatcagggtacataattgtcaaggtgccgcccgacatgaatagcccccccctcagagcaccacaatctcagaacggtaaccctagcgcctctgagttcgcctctcatcactataacctcaacatactgccacaattcactgagaaccaggagacactttctccacagttcacacaaacagacgcaatggaccatcgacggtggcccgcctggaaaaggctttcaccatgtcctcctacccggtcaccacccccttctacactacatggcaggtcgcaccactcccatcagcggagacatcgccgatattag

SEQ ID NO: 243978 - DNA, 1278 bp, Artificial Sequence
  derived and/or modified sequence
atgaacaagatgcctgctggggagcaggagtgtgagtacaacaaggagggcaagtactacagcaagggcgtgaagctggtgaggaagaagaagaagatccctggctaccgctggggagacatcaagatcaacatcatcggggagaaggatgacctgcccatccacttctgtgacaagtgtgacctgcccatcaagatctacggccgcatcatcccctgcaagcacgccttctgctaccactgtgccaacctgtatgacaaggtgggctacaaggtgtgcccccgctgccgctaccctgtgctgagaattgaggcccacaagaggggcagcgtcttcatgtgcagcatcgtgcagcagtgcaagaggacctacctgagccagaagagcctgcaggcccacatcaagaggaggcacaagagggccaggaagcaggtgaccagcgccagcctggagaaggtgcggccccacatcgccccaccccagacagagatcagtgacatccccaagaggctgcaggaccgggaccacctgagctacatccccccagagcagcacaccatggtgtccctgcccagcgtgcagcacatgctgcaggagcagcacaaccagccccacaaggacatccaggcccctcctcctgagctgagcctgagcctgcccttccccatccagtgggagaccgtgtccatcttcaccaggaagcacggcaacctgactgtggaccacatccagaacaacagcgacagcggggccaagaagcccaccccaccagactactacccagagtgccagagccagcctgctgtgagcagcccccaccacatcatcccccagaagcagcactacgcccccccacccagccccagcagccctgtgaaccaccagatgccctacccaccccaggatgtggtgacccccaacagcgtgcgcagccaggtgcctgccctgaccaccacctatgaccccagcagcggctacatcatcgtgaaggtgcccccagacatgaacagcccccccctgcgggccccccagagccagaatggaaaccccagcgccagcgagtttgccagccaccactacaacctgaacatcctgccccagttcacagagaaccaggagaccctgagcccccagttcacccagacagatgccatggaccaccggcgctggccagcctggaagaggctgagcccctgcccccccaccaggagccccccacccagcaccctgcacggccgcagccaccacagccaccagaggaggcaccggcgctactag

SEQ ID NO: 243979 - DNA, 1278 bp, Artificial Sequence
  derived and/or modified sequence
atgaacaagatgcccgccggcgagcaggagtgcgagtacaacaaggaaggtaaatactacagcaagggtgtaaaactggttagaaagaaaaagaagatcccaggctaccggtggggcgacattaaaatcaacattatcggtgagaaagatgacctccctatccacttttgtgacaagtgtgacctccctattaagatctacggccgtataatcccatgtaagcatgcattctgctatcattgcgccaacctttatgataaggtcgggtataaagtatgcccaagatgtagatatcccgtcttgcgaatcgaagcccacaaaagagggagcgtgtttatgtgttccatagtgcagcaatgcaagaggacttacctgagtcaaaagagcttgcaggcccacattaagcggaggcataaacgtgccagaaagcaggttacgagcgcctccctggagaaagtgcgcccccatattgcaccccctcagacggagatttccgacattccgaagaggcttcaggatagggatcacctctcctatatcccaccagagcagcacaccatggtctcgttgccctccgtccagcacatgttacaggaacagcataatcagcctcacaaagatatccaggcaccaccaccagaactgtccctgagtctcccgttcccaattcagtgggaaactgtaagtatcttcacaagaaaacacggcaatttaacagtggatcacattcagaacaattccgactcaggcgcaaaaaaaccaacaccacctgattattatccagagtgtcagtcccagccagctgtctctagccctcaccatataatcccacagaaacaacactatgctccacccccctcgccttcctcccctgtgaaccatcagatgccctatccaccccaggacgtagttacaccgaactctgttagatcacaggttccagccctgacgaccacctacgatcccagcagcgggtatatcatcgttaaagtgccccctgacatgaactcgccgcccctgcgtgccccgcagtcacaaaacggaaatcccagtgccagtgagttcgcaagtcaccactacaacctgaatatactgccacagtttactgaaaatcaggaaaccctttctccgcagttcacccaaactgatgccatggaccatcgccgttggccagcatggaagcggctctcaccctgcccacccaccagaagcccaccaccttctacactacatgggagatctcaccatagccaccagaggagacacaggcgctactag

SEQ ID NO: 243980 - DNA, 1278 bp, Artificial Sequence
  derived and/or modified sequence
atgaataagatgccagccggagaacaggagtgcgaatataacaaggagggcaaatattacagcaaaggtgttaaactagtccgaaaaaagaagaaaatacctgggtacaggtggggggacatcaagattaacatcatcggtgagaaggatgaccttcccatccatttctgtgataaatgcgaccttcccattaagatatatggcaggataattccatgcaagcatgctttctgctaccattgcgctaatctgtacgacaaggtaggctacaaggtatgtcctagatgtcgctatcctgttttgcgcatcgaggctcacaagagagggtccgtgttcatgtgtagtatcgtccagcagtgtaagcggacttatcttagtcagaaatccctgcaggctcatattaagagaaggcataagcgagcaagaaagcaggtgactagtgccagtctggagaaagtacgtccacacatcgccccaccacagacagaaatatcagacatcccaaaacgactccaggatcgcgaccatctatcatatatccccccagagcaacacaccatggtcagccttccttctgtccagcacatgctgcaagaacaacataatcagccccataaagatattcaggccccaccccctgaactgtctctgagtcttcctttcccaatacagtgggaaactgtgtcgatcttcacacgcaagcatggcaacctgacggttgatcacatccagaacaatagtgattccggggctaaaaaacctaccccacccgattattacccagagtgccagtctcaacctgccgttagcagcccccaccacataattccccagaagcagcattacgcccctcctccgtccccatcaagccctgttaaccaccagatgccatacccaccccaagacgtcgtgacaccgaactcagtgcgctcacaggtgcccgcacttaccaccacttacgacccctcctccggttacattatcgtcaaagtgccacccgacatgaattcgcctcctttacgggcaccgcaatctcagaatggcaaccccagtgcatccgagttcgcttctcaccactataacctcaacattcttccacagtttacagaaaatcaggaaactttaagtcctcaattcacgcagaccgacgcaatggatcaccggagatggcccgcttggaaaaggctgtcaccatgcccacccacaagatcacccccaccttccaccctccatggcaggtctcaccattcccatcagcggagacatagacggtactag

SEQ ID NO: 243981 - DNA, 1510 bp, Artificial Sequence
  derived and/or modified sequence
gaggaagtagacaaacctaaatatgtgtctgaactccaaggaatatgaacaagatgcctgctggtgaacaagaatgtgaatataacaaagaagggaagtactactctaaaggagttaaactggtgagaaaaaagaaaaaaattcctggttaccgttggggggacattaagataaacatcataggtgaaaaggatgatttaccaattcatttctgtgacaaatgtgatttgcctattaaaatctatgggcgaataattccgtgcaagcatgctttttgctatcactgtgctaatttatatgacaaagtcggatataaagtatgtccgcgctgtcgttatcctgtgctgagaattgaggcgcataaacgaggttctgtcttcatgtgtagtattgttcagcagtgcaagagaacatacttgtctcagaaaagcttacaggctcatatcaaacgccgccataagagagctcgaaaacaagttaccagcgcttcgcttgaaaaagttcgtcctcatattgctccgccacaaactgaaatctctgacatccctaaaagactgcaagacagggaccatctaagctatattccaccagaacagcacaccatggtgtcactaccgtctgtgcaacatatgctacaagagcaacataatcagccacataaggatatccaggctcctcccccagaactatctctaagtctgccttttcccatccagtgggaaaccgttagtatttttacgagaaaacatggcaatttaacagttgatcatattcagaataactcagattctggtgctaagaagccaacacctcccgactattatcctgagtgtcaaagtcaaccagcggtatcgtcccctcatcatattatacctcagaaacagcattatgcgccacctccatctccatcatcaccagtaaaccatcaaatgccatatcctcctcaggatgtagttactcctaactcggttcgtagccaagtgccagctctaaccacgacctacgatccatcatctggatatattattgtaaaggtgccacctgatatgaattctcctccactacgtgctccccagtctcaaaatggtaatccatctgcaagtgaatttgcttctcaccattataaccttaacattttacctcagttcaccgaaaatcaagaaaccttgagccctcagtttacacaaacagatgcaatggatcatagaaggtggcctgcatggaaacgactgtcaccttgtccaccaacgcggagtccacctccttcaaccctacatggtcgatcacatcattcacaccagagaagacatagacggtattaaggatgataacagtatttggaactgaagacctgatgggaaaaaaaccttcaagttctatactgtactgtggataagcggctcagttcagcagagctggagttgaacaactttgttcctctggtgtggtaaattgacctaaaggtgacctctgacgatttcctgaaataaatatgcaatgttacattttc

SEQ ID NO: 243982 - DNA, 1278 bp, Artificial Sequence
  derived and/or modified sequence
atgaacaagatgcccgccggcgagcaggagtgcgagtacaacaaggagggcaagtactacagcaagggcgtgaagctggtgagaaagaagaagaagatccccggctacagatggggcgacatcaagatcaacatcatcggcgagaaggacgacctgcccatccacttctgcgacaagtgcgacctgcccatcaagatctacggcagaatcatcccctgcaagcacgccttctgctaccactgcgccaacctgtacgacaaggtgggctacaaggtgtgccccagatgcagataccccgtgctgagaatcgaggcccacaagagaggcagcgtgttcatgtgcagcatcgtgcagcagtgcaagagaacctacctgagccagaagagcctgcaggcccacatcaagagaagacacaagagagccagaaagcaggtgaccagcgccagcctggagaaggtgagaccccacatcgcccccccccagaccgagatcagcgacatccccaagagactgcaggacagagaccacctgagctacatcccccccgagcagcacaccatggtgagcctgcccagcgtgcagcacatgctgcaggagcagcacaaccagccccacaaggacatccaggcccccccccccgagctgagcctgagcctgcccttccccatccagtgggagaccgtgagcatcttcaccagaaagcacggcaacctgaccgtggaccacatccagaacaacagcgacagcggcgccaagaagcccaccccccccgactactaccccgagtgccagagccagcccgccgtgagcagcccccaccacatcatcccccagaagcagcactacgcccccccccccagccccagcagccccgtgaaccaccagatgccctaccccccccaggacgtggtgacccccaacagcgtgagaagccaggtgcccgccctgaccaccacctacgaccccagcagcggctacatcatcgtgaaggtgccccccgacatgaacagcccccccctgagagccccccagagccagaacggcaaccccagcgccagcgagttcgccagccaccactacaacctgaacatcctgccccagttcaccgagaaccaggagaccctgagcccccagttcacccagaccgacgccatggaccacagaagatggcccgcctggaagagactgagcccctgcccccccaccagaagccccccccccagcaccctgcacggcagaagccaccacagccaccagagaagacacagaagatactag

SEQ ID NO: 243983 - DNA, 453 bp, Artificial Sequence
  derived and/or modified sequence
atggagaataacccctctcataatcccgtgagtccaagcccattccccaccaggatttcggctccacttaacatgtctcagtcccattttcgcgagaattggcttatgctgaagaagagcctcgagggcaagctctgcccaagtagttgcggatcactaaaatgtcgtgccagtcgctctccatcagtgggcacaggcccatccctccccattgaatgcttcctgtacatgaaaacctggagttccctccagatgacggtggcctcagaggaagacaagcgcagggaaaagacacaaaacgcggggctcccactttttttcgcatcgaccgtggggacggtgaccctgcctagctttcaccacttacagttgcatacacatacccacaccctggtgccacagtcattgttcgggacatgtttgaccgcgcatttggaaacccgctggtcatag

SEQ ID NO: 243984 - protein, 313 aa, Artificial Sequence
  derived and/or modified sequence
MPWKEESEFTKQDKAARVIQQAWKSFLNVAIFQHFKSLIDLRRQGEPRQIVKYINPKEAELLDAAAGIHVRFRLGGVKFPPDIYYKIFTHRPIEDLCANSPRNYAKLPAKHTSHNKNDHLQEEDHSGWYHRIENNGWRPVSDTFWLSTDGMVVEDKKESEFHFSKLKRRQDLEKKRKLRKIEWMRQMYYSGSLEAKSTHHETLGLIHTATKGLIRAFEDGGIDSVMEWEVDEVLNWTNTLNFDEYIASWKEIATSNSSANFKGFRFNQAQKNIYNYGGDISKMQMGIPDDTYYENVYQEPNVTRLTPDSTYGL

SEQ ID NO: 243985 - DNA, 1033 bp, Artificial Sequence
  derived and/or modified sequence
acgtcatttccgcctgcgacgttacctaggagtccagcggcgcccgggccagcagcgattggaatttcaaatgccttggaaagaggaatcagaatttacaaagcaggataaggctgccagagtcattcagcaggcctggaaaagtttccttaatgtcgctatatttcaacactttaaaagtctgattgatttaagaagacaaggagaaccacgtcagatagtgaaatatattaatcccaaagaggcagagcttctagatgctgctgctggcattcatgtgcgattcagattaggtggagttaaatttccacctgatatatactataagatttttactcacagacctattgaagatctctgtgctaacagccctagaaattatgcaaaacttccagcaaagcatacatctcataataaaaatgatcatcttcaggaagaggatcatagtggctggtatcatcgtatagaaaacaatggctggaggccagtttctgatacattttggctatctactgatggtatggtggtggaagacaaaaaggaaagtgaattccatttctctaaactgaagagaaggcaagatttggaaaagaaaagaaaacttagaaaaatagagtggatgaggcaaatgtactactcaggaagtctggaggctaagtcaacacatcatgaaactctaggactaattcacactgcaacaaaggggctgattagagcttttgaagatggggggatagattctgtgatggaatgggaagtggatgaagtgctgaactggacaaatacactgaactttgatgagtacattgccagctggaaggaaattgctacaagcaactcttcggctaacttcaaaggattcaggtttaatcaagcacagaaaaacatatataactatggaggagacatatcaaagatgcaaatgggaataccagatgatacttactatgaaaatgtttatcaagaaccaaatgtaactagattaacgcctgattctacttatggactataaagtactttatttctattctga

SEQ ID NO: 243986 - DNA, 973 bp, Artificial Sequence
  derived and/or modified sequence
ggaatttcaaatgccttggaaagaggaatcagaatttacaaagcaggataaggctgccagagtcattcagcaggcctggaaaagtttccttaatgtcgctatatttcaacactttaaaagtctgattgatttaagaagacaaggagaaccacgtcagatagtgaaatatattaatcccaaagaggcagagcttctagatgctgctgctggcattcatgtgcgattcagattaggtggagttaaatttccacctgatatatactataagatttttactcacagacctattgaagatctctgtgctaacagccctagaaattatgcaaaacttccagcaaagcatacatctcataataaaaatgatcatcttcaggaagaggatcatagtggctggtatcatcgtatagaaaacaatggctggaggccagtttctgatacattttggctatctactgatggtatggtggtggaagacaaaaaggaaagtgaattccatttctctaaactgaagagaaggcaagatttggaaaagaaaagaaaacttagaaaaatagagtggatgaggcaaatgtactactcaggaagtctggaggctaagtcaacacatcatgaaactctaggactaattcacactgcaacaaaggggctgattagagcttttgaagatggggggatagattctgtgatggaatgggaagtggatgaagtgctgaactggacaaatacactgaactttgatgagtacattgccagctggaaggaaattgctacaagcaactcttcggctaacttcaaaggattcaggtttaatcaagcacagaaaaacatatataactatggaggagacatatcaaagatgcaaatgggaataccagatgatacttactatgaaaatgtttatcaagaaccaaatgtaactagattaacgcctgattctacttatggactataaagtactttatttctattctga

SEQ ID NO: 243987 - DNA, 942 bp, Artificial Sequence
  derived and/or modified sequence
atgccctggaaggaggagagcgagttcaccaagcaggacaaggccgccagagtgatccagcaggcctggaagagcttcctgaacgtggccatcttccagcacttcaagagcctgatcgacctgagaagacagggcgagcccagacagatcgtgaagtacatcaaccccaaggaggccgagctgctggacgccgccgccggcatccacgtgagattcagactgggcggcgtgaagttcccccccgacatctactacaagatcttcacccacagacccatcgaggacctgtgcgccaacagccccagaaactacgccaagctgcccgccaagcacaccagccacaacaagaacgaccacctgcaggaggaggaccacagcggctggtaccacagaatcgagaacaacggctggagacccgtgagcgacaccttctggctgagcaccgacggcatggtggtggaggacaagaaggagagcgagttccacttcagcaagctgaagagaagacaggacctggagaagaagagaaagctgagaaagatcgagtggatgagacagatgtactacagcggcagcctggaggccaagagcacccaccacgagaccctgggcctgatccacaccgccaccaagggcctgatcagagccttcgaggacggcggcatcgacagcgtgatggagtgggaggtggacgaggtgctgaactggaccaacaccctgaacttcgacgagtacatcgccagctggaaggagatcgccaccagcaacagcagcgccaacttcaagggcttcagattcaaccaggcccagaagaacatctacaactacggcggcgacatcagcaagatgcagatgggcatccccgacgacacctactacgagaacgtgtaccaggagcccaacgtgaccagactgacccccgacagcacctacggcctgtag

SEQ ID NO: 243988 - DNA, 942 bp, Artificial Sequence
  derived and/or modified sequence
atgccttggaaagaggagtcagagttcactaagcaggataaggctgcacgcgtgatccagcaagcctggaagtcctttctgaacgtcgccatttttcaacacttcaaatcactgattgacctccgacgccaaggcgagcctaggcaaatcgtgaaatacataaatcctaaagaggcagagctgctcgatgccgcagcaggaattcacgttaggtttaggcttggaggggtgaaatttcctccagacatctattataagattttcacccataggccgatagaagacctttgtgctaattctcctcgaaattacgcgaagctgccagccaagcacaccagtcataacaagaatgaccacctgcaggaggaagaccactccggttggtatcataggatagaaaataatggatggcggcccgtgtccgacactttctggctttccactgatggcatggtagtcgaggacaaaaaggagtcagagttccattttagtaaattgaagagaagacaggatctggaaaagaaacggaagttgcggaagatcgagtggatgaggcagatgtattacagtgggtcgctggaggccaaatccacccatcacgaaacccttggtttgatacacactgccactaaaggcctgatccgcgcattcgaggatggtgggatagactccgtcatggaatgggaggttgatgaggtgctgaattggactaacaccctgaacttcgatgagtacattgcatcgtggaaggaaattgccacatccaactcctcagccaactttaagggctttaggttcaaccaggctcagaagaacatctacaactatggcggagatatttccaagatgcagatggggatccctgacgacacttattatgaaaatgtttaccaggaacccaacgtgacccggctcacccccgactcgacttacggcttgtag

SEQ ID NO: 243989 - DNA, 942 bp, Artificial Sequence
  derived and/or modified sequence
atgccctggaaggaggagtccgagttcactaagcaggataaggcggctcgggtgatccaacaggcatggaagtcgttcctgaacgtcgctatcttccaacacttcaagtcactgattgatcttagacggcagggcgaaccaagacagatcgtgaagtacattaatcccaaggaagccgagctgctggacgccgctgcgggaatccacgtgagattcaggctcggaggggtgaagttcccccccgacatctactacaagatctttacgcaccggcccatcgaagatctgtgtgctaatagtccacggaactacgcaaagttaccagcaaaacacacatcgcataacaagaacgatcatctacaagaggaagatcacagcgggtggtaccatcgcatcgagaacaatggttggagacctgtgagcgacaccttttggctaagcactgacggtatggtggtggaagataagaaggaatcagagttccatttctctaagttaaaaaggagacaggatctggaaaagaagaggaagctccgtaaaatagaatggatgcgccagatgtattactcggggagtctcgaggcaaagtccacccatcacgagactctcggcttgatccatacggccaccaaaggtctaattcgggcattcgaagacggcgggatcgactctgtcatggagtgggaagtggatgaggtgctcaattggacgaataccctgaattttgacgagtacattgcctcttggaaggagatcgcaacgagcaattctagcgccaacttcaagggattcagattcaatcaggcacaaaaaaatatttacaattatggcggagacatctcgaagatgcagatgggaatccccgacgacacctattacgagaatgtctatcaggaacctaacgtgacccgcctgacccctgattcaacctatggcttgtag

SEQ ID NO: 243990 - DNA, 942 bp, Artificial Sequence
  derived and/or modified sequence
atgccctggaaggaggagagcgagttcaccaagcaggacaaggccgcccgggtcatccagcaggcctggaagagcttcctgaatgtggccatcttccagcacttcaagagcctgattgacctgcggcggcagggcgagccccggcagatcgtgaagtacatcaaccccaaggaggccgagctgctggatgctgctgctggcatccacgtgcgcttccggctgggcggcgtgaagttccccccagacatctactacaagatcttcacccaccggcccatcgaggacctgtgtgccaacagccccaggaactatgccaagctgcctgccaagcacaccagccacaacaagaatgaccacctgcaggaggaggaccacagcggctggtaccacagaattgaaaataatggctggaggcctgtgtctgacaccttctggctgagcacagatggcatggtggtggaggacaagaaggagagcgagttccacttcagcaagctgaagaggcggcaggacctggagaagaagaggaagctgaggaagattgagtggatgaggcagatgtactacagcggcagcctggaggccaagagcacccaccacgagaccctgggcctcatccacacagccaccaagggcctcatccgggcctttgaagatggcggcatcgacagcgtgatggagtgggaggtggatgaggtgctgaactggaccaacaccctgaactttgatgagtacatcgcctcctggaaggagatcgccaccagcaacagcagcgccaacttcaagggcttccgcttcaaccaggcccagaagaacatctacaactacggcggggacatcagcaagatgcagatgggcatcccagatgacacctactatgaaaatgtgtaccaggagcccaacgtgacccggctgaccccagacagcacctacggcctgtag

SEQ ID NO: 243991 - DNA, 942 bp, Artificial Sequence
  derived and/or modified sequence
atgccctggaaggaggagagcgagttcaccaagcaggacaaggccgcacgggtcattcagcaggcatggaagtcctttctgaatgtcgccatattccagcactttaagtccctgatcgatttacggcggcagggtgaaccacggcagatagtcaagtacatcaacccaaaggaagccgaattgctagacgccgccgcaggtattcatgtcaggtttcgtctgggcggtgtgaagttcccgcctgacatctattacaagatttttacccatcgacctatcgaggatctgtgcgccaattcacccagaaactatgcaaagttgcccgccaagcacactagccacaacaagaatgatcacctgcaggaagaggaccactctggctggtaccacaggatcgaaaacaacggatggcgccccgtttcagacactttctggctctccaccgatggaatggtggtggaagacaagaaagagtctgagttccacttctcgaaacttaagaggcgccaagatcttgaaaagaaacggaagctgcgcaaaatagaatggatgcggcaaatgtattattcaggctctctagaagcaaaatctactcaccacgaaacactcggactgatccacactgccacaaagggtcttattagagctttcgaggatggaggcatagattcagttatggagtgggaggtggacgaggtacttaattggactaatacactaaacttcgatgaatacatcgcatcctggaaggaaattgctacttccaattcttccgctaattttaagggatttcggttcaatcaagcccagaagaacatttacaattacggcggcgacatttccaagatgcagatgggcatccctgacgacacttactacgagaacgtctatcaggaaccgaacgtgaccagacttactccagactccacttacggcctctag

SEQ ID NO: 243992 - DNA, 942 bp, Artificial Sequence
  derived and/or modified sequence
atgccctggaaggaggagagcgagttcaccaagcaggacaaggccgctcgcgtgatccagcaggcttggaagtctttcctgaatgtagccatcttccagcactttaaaagcctgattgacctccgccggcaaggggagccccgccagatcgttaaatacataaatcccaaagaagctgagcttctggatgctgccgccggcatccatgtgagattccgcctaggaggcgtgaaattcccaccggacatctactataagattttcacacaccggcccattgaagatctctgcgccaactcccctcgaaattacgccaagctcccagctaagcatacttcccacaataaaaatgaccacctacaggaagaagaccacagcggttggtaccacagaattgaaaataacggatggcgcccagtgagtgatactttctggctctctaccgacggcatggttgttgaagacaagaaggaaagtgagtttcatttctcaaaattgaaacggcggcaagacctagaaaaaaaacgcaagctcaggaaaattgagtggatgcgccaaatgtactactcaggatccttagaggcaaaatctactcatcatgaaaccctcggactcatccatacggcgaccaagggactgattagagccttcgaggatgggggtatcgactccgtgatggagtgggaggtggacgaagtactcaattggaccaatacgctgaactttgacgagtacatagcgagctggaaggagatagccacttccaattcaagcgctaactttaaaggcttccggtttaatcaagctcagaaaaatatctataactacggcggggacatttcgaagatgcagatgggcattccagatgatacctattacgagaacgtgtatcaggaaccaaatgtgacacggttgacccccgactcaacttacgggctgtag

SEQ ID NO: 243993 - DNA, 942 bp, Artificial Sequence
  derived and/or modified sequence
atgccttggaaggaagagtctgagttcaccaagcaggacaaagcagcgagggtgatccagcaggcctggaaatcttttcttaacgttgccatttttcagcacttcaaaagcctgattgaccttaggagacagggcgaaccgagacaaatcgtcaagtacatcaaccccaaggaagcagaactgctggatgctgcggctggaatccacgtgcgatttcggcttgggggagtgaaattccctccagacatttattacaagatctttactcatcgcccaatcgaggacttgtgtgccaattcgccaagaaattacgcaaaactgccggctaaacacacgtctcacaataagaatgaccatttgcaggaggaagaccactcaggctggtatcacaggatcgagaataacgggtggcggccagtgagtgataccttttggttgtcgacagatgggatggtcgtggaggacaaaaaggaaagcgaattccacttcagcaaactgaagagacggcaggatttagagaagaagcgcaagcttcggaaaatcgagtggatgaggcagatgtattattctggaagtttggaggcaaagtctacccatcacgaaactctgggactgatacatactgcgaccaagggcttaatccgtgccttcgaagacgggggaatcgattcggtgatggaatgggaggtggatgaagtcctgaactggaccaatactctgaatttcgatgagtacatcgctagctggaaggaaattgctacgtccaactcctccgcaaacttcaaagggtttcgatttaatcaggcccaaaaaaacatctacaactacgggggagatatcagtaagatgcaaatggggatccctgacgacacctactacgagaacgtctaccaggagccaaacgttactcggctgaccccagattctacttatggactgtag

SEQ ID NO: 243994 - DNA, 942 bp, Artificial Sequence
  derived and/or modified sequence
atgccatggaaggaggagtctgagtttacaaagcaggacaaagctgcacgggtaatccagcaagcgtggaagtctttcctgaatgtggcaatttttcagcatttcaaaagcctaattgacctacggaggcagggcgagccacggcagatcgtcaagtacattaaccccaaggaagccgagctgctcgacgcggcagcgggaatacacgtccgctttcgcttgggcggagtgaaatttccgcctgatatctattacaaaattttcacccataggcccatcgaagatctttgtgcaaatagtcctcgaaattatgccaagctcccggcaaagcacacttcccacaataaaaacgatcatctgcaggaagaggatcatagtgggtggtaccatcgtattgagaacaatggatggcgcccagtgtcagacacgttttggctgtccacagacggtatggtggtcgaagacaagaaggagagtgagtttcacttcagcaaactgaaacggcgacaggacctcgagaaaaaacgaaaattgcggaagatagaatggatgcggcagatgtattattctggatccctggaagctaaatctacacatcatgaaacattaggactgatccacaccgcaaccaaaggtctgatcagagcattcgaggacggcggaattgactcagttatggagtgggaagtagatgaggtgctaaactggactaataccctcaacttcgacgaatatattgcaagctggaaagaaatcgccacctccaacagctcagccaattttaaaggatttcgtttcaatcaggcacagaaaaatatttataactatggcggagatatctccaagatgcagatgggtattcctgatgacacctattacgagaacgtgtatcaggagccaaacgtgacacgcctcacgcctgacagcacatatggcctctag

SEQ ID NO: 243995 - protein, 836 aa, Artificial Sequence
  derived and/or modified sequence
MIAELVSSALGLALYLNTLSADFCYDDSRAIKTNQDLLPETPWTHIFYNDFWGTLLTHSGSHKSYRPLCTLSFRLNHAIGGLNPWSYHLVNVLLHAAVTGLFTSFSKILLGDGYWTFMAGLMFASHPIHTEAVAGIVGRADVGASLFFLLSLLCYIKHCSTRGYSARTWGWFLGSGLCAGCSMLWKEQGVTVLAVSAVYDVFVFHRLKIKQILPTIYKRKNLSLFLSISLLIFWGSSLLGARLYWMGNKPPSFSNSDNPAADSDSLLTRTLTFFYLPTKNLWLLLCPDTLSFDWSMDAVPLLKTVCDWRNLHTVAFYTGLLLLAYYGLKSPSVDRECNGKTVTNGKQNANGHSCLSDVEYQNSETKSSFASKVENGIKNDVSQRTQLPSTENIVVLSLSLLIIPFVPATNLFFYVGFVIAERVLYIPSMGFCLLITVGARALYVKVQKRFLKSLIFYATATLIVFYGLKTAIRNGDWQNEEMLYRSGIKVNPAKAWGNLGNVLKSQSKISEAESAYRNALYYRSNMADMLYNLGLLLQENSRFAEALHYYKLAIGSRPTLASAYLNTGIILMNQGRTEEARRTFLKCSEIPDENLKDPHAHKSSVTSCLYNLGKLYHEQGHYEEALSVYKEAIQKMPRQFAPQSLYNMMGEAYMRLSKLPEAEHWYMESLRSKTDHIPAHLTYGKLLALTGRKSEAEKLFLKAIELDPTKGNCYMHYGQFLLEEARLIEAAEMAKKAAELDSTEFDVVFNAAHMLRQASLNEAAEKYYDLAARLRPNYPAALMNLGAILHLNGRLQKAEANYLRALQLKPDDVITQSNLRKLWNIMEKQGLKTSKT

SEQ ID NO: 243996 - DNA, 2511 bp, Artificial Sequence
  derived and/or modified sequence
atgatcgccgagctggtgagcagcgccctgggcctggccctgtacctgaacaccctgagcgccgacttctgctacgacgacagcagagccatcaagaccaaccaggacctgctgcccgagaccccctggacccacatcttctacaacgacttctggggcaccctgctgacccacagcggcagccacaagagctacagacccctgtgcaccctgagcttcagactgaaccacgccatcggcggcctgaacccctggagctaccacctggtgaacgtgctgctgcacgccgccgtgaccggcctgttcaccagcttcagcaagatcctgctgggcgacggctactggaccttcatggccggcctgatgttcgccagccaccccatccacaccgaggccgtggccggcatcgtgggcagagccgacgtgggcgccagcctgttcttcctgctgagcctgctgtgctacatcaagcactgcagcaccagaggctacagcgccagaacctggggctggttcctgggcagcggcctgtgcgccggctgcagcatgctgtggaaggagcagggcgtgaccgtgctggccgtgagcgccgtgtacgacgtgttcgtgttccacagactgaagatcaagcagatcctgcccaccatctacaagagaaagaacctgagcctgttcctgagcatcagcctgctgatcttctggggcagcagcctgctgggcgccagactgtactggatgggcaacaagccccccagcttcagcaacagcgacaaccccgccgccgacagcgacagcctgctgaccagaaccctgaccttcttctacctgcccaccaagaacctgtggctgctgctgtgccccgacaccctgagcttcgactggagcatggacgccgtgcccctgctgaagaccgtgtgcgactggagaaacctgcacaccgtggccttctacaccggcctgctgctgctggcctactacggcctgaagagccccagcgtggacagagagtgcaacggcaagaccgtgaccaacggcaagcagaacgccaacggccacagctgcctgagcgacgtggagtaccagaacagcgagaccaagagcagcttcgccagcaaggtggagaacggcatcaagaacgacgtgagccagagaacccagctgcccagcaccgagaacatcgtggtgctgagcctgagcctgctgatcatccccttcgtgcccgccaccaacctgttcttctacgtgggcttcgtgatcgccgagagagtgctgtacatccccagcatgggcttctgcctgctgatcaccgtgggcgccagagccctgtacgtgaaggtgcagaagagattcctgaagagcctgatcttctacgccaccgccaccctgatcgtgttctacggcctgaagaccgccatcagaaacggcgactggcagaacgaggagatgctgtacagaagcggcatcaaggtgaaccccgccaaggcctggggcaacctgggcaacgtgctgaagagccagagcaagatcagcgaggccgagagcgcctacagaaacgccctgtactacagaagcaacatggccgacatgctgtacaacctgggcctgctgctgcaggagaacagcagattcgccgaggccctgcactactacaagctggccatcggcagcagacccaccctggccagcgcctacctgaacaccggcatcatcctgatgaaccagggcagaaccgaggaggccagaagaaccttcctgaagtgcagcgagatccccgacgagaacctgaaggacccccacgcccacaagagcagcgtgaccagctgcctgtacaacctgggcaagctgtaccacgagcagggccactacgaggaggccctgagcgtgtacaaggaggccatccagaagatgcccagacagttcgccccccagagcctgtacaacatgatgggcgaggcctacatgagactgagcaagctgcccgaggccgagcactggtacatggagagcctgagaagcaagaccgaccacatccccgcccacctgacctacggcaagctgctggccctgaccggcagaaagagcgaggccgagaagctgttcctgaaggccatcgagctggaccccaccaagggcaactgctacatgcactacggccagttcctgctggaggaggccagactgatcgaggccgccgagatggccaagaaggccgccgagctggacagcaccgagttcgacgtggtgttcaacgccgcccacatgctgagacaggccagcctgaacgaggccgccgagaagtactacgacctggccgccagactgagacccaactaccccgccgccctgatgaacctgggcgccatcctgcacctgaacggcagactgcagaaggccgaggccaactacctgagagccctgcagctgaagcccgacgacgtgatcacccagagcaacctgagaaagctgtggaacatcatggagaagcagggcctgaagaccagcaagacctag

SEQ ID NO: 243997 - DNA, 2511 bp, Artificial Sequence
  derived and/or modified sequence
atgatcgccgagctggtgagttcagccctcggactcgcactttacctaaatactttatcagcagacttttgctacgatgactctagagccatcaagactaatcaggatctcctgcccgaaaccccatggacgcacatcttttataatgatttttgggggaccttgctgactcactcagggagtcataaatcatatcggcctctttgtactctgagtttccggctgaaccatgccattggtggcctcaatccctggagctaccacctggtcaacgtcctgctccatgccgctgtgaccggtttattcacctcctttagtaaaattttgttgggagacggctactggacctttatggcaggcctcatgttcgcttctcaccctattcacactgaggccgtagcaggtatcgtaggaagggccgatgttggtgcgagcctcttctttctactgagtctgctgtgttacattaaacactgtagcaccaggggttatagcgcccgaacttggggctggtttctgggctctggcctctgcgccggttgttccatgctgtggaaggagcagggcgtaaccgtgctggccgtgtctgctgtgtacgacgtatttgtcttccacagactgaaaattaaacagattttaccgactatctataaaaggaagaacttgagccttttcctgagtatcagtctgttgatcttctggggatctagcctcctgggagcgcgactttactggatgggaaataagcctcccagcttttccaactctgataatcctgcggccgattctgacagcctgcttactcgcaccctcaccttcttctatctccccaccaaaaatctctggctgctcctatgtcccgacactctgtcttttgattggagtatggacgcagtacccttgctcaagacagtgtgcgattggagaaatcttcacacagtggccttctatactggactgttgctcctggcctactatggtctgaagagtcctagcgtggatagagagtgtaacggcaaaaccgtgacgaacggcaagcagaatgcgaatggccactcctgtctgagtgatgttgaatatcaaaatagtgagaccaagagtagtttcgccagcaaggtggaaaacggaattaaaaacgacgtgtcccaacggacacagctgccgtcaactgaaaatatcgttgtgctctcactgtccttgctcatcattccgttcgttcccgctactaatctgttcttctacgttggtttcgtcattgccgagagggtgctgtacatcccatccatgggattttgcctgctcataacagtcggcgctagggctttgtatgtaaaggttcaaaaacgattcctgaaaagcctgatcttctacgcaacggctactctgatcgtgttctatggtctcaagactgctatcaggaatggcgattggcagaatgaggagatgctgtataggagcgggattaaggtaaatcccgcgaaggcttggggaaatctcggtaatgtcctgaagtcccagagcaagattagcgaggcagaatctgcttaccgaaacgcactgtactacagatccaacatggccgatatgctgtataatttgggcctactgctgcaagaaaacagccggtttgccgaggccctccattactacaagctggctataggttcaaggccaacgttggcttcggcctacttgaataccggaatcattctgatgaatcagggacgcaccgaggaggctagacggacctttctaaagtgctccgagatccccgacgaaaatctgaaggacccgcacgctcacaaaagctcggtgacgagctgtctttataacttggggaaactgtaccacgaacagggtcactatgaagaggccttgagcgtttacaaagaggccatccagaaaatgccaaggcagttcgccccacaaagcctctataatatgatgggcgaggcctacatgagattaagtaaattgcccgaagccgaacactggtatatggagtcactgagatccaagaccgaccacattccagcgcatctcacctatggcaagttgcttgccttgacggggcgcaaaagtgaagcagagaagctgttcctaaaggccatcgagctggatcccactaaaggtaactgctatatgcattacggtcaatttttactagaggaggctagactcattgaggccgccgaaatggcaaaaaaggccgcagagctggattctaccgagttcgatgttgtgtttaacgcagcacatatgctgcggcaagccagtttaaatgaggctgcagagaaatactacgacctagccgcccgcttgcgtccgaattaccccgccgcgctcatgaaccttggcgctattctccacctgaacggccggttgcagaaagccgaggccaactatctgcgggccctgcagttgaagcccgacgacgtgattacccaatctaatcttcggaaattgtggaatattatggaaaagcagggcctaaagacaagcaagacctag

SEQ ID NO: 243998 - DNA, 2511 bp, Artificial Sequence
  derived and/or modified sequence
atgattgctgagctggtgagcagcgccctgggcctggccctgtacctgaacaccctgtctgctgacttctgctatgatgacagccgggccatcaagaccaaccaggacctgctgcctgagaccccctggacccacatcttctacaatgacttctggggcaccctgctgacccacagcggcagccacaagagctaccggcccctgtgcaccctgtccttccggctgaaccacgccatcggcggcctgaacccctggagctaccacctggtgaatgtgctgctgcacgccgctgtgacaggcctcttcaccagcttcagcaagatcctgctgggagatggctactggaccttcatggccggcctgatgtttgccagccaccccatccacacagaggccgtggccggcatcgtgggccgggcagatgtgggcgccagcctcttcttcctgctgagcctgctgtgctacatcaagcactgcagcacccggggctacagcgcccggacctggggctggttcctgggcagcggcctgtgtgccggctgcagcatgctgtggaaggagcagggcgtgacagtgctggccgtgtctgctgtgtatgatgtgtttgtgttccaccggctgaagatcaagcagatcctgcccaccatctacaagaggaagaacctgagcctcttcctgagcatcagcctgctgatcttctggggcagcagcctgctgggcgcccggctgtactggatgggcaacaagccacccagcttcagcaacagcgacaacccagctgctgacagcgacagcctgctgaccaggaccctgaccttcttctacctgcccaccaagaacctgtggctgctgctgtgcccagacaccctgagctttgactggagcatggatgctgtgcccctgctgaagacagtgtgtgactggaggaacctgcacacagtggccttctacacaggcctgctgctgctggcctactacggcctgaagagccccagcgtggaccgggagtgcaatggcaagacagtgaccaacgggaagcagaatgccaacggccacagctgcctgagtgatgtggagtaccagaacagcgagaccaagagcagctttgccagcaaggtggagaatggcatcaagaatgatgtgtcccagaggacccagctgcccagcacagaaaatattgtggtgctgagcctgagcctgctgatcatcccctttgtgcctgccaccaacctcttcttctacgtgggctttgtgattgctgagcgggtgctgtacatccccagcatgggcttctgcctgctgatcaccgtgggcgcccgggccctgtatgtgaaggtgcagaagcgcttcctgaagagcctcatcttctacgccacagccaccctgattgtgttctacggcctgaagacagccatcagaaatggagactggcagaatgaggagatgctgtaccgcagcggcatcaaggtgaacccagccaaggcctggggcaacctgggcaatgtgctgaagagccagagcaagatcagcgaggccgagagcgcctacagaaatgccctgtactaccgcagcaacatggctgacatgctgtacaacctgggcctgctgctgcaggagaacagcagatttgctgaggccctgcactactacaagctggccatcggcagccggcccaccctggccagcgcctacctgaacacaggcatcatcctgatgaaccagggccgcacagaggaggcccggaggaccttcctgaagtgcagcgagatcccagatgagaacctgaaggacccccacgcccacaagagctctgtgaccagctgcctgtacaacctgggcaagctgtaccacgagcagggccactatgaggaggccctgtctgtgtacaaggaggccatccagaagatgccccggcagtttgccccccagagcctgtacaacatgatgggagaggcctacatgaggctgagcaagctgcctgaggccgagcactggtacatggagagcctgcggagcaagacagaccacatcccagcccacctgacctacggcaagctgctggccctgaccggcaggaagtctgaggccgagaagctgttcctgaaggccatcgagctggaccccaccaagggcaactgctacatgcactacggccagttcctgctggaggaggcccggctcatcgaggccgctgagatggccaagaaggctgctgagctggacagcacagaatttgatgtggtgttcaatgctgcccacatgctgcggcaggccagcctgaatgaagctgctgagaagtactatgacctggccgcccggctgcggcccaactacccagctgccctgatgaacctgggcgccatcctgcacctgaatggccgcctgcagaaggccgaggccaactacctgcgggccctgcagctgaagccagatgatgtgatcacccagagcaacctgaggaagctgtggaacatcatggagaagcagggcctgaagaccagcaagacctag

SEQ ID NO: 243999 - DNA, 2511 bp, Artificial Sequence
  derived and/or modified sequence
atgatcgccgagctggtgagcagcgccctgggcctggccctgtaccttaacaccctgtccgcagatttctgttacgacgattctcgtgcaatcaagactaaccaggacctattacctgaaaccccctggacacacatcttctataatgatttctggggaacactactaactcatagcgggagtcacaaatcttatagacccctctgtactcttagttttcgcctgaatcatgcaattggcggactgaacccttggtcataccacctcgtaaatgtacttttgcacgctgccgtcacagggttgtttaccagcttttcaaagatcttactgggagatggctactggacatttatggcaggcctaatgtttgctagccatcccattcatactgaagcagtggcaggaatcgtggggcgcgctgacgtgggcgccagtctgtttttcctgctgtctctgctctgctatatcaagcattgttccacccgcggatattcggctaggacatggggctggtttcttggcagcggcttatgcgcaggttgctccatgctctggaaagaacagggcgttactgtcttagcagtcagtgccgtgtacgatgtgttcgtttttcatcggctgaagatcaagcagattctccctaccatttacaaaaggaaaaacttaagcttgtttctgtcgatttcgcttctaattttttggggctcctctctgttgggcgctagactgtactggatgggtaataagcccccttctttctcaaacagcgataatccagccgctgactcagactctctgttgacaaggactctgacatttttttacctccctaccaagaacctgtggcttttattgtgcccagacaccctgtcatttgactggagcatggacgcagtgcccctgctgaagactgtttgtgactggcggaatctacacacagtggcattttacaccggtcttctgctgttagcctactatggactcaagagccctagtgtcgacagagagtgcaacggtaaaacggtcacaaatggaaagcaaaacgccaatggccactcatgcctctcagatgtggagtatcagaactccgagaccaaaagtagcttcgcgagcaaggtcgaaaatggaattaaaaatgacgtttctcagaggactcagctcccctccactgaaaacatcgtggtcttgtcgctttccttactgatcatcccttttgtgcccgccaccaacctattcttctatgtcggctttgtgatcgcagagagagtgctgtatattccttcaatggggttctgcttactgattacagttggcgctagggcattgtacgtcaaagtgcagaaaaggtttctcaaaagcctgattttttatgcaaccgcgacgctgatagtcttttatggactcaagacggccatcaggaacggggactggcagaacgaggaaatgctgtataggtcgggtatcaaggtgaatcctgcaaaggcctggggcaatcttggcaacgttctgaaaagtcagtctaagatttctgaggctgaatctgcatacaggaatgcactgtattatcgatcaaatatggcggacatgctgtacaaccttggactcctcttacaagaaaatagccgatttgccgaggcactgcactactataaactcgctatcggctccagacccacgctagctagcgcctatctgaacacaggcattatactgatgaaccaaggtagaacagaagaagcacgacgaacctttctaaagtgtagtgagatccccgacgagaatctcaaggacccacatgcacacaagagcagcgttacatcttgtctctacaacttgggcaaactctaccatgagcaaggacattacgaggaggccctgagcgtctacaaggaggccatacaaaagatgccccgccagtttgccccccagagcttgtataatatgatgggcgaggcttacatgcggctgagcaagcttccagaagctgagcactggtatatggaaagtctccggtctaagaccgatcatatccctgctcatctgacttacggcaaactgctggctcttacagggcggaagtccgaggcagagaagctgttcctgaaagccatcgagctggacccaaccaaggggaattgctatatgcactacgggcagttccttctggaagaggcacgtctcatcgaagcagctgaaatggcaaagaaagctgccgagctcgactctactgaatttgatgtggtcttcaatgctgctcatatgctccgacaagcctcgctgaatgaggccgcagagaaatactatgatcttgccgcacgactgcggcctaattatcccgctgcacttatgaacttgggtgccatacttcacctgaatggcagactccagaaagccgaagccaactacctgagagcccttcagcttaaaccagatgacgtgataacacaaagtaatctgcgaaagttgtggaatattatggagaagcaaggattgaagacatctaagacctag

SEQ ID NO: 244000 - DNA, 2511 bp, Artificial Sequence
  derived and/or modified sequence
atgattgctgaactcgtaagctcagcccttgggctagcgctgtacctaaacacactgtctgctgacttttgttacgatgactctcgcgcaatcaagacaaatcaggatcttctgcctgagacgccatggacccatatcttctataacgacttctggggcacattgctgacccattccggatcccataagtcctatagaccattgtgcacactttcattcagactgaatcacgccattggagggcttaatccatggtcctaccaccttgtaaatgtactactacacgccgctgtcactggcctgttcaccagcttcagcaagatacttttgggcgatgggtattggaccttcatggctggtctgatgtttgcctcccatcctattcatacagaggccgtggccggtatcgtgggcagagctgatgtcggggcatcgttattcttccttctatcattactgtgttatataaagcactgttcaacccggggatacagtgcccgtacctggggatggttcttgggatcaggactgtgcgcgggttgttccatgttgtggaaggagcagggggtgacagtgctcgctgtatccgccgtgtacgacgtgtttgtttttcacaggcttaagattaaacagattctgcctaccatttacaaacgcaaaaatctttctctgttcctaagtatcagcctcctaatattttgggggtcgagcctgctcggagcgaggctctactggatgggtaataaaccccctagcttttctaattcagacaacccagccgctgacagtgactctctactgacaaggacactcaccttcttctacctgcccacgaagaatctttggttgcttctatgccccgataccctttcattcgactggtctatggacgccgtcccccttctaaagacagtgtgcgattggaggaacctgcatacagtggccttttatactgggctcctcttactagcatattacggactgaaatcaccttctgtggaccgcgaatgtaatggaaaaactgtgaccaatgggaagcagaatgcgaacggacactcctgcttgagcgatgttgagtaccagaatagtgagactaaatcatcatttgcaagcaaggtggagaatggtatcaaaaatgacgtcagccagaggacacaactcccgtccactgagaacatcgtagttctgtctcttagtcttctgatcattccctttgtaccggcaacaaatctgttcttctacgttgggttcgtgatcgccgagagagtgttgtatataccatctatggggttctgtcttcttatcacagtgggcgctagagctctctacgtcaaagtgcagaaaaggttccttaaatctcttatcttctatgccactgctacattaattgtcttttacggtctcaagacagccatcaggaacggcgattggcaaaatgaggaaatgctctacaggtctggcatcaaagtgaacccagccaaggcctggggcaatttaggtaatgtactgaagagccagagcaaaatctctgaagccgaatctgcctataggaacgccttatattacagatctaatatggctgacatgctgtacaacttggggttgctcctgcaggagaactctaggtttgcagaagctctgcattattataaactggccatcggcagcagacctacacttgcatctgcctacctgaacaccggcattatcttgatgaaccagggtagaaccgaggaagcccgacgcacttttctgaagtgttccgaaatacctgatgaaaatcttaaggaccctcacgcacacaagtcctcagtcacgagctgtttgtacaatctgggcaagctttaccatgaacagggtcattacgaagaagccctgagcgtgtacaaggaagccatccaaaagatgcctcgacagtttgcaccccaaagtctgtataatatgatgggcgaagcttacatgcgcctgagcaagctgccagaggcggaacactggtacatggagtctctccggagcaaaactgaccatatccccgcacacctgacttatggaaagctgctggccctgacaggtcgcaagagtgaggccgagaagttgttcttaaaggcaattgaactggaccccactaagggtaactgctatatgcactacggccagtttctcttggaggaagctaggctcatcgaggccgctgaaatggccaaaaaggccgctgaactggactctacggagttcgatgtggtattcaacgctgcccacatgttacggcaggcatccctcaacgaggccgctgagaaatactacgacttagccgctcgcctccgccctaactaccccgcagcgctaatgaatctgggagctattctccatctcaacggcagactccagaaagctgaggctaattatctgagggcgctgcaacttaagcccgatgacgtaatcacgcagagcaatttgcgtaagctgtggaacattatggagaaacagggcctaaagactagtaaaacgtag

SEQ ID NO: 244001 - DNA, 5681 bp, Artificial Sequence
  derived and/or modified sequence
gtcacgcaggcgcggggggccgcgtcgagaaccccacgcgggagcttctggagtctccagccaccgcttctcacttcactggagaagggagctggggctggggctggggctggggctgggagggagctaataaacattgaatgtgcagcagctgccttggcggccggagtccgcccgagcgacaccggagcagtgcgcccgggaggcggcgaggggaggcggttcgccttgtccctcccacccgcgcctctttctctctcttcctccagctggtcccagagcccggcttggtccggtccctctgcccccatcccgcacccttccacctcctccgagtcccactcctcacctaggacgccccaaactgccatgggttagggtggggatcgcgacccgcgcgaaagaccagccctgcgcttccgccgggggacgcggagcccaaacgccgctcaccgcttgcgggcgccgggcatggggagtgtggtgtgagcccgcacccggggaggacgcaggagctgcggagacgggcgcgaggaggaggagaggagtcgtggattggaaggacccgagggagggagggtggggaagcgagggaaaagtgaagctgggaggagaaggcggcggaaggtggagattgatgcttctgttttttgttgccgctgctgccctcgcgctgggagccgagccggagggaaggcggtggagagatgattgcagagttggtgagcagcgctctggggctcgccttgtatctcaacaccctgagtgcggatttctgctatgatgacagccgtgctatcaagactaatcaggaccttctcccagaaactccatggacgcacattttctacaatgatttttgggggactcttctaacccacagtggcagccacaagtcctaccggccactctgcactctttcttttcgcctgaaccatgccattggagggttgaatccctggagctaccatcttgtcaatgtcctgttgcatgcagcagtcactggtctcttcacaagcttctccaagatcctccttggtgatggatactggacattcatggctggcttgatgtttgcttctcaccccattcacacggaggcagtggcaggaatcgtgggacgagccgatgtcggggccagtctcttctttctcctctccttgctctgctacattaaacactgttctacaagaggctactcagccagaacctggggctggttcctggggtcaggactgtgcgcaggatgcagcatgttgtggaaggaacaaggagtgactgttctcgcagtttcagcagtttatgatgtctttgtctttcacaggctgaaaataaaacagatattacctaccatttacaaaaggaagaacttgtcgcttttcctaagcattagtttgttaattttctggggttcctcccttttgggtgcccggttatactggatgggaaacaaaccaccaagcttttccaactcggacaaccccgctgctgattcggacagcctcctcacccgcactctcaccttcttctacttgccaaccaagaacctctggctgttgctatgtccagataccctcagttttgattggtcaatggatgctgtgcctctgctcaaaacagtttgtgactggagaaacctacacactgtggccttctatactggactccttctccttgcctactatggtttgaagagcccgagcgtagacagagaatgcaatgggaaaactgtaacaaatggcaagcagaatgcaaatggacatagctgcctttcagatgtggagtaccagaactcagagactaagtccagctttgcatccaaagtagaaaatggcattaaaaacgatgtatcacagagaacccagcttccttctacggagaacattgttgttctgtctttatctttgttaatcataccctttgttcctgccacgaacctgtttttctatgtcggctttgtaattgcagagcgagtattatatattcctagtatgggcttctgcctactgattacagtgggtgctagagccctttatgtcaaagtccaaaagcggttcctcaagagcttgattttttatgctacagctacactaattgttttttatggactcaagactgcgatcaggaatggagactggcagaatgaggaaatgctttatagatcagggataaaagtaaacccagctaaagcatggggtaaccttggaaatgttctgaagagtcagagcaaaatttctgaagctgaaagcgcctatagaaatgctttgtactaccgcagcaacatggctgacatgctttataatttagggctacttctccaggagaacagcaggtttgcagaagcactacattattataaattggccattgggagcaggcctaccctggcttctgcatatttaaataccggtattattctaatgaaccaaggaaggacggaagaagcccgacggacattcttaaagtgttcggagatcccagatgaaaacctaaaggaccctcatgcacacaagagctctgttaccagttgtttgtacaacctaggaaagctgtatcatgagcagggacactatgaggaagcccttagtgtatacaaggaagcaattcagaaaatgccaaggcagtttgccccacagagcttgtacaacatgatgggtgaagcatatatgcgtttaagcaaactccccgaagcagagcattggtatatggaatcactgagatccaagactgaccacatccctgctcatctcacctatgggaagctgctagctctaacaggtcgtaagagtgaggctgaaaagctcttcttgaaggctattgagctggatcccaccaaaggaaactgttacatgcattatggtcagtttcttctggaagaagctcgtctcatagaagcagctgagatggcaaaaaaagcagctgaactagacagcacagagtttgatgttgtcttcaatgctgcccacatgctcagacaggctagcctcaatgaagcagctgagaagtattatgatctggcagccaggctgaggcctaattatccggctgctttgatgaacctgggagccattctgcacctcaatggcagactccagaaggccgaggccaactacctgcgggccctgcagctcaagccagacgatgtcatcacacagtccaatctccgcaaactgtggaacatcatggaaaaacaaggcttaaagacttctaagacctgacacaggaggcagaagcccatcctcctccatttttaaaagctggcttccttagcagacagaacttcccagcagtgctatgacaagagctggtgttagacttcaagaccagggcagaggtcattgaggtcactaccgcttctggaagaatccactttgctgtaggcacagctgttaacaccaaaaaggggaaagccggaaacctcctggaggatgtcattgttacccatagactgtaaaccagagcacttaaaacagaaccttttggcattcttaaaaagggaggggtgggtgtgtaagtcacagattttgttcattttctgaaagctaatttcaaaattatgttgttccttaaacactgtgagaggaagtcagagtgtccattcaggcatggcaaacaattagggttaagtgttacgagggagtgataaacacgtagtgtgagtcccagtgagccgccggttgtcctaacgctgctgtcttccctgtttgggacagcctgcttatcaatttctgaagcttagaacactttttttaatactgtgtcaagatctgtcagaatctgctatgtttcttgaccagtgcacataatgttttatgatttggatgtcagaggcttcattcttttggacatcatttgctttttatgttctgaaaaggatatggagagtagagctaaccatacttcacactcgagttgtatgagggactggggaggccttatatgtgtcaggcaggcattttttaaattttaatatcgtcaatattttcccccaaactgcccagtagaattcattgtattaattcttttgaaattacctttgaaaatagctattcctggagaatgtgcaagcttacataaggataaaggacaggggaggagtttgtaagccttgcagttccaataactaaccaacaggttattagacaaaagggaaggtgttttgtgcttctcagatgttgctggtttaggagtgtgtgatgatgcttgccagtgattttgtgttttggaaagggtaggtatcgaatgttaatcactttctaatgggtacctaaacagcaatgctgataaatgttcaaggaattattttcatcttagtttgttcttctcaaaaggcatcaaaaacaacttatttgaagctgcaatagagtgtagcattagcctgcatgtttctaggtcttctgccaagtgcttttctcagttgaaaactatttttcactagcaaaattggtattttatttcattacctgttagtaactacttcaatgatcatttcacaagaaaaagactataaattaagtagagaacaacatttttattgaacatttttggcttgcaatcaaactttgccactaaaaattaacttcataaaacactagtccgttatcaacttcttcacagagaaagtagctatactataccctacatatttatttatttattattctactatagcagaataacaaaacttgatgcattaagccagttctttgcaactgaaaattacctgtttctccttccctttcacactccatgtatatatgatcagcctctccattaaaaagaagctggacatgcaaatacatcatattatgttttctccatattttatgtttttctatgtatctgaatacagtgggataaataattgaaagtagtgttcctatggcattagtgtttttgtgagaagggtaaatgtagtgagaaaggttttttcatggcattaataagaaagcccttctgtaatatatatattattttgtaaacatttcactgaagggccaaaagttaaattataactaaatcactgtgttttcagaatgatatttaacaacaaacccgtggtcaaaccaaaatagtgggttgaagtgtattattcatcttttagtgcattggcaattgcaaaaaaaaaaaaggaatttaatataaggctatagagattaattcagtgtctaacatttgtatttatttaaatagttattgacctatgatgactttctagtcttaacattttatctttttattgttgttgttcttcctttcaaagatgtggttcttaataggttcactgaatgcacagttgaggcacttcttgtgacaccagttcccaagtagcgttaataattgggcctgtgtcataaaatgcacggatcattaataactaaatgtccctgacacttttcactacagggctggacttagtaactgaccaacttcggggggagggttggggcaagggggggtgggcgttagaacatgatcaaaaaatgtctccgctcagggatttatggtggattattgcagacagtgctaaaaatatagagcacaagacaagtttactaaattaaaattttattttttgagaaactgttatttgtataaattatcaagatttgtaggctttccttttgtagaaataattgttttatgtgccagagaatttcaattttgttttcaacaataaa

SEQ ID NO: 244002 - protein, 414 aa, Artificial Sequence
  derived and/or modified sequence
MEMQQNCSISCFWETQPLGCVKISCIFYHSKPRNINGLFLPPSSNITLQKEIQEGIPLQSQSQEPLKPQENISRPIHHPLVLKTNFEEEEEVDEQNDASSLWTKTPEEIEEKRAIKEMCYKSGEYYRFHTPPDILSSKSMTPTAEKQLEKPLENGSELQEGDSLTVPTKLSQYERQGEIKTSLHGKPKTDIAAFENGGGDCYVPQRVIFLGVDESEALTEEKEITISKCSNTKDNKDSPHPKHSLTTRLVPTTHVLNATENISMKCREDPSSMNDVQPVKKPHFKGVKKRKWIYDEPQNFPNSGMQRAVQAPRPQNKMSYHRNNKNRNAENASYIHVQRDAVRTVALNAPSRSRPTHGSYNKVHANREPKPNLSPDKYTSTSYNDSAWRKRIPFSKTYSKSEKIYPEPRRNGSK

SEQ ID NO: 244003 - protein, 97 aa, Artificial Sequence
  derived and/or modified sequence
MEMQQNCSISCFWETQPLGCVKISCIFYHSKPRNINGLFLPPSSNITLQKEIQEGIPLQSQSQEPLKPQENISRPIHHPLVLKTNFEEEEEVDEQNG

SEQ ID NO: 244004 - DNA, 1245 bp, Artificial Sequence
  derived and/or modified sequence
atggagatgcagcagaactgcagcatcagctgcttctgggagacccagcccctgggctgcgtgaagatcagctgcatcttctaccacagcaagcccagaaacatcaacggcctgttcctgccccccagcagcaacatcaccctgcagaaggagatccaggagggcatccccctgcagagccagagccaggagcccctgaagccccaggagaacatcagcagacccatccaccaccccctggtgctgaagaccaacttcgaggaggaggaggaggtggacgagcagaacgacgccagcagcctgtggaccaagacccccgaggagatcgaggagaagagagccatcaaggagatgtgctacaagagcggcgagtactacagattccacaccccccccgacatcctgagcagcaagagcatgacccccaccgccgagaagcagctggagaagcccctggagaacggcagcgagctgcaggagggcgacagcctgaccgtgcccaccaagctgagccagtacgagagacagggcgagatcaagaccagcctgcacggcaagcccaagaccgacatcgccgccttcgagaacggcggcggcgactgctacgtgccccagagagtgatcttcctgggcgtggacgagagcgaggccctgaccgaggagaaggagatcaccatcagcaagtgcagcaacaccaaggacaacaaggacagcccccaccccaagcacagcctgaccaccagactggtgcccaccacccacgtgctgaacgccaccgagaacatcagcatgaagtgcagagaggaccccagcagcatgaacgacgtgcagcccgtgaagaagccccacttcaagggcgtgaagaagagaaagtggatctacgacgagccccagaacttccccaacagcggcatgcagagagccgtgcaggcccccagaccccagaacaagatgagctaccacagaaacaacaagaacagaaacgccgagaacgccagctacatccacgtgcagagagacgccgtgagaaccgtggccctgaacgcccccagcagaagcagacccacccacggcagctacaacaaggtgcacgccaacagagagcccaagcccaacctgagccccgacaagtacaccagcaccagctacaacgacagcgcctggagaaagagaatccccttcagcaagacctacagcaagagcgagaagatctaccccgagcccagaagaaacggcagcaagtag

SEQ ID NO: 244005 - DNA, 1245 bp, Artificial Sequence
  derived and/or modified sequence
atggagatgcaacagaactgtagtatctcttgcttttgggaaacacagcctctgggttgcgttaagatttcatgcatattttatcacagcaagccacgaaatattaacggactatttctacctccctcctccaacataaccctgcaaaaggaaatccaagagggtatccctttgcagtcccaatcccaggagccgctcaagccccaggagaatatcagccgtcccatccaccacccacttgtgctgaagacgaatttcgaagaggaggaggaagtagatgagcaaaacgacgcgtctagtctctggacgaaaacccctgaagaaatcgaagagaagagagccattaaagaaatgtgttataaatctggcgagtactatcggttccatacccctcccgatattctgagttccaagagtatgaccccaacagcagagaaacaactagaaaagcctttagaaaacggaagcgagctccaggaaggagattccctaactgtaccaactaaactgtcacagtatgagcgccagggtgaaatcaaaacctccctccacggtaagcctaagactgatattgccgccttcgaaaatggcgggggggactgttatgtgccgcagcgcgtgatattcctgggagtggatgagtcagaagctttgactgaagaaaaagagattacaatcagtaagtgtagcaacactaaggacaataaggacagtccacaccctaagcacagtctgaccacacggctggtaccaaccacccatgtcctgaacgctacagagaacatctcgatgaaatgcagagaggacccatccagtatgaacgatgtacagccagtcaagaagccccatttcaagggggtgaaaaagagaaagtggatctatgacgagccacagaactttccaaattccgggatgcagcgggctgttcaggccccacgcccgcagaacaaaatgagttaccatcggaacaacaagaacagaaacgccgaaaacgcatcttatattcacgtacagcgcgatgcggtgcgtaccgtagcactcaatgcgccctctcggtctagacctacgcacggctcatacaataaagtccacgccaaccgggagccaaaaccgaacctaagtcctgataagtacacatctactagctacaacgattcggcttggcgcaagcgcatacctttttcaaaaacctactctaagtcagagaagatctatccggagccccggcgaaatggatctaaatag

SEQ ID NO: 244006 - DNA, 1245 bp, Artificial Sequence
  derived and/or modified sequence
atggagatgcagcagaactgcagcatcagctgcttctgggagacccagcccctgggctgtgtgaagatcagctgcatcttctaccacagcaagcccaggaacatcaatggcctcttcctgccccccagcagcaacatcaccctgcagaaggagatccaggagggcatccccctgcagagccagagccaggagcccctgaagccccaggagaacatcagccggcccatccaccaccccctggtgctgaagaccaactttgaggaggaggaggaggtggatgagcagaatgatgccagcagcctgtggaccaagaccccagaggagattgaggagaagagggccatcaaggagatgtgctacaagagcggggagtactaccgcttccacaccccaccagacatcctgagcagcaagtccatgacccccacagctgagaagcagctggagaagcccctggagaatggcagcgagctgcaggagggggacagcctgactgtgcccaccaagctgagccagtatgagcggcagggcgagatcaagaccagcctgcacggcaagcccaagacagacattgctgcctttgaaaatggaggaggagactgctacgtgccccagagggtcatcttcctgggcgtggatgaaagtgaggccctgacagaggagaaggagatcaccatcagcaagtgcagcaacaccaaggacaacaaggacagcccccaccccaagcacagcctgaccacccggctggtgcccaccacccacgtgctgaatgccacagagaacatctccatgaagtgccgggaggaccccagctccatgaatgatgtgcagcctgtgaagaagccccacttcaagggcgtgaagaagaggaagtggatctatgatgagccccagaacttccccaacagcggcatgcagagagctgtgcaggccccccggccccagaacaagatgagctaccacaggaacaacaagaacagaaatgcagaaaatgccagctacatccacgtgcagagagatgctgtgaggacagtggccctgaatgcccccagccgcagccggcccacccacggcagctacaacaaggtgcacgccaaccgggagcccaagcccaacctgagcccagacaagtacaccagcaccagctacaatgacagcgcctggaggaagaggatccccttcagcaagacctacagcaagtctgagaagatctacccagagcccaggagaaatggcagcaagtag

SEQ ID NO: 244007 - DNA, 1245 bp, Artificial Sequence
  derived and/or modified sequence
atggagatgcagcagaactgcagcatcagctgcttctgggagacccagccgctgggttgtgtcaaaataagctgcatcttctatcattcaaaaccaaggaatataaatggcctttttttacccccctcgtccaatatcacccttcaaaaggaaatccaggagggcattccactgcagtcgcagtcacaggagcctctgaagccccaggagaacatctcacgccccattcatcacccattggtactgaagacgaatttcgaagaggaggaggaagtagatgagcagaatgatgcctcttctctgtggactaagaccccagaggagatcgaggaaaagagggcaatcaaagagatgtgttacaagtctggagaatattatagattccacactccccctgatattctgtctagtaagtcaatgactcctacggctgagaagcagctcgagaagccactcgaaaatgggagcgaactgcaggaaggcgactcccttacagtgccaactaagctttctcagtatgaaagacagggggaaattaagacatcactgcacggaaaacccaagaccgacatcgcagcgtttgagaatggaggtggcgactgctacgttccacaaagggtcatttttttgggggtggatgagtccgaggctctcaccgaagagaaggaaatcacaatttcaaaatgctccaataccaaagacaacaaggacagcccccaccccaaacatagcctaacaacaaggctggtgcccacaactcatgtgttgaacgctacagaaaacatttccatgaagtgtagggaggacccaagcagtatgaacgatgtgcagcctgtgaaaaaaccacacttcaagggtgtgaagaagagaaaatggatttatgatgaaccccagaactttccaaatagtgggatgcagagggctgtgcaagcgccaaggccccagaacaagatgtcctatcataggaataacaagaaccggaacgcagaaaacgcatcatacatacatgtgcagcgcgatgctgtccgcaccgtggctttaaacgccccttcccgtagtaggccaacccacggatcttacaacaaggtacatgcgaacagggagcccaaacctaacctgtcccccgataaatacacctcaacctcctacaatgactcagcttggagaaagcgaatccctttttctaagacctattcgaagagcgaaaagatttaccccgaacctaggagaaacgggtctaagtag

SEQ ID NO: 244008 - DNA, 1245 bp, Artificial Sequence
  derived and/or modified sequence
atggaaatgcaacagaactgctctatttcttgcttctgggaaacacagcctctggggtgcgttaagatctcgtgtatcttttaccattcaaagcccaggaacattaacggattatttctgcccccatcatccaacattaccttgcaaaaggagattcaggagggaatccccttgcaatcccagtctcaggaacctctcaagccccaagagaacatttctcgtcctattcaccatccactggtgctcaagaccaatttcgaggaagaagaggaagttgacgagcagaacgatgcatcttcgttgtggacgaaaactcctgaagagatcgaggaaaagcgggcaatcaaagaaatgtgttataagtccggcgaatactacagattccatacgccgccagacattctcagctccaaatccatgaccccgactgcggagaaacagttggaaaagcccctcgaaaacggatcagagctgcaggaaggcgactccttaacagtgccaacgaaactctcccagtacgagaggcagggggaaataaagacttctctgcatgggaagcccaaaacagacattgcagcctttgagaatggaggaggtgactgttatgtgcctcagcgagtgatctttttgggggtcgacgagagcgaggctctgacagaagagaaggagatcacaatatctaagtgcagcaacactaaagataacaaagatagcccacaccccaagcacagtcttactacccgcttggtacctacaacccacgtgctaaacgcaacggaaaacatttccatgaaatgtagagaggacccttcaagcatgaacgacgttcagcctgtgaagaaacctcacttcaaaggggtcaagaaaaggaagtggatctatgatgaaccacagaatttccccaactccggcatgcagcgcgctgtgcaggccccacggccacaaaataagatgtcatatcaccgtaacaacaagaaccgaaacgctgagaatgccagttacatccacgtgcagagggatgccgtcagaacggtagccctcaacgctccgtcccgcagtaggcctacccacggcagctacaataaagtgcacgccaatagggaacccaagcctaacctcagtcccgacaagtacacttccacctcatacaatgactccgcttggaggaagcgaatcccatttagcaaaacttattccaaatctgagaaaatttatccagagccccgaaggaacgggagcaagtag

SEQ ID NO: 244009 - protein, 388 aa, Artificial Sequence
  derived and/or modified sequence
MLEGSWINRREDKLGVYSLVHFSPKMLGSVATTLPLSSSNSSGMPLGYYLSSPQISRVTISTTGQLTSKATVGSCSRVENSLDASPFSVPKKQDESPMIGDGEDYFLSLFGDSKKLTAHSNYTQKTLKYFSMILEEVGQFTSSSLGDVEIAEVNVKGLFVKLINSSLDKEMAIGDHILQQNVNGQTISLYRFLPNIVMQANSTVTVWAAASEAKHQPPSDFLWKEQDKFRASPDCITILCKPNGQAIAWYTPIHWKQAWEKLDADVEFNRCSVVSPTFRKRVFQWTASTATITKEKQDQPKKDISNYQVEQAQVLLKREKEIPPTVFPNRSPWCQNPYVSAHPYCPLIEPHNTSTAGGRLDRQPRTRSTRPNRASGSKKKKTSESQKQ

SEQ ID NO: 244010 - DNA, 1167 bp, Artificial Sequence
  derived and/or modified sequence
atgctggagggaagctggatcaaccgaagggaggacaaactgggcgtgtactcactggttcatttctcgccgaagatgttgggatccgttgctactactcttccattgtcatctagcaacagttctgggatgccgttggggtactacctgtcatcaccacagatttcgcgagtcacgatcagcaccaccggacagctgacctccaaggccactgtgggctcctgcagtcgcgtagagaattctctggacgcaagtccattctccgtccctaagaaacaggacgaatctcccatgatcggcgatggagaagactatttcctctctctgttcggcgactctaagaaactgacagctcactccaactacacacaaaagacacttaagtactttagcatgattcttgaggaggtaggccagttcacctcatcatcacttggtgatgttgagattgctgaggtgaatgtcaagggactgttcgtaaagctgatcaactctagcctcgacaaagagatggcaatcggagatcatattctacagcagaatgttaatggtcagacaatctccctatatcggttcctgccaaatattgtcatgcaggccaatagcacagtaacagtgtgggctgctgcctctgaagcaaagcaccagccacctagtgatttcctgtggaaggagcaagataaattccgagcatctcctgattgtataaccatactctgtaagccaaatgggcaggctattgcatggtacacccccatccactggaaacaggcttgggaaaaattagacgccgatgtggaatttaacaggtgctctgtggtgagtcctactttcagaaagcgggtttttcaatggaccgcctctacggcgactatcacaaaggagaaacaagaccagccaaaaaaagatatctctaactaccaggtcgaacaggcccaggttctcctcaagcgagagaaggagatccctccgactgttttccccaatcgcagcccatggtgccagaatccctacgtatccgctcacccttactgtccactgatcgagcctcataatacatctacagccgggggtcgcttagataggcaacctaggacgcgatccaccaggcctaatcgtgctagcggcagcaagaaaaaaaagacatctgagtcccagaaacagtag

SEQ ID NO: 244011 - DNA, 1167 bp, Artificial Sequence
  derived and/or modified sequence
atgctggagggctcctggatcaacagaagagaggacaagctgggcgtgtacagcctggtgcacttcagccccaagatgctgggctctgtggccaccaccctgcccctgagcagcagcaacagcagcggcatgcccctgggctactacctgagcagcccccagatcagccgggtgaccatcagcaccaccggccagctgaccagcaaggccaccgtgggcagctgcagccgggtggagaacagcctggatgccagccccttctctgtgcccaagaagcaggatgagagccccatgattggagatggagaggactacttcctgagcctgtttggagacagcaagaagctgacagcccacagcaactacacccagaagaccctgaagtacttctccatgatcctggaggaggtgggccagttcaccagcagcagcctgggagatgtggagattgctgaggtgaatgtgaagggcctgtttgtgaagctgatcaacagcagcctggacaaggagatggccatcggggaccacatcctgcagcagaatgtgaatggccagaccatcagcctgtaccgcttcctgcccaacatcgtgatgcaggccaacagcacagtgacagtgtgggccgccgccagcgaggccaagcaccagcccccaagtgacttcctgtggaaggagcaggacaagttccgggccagcccagactgcatcaccatcctgtgcaagcccaacggccaggccatcgcctggtacacccccatccactggaagcaggcctgggagaagctggatgctgatgtggagttcaaccgctgcagcgtggtgagccccaccttcaggaagagggtcttccagtggacagccagcacagccaccatcaccaaggagaagcaggaccagcccaagaaggacatcagcaactaccaggtggagcaggcccaggtgctgctgaagcgggagaaggagatccccccaacagtgttccccaacagaagcccctggtgccagaacccctacgtgtctgcccacccctactgccccctcatcgagccccacaacaccagcacagctgggggccgcctggaccggcagcccaggaccaggagcacccggcccaacagagccagcggcagcaagaagaagaagaccagcgagagccagaagcagtag

SEQ ID NO: 244012 - DNA, 1167 bp, Artificial Sequence
  derived and/or modified sequence
atgctggagggcagctggatcaaccggcgggaggacaagctgggcgtctattctctggtgcacttttccccaaagatgctgggctccgtggccactacactgcctcttagttccagtaatagcagtgggatgccgctggggtactacttgagttcaccacaaatcagcagggttaccatttctaccaccgggcaactgacctccaaggcaaccgtggggtcctgctctcgcgtggaaaattccttagatgcaagccctttttctgtccctaaaaagcaggatgaaagccccatgatcggggacggggaggactacttcctgagcctcttcggggatagcaaaaagctcaccgcccacagcaattatacacaaaagaccctgaagtatttctccatgattcttgaggaggtaggccaatttaccagctccagcctgggagatgtcgagattgccgaagtgaacgtcaaggggctgttcgttaaattgatcaacagttcccttgacaaagaaatggctatcggcgatcatatcttgcagcaaaatgtaaacggtcaaacaatttctttgtatcgatttctgcccaatatcgtgatgcaggccaatagtaccgtcacagtgtgggcagcggcctcagaagccaaacaccagcctccttctgatttcttgtggaaggaacaggataaatttcgcgccagtccggattgtatcaccatcttatgcaagccaaatggccaagcaatagcttggtatactccgatccattggaagcaggcctgggaaaaactcgatgctgatgtagagttcaaccgctgttcggtagtctctcctacattccggaaacgggtctttcaatggactgcgtccaccgctacaattaccaaagagaagcaagatcagcccaagaaggatatttcaaactatcaggttgagcaggcccaggtgctgctgaagagggagaaggaaattcctcccacagtcttccccaaccggtccccatggtgccagaatccctacgtctccgcgcatccctactgccccctgatcgaaccacacaacacatctacagccggaggccggttggacagacaaccccggactaggtccactcggcctaatcgagcgtccggaagcaaaaaaaagaaaacctccgagtcgcagaaacagtag

SEQ ID NO: 244013 - DNA, 1167 bp, Artificial Sequence
  derived and/or modified sequence
atgttggaaggatcatggatcaacagacgagaagataagctgggcgtgtactctctggtgcatttttcccccaaaatgctaggctcggtcgcaacaacccttccactcagctcatcaaactcctccgggatgcccctcggctattacctgagcagcccacagatttccagggtgacaatttcaactaccggtcagttgacctctaaagccacagtggggtcctgctccagggtggagaacagcctcgatgccagtccatttagcgtgccgaagaagcaggacgaaagccctatgatcggcgacggtgaggactacttcctttctctgttcggggactccaagaaacttacagctcatagcaattatacccagaaaacactgaaatactttagcatgatccttgaagaggtcggacaattcacaagttcatccctaggcgacgtcgagattgccgaagttaatgtcaaaggcctctttgtaaagctgatcaactcgtcgctggataaagagatggccatcggtgatcacatacttcagcagaatgtgaatggccagactatcagcctataccgcttccttcctaacattgtcatgcaagcaaattctacggtcactgtgtgggccgctgcatccgaagctaaacatcagccgccaagcgactttctttggaaggaacaggataaatttcgtgccagcccagactgtataaccatcttgtgcaaacccaatggccaggccattgcttggtacacccccatccactggaagcaggcctgggagaagcttgacgccgacgtggagttcaatcgctgtagtgtggtgagtcccaccttccgaaagcgggtcttccaatggacagcctcaacggcaacaattacaaaggagaaacaggatcaacccaagaaggacatttccaattaccaggtggagcaggcacaggtcttgcttaaaagggagaaggaaatccctccgaccgttttcccgaatagatctccttggtgccagaatccttatgtgagcgctcatccttactgccccttgatcgagccacataacacttcgactgcaggaggaaggctggaccgccaacccagaacacggtctactcgccctaatcgcgctagtggatctaaaaagaagaaaacttccgagtcgcaaaagcagtag

SEQ ID NO: 244014 - DNA, 1718 bp, Artificial Sequence
  derived and/or modified sequence
aagctgcttccagtgaatgctacacacctgcaccatggtttgtccgacatccttagccaagatcaggattggctatgttggtacttacatatcctcatgagaattgtggttctggtactagtttggtaaagaaattattaaacctagctgatgcttgaaggtagttggattaacagaagagaagacaaacttggagtatattctttagtacatttttccccaaagatgttgggttcagttgccacaacactgccattgtcatcttcaaattccagtggaatgcctcttggttactatctgtctagtcctcagattagtagagtaactatatcaacaactggacaattgacttctaaagctactgtaggtagctgttccagagtggaaaacagcttggatgccagccccttctcagttccgaagaaacaggatgaatcacccatgattggggatggagaagattatttcctttctttgtttggtgattcaaagaaacttacagcacactcaaactacactcagaaaactttaaaatacttttctatgattcttgaagaagttggccaatttacctccagttctcttggagatgttgaaatagctgaagtgaatgtcaagggtttgttcgtgaagctcattaactcttcccttgacaaagaaatggcaattggagatcatattctccagcaaaatgtgaatggacaaaccatttctttgtaccgattccttccaaacatcgtaatgcaggcaaattccacagtaacagtgtgggcagcagcatctgaagcaaagcatcaacctccatcagattttctttggaaggaacaagacaagtttagagcaagtcctgattgtataacaatcctgtgcaaaccgaacggtcaagccattgcgtggtacacccctatccactggaagcaagcgtgggaaaaattagatgctgacgttgaatttaacagatgttcagtagtatctccaacattccgaaagcgtgtgtttcagtggacagcatctacagctacaataactaaagaaaaacaagatcaacctaagaaagatatctcaaattatcaggtggaacaagctcaagttcttcttaagagagagaaggaaatcccaccaaccgttttccctaatcgcagcccttggtgccagaatccctatgtctctgcacatccttactgtcctctgattgaaccacacaatacatccaccgctggaggcagattggatagacagcccaggactcggtcaaccagacctaatcgagcctcagggtctaagaaaaagaagacatctgagtcacaaaagcaataagcagtcaactcaacctttaaagtaatctagtccaccctcaaccagctactagaaaagcaaaagagaactcaaatccctgaggcctgctctgcaacctccctgctattccatgagagggtgaagacatcacatttctatatggaaaaaggatccaaaatttgtattgctgtagaattggtgaattatagatgcttgatgaaatcacaagtcctaccactcctgccttccaaatccctgcagaaaacaagcagatggttagtattattcaatggataaaattgctatttgccttagatttctctttttgtaaacaaagttattttgggtacagaactcacaaaagaagagcacgtgcaattgtttaaccattttacattgactgataaatctcttttttccat

SEQ ID NO: 244015 - DNA, 1167 bp, Artificial Sequence
  derived and/or modified sequence
atgctggagggcagctggatcaacagaagagaggacaagctgggcgtgtacagcctggtgcacttcagccccaagatgctgggcagcgtggccaccaccctgcccctgagcagcagcaacagcagcggcatgcccctgggctactacctgagcagcccccagatcagcagagtgaccatcagcaccaccggccagctgaccagcaaggccaccgtgggcagctgcagcagagtggagaacagcctggacgccagccccttcagcgtgcccaagaagcaggacgagagccccatgatcggcgacggcgaggactacttcctgagcctgttcggcgacagcaagaagctgaccgcccacagcaactacacccagaagaccctgaagtacttcagcatgatcctggaggaggtgggccagttcaccagcagcagcctgggcgacgtggagatcgccgaggtgaacgtgaagggcctgttcgtgaagctgatcaacagcagcctggacaaggagatggccatcggcgaccacatcctgcagcagaacgtgaacggccagaccatcagcctgtacagattcctgcccaacatcgtgatgcaggccaacagcaccgtgaccgtgtgggccgccgccagcgaggccaagcaccagccccccagcgacttcctgtggaaggagcaggacaagttcagagccagccccgactgcatcaccatcctgtgcaagcccaacggccaggccatcgcctggtacacccccatccactggaagcaggcctgggagaagctggacgccgacgtggagttcaacagatgcagcgtggtgagccccaccttcagaaagagagtgttccagtggaccgccagcaccgccaccatcaccaaggagaagcaggaccagcccaagaaggacatcagcaactaccaggtggagcaggcccaggtgctgctgaagagagagaaggagatcccccccaccgtgttccccaacagaagcccctggtgccagaacccctacgtgagcgcccacccctactgccccctgatcgagccccacaacaccagcaccgccggcggcagactggacagacagcccagaaccagaagcaccagacccaacagagccagcggcagcaagaagaagaagaccagcgagagccagaagcagtag

SEQ ID NO: 244016 - protein, 444 aa, Artificial Sequence
  derived and/or modified sequence
MSEETATSDNDNSYARVRAVVMTRDDSSGGWLPLGGSGLSSVTVFKVPHQEENGCADFFIRGERLRDKMVVLECMLKKDLIYNKVTPTFHHWKIDDKKFGLTFQSPADARAFDRGIRRAIEDISQGCPESKNEAEGADDLQANEEDSSSSLVKDHLFQQETVVTSEPYRSSNIRPSPFEDLNARRVYMQSQANQITFGQPGLDIQSRSMEYVQRQISKECGSLKSQNRVPLKSIRHVSFQDEDEIVRINPRDILIRRYADYRHPDMWKNDLERDDADSSIQFSKPDSKKSDYLYSCGDETKLSSPKDSVVFKTQPSSLKIKKSKRRKEDGERSRCVYCQERFNHEENVRGKCQDAPDPIKRCIYQVSCMLCAESMLYHCMSDSEGDFSDPCSCDTSDDKFCLRWLALVALSFIVPCMCCYVPLRMCHRCGEACGCCGGKHKAAG

SEQ ID NO: 244017 - DNA, 1335 bp, Artificial Sequence
  derived and/or modified sequence
atgagcgaggagaccgccaccagcgacaacgacaacagctacgccagagtgagagccgtggtgatgaccagagacgacagcagcggcggctggctgcccctgggcggcagcggcctgagcagcgtgaccgtgttcaaggtgccccaccaggaggagaacggctgcgccgacttcttcatcagaggcgagagactgagagacaagatggtggtgctggagtgcatgctgaagaaggacctgatctacaacaaggtgacccccaccttccaccactggaagatcgacgacaagaagttcggcctgaccttccagagccccgccgacgccagagccttcgacagaggcatcagaagagccatcgaggacatcagccagggctgccccgagagcaagaacgaggccgagggcgccgacgacctgcaggccaacgaggaggacagcagcagcagcctggtgaaggaccacctgttccagcaggagaccgtggtgaccagcgagccctacagaagcagcaacatcagacccagccccttcgaggacctgaacgccagaagagtgtacatgcagagccaggccaaccagatcaccttcggccagcccggcctggacatccagagcagaagcatggagtacgtgcagagacagatcagcaaggagtgcggcagcctgaagagccagaacagagtgcccctgaagagcatcagacacgtgagcttccaggacgaggacgagatcgtgagaatcaaccccagagacatcctgatcagaagatacgccgactacagacaccccgacatgtggaagaacgacctggagagagacgacgccgacagcagcatccagttcagcaagcccgacagcaagaagagcgactacctgtacagctgcggcgacgagaccaagctgagcagccccaaggacagcgtggtgttcaagacccagcccagcagcctgaagatcaagaagagcaagagaagaaaggaggacggcgagagaagcagatgcgtgtactgccaggagagattcaaccacgaggagaacgtgagaggcaagtgccaggacgcccccgaccccatcaagagatgcatctaccaggtgagctgcatgctgtgcgccgagagcatgctgtaccactgcatgagcgacagcgagggcgacttcagcgacccctgcagctgcgacaccagcgacgacaagttctgcctgagatggctggccctggtggccctgagcttcatcgtgccctgcatgtgctgctacgtgcccctgagaatgtgccacagatgcggcgaggcctgcggctgctgcggcggcaagcacaaggccgccggctag

SEQ ID NO: 244018 - DNA, 1335 bp, Artificial Sequence
  derived and/or modified sequence
atgagcgaggagaccgctaccagcgacaacgataactcgtacgcgcgagtgagagctgtcgtaatgacgagagatgactctagtggcggttggcttcctttgggggggtcgggcttgagcagcgtgaccgttttcaaagtgccccaccaggaagagaatggctgtgccgatttttttattaggggcgaacgtctgcgggacaagatggtggtcctggaatgcatgctgaagaaagatctgatctacaacaaggtaaccccgactttccaccactggaagatcgatgacaagaagtttgggctcaccttccagagccccgcagatgctcgggcctttgacagagggatccgcagagctattgaggacatttctcagggctgtcccgagagtaaaaacgaggcagaaggcgccgacgatcttcaggctaacgaagaagacagcagcagttccctggtaaaggatcatttattccagcaggagacagtcgttacctcagaaccgtaccgaagtagcaacatccggccttccccattcgaggacctaaatgcccgaagagtatacatgcagtcacaagctaaccaaatcacttttggccaacccggtctcgatatccagtcgcgaagtatggagtacgtacaaaggcagatcagcaaggagtgtggttcccttaaatcccagaaccgggtacccctcaaatccattagacacgtttcatttcaggatgaagacgaaatagtaaggattaacccccgggacatactgattcgacgatacgccgactacaggcaccccgatatgtggaaaaatgatcttgagcgagatgacgctgactccagcattcaattctcgaagccagatagtaagaaatcagattatctgtattcttgtggagatgagacaaaactctcttcccctaaggattctgtggtgttcaagacacagccatcctccctgaaaatcaagaaatcaaagagaagaaaggaagatggggaaaggtcaagatgtgtttactgtcaggaaaggttcaaccacgaggaaaacgtgcgtggcaagtgccaggacgcccccgatcccattaagcgatgcatttaccaggtgtcttgtatgctgtgcgccgaatctatgttgtaccattgcatgagtgatagcgaaggggacttttccgacccatgcagttgcgacactagcgacgacaagttctgtcttagatggctcgccttagtcgccctgagttttatagtgccatgtatgtgctgctacgtccccctgcgaatgtgccatagatgcggagaggcttgtgggtgttgtggcggcaagcacaaagctgctggctag

SEQ ID NO: 244019 - DNA, 1335 bp, Artificial Sequence
  derived and/or modified sequence
atgtctgaggagacagccaccagtgacaatgacaacagctatgcccgggtgcgggctgtggtgatgaccagagatgacagcagcggcggctggctgcccctgggcggcagcggcctgagctctgtgacagtgttcaaggtgccccaccaggaggagaatggctgtgccgacttcttcatccggggggagcggctgcgggacaagatggtggtgctggagtgcatgctgaagaaggacctgatctacaacaaggtgacccccaccttccaccactggaagattgatgacaagaagtttggcctgaccttccagagccctgcagatgcccgggcctttgaccggggcatcagaagagccatcgaggacatcagccagggctgcccagagagcaagaatgaggccgagggcgcagatgacctgcaggccaatgaggaggacagcagcagcagcctggtgaaggaccacctgttccagcaggagaccgtggtgaccagcgagccctaccgcagcagcaacatccggcccagcccctttgaggacctgaatgcccggcgggtgtacatgcagagccaggccaaccagatcaccttcggccagcccggcctggacatccagagccgctccatggagtatgtgcagaggcagatcagcaaagaatgtggcagcctgaagagccagaacagagtgcccctgaagagcatccgccacgtgtccttccaggatgaagatgaaattgtgcgcatcaacccccgggacatcctgatccgccgctatgctgactaccgccacccagacatgtggaagaatgacctggagagagatgatgctgacagcagcatccagttcagcaagccagacagcaagaagagtgactacctgtacagctgtggagatgagaccaagctgagcagccccaaggacagcgtggtgttcaagacccagcccagcagcctgaagatcaagaagagcaagaggaggaaggaggatggagagaggagccgctgtgtgtactgccaggagcgcttcaaccacgaggagaatgtgcggggcaagtgccaggatgccccagaccccatcaagcgctgcatctaccaggtgtcctgcatgctgtgtgccgagagcatgctgtaccactgcatgtctgattctgagggggacttcagtgacccctgcagctgtgacaccagtgatgacaagttctgcctgcgctggctggccctggtggccctgtccttcatcgtgccctgcatgtgctgctacgtgcccctgaggatgtgccaccgctgtggggaggcctgtggctgctgcggcggcaagcacaaggctgctggatag

SEQ ID NO: 244020 - DNA, 1335 bp, Artificial Sequence
  derived and/or modified sequence
atgagcgaggagaccgccaccagcgacaacgacaacagctacgcccgagtgcgtgcagtggtgatgacgagagacgacagttctggtgggtggttgcccctcggaggctctgggctttccagtgtgacagtgttcaaagtgcctcaccaagaggaaaacgggtgcgcagatttttttattagaggggagaggcttcgtgacaaaatggtggtcctcgagtgtatgctcaagaaggacttgatttacaacaaagtcacaccaactttccatcactggaaaatcgacgataagaaattcgggttgacttttcaaagcccagctgatgcacgggcattcgaccgcggtattagacgggcgatcgaggacatcagtcagggctgccccgagtctaaaaatgaagcagaaggggctgatgacctgcaagctaatgaagaagacagttcttcttccctggtgaaggaccacctcttccagcaagaaacagttgtgacatccgagccctatcgctcttcaaacatcagaccctctcccttcgaagacttgaacgctaggcgagtttatatgcagtcacaagcaaaccagataacattcggtcaaccaggattggacatccaatccagatctatggagtacgtgcagcggcaaatttccaaggagtgtgggtctttgaagtcgcagaatcgcgtgcccttgaaatccatcagacacgtgtctttccaagatgaagacgagatagtccggatcaatccgcgcgacatcctcatcaggcgctatgccgactaccggcaccccgacatgtggaaaaatgacctggagagggatgacgcagactctagtatacagttctccaagccagactcaaagaagagtgactacctttattcttgtggcgacgaaacaaagctctcttctcccaaagacagcgtggtttttaagacacagccatcctcactcaaaattaagaagagcaaacgcaggaaagaggatggcgagagatctaggtgtgtgtattgccaggagcgcttcaaccatgaggagaacgtgcgcggcaaatgccaggacgctcctgatcccatcaaacgctgtatctaccaggtcagctgcatgttgtgtgctgaatcgatgctgtatcattgtatgagtgattctgagggggattttagtgacccttgcagttgcgacaccagtgatgataagttttgcctgcgctggcttgctttggtagcactgagctttatcgtaccctgtatgtgctgttatgttcccttaagaatgtgccatagatgcggggaagcctgtggctgctgtggtgggaaacacaaagccgccggttag

SEQ ID NO: 244021 - DNA, 1335 bp, Artificial Sequence
  derived and/or modified sequence
atgtccgaggaaactgcgacatcagacaatgacaactcctacgcgagagtgagagccgtcgtcatgactcgagacgattcgagtggcggttggctcccactcggcggatcagggctgtctagcgtaaccgtatttaaggtgccgcaccaggaagaaaacggctgtgcagatttcttcataaggggcgaacgcctgagagataagatggtggtgctcgagtgcatgttaaagaaggatctaatttacaacaaagtgacacccacattccatcactggaaaatagatgataaaaaattcggactgactttccagtctccagccgacgccagggcctttgaccgaggcatcaggcgggctatcgaggacatatctcagggatgtccggaatccaagaacgaggccgagggtgcagatgatctgcaggcgaacgaggaggactcgtccagctcccttgttaaggaccacctgtttcaacaagagactgtggttacgagtgaaccatataggtcatccaacatacggccaagcccattcgaggatctgaatgcccgacgcgtgtatatgcagagtcaggctaatcagatcacattcggacagccaggcttagacatccagagcagaagtatggagtacgttcaacgacaaatttctaaggagtgtggtagcctgaaatctcagaaccgcgtgcctctgaaaagtattcggcacgtgtcatttcaagacgaggacgagattgtccgcataaacccacgcgatattctaatcaggagatatgcggactatagacatccagacatgtggaagaatgacctcgagcgcgacgacgctgactccagtatacagttttctaaaccggactctaagaaatccgattatctgtactcttgcggtgatgagactaagctgtcatctcctaaagatagcgtcgtctttaaaacccagcctagctcactaaagatcaagaaatcaaaacgaagaaaggaagatggtgagcggtctcgttgcgtctattgtcaggaacgatttaaccatgaggaaaatgtccggggtaagtgtcaagatgcacctgacccaattaaacggtgtatatatcaggtttcgtgcatgctttgcgccgagtccatgctttaccactgcatgagtgatagcgaaggtgatttctctgatccatgctcctgcgacaccagtgatgataagttctgtctgaggtggttggccctcgtggcgctgtccttcatcgtgccttgtatgtgttgctacgttccattgcgaatgtgtcacaggtgtggagaagcgtgcgggtgttgcgggggtaagcacaaggccgcaggctag

SEQ ID NO: 244022 - DNA, 7780 bp, Artificial Sequence
  derived and/or modified sequence
ctctcgggcgtgaggagctggcccgctgagctgctggtgggcactggctggcggggaacctgcagccgctcttgtcctctcccgccgcttctcgggatcctgccccccggacccgggcccgcccgctcttctccggccgggtgggaacgatcggtttgcctgcccctcgcctcacacgctccccgccgccccctccacccccctgaggaggagtcccggctggagcgtgtctggaggaatccgccgccgcggggcccctagccctgctctgccggcgcctgaggaccgacccagacgccgccgggggttgaggggcagccggcggcgaggcgggagatggtggggtgggctccggcaggaccgcgccgccgctgcccggagcctgggctcggcacccccccgccggcccccaccgagcggagctctgcttcctcctcgccgcatccctgagggaagcgccgcctctgctcccgggttctccgcccgccgactccttcctggccggaccccgctgcgctccaccccagtggctggaggagcagctctccagtcagcctttgcagcccctctctttttccctttccaccgggcctcctcggatcccttggctgggcactgaggcgggggaagaggctggggtcgccacggcggaggttgctgccgccacccccctgcgggggtggccggggttcccggctgggggggtaccgttctgggtgaggcatccaccatggtgaggcccctgtgccgctgcccccgcgcccccccggccgccgctgcctcctgcccctcggtgctgctgttgctcccccgcctgctgttgctcctccatctccagatcggatcacggtgagggaaagatgagcgaggagacggcgacttctgacaacgataatagttatgcacgagtgcgagctgtggtgatgacccgagatgactcaagtggtggatggttaccacttggagggagtggactaagcagcgtcactgtcttcaaagtccctcatcaggaagagaatggctgtgctgacttttttatccgtggagagcgactcagggacaaaatggtggttttggaatgtatgcttaaaaaagacctcatttataataaggtcactccaacatttcaccactggaagattgatgacaagaagtttggtcttacgtttcaaagtcctgctgatgctagggcttttgatagaggtatccgaagagctatagaggatatttctcaaggatgccccgaatcaaaaaatgaagctgaaggggcagatgacttacaagcaaatgaagaggattcttccagttctctagtgaaggatcacctttttcagcaagagacagttgttaccagtgagccttatagaagctcaaatataagaccttctccctttgaagatctgaatgccagaagagtctacatgcaaagccaagccaatcagataacatttggtcagccaggcttggacattcagagcagaagtatggaatacgtacagcggcaaatatccaaggaatgtggaagcctaaagtcccaaaatagggtccctttgaaatcaatcagacatgtcagctttcaagatgaggatgagattgtcagaataaaccctcgagatatcttaatacgtcgctatgcagactacagacatcctgacatgtggaaaaatgacttggaaagagatgatgctgattccagtattcagttttctaaaccagacagtaaaaaatcagactatctgtactcttgtggggatgagactaagttaagttcacccaaagactctgtggtatttaagacgcagccttcctcattaaaaattaagaagtcaaaacgaagaaaagaggatggtgaacgttctcgctgcgtatactgccaggaaaggtttaatcatgaagaaaatgttaggggaaaatgtcaggatgctccagaccctattaaaagatgcatatatcaagttagttgcatgctctgtgcagagagcatgttgtatcattgtatgtcagactcagagggagatttttctgatccctgttcgtgtgacactagcgacgacaagttctgcttgcgatggttagccctggtagctttgtctttcattgtaccatgtatgtgctgctacgtccctttgagaatgtgccatcgctgtggtgaggcatgtggttgctgtggtgggaaacataaagctgctggatgaaatggtccagtgccaaaatgagcttaaaatctttgtttccaggaattagctaacttggatttgtggaagcttttggcaagcaatatggaatcttgcctggtatcattgagcccacacatggaggaagcagaactcatcagttcttggcgtttcacgccatgcctaacttttcccttgagtgcatggcatgttttgttacaggttgtagagtatttgcagaaggaaaccatttctggttatttggctataaaaagtcagcataaaatatgatccaactaaaagggattaatttttggcatttttgtatatttatgcattaggtgatgggacttttaaaggtttgaatttattaggacacgaactaaaaataaaagtgcactaggggacagttgatttcaatctaagaaaagttaacacttgggaattacaagaagtaaaacaagtgcaactaaatcatttattagttgttttttgaaagcagttttatgtataaataacaaatgtttatatttaactaaatgtaaggtacgaattattacatattaaacttttcttccccttcctagttctgaagtagatatatatatatatatatctactgtcacattccatatattttgaatatttaactcatctagttaataatgtttttattccatgcgaatgatttgatattttcatccttatttctctttggctacaatttatattgagttatatctgtacattctggtaatctaaaatccttaaaaatactctaatagccttgagtgaccaactttttttttaaagcacagatgtaattgtctaatgttctgatgggaacgtaacacttatttttatataaaaagagactgagtaaacaaacattatagaaaaaaagtgaagttttttagttgttttttgtggtattcaaccagcaagttgttttctttcagagtttcctccttcaaaaagttatattgcatttacaaatgttttacaaggcagaaagtttgactggatagttagtgtaaaagcttcatgttgagatcttcacgtatcattctgctaaaccagaatatgttcagctgtgttactaatttttcagcttaatcctcagtgcttattatttacataacaataactttttatcagttacattttatttttatttaaactggccaaaagcaaaattattttatgttaaaatgtgtgctaaactatcccaggaaagtatttaatccaacattgtaaatgaagtatcttgtacatataaatttatttcttttgcagagcattatattactggatgtttaatttacaaaatagttgggtaaatgttccaacaaactttaaagtaccttgaagtcaaattgtctgtttttgttttgttgttgttgttgttgttttcttaagtgttacattaaaactctaaccaaggaaagggttctttaagaacattcccttagagggataaagttgagaagtgtgccttttttttaatggcttgaagtttcagaggtgataaaaattaaaatcacactactatttgaagctcattttctatgcaggtttttaaacgtcatttatgtatcattctttttatatatcacacttaagcttgtgttagcttttttcttttgccccagatcaaactgaacaatgtatataacactatctgtctgtaaaatactttttttaagaaagcatttatatttatatgacagcttgaactgacaacattgtgtatatagatcatcttgaagtattatttcacattgaaaagaagaaaatatattgataactatagatgttatgaagaagagggtatttctagttttgtactaaaaatcaattggatgaactaaatccaaaacatgacactgtaggcagcagttttaagtcttatttttactgtttatatatttgaatgctgctacaacagatgatcttcatccctgaagttttcagctaaacttggtttcctagaatagactgttaactttcaaaatttttattggtgaaatggaaatactgtttttccttgtgaatgaattttcatatttgtaagtgctaagtttataattcaggtttgatcaaggtgtgaataactgaagaaaataacttgctggctatataggaaaatgctgtggaaatgaactgtgtatatacttctgggaggaacaaatttaatcatttcttctgttaagcactaatcagtatagtgcaactcctggttctgtactgtattttatatgcaacatatatgctttaatattttaatgtttgtgcattaatattttcaatttgtttaaccactttgctgctaagattttgccgtcccattcccattttttcctttacaattttaaacaagtttcttcattaaaaactatggtgatgaaatggtttttattttaccttggatctttatagttaacatacccagtttcttaatcagtctacaagactaactgatgatataatgttctctgaatccctatatggaaattttcttttgagtaaatgagaattcctttgtgaaagcaaatgggtagtttaaatcactgattcttaaacatgtgtataggcaccttcaggaacattttctcattctctgtacagattcggcactgccaattggcttttcctctaaaacttttctttgtttttatctgatataagcagatggctcaagacaactgcttgagtaatagtattgaaaatggaatcatctagacggcatgacaagcaagactggtctgatgaacttgttcagaattgataattcttaaatatttctcttggcttcaaaagggacatcatttgatttctgaagaagtatgtcgtgtggagcttcagcaccacctactggatgatttccaggccagagacatgagatggcaatagggatctgacagggttcatcactactaccattaaagggctatttatgtggtgaccacctctaccagggaaaccaggaataagaactgtctcaaaggaattgtaaaatggttatttacctaatgtgtcttgttggcttgctgaaagattttaagcacttttttcttacatatcctgttttaaaatatttgttgatatttgggactggcaatcaaacttaatggatgtactgaggcatttatagaaccagttgctttaactctcaaaagccattaccaaaatggtatttttttcctccttccgccagtcagggagaatttttaaaaataataatcaaaacatgaaaaaacataatcacacctgtattttatcatgacagcttcagagagtgtgtgtgtacgtttttctctcttttatttgagacggagtttcactcttgttgcccaggctggagtgcaatggtgcgatctcagctcactgcaacctccgcctcctgggttcaagcgattctcctgcctcagcctcccaagtagctgggattacaggcacccaccaccatgcccagctaagttttggtattttagtagagatggggtttcaccatgttggccaggctggtcttgaactcctgaccttaggtgatccacccacctcggcctcccaaagtgctgggattacaggcatgagctactgcgcccagccgtgtgtatgtttctgaaatgatgatggggtggggttaaaatctaaagggaaaaacttgaaactacctattttcattggttattcagcagtgcctaaaatgagcttttgaagtaatgtaaatgcactttcaattcatgtgtatagtgccatctgatatcttgggtaagtcttgctttttcttttctttttcctctcccctgcccccttaattaaatggcacggaaatgtttcttaatatgcacgtgagtctccagagtacaggaaatgtgctttcctctaaatggtcaatgtaaagaatcttaaggatatttcttgtgttgaaatttacattcgattttgtgattacacttggaagtatgtgttaaattgggtttttaattgtagcccaaaggtgcattaagcaagtgtaacattttttccacataaaacttagaaaactttagttacctgaaaagcaaggattctttactaattattatgctcattcttgatttgacttccatgttcacacttcaaagtgtaagaggaagcactagaaactggcattattgttgcactaaaaaagtctataaatcataatagcaccatgaggtgttttgcaatgagacaaacatgaagaatgaatttctttaagagagaaacacaaccggaggtgatttatataaaccaaaagaaaaaaaaaggctttaaggtattaggtactgtttgcctagcagccaggtggttataaaagattcatatgctttggtacactgataaatgttagccattattcctgaaagcttcttaaattgcatcagttgttttgaaattttttcaagaataaactagttgaaaagtctttgtattaaaaatacacatagatttttgtgaacatttccagtgtgtagtgtcgtttgctttctatttctgacctcaaaagtgcctcacttgtatattatttccattaaaagcttgactgcattctttctaatgaacaatgaaaaactgtttaactcatgtcataatgtgtctcctcagatatagttaactagcttgatagttttgagtatataatgtaaataatacattataagtttgtaaccatttctgttacttcatacccgtgtaattggacatagcagatgattatcataagaatttgttttaatggtttttttccctcctggaattacctgattaaacctgtcatgaattataaaaggactttttcttattctcctagagcttatcaaattatcacataagagataattactggaggagaaagtaaaaatggaagcttttgataattagctctgttctttaaaagtatacttttaaactgaaagttcacatatagttcatcttaataacatatttattcatccttaattgtattcagatttttttttaagtctctaagctaataatgttatatttattggtttggtaacatgttgcagctaagctaatgaccttaagtggcaattgtttaacccaggactactgatttttttatattcaagtcagtttcatcgttttacttaactcgccatataaccaaaaataacgaataatctaaaggaaaggttattaggacagtaataaaaaattatagtgtatctcaacactagaataagttggattactatattatagtttatttgaaaaatcaaggagtaactgtatctttaccattaattatgaaatgtagtctcatgtgcttatttacaggtttttcagaatttgctttacattcttcacatcaagttaatacccacaagtaagtagaatagcttttataacaaggaaattgaaactagggttctagcttggctatcaatataagtgtcatgcacatagtgctccttaaagaaaaagacatcgacatcaatggtatgaaagctgtagtcactctttaaattgaactgctctaagatttgcagttttagtgagatctgaaatgatggttcaaaaaatacattcataataaaagtcttaacaaaatcaca

SEQ ID NO: 244023 - protein, 725 aa, Artificial Sequence
  derived and/or modified sequence
MDDSDTPTYYLQIEPQDGCHPGDSVERSVTCLPSASDENENQLDGDGHEHLTSSDSAMGKPQVSEQDSLNNNESCTLSCEVAAGENLQNTLCEASRDEQAFLGKDKKIPGKRSPRSKKGTAKKIPPGLFSGDIAPLMQEKVLSAVTYAVDDEEAAEVNANEQPEAPKLVLQSLFSLIRGEVEQLDSRALPLCLHQIAESYFQEEDYEKAMKFIQLERLYHEQLLANLSAIQEQWETKWKTVQPHTVTALRNSEKGFNGEDFERLTKICATHQDPLLSKHKIAAVEKSQERKCSTQLLVSEDPKEGGATTKESESKTCLGTESSKESQHTVEPLGSSPCCHQMDVQTDSPSLSVTAGKDHMEELLCSAEATLALHTQSSETAGSPSGPDSSEDACEDDSRLQLAQTEACQDVARIEGIAEDPKVFLSSKSKTEPLISPGCDRIPPALISEGKYSQAQRKELRLPLRDASEALPTDQLENNELNELQQPDLTDSDGKSPQAQADSDGSENVLCGNNQISDLGILLPEVCMAPEEKGDKDDQLNKETEDYLNSLLEGCLKDTEDSLSYEDNQDDDSDLLQDLSPEEASYSLQENLPSDESCLSLDDLAKRIEIAEVVPTEGLVSILKKRNDTVGDHPAQMQHKPSKRRVRFQEIDDSLDQDEVGGGSCILLVLLCIATVFLSVGGTALYCTFGDMESPVCTDFADNMDFYYTKLLQGVAELKHWIYLS

SEQ ID NO: 244024 - DNA, 2178 bp, Artificial Sequence
  derived and/or modified sequence
atggacgactctgacacccccacatactatctgcagattgaaccccaagatggctgtcatcccggggattcagtcgaaaggtccgtcacatgtctgccaagcgcctccgacgagaatgaaaatcagttagacggtgatgggcatgagcacctgaccagctctgactccgcgatgggtaagccacaggtttcagagcaggacagcctgaacaataatgaaagctgtacactgtcttgtgaggtcgccgccggagaaaacctgcagaataccctttgcgaggcatccagggacgagcaggcattcctcggaaaagacaaaaagattcccggcaagagaagtccacgatctaagaagggaaccgccaagaagattccaccggggttattctccggagatatcgcccccctgatgcaagagaaagtcctatcggctgtcacatatgccgtggacgacgaagaggcagctgaggttaacgctaatgagcagccagaagcaccgaagctagttctgcaatcactgttctcgctcattcgaggtgaggtcgagcagctggattcccgggccctaccgctttgcctgcaccaaattgccgagtcttattttcaggaagaggactacgagaaggccatgaagtttatacagctggagagactgtaccacgagcagttactcgcgaatctcagcgcaattcaggagcagtgggagactaaatggaagactgtacagcctcacaccgttaccgcattgaggaactccgaaaaggggttcaatggagaagatttcgagagactcaccaaaatttgcgctacacaccaggatccactcctaagtaagcacaagatcgctgccgtggaaaaatcacaggagaggaagtgctctacgcagttattagtatctgaggatcccaaagaaggcggggctaccacaaaggagtcagagtctaagacctgtcttggtaccgagagctccaaagagagtcagcatacagttgaacccctcgggtcatccccatgctgtcaccaaatggatgtgcagaccgattccccatctcttagcgtcacagcaggcaaggatcacatggaggagctgctctgctccgccgaagcaacactcgccctgcacacccaaagctcggaaacggctgggtccccttcgggccccgacagctcagaagacgcctgtgaggacgattcacgcctccagttggcacagacagaagcttgtcaggacgtggctagaatcgaggggatagccgaggatccaaaagtctttttgagcagtaaaagcaagacagaaccacttatatcacccggttgtgaccgtattccacccgcacttatctccgaaggcaagtacagtcaggcccagcggaaggagctcagactccctctgagagatgcctctgaagcgctcccaaccgaccagctggaaaataacgaattaaatgaactgcagcaacccgacctgacagatagcgatgggaagtccccgcaggctcaagcagactcagacggatctgagaacgtcctctgcggtaataatcaaataagtgatttggggatacttctgccagaagtgtgcatggcaccagaggagaagggggataaggatgaccagctgaacaaggaaacagaggattatcttaacagcctcctggagggttgtctcaaggataccgaggattcattgagctatgaggacaaccaggatgacgactcggatctgctgcaggacctcagcccggaggaagcgagctattcgctgcaggaaaaccttccttcagacgagagttgcctaagcctcgacgatctggcaaaacggattgagatcgctgaggtggtccctactgaaggcctggtgtcaattttgaagaagcggaatgacactgttggcgaccatcccgcacagatgcagcataaaccttctaaacgcagagtgagatttcaggagatcgacgatagccttgatcaagacgaggtaggcggaggcagttgtatcctactcgtgctcttgtgcattgccaccgtgtttctcagtgttggtggaaccgcactctactgcaccttcggcgatatggaatctcccgtctgcacagacttcgcagacaatatggacttttactacacaaagctcctacaaggagtggctgaactcaaacattggatctatctctcatag

SEQ ID NO: 244025 - DNA, 2178 bp, Artificial Sequence
  derived and/or modified sequence
atggatgacagcgacacccccacctactacctgcagatcgagccccaggacggctgccaccctggggacagcgtggagaggtctgtgacctgcctgcccagcgccagtgatgaaaatgaaaaccagctggatggagatggccacgagcacctgaccagcagtgacagcgccatgggcaagccccaggtgtctgagcaggacagcctgaacaacaatgaaagctgcaccctgagctgtgaggtggccgccggggagaacctgcagaacaccctgtgtgaggccagcagagatgagcaggccttcctgggcaaggacaagaagatccctgggaagaggagccccaggagcaagaagggcacagccaagaagatccccccaggcctcttcagcggggacatcgcccccctgatgcaggagaaggtgctgtctgctgtgacctatgctgtggatgatgaggaggccgctgaggtgaatgccaatgagcagcctgaggcccccaagctggtgctgcagagcctcttcagcctcatccggggggaggtggagcagctggacagccgggccctgcccctgtgcctgcaccagattgctgagagctacttccaggaggaggactatgagaaggccatgaagttcatccagctggagcggctgtaccacgagcagctgctggccaacctgagcgccatccaggagcagtgggagaccaagtggaagacagtgcagccccacacagtgacagccctgaggaacagcgagaagggcttcaatggagaagattttgagcggctgaccaagatctgtgccacccaccaggaccccctgctgagcaagcacaagattgctgctgtggagaagagccaggagaggaagtgcagcacccagctgctggtgtctgaggaccccaaggagggcggggccaccaccaaggagagcgagagcaagacctgcctgggcacagagagcagcaaggagagccagcacacagtggagcccctgggcagcagcccctgctgccaccagatggatgtgcagacagacagccccagcctgtctgtgacagctgggaaggaccacatggaggagctgctgtgcagcgctgaggccaccctggccctgcacacccagagcagcgagacagctggcagccccagcggccctgacagcagtgaagatgcctgtgaagatgacagccggctgcagctggcccagacagaggcctgccaggatgtggcccgcatcgagggcattgctgaggaccccaaggtgttcctgagcagcaagagcaagacagagcccctcatcagccctggctgtgaccgcatccccccagccctgatcagcgagggcaagtacagccaggcccagaggaaggagctgcggctgcccctgagagatgccagcgaggccctgcccacagaccagctggagaacaatgagctgaatgagctgcagcagcctgacctgacagacagtgatggcaagagcccccaggcccaggccgacagtgatggctctgaaaatgtgctgtgtggcaacaaccagatcagtgacctgggcatcctgctgcctgaggtgtgcatggcccctgaggagaagggggacaaggatgaccagctgaacaaggagacagaggactacctgaacagcctgctggagggctgcctgaaggacacagaggacagcctgtcctatgaggacaaccaggatgatgacagcgacctgctgcaggacctgagccctgaggaggccagctacagcctgcaggagaacctgcccagtgatgagagctgcctgagcctggatgacctggccaagagaattgaaattgctgaggtggtgcccacagagggcctggtgtccatcctgaagaagagaaatgacacagtgggggaccacccagcccagatgcagcacaagcccagcaagagaagagtgcgcttccaggagattgatgacagcctggaccaggatgaggtgggcggcggcagctgcatcctgctggtgctgctgtgcatcgccaccgtcttcctgtctgtgggcggcacagccctgtactgcacctttggagacatggagagccctgtgtgcacagactttgctgacaacatggacttctactacaccaagctgctgcagggcgtggccgagctgaagcactggatctacctgtcctag

SEQ ID NO: 244026 - DNA, 2178 bp, Artificial Sequence
  derived and/or modified sequence
atggacgacagcgacacccccacctactacctgcagatcgagccccaagatggctgtcacccaggtgattccgtggaacgaagcgtaacatgccttccttctgcgtccgacgaaaacgaaaatcagcttgatggtgatgggcatgaacacttgacttcgagtgattcagccatgggcaagccccaagtttcagagcaagacagtcttaacaataacgagtcttgtacgttaagttgtgaagtagccgcaggcgagaatttacagaacaccctgtgcgaggcgtctagggacgaacaggccttcctgggtaaagataaaaagatccccggtaaaagaagtccacgcagcaagaaaggtaccgctaagaagattccaccaggtcttttctctggagatattgcaccgctgatgcaagagaaggtgctgagcgctgtgacatatgccgttgatgacgaggaggctgctgaggtgaacgccaacgaacagcctgaagctcccaaactcgtactacaaagcctgttctctctgatcaggggtgaagtagagcagctggacagtcgggctttgcccctttgcctacaccagatagctgagagctattttcaggaagaagattatgagaaggccatgaagttcattcagctcgagaggttatatcacgagcaactattagccaacctgtcagctatacaggaacagtgggaaacaaagtggaaaactgtccagcctcatactgtgaccgcactgaggaattcagaaaagggattcaacggtgaggattttgaacggcttactaaaatttgcgccacccatcaagatccactgttgtctaaacacaagattgcggccgtggagaagagccaggagagaaagtgttctacacagctgctggtctctgaagatccgaaagaggggggagccacgaccaaggaaagcgagtccaagacctgtttaggcacagagtcctctaaagagagtcaacacactgtggaaccgttaggttcctcgccttgttgtcaccagatggacgtgcaaacagacagtccaagtcttagcgtgacagctgggaaggaccacatggaggaactgctatgctccgcagaagcgacactcgcccttcatacacagtcatctgaaacagccggctcccccagcggccccgactcaagcgaagacgcatgtgaggatgatagccggttgcagctggcccaaacggaagcctgccaggacgtggcaagaatcgaaggtatcgccgaagaccctaaggtgtttctgtctagtaaatccaaaacagaaccattaatctcccctggttgcgacagaattccccccgctcttataagcgaaggaaaatacagtcaggcccaaagaaaggaactcagactgccgctacgggatgcctccgaagccctgccgacagaccagctggagaacaatgagttaaacgaactgcagcagcccgatttgactgacagtgatggtaagtctccacaggcccaggcagacagtgatggctctgagaatgtcctctgcggcaataatcagatctccgacttagggatcctcttgcccgaagtctgcatggcccccgaggagaagggagacaaggatgaccagctgaacaaggagaccgaggactacctgaatagcctgctcgaagggtgcttaaaggacaccgaggatagcctgtcgtatgaagacaaccaggatgacgactcagatctgcttcaggacctttcacctgaagaagcctcatactcccttcaagagaatctcccatcagatgagtcctgtcttagcctggacgaccttgctaaacgaatcgagatagccgaggttgtgccaaccgaaggcctggtgtctatactcaagaagcgcaatgatacagtgggagaccaccccgctcagatgcaacacaaaccctccaagcgacgcgttaggtttcaggagatcgacgactcactggaccaagatgaagtggggggaggctcttgcattctgctagtgttgctttgtatcgccaccgtgttcctgtctgtggggggtacagctctgtattgcaccttcggcgacatggaatcacctgtgtgtactgatttcgcagacaatatggatttctactacacgaagcttcttcaaggagtggccgagttaaaacattggatctatctgtcatag

SEQ ID NO: 244027 - DNA, 2178 bp, Artificial Sequence
  derived and/or modified sequence
atggacgactctgacacacccacatattacttgcagatcgaaccgcaggatggctgccatcctggtgactctgtggagcgatccgttacctgtcttccctccgcctctgatgaaaacgaaaaccagttggacggggacggacacgaacacctcacgagcagcgactctgccatgggtaagccccaggtgtccgagcaggactcactgaacaacaacgagtcatgtaccttgtcatgcgaagtggctgccggagaaaatttgcagaacacactgtgcgaagcttctcgagatgagcaggcgtttctggggaaagataaaaagattccgggtaaaaggtctcctcgcagcaaaaagggcacggctaagaagatacctcctggtctattctccggagatatagcaccactgatgcaggagaaggtgttaagcgccgtaacctatgcagtggacgatgaggaggcagcagaagtgaatgcgaatgagcagccagaggctccgaagctggttctgcagtctctctttagtcttatccggggtgaagtggagcagctagactcccgcgcactgccgctgtgcctccaccagatagccgaatcctatttccaggaggaagactacgagaaggccatgaaatttattcagttagaacgcctctatcatgagcagctccttgcaaacttgagcgctatccaagagcaatgggaaaccaagtggaagaccgtccagcctcatactgtgacagccctcagaaacagcgagaaaggctttaatggcgaagacttcgaaagactgactaaaatatgcgcaacacatcaggatccactgttgagtaagcataaaatcgccgcagttgagaaatcccaagaacgcaagtgctccacacagttgctcgtgtccgaagaccccaaggagggaggggctacgacgaaagaaagtgaatcaaaaacctgtttgggcactgaatccagcaaagagtctcagcatactgtcgaacccctcgggtcctcaccatgctgtcatcaaatggatgtgcagacggatagtccatcactgtccgtcactgccggaaaagatcatatggaagagttgctgtgttcagctgaagcaacactagccctgcacacacagtcctcggagacggcaggcagcccttcagggcctgattcatccgaagatgcctgtgaagacgactccagacttcagctcgcccagacggaagcttgtcaggacgtggccaggatagagggcatcgcggaggaccctaaagtgttcttgtcttctaaatcaaaaactgagccgctgatcagtccagggtgcgatagaattccacctgccctgattagcgaggggaagtacagccaagcccaaaggaaggaattgaggctgccactgagagacgcgtccgaggcactacccactgaccagctggaaaataacgaactgaatgaattgcaacaacctgaccttactgatagtgatggtaaatctcctcaagcccaggccgatagcgacggatcagagaatgtcttatgtgggaataatcagatatctgacctgggaatactgttgccagaggtttgcatggcgcctgaagaaaaaggagacaaggatgaccagctgaataaggaaaccgaggactatctaaacagtcttctagagggctgcctcaaggataccgaggactccctcagttacgaggataatcaagacgacgactccgatctgctgcaggatttgtcgccagaagaggcaagttacagcctgcaggaaaatctgccctctgacgaatcctgtctctccttagatgacctggccaagagaattgaaattgccgaggtagtgcctactgaaggcctcgtgagcatcctcaaaaagcggaatgacaccgttggcgaccaccctgcgcaaatgcaacataagccaagcaaaagacgggtgcggtttcaagagattgacgattctctggaccaggacgaggtgggcggtgggtcatgtatccttctggtgctgttatgcatcgccaccgtctttctgtccgtgggtgggaccgcgttatattgtaccttcggagacatggagtccccagtctgcactgacttcgccgacaacatggatttctactacaccaagctcctgcagggtgtggctgagcttaaacattggatctacttatcctag

SEQ ID NO: 244028 - DNA, 5126 bp, Artificial Sequence
  derived and/or modified sequence
tctatgctccgcggtcgcgggccgccagcctccagccggccagccgcgaggggtgcgcagagggaggcggggcggaaaggcgagaggtgtctcctccaccggagccaggggagacccgagcaagctccgtgacagcacgtcggccgccatgtcgccgagtggggctggaaacagacccggcgcccagcggtagccctccttgcgcctccgattcccagacatggaaggtctttaatgtaactttaaatggttcaccaaaggatgctctaatggatgacagcgatactcctacatattatctgcaaatagaaccacaagatggatgtcatcctggtgacagcgtggaaaggagtgtgacctgtctgccttctgcatcagatgaaaatgaaaatcagcttgacggggacgggcatgagcatctgaccagcagtgacagtgcgatgggaaagccccaagtgtctgagcaggacagtctcaataataatgaaagctgcacattgagctgcgaggtggctgcaggtgagaacttgcaaaacaccctttgtgaagcctccagagatgaacaggccttcttgggaaaggacaaaaaaattcctggaaaaagaagtccaagaagcaaaaaagggactgctaagaagataccaccaggacttttttcaggagatattgcacctttaatgcaagaaaaagtactaagcgcagtcacatatgctgttgatgatgaagaagctgctgaagtaaatgctaatgagcagccagaggcgccaaagcttgttctgcagtctctgttttcacttatacgaggtgaagttgagcagttggattcaagagcacttcccctttgccttcatcagatagcagaatcctatttccaggaggaggactatgagaaagcaatgaaattcattcagctagaacgattgtatcatgagcaattgctcgcaaatctttctgccattcaagaacagtgggaaacaaaatggaaaactgtgcaaccacatacagttacggctctaaggaattcagaaaagggatttaatggtgaagattttgaacggcttacgaaaatttgtgcaacacatcaagatcctcttttatccaaacataagatagcagctgtggagaagtcccaggaaaggaaatgctccacgcagttactagtgtctgaagatccaaaggaaggaggagctaccaccaaagagtcagagagtaaaacttgtctcggcacagagtcaagtaaagaaagccaacatacagtggagcccctggggagcagtccctgctgtcatcagatggacgtgcaaacagattccccaagcctttcggtaactgcaggaaaggaccacatggaggagctgctctgcagcgctgaagccacgttagcgctccacacccagtcctccgagacagcagggagcccgtctgggccagactcttctgaggatgcttgtgaggatgacagtcgcttgcagctggctcaaacagaggcctgccaggatgtggccagaatagagggcattgctgaagaccctaaggtgtttctttccagcaagtcaaagacagagccgttgatttcaccaggctgtgaccgtatacctcctgcattgatttctgagggtaaatattcacaggctcagaggaaagaactccgtttgccacttcgggatgcttctgaggcgttgcccacagaccaacttgagaacaatgaattaaatgagctgcagcagcctgatcttacagacagtgatggaaaatcaccacaggcgcaggctgactcagacggttctgagaatgtgctctgtggaaataatcaaatatctgacttaggcatactgcttccagaggtgtgtatggccccagaggaaaagggagataaagacgaccaactcaacaaagaaacagaagactatttgaacagccttttagaaggatgtttaaaagatactgaagattccctttcctatgaagataaccaagacgacgactccgatctccttcaagatctctctcctgaagaagcatcctatagtctccaggagaatctgccttctgatgagagctgtctttctcttgatgatcttgccaaaaggatagagattgcagaggttgttcctactgaaggattggtctccatattaaagaagaggaatgatactgtaggagatcatcctgcccaaatgcaacacaaaccatctaagcgaagagtgagattccaagaaatagacgatagcttggatcaagatgaagttggaggtggctcctgtattttgctggtcttgctgtgcatagcaacggttttcctcagtgttggaggaactgcattatactgcactttcggtgacatggagtcacctgtttgtactgactttgcagacaacatggacttctattacactaagttacttcagggagtggcagaactgaagcactggatctacctctcctagcagcattccagacacagacatgctggcagtgagagtgaaaggcgggagactttctaaacagtttttctttcaggaattctgtagcattcccccttccctctgttaggaaccaaggacatcagaaatagcaactttaagtggcaagccggaggaactctgttagaataatccacacagtgaggcaaatatcaatctaagcattgtggatggaaggaatggtctttggagagagcatatccatctcctcctcactgcctcctaatgtcatgaggtacactgagcagaattaaacagggtagtcttaaccacactatttttagctaccttgtcaagctaatggttaaagaacacttttggtttacacttgttgggtcatagaagttgctttccgccatcacgcaataagtttgtgtgtaatcagaaggagttaccttatggtttcagtgtcattctttagttaacttgggagctgtgtaatttaggctttgcgtattatttcacttctgttctccacttatgaagtgattgtgtgtttgcgtgtgtgtgcgtgcgcatgtgcttccggcagttaacataagcaaatacccaacatcacaaagatgatctttcttcttttaacttgatgatgatgtgcaggcacaaatctttggagaaggcttaactgtggaatagatgaattctagaactcttgaccctgcaatgagaaactgtgacagatctgtgtcaattaacttgattagccagaaattaatcacaggcctagagaccaaagaaaaagctcccctgagtctcaggcaacagttttgtcacggatgcaaagcttcctgaaatcatgaatgctggactcagtttggcaaacgcttacacctattatgttctgagattctgagaaccagaatgcaaacttaagtaagatacagttcccactgtaggtgttttaatcctggtcttatatagaataaaccagtactttgctgagtgaaatcaccatatagaattcagtattaacagatcatgcattcagatgcttgaatgtgcattcttgttgtgggcttgatttagatcctattgcggggtcattacgcaaaaattcaatcataccttccatagacaaatgtctgatttttgtttaaatctgtccgttaggtggcctttccttatctgaggtgtagtggtctaacatttaggaagccttgctttgactttatcgggcagcattaaaaaaaaaacaacaaagaaaaaccaaacatgaattatagtttttaacaagtgatctttatttcctgtcttctgttaggatcatttgaaagaaaaagggagaacttactttctagttgttactggctggcacagtacctccctttgtgtttctgcttatttatttagattatgtgaatcttaaagggctttttatatcagttgaaagtgtgttactgcgcatgcatttggtgattccagtgctagatatttaattactgtgtatttagtgttttgattttctataatttcagttccgcgtgtttttacacttgttcattttaaattgatgtttcattttcacttataatactgtttgacttgtctctatcatgtcaccataaactgtaatattttcaagggttatagatcaaagatatttatttagaaatgtacaagataatgaaatttagattccttatacttaaggctgattttattagaagattattttaatgttctattataaattttaagaatttgtattcaaattgtatgtaaaatatgtaaaatgttgacggtactatattaagtggttctataaaagctattcacaagttctactgtgatggacatcctcatcatagacaaacctcctctgttttatcctcaatttctagttacagaaatttggtgatgcttatttttgccaattttatgtcaaaataagttaaaacttccctcctgttcacctcttgggtctctatcctgtgtaacctctggtgtagtatttgcccataggcaaccagagccacttcctctgaacccaacatctcctggggaccttcgcagcaagaggaaagcactgagacaatagcttgctaagcaggggcccagtggtgtctcagagaaaccatgggtgtcctcgccacttcccagggagggtgaggtgagctcgggaacataacgatgttttgacttacaataggcatgaaatcgcaactagaaaaattagggcagtttttaaaaatgtcatagttatctattgcatgaactggagtaattccacctggtggtgaaaggattgttatttcacacatgaaaaattcatccagttttactaaaatgtaattttttctgtcatttgaaagtactgacaactatttgtaactaatcttccttaagaactgtatttgagggtatcaaatcaagcttgtaatttaaaatctgtaccaacaaagtgtctcagagagtttatttgaaccattgggtgctgagaaaaaactgctttaaagtgaaactttgatttcagaagttgatctggccctacaagtagacagtcatctactttgggaagactaataggtccttaggtaacggctcttctgctttaaaatacctcccccatctgctgacagtagctgaagattattctaaacattcattcttttagatttaaaaataaaaatcttctggaggatt

SEQ ID NO: 244029 - DNA, 2178 bp, Artificial Sequence
  derived and/or modified sequence
atggacgacagcgacacccccacctactacctgcagatcgagccccaggacggctgccaccccggcgacagcgtggagagaagcgtgacctgcctgcccagcgccagcgacgagaacgagaaccagctggacggcgacggccacgagcacctgaccagcagcgacagcgccatgggcaagccccaggtgagcgagcaggacagcctgaacaacaacgagagctgcaccctgagctgcgaggtggccgccggcgagaacctgcagaacaccctgtgcgaggccagcagagacgagcaggccttcctgggcaaggacaagaagatccccggcaagagaagccccagaagcaagaagggcaccgccaagaagatcccccccggcctgttcagcggcgacatcgcccccctgatgcaggagaaggtgctgagcgccgtgacctacgccgtggacgacgaggaggccgccgaggtgaacgccaacgagcagcccgaggcccccaagctggtgctgcagagcctgttcagcctgatcagaggcgaggtggagcagctggacagcagagccctgcccctgtgcctgcaccagatcgccgagagctacttccaggaggaggactacgagaaggccatgaagttcatccagctggagagactgtaccacgagcagctgctggccaacctgagcgccatccaggagcagtgggagaccaagtggaagaccgtgcagccccacaccgtgaccgccctgagaaacagcgagaagggcttcaacggcgaggacttcgagagactgaccaagatctgcgccacccaccaggaccccctgctgagcaagcacaagatcgccgccgtggagaagagccaggagagaaagtgcagcacccagctgctggtgagcgaggaccccaaggagggcggcgccaccaccaaggagagcgagagcaagacctgcctgggcaccgagagcagcaaggagagccagcacaccgtggagcccctgggcagcagcccctgctgccaccagatggacgtgcagaccgacagccccagcctgagcgtgaccgccggcaaggaccacatggaggagctgctgtgcagcgccgaggccaccctggccctgcacacccagagcagcgagaccgccggcagccccagcggccccgacagcagcgaggacgcctgcgaggacgacagcagactgcagctggcccagaccgaggcctgccaggacgtggccagaatcgagggcatcgccgaggaccccaaggtgttcctgagcagcaagagcaagaccgagcccctgatcagccccggctgcgacagaatcccccccgccctgatcagcgagggcaagtacagccaggcccagagaaaggagctgagactgcccctgagagacgccagcgaggccctgcccaccgaccagctggagaacaacgagctgaacgagctgcagcagcccgacctgaccgacagcgacggcaagagcccccaggcccaggccgacagcgacggcagcgagaacgtgctgtgcggcaacaaccagatcagcgacctgggcatcctgctgcccgaggtgtgcatggcccccgaggagaagggcgacaaggacgaccagctgaacaaggagaccgaggactacctgaacagcctgctggagggctgcctgaaggacaccgaggacagcctgagctacgaggacaaccaggacgacgacagcgacctgctgcaggacctgagccccgaggaggccagctacagcctgcaggagaacctgcccagcgacgagagctgcctgagcctggacgacctggccaagagaatcgagatcgccgaggtggtgcccaccgagggcctggtgagcatcctgaagaagagaaacgacaccgtgggcgaccaccccgcccagatgcagcacaagcccagcaagagaagagtgagattccaggagatcgacgacagcctggaccaggacgaggtgggcggcggcagctgcatcctgctggtgctgctgtgcatcgccaccgtgttcctgagcgtgggcggcaccgccctgtactgcaccttcggcgacatggagagccccgtgtgcaccgacttcgccgacaacatggacttctactacaccaagctgctgcagggcgtggccgagctgaagcactggatctacctgagctag

SEQ ID NO: 244030 - protein, 623 aa, Artificial Sequence
  derived and/or modified sequence
MAGFSHFSQPPYRDLWEPPRPGGERESTQRLGGQRSGADSTACSRAGTPGAESEAGACWLHPHCSFTPRPRRRGCSDSLRGSRSLSDVARRPLERSRKHRPRSRRLEDAWGETGTKPRPAWQPQTQLPPQRPQPCPHYPLAQGDSPPPCPGGAGTPLSGTFRVEKAQGGDQWAVPLGRHLGRWSPSSVPSERSSVPSQKFKRHSACVCAQKRDSSDQVESLASRDSQPLASSKEMRSPHTQVLKSKLEEVVVSSQDQQIVALVLTRLKKAQRIRELQQQAAKAWEELKRSDQKVQMTLERERRLLLRQSQEQWQEKEQRKTLQSPEQRGLRRDSQRKNVPPGESRWKEQPEDQESPRQEKLEKARAQAEHRKQCQVRRLREQEKMLRNLREQHSLQLQRRLVEACRKRHLHAVEGQKKVQDTNLSSLINYQARKVLMDCQAKAEELLRQLSLEQSFQRSQEIHQGLRKERQRELREKAQKEEEQLQQARWRAGESEEQRKMRKRILVELADEKIRQARSHVHKTTRDKVQHLRELNHLREKNHHILKLKAEKEEKCHIEGIKEAIKKKEQRVQHISQGKDPNFQEFQKLPQASRREERAPPNSSLDQMVLEAQLRACQQNRGY

SEQ ID NO: 244031 - DNA, 90 bp, Artificial Sequence
  derived and/or modified sequence
aacatacgcaaatcaataaatgtaatccagcatataaacagaaccaaagacaaaaaccacatgattatctcaatagatgcagaaaaggcc

SEQ ID NO: 244032 - DNA, 75 bp, Artificial Sequence
  derived and/or modified sequence
aacataatccatcaaataaacagaaccaaagacaaaaaccacatgattatctcaatagatgcagaaaaggccttc

SEQ ID NO: 244033 - DNA, 93 bp, Artificial Sequence
  derived and/or modified sequence
aacatacgaaaatcaataaacgtaatccagcatataaacagaaccaaagacaaaaaccacatgattatctcaatagatgcagaaaaggccttt

SEQ ID NO: 244034 - DNA, 86 bp, Artificial Sequence
  derived and/or modified sequence
tacgcaaatcgataaatgtaatccagcatataaacagaaccaaagacaaaaaccacatgattatctcaatagatgcagaaaaggcc

SEQ ID NO: 244035 - DNA, 80 bp, Artificial Sequence
  derived and/or modified sequence
aatcagtaaacgtaatacagcatataaacagaaccaaagacaaaaaccacatgattatctcaatagatgcagaaaaggcc

SEQ ID NO: 244036 - DNA, 67 bp, Artificial Sequence
  derived and/or modified sequence
aatccagcatataaacagaaccaaagacaaaaaccacatgattatctcaatagatgcagaaaaggcc

SEQ ID NO: 244037 - DNA, 87 bp, Artificial Sequence
  derived and/or modified sequence
atacacaaatcaataaatgtaatccagcatataaacagaaccaaagacaaaaaccatatgattatctcaatggatgcagaaaaggcc

SEQ ID NO: 244038 - DNA, 2098 bp, Artificial Sequence
  derived and/or modified sequence
aggcgacccggacctcgggaccggggggcagggcgggtgtctgcagcgtcctcgggaggtctcaggccccttgggcagacgctgcgcgtgcccagagggagggatggcaggcttcagccacttctcccagccgccctaccgggatctctgggaacccccgcggcccggcggagaacgagagtccacgcagcggctgggcgggcagaggtccggagccgactccaccgcgtgctcccgggccgggactccgggtgcggagagcgaagctggggcgtgctggctgcacccgcactgttcgttcaccccgcggcctcgcaggcgcgggtgctcagattcactgcggggcagccgaagcctgagcgatgtggcccgcaggcccctggaacgttccaggaagcaccggccccgcagcaggcgcctggaagatgcctggggagagacaggaaccaagccccgcccggcttggcagccgcagacccagctgccaccccagcggccgcagccctgcccgcattaccctctggcccagggagactcgcccccgccttgccccggaggagctggcactcccctgagtggcacattcagggtagaaaaggcacagggtggagaccagtgggcagtgccactcggcagacatctaggtcgctggtccccttcctcagttccctcggagcggtcttctgtgccctcgcaaaagttcaagaggcactcagcctgcgtgtgcgcccagaagagagacagcagcgaccaggttgagtcattagccagccgggactcccagcccttggcctccagcaaagagatgcggagcccgcacacccaggtcctgaagagcaagctggaagaggtggtggtgtcctcccaggaccagcagattgtggccctggtgctgacccgtctcaagaaggcccagaggatacgggagctgcagcagcaggcggctaaggcctgggaggagctgaagcgctcggatcagaaggtccagatgaccctggagcgggagcgccggctgctgctgcggcagagccaggagcagtggcaggagaaggagcagcgcaagaccctccagagccctgagcagcgcggcctgcggcgggacagccagaggaagaacgtgcccccgggggaaagccggtggaaggagcaaccagaggaccaggagagcccgcgccaggagaagctggagaaggcgcgcgcccaggcagagcaccgaaaacagtgccaggtgcggcgcctgcgggagcaggagaagatgctacggaacctccgggagcagcacagcctgcagctgcagaggaggctggtggaagcctgtcgcaagaggcacctacatgccgtggagggccagaagaaggtccaggacaccaacctgagctccctcatcaattaccaggcccggaaggtcctcatggactgccaggccaaggctgaggagctccttaggcagctgtccctggaacaaagtttccagcggtcccaggagatacaccagggcctgaggaaggagcggcaacgcgagctgagggagaaggcccagaaggaggaagagcagttgcagcaggccaggtggcgcgcaggggagtcagaggaacagaggaagatgcgcaaaagaattctggtggagctggcggatgagaagatccgacaggccaggagtcacgtgcacaagaccactagggacaaggtgcagcacctccgggagctcaaccacctgagggagaaaaaccaccacatcctgaaactgaaagccgagaaggaggaaaagtgtcacattgagggcatcaaggaggccattaagaaaaaggagcagagggtgcagcacatttcccaagggaaagacccaaacttccaggagttccagaagctccctcaggcctccaggagagaggagagagcgcctcccaacagctcccttgatcagatggtactagaggcccagctccgtgcctgtcagcagaacaggggttactgagaaccaaggacgcctggcttacagtgcgcagccagaaggagatgtggcaatgtgattccttttgtaatctgattataattgaacattgattttaaaaaagcatgtaaaatagctgcaatttcc

SEQ ID NO: 244039 - DNA, 1872 bp, Artificial Sequence
  derived and/or modified sequence
atggccggcttcagccacttcagccagcccccctacagagacctgtgggagccccccagacccggcggcgagagagagagcacccagagactgggcggccagagaagcggcgccgacagcaccgcctgcagcagagccggcacccccggcgccgagagcgaggccggcgcctgctggctgcacccccactgcagcttcacccccagacccagaagaagaggctgcagcgacagcctgagaggcagcagaagcctgagcgacgtggccagaagacccctggagagaagcagaaagcacagacccagaagcagaagactggaggacgcctggggcgagaccggcaccaagcccagacccgcctggcagccccagacccagctgcccccccagagaccccagccctgcccccactaccccctggcccagggcgacagcccccccccctgccccggcggcgccggcacccccctgagcggcaccttcagagtggagaaggcccagggcggcgaccagtgggccgtgcccctgggcagacacctgggcagatggagccccagcagcgtgcccagcgagagaagcagcgtgcccagccagaagttcaagagacacagcgcctgcgtgtgcgcccagaagagagacagcagcgaccaggtggagagcctggccagcagagacagccagcccctggccagcagcaaggagatgagaagcccccacacccaggtgctgaagagcaagctggaggaggtggtggtgagcagccaggaccagcagatcgtggccctggtgctgaccagactgaagaaggcccagagaatcagagagctgcagcagcaggccgccaaggcctgggaggagctgaagagaagcgaccagaaggtgcagatgaccctggagagagagagaagactgctgctgagacagagccaggagcagtggcaggagaaggagcagagaaagaccctgcagagccccgagcagagaggcctgagaagagacagccagagaaagaacgtgccccccggcgagagcagatggaaggagcagcccgaggaccaggagagccccagacaggagaagctggagaaggccagagcccaggccgagcacagaaagcagtgccaggtgagaagactgagagagcaggagaagatgctgagaaacctgagagagcagcacagcctgcagctgcagagaagactggtggaggcctgcagaaagagacacctgcacgccgtggagggccagaagaaggtgcaggacaccaacctgagcagcctgatcaactaccaggccagaaaggtgctgatggactgccaggccaaggccgaggagctgctgagacagctgagcctggagcagagcttccagagaagccaggagatccaccagggcctgagaaaggagagacagagagagctgagagagaaggcccagaaggaggaggagcagctgcagcaggccagatggagagccggcgagagcgaggagcagagaaagatgagaaagagaatcctggtggagctggccgacgagaagatcagacaggccagaagccacgtgcacaagaccaccagagacaaggtgcagcacctgagagagctgaaccacctgagagagaagaaccaccacatcctgaagctgaaggccgagaaggaggagaagtgccacatcgagggcatcaaggaggccatcaagaagaaggagcagagagtgcagcacatcagccagggcaaggaccccaacttccaggagttccagaagctgccccaggccagcagaagagaggagagagccccccccaacagcagcctggaccagatggtgctggaggcccagctgagagcctgccagcagaacagaggctactag

SEQ ID NO: 244040 - DNA, 1872 bp, Artificial Sequence
  derived and/or modified sequence
atggcagggtttagtcacttttcccagcctccttaccgcgatctttgggagccccctcgtcccggaggagagagggaatcaacacagcgactggggggccaacggtccggcgctgactctaccgcgtgcagccgcgctggaacacctggagccgagagcgaagcaggggcctgctggctccatcctcactgctccttcacaccaaggccaaggagaaggggctgctccgattccctcaggggatccagaagcctgtccgacgtggctcggcgccctttagagagaagccggaagcacaggcctaggtccaggcgcctagaggacgcatggggggagacaggcaccaaacctagaccagcctggcagccccagacacagctgccaccccagcgtccacaaccttgtccacactatcctctagctcagggcgactctcctcctccatgcccagggggtgccggtacacccctgtcagggacattcagagttgagaaggcccagggaggggaccagtgggcagtgcccctggggaggcatctcgggaggtggtccccgtcatccgtcccctccgaacggtcttctgttcctagtcagaagttcaaaaggcacagcgcctgtgtgtgcgcccagaagagagactcatccgaccaggtggagtcactggcatccagagacagccagccactggccagctccaaagaaatgagatctccacatacccaagtgttgaaaagcaagcttgaagaggtcgtggtctcatcacaagatcagcaaatcgtggccctggtgttgacacggctgaagaaggctcagcgcatacgcgagctgcagcagcaggcagccaaagcctgggaggaactgaagcggtccgaccagaaggttcagatgacactggaaagggaaagacgtctgctgcttcgccagtctcaggagcaatggcaggagaaggagcaacggaagacgctacagtctcccgaacagcgcggcctgaggagggattcgcagaggaagaacgtgccaccgggcgaatcccgatggaaggaacagccggaagaccaggagagtccaagacaggagaaacttgagaaagcacgcgcccaggctgagcacagaaagcagtgccaggtgcgacggttgcgtgagcaagaaaagatgctccggaacctgagggaacagcactcattgcagctccagcgaaggctggtcgaagcttgccgcaagcgccatctgcatgcagttgagggacagaagaaggttcaggacacaaatctctccagcttgataaattaccaggccagaaaggtgctgatggactgccaggccaaggccgaggagctgctgcgccagctcagccttgagcagtctttccagcgatcccaggaaatccatcaggggctgcgaaaagagaggcaaagagagctccgcgagaaggcccagaaggaagaggagcaactccaacaagcacggtggcgcgctggagagagcgaggagcagaggaaaatgaggaagagaatcctggtagagctcgccgacgagaagatcaggcaggcaaggagccatgtgcacaagaccacgagggacaaagtgcagcacctccgggagctaaaccacctgcgcgaaaaaaatcatcatatactcaaactcaaagcagaaaaagaagaaaagtgtcatatcgagggaattaaagaagccattaaaaagaaagagcagagggtgcagcacatttcacaggggaaagatccaaatttccaggaatttcagaagctgccccaggcgtcccggcgagaagagcgagccccaccgaactccagtctggaccaaatggtcctggaggcgcaactgagggcctgccaacagaatagggggtactag

SEQ ID NO: 244041 - DNA, 1872 bp, Artificial Sequence
  derived and/or modified sequence
atggccggcttcagccacttcagccagcccccctacagagacctgtgggagccccccaggcctggaggagagcgggagagcacccagaggctgggcggccagaggtctggagctgacagcacagcctgcagccgggccggcaccccaggagctgagagcgaggccggggcctgctggctgcacccccactgcagcttcaccccccggccccggcggcggggctgcagcgacagcctgcggggcagccgcagcctgagtgatgtggcccggcggcccctggagaggagcaggaagcaccggcccaggagccggcggctggaggatgcctggggcgagaccggcaccaagcccaggcctgcctggcagccccagacccagctgcccccccagaggccccagccctgcccccactaccccctggcccagggcgacagccccccaccctgccctgggggcgccggcacccccctgagcggcaccttccgggtggagaaggcccagggcggggaccagtgggccgtgcccctgggccgccacctgggccgctggagccccagctctgtgcccagcgagaggagctctgtgcccagccagaagttcaagaggcacagcgcctgtgtgtgtgcccagaagagggacagcagtgaccaggtggagagcctggccagccgggacagccagcccctggccagcagcaaggagatgaggagcccccacacccaggtgctgaagagcaagctggaggaggtggtggtgagcagccaggaccagcagatcgtggccctggtgctgacccggctgaagaaggcccagaggatccgggagctgcagcagcaggccgccaaggcctgggaggagctgaagagaagtgaccagaaggtgcagatgaccctggagcgggagcggcggctgctgctgcggcagagccaggagcagtggcaggagaaggagcagaggaagaccctgcagagccctgagcagaggggcctgcggcgggacagccagaggaagaatgtgcccccaggagagagccgctggaaggagcagcctgaggaccaggagagcccccggcaggagaagctggagaaggcccgggcccaggccgagcacaggaagcagtgccaggtgcggcggctgcgggagcaggagaagatgctgaggaacctgcgggagcagcacagcctgcagctgcagaggcggctggtggaggcctgcaggaagaggcacctgcatgctgtggagggccagaagaaggtgcaggacaccaacctgagcagcctcatcaactaccaggccaggaaggtgctgatggactgccaggccaaggccgaggagctgctgcggcagctgagcctggagcagagcttccagaggagccaggagatccaccagggcctgaggaaggagcggcagcgggagctgcgggagaaggcccagaaggaggaggagcagctgcagcaggcccgctggagggctggggagagcgaggagcagaggaagatgaggaagaggatcctggtggagctggctgatgagaagatccggcaggcccggagccacgtgcacaagaccacccgggacaaggtgcagcacctgcgggagctgaaccacctgcgggagaagaaccaccacatcctgaagctgaaggccgagaaggaggagaagtgccacatcgagggcatcaaggaggccatcaagaagaaggagcagagggtgcagcacatcagccagggcaaggaccccaacttccaggagttccagaagctgccccaggccagccggcgggaggagcgggccccacccaacagcagcctggaccagatggtgctggaggcccagctgcgggcctgccagcagaacagaggctactag

SEQ ID NO: 244042 - DNA, 1872 bp, Artificial Sequence
  derived and/or modified sequence
atggccggcttcagccacttcagccagcccccctaccgggacctgtgggaacccccgcgccccggcggagagcgagagtcgacgcagcgcctcggtggacagagaagcggggcagacagtactgcctgctctcgtgcagggacacctggtgcagaatccgaggccggagcgtgttggctgcaccctcattgttctttcacgccgcgacctaggagaaggggctgcagtgatagtctgcgggggtccagatcgctgtcagacgtcgctcgccgtcctcttgagcgatcaaggaaacaccgcccaagatcacgccggctggaagacgcctggggagagacaggcacaaaaccacgcccagcctggcagccccagactcagttacccccacagagaccccagccatgcccccattatcctctggcccagggtgattcgccgcctccctgcccaggcggggctggtacacctctgagcggaactttcagagtcgagaaagcccagggcggcgaccagtgggcggttccattaggacgccaccttggccggtggagtccatccagcgtgcctagtgagcggtcttcagtgccgtctcagaagttcaaacgccatagcgcctgtgtgtgcgcgcagaaacgcgacagttcagaccaagtagagtctctagcttcccgcgactcccagcccctcgcctctagtaaggaaatgcggtctccacacacacaggttctgaagtctaaactggaagaggtagttgtctcttcacaggatcagcagatcgttgctctcgtgttgactaggctaaagaaggcacagagaatacgggaattgcaacagcaggccgccaaagcctgggaggagttaaaacggagcgatcagaaggtgcaaatgaccctggaaagagagcggcggttgctcctgcgccagtcacaggagcagtggcaggagaaagaacagcgaaaaacactccaatccccggaacaacgaggcttgcgcagggattcacaacgaaagaatgtacctcccggcgagagcagatggaaagaacagccagaagatcaggagtccccccgtcaggagaagctggagaaggctcgcgctcaggcagaacatcggaagcaatgccaggtgcgccgcctccgcgagcaggagaagatgctaagaaaccttcgggagcagcatagtctgcagctgcagcgcagattggtggaagcctgcaggaagaggcatcttcacgcagtggaagggcagaagaaggtccaggatacaaacttatccagtctcattaattatcaggcgcggaaagtgctcatggattgccaggctaaggcagaagagctcctgaggcaactttccctcgagcagagttttcaaagatcccaggaaatacatcaaggactgaggaaggagcgccagcgtgaactacgagaaaaagcccaaaaagaggaagagcaactgcaacaggccagatggcgggctggcgagtcagaagagcaacggaaaatgcggaagcgaatccttgtggagcttgccgacgagaagatcagacaagcgcgaagccatgtgcacaagacaaccagggacaaagtccagcacctgcgagagctgaatcacttaagggagaagaatcatcatatcctgaagctcaaggcggaaaaagaggagaaatgtcacatcgaaggtatcaaagaggccataaagaaaaaagagcagagagttcaacacataagccagggcaaagaccctaacttccaggaatttcagaagttaccgcaggcatctcgcagagaggaaagagcacctccaaattccagccttgatcagatggttttggaggctcagcttcgcgcttgccagcagaacaggggctattag

SEQ ID NO: 244043 - DNA, 1872 bp, Artificial Sequence
  derived and/or modified sequence
atggccggttttagtcactttagccagcccccttatcgcgacttgtgggaaccccctcgtcctggtggggaaagagaatccacacaacgccttggtggccagagaagcggggctgactcaacggcatgtagcagggccggtacccctggagccgaaagtgaggctggtgcgtgttggctccatccccactgttcctttactccgaggccccgtcgaagaggatgtagtgattcactcaggggatctcggagcctgagcgacgtcgcccgtcgacctcttgagcgctcaaggaagcacaggccaaggtcaaggagactggaggatgcatggggcgagacagggactaaacctcggccagcatggcagccgcaaactcagctgccaccccagcgtccccagccctgcccacactatcctctggctcagggcgattcgcctcccccatgtcctgggggagccggaacgcctctcagcggcacctttagagtagagaaagcgcaggggggtgatcagtgggccgtgcccctgggtcggcacttgggtcggtggagcccaagcagcgtccccagtgagagatccagcgtgccctcacagaaattcaaaaggcacagcgcctgtgtatgcgcccagaaaagagactcgagcgatcaagtcgagtcgctggctagcagggattcccagccactggcatcaagtaaggagatgagatcccctcatactcaagtgttgaaaagcaaactagaggaggtagtggtttcttctcaggatcagcagatcgttgctcttgtgctcactcgcctgaagaaggcgcagcgaattcgagagttgcagcaacaggctgctaaggcgtgggaggagctgaagcgcagcgaccaaaaagtacagatgactctggaacgcgagcgcagattgctgttgagacagtctcaagagcagtggcaggaaaaggaacagagaaaaaccctgcagtcccctgagcagcgcggactcaggagggactcccaaagaaagaatgtgccgccaggagagtctcggtggaaagagcaacccgaggatcaagaatcgcctagacaagagaagctggagaaggcgagggcacaggcggagcaccggaagcagtgtcaagtcaggaggctgcgggaacaggagaagatgctgaggaacctgagagaacaacattccctgcaacttcagcggaggcttgtggaggcctgccgcaaaagacatcttcacgctgtggaaggacagaagaaggtgcaagacaccaacctatcaagtctcataaactaccaggcccgaaaggttttgatggactgccaggccaaagccgaagaactgctgaggcagctgagtctggaacagagcttccagcgctcacaagagatccaccagggcctgcgaaaagagaggcagagagagcttcgggagaaagcacagaaagaggaggagcagttacagcaggccagatggcgcgcaggagagtcggaggaacaacgcaaaatgaggaagcgtattctggtagaactggcggacgagaaaatccgccaggctcggagtcatgtgcataaaacgacaagagataaggttcaacatctccgcgagctcaatcatctcagagagaaaaaccatcatatcctgaagctgaaggcggaaaaagaagagaagtgtcacattgagggaatcaaggaggccatcaaaaaaaaggaacagcgtgtccagcacatcagtcagggcaaggatccaaattttcaggaatttcaaaaactcccacaggctagcaggagggaggagagggctcccccaaacagcagcctggatcagatggtgctggaagcacagctccgggcttgtcaacaaaatcgagggtactag

SEQ ID NO: 244044 - protein, 740 aa, Artificial Sequence
  derived and/or modified sequence
MRQTLPLLLLTVLRPSWADPPQEKVPLFRVTQQGPWGSSGSNATDSPCEGLPAADATALTLANRNLERLPGCLPRTLRSLDASHNLLRALSTSELGHLEQLQVLTLRHNRIAALRWGPGGPAGLHTLDLSYNQLAALPPCTGPALSSLRALALAGNPLRALQPRAFACFPALQLLNLSCTALGRGAQGGIAEAAFAGEDGAPLVTLEVLDLSGTFLERVESGWIRDLPKLTSLYLRKMPRLTTLEGDIFKMTPNLQQLDCQDSPALASVATHIFQDTPHLQVLLFQNCNLSSFPPWTLDSSQVLSINLFGNPLTCSCDLSWLLTDAKRTVLSRAADTMCAPAAGSSGPFSASLSLSQLPGVCQSDQSTTLGASHPPCFNRSTYAQGTTVAPSAAPATRPAGDQQSVSKAPNVGSRTIAAWPHSDAREGTAPSTTNSVAGHSNSSVFPRAASTTRTQHRGEHAPELVLEPDISAASTPLASKLLGPFPTSWDRSISSPQPGQRTHATPQAPNPSLSEGEIPVLLLDDYSEEEEGRKEEVGTPHQDVPCDYHPCKHLQTPCAELQRRWRCRCPGLSGEDTIPDPPRLQGVTETTDTSALVHWCAPNSVVHGYQIRYSAEGWAGNQSVVGVIYATARQHPLYGLSPGTTYRVCVLAANRAGLSQPRSSGWRSPCAAFTTKPSFALLLSGLCAASGLLLASTVVLSACLCRRGQTLGLQRCDTHLVAYKNPAFDDYPLGLQTVS

SEQ ID NO: 244045 - DNA, 2223 bp, Artificial Sequence
  derived and/or modified sequence
atgagacagaccctgcccctgctgctgctgaccgtgctgagacccagctgggccgaccccccccaggagaaggtgcccctgttcagagtgacccagcagggcccctggggcagcagcggcagcaacgccaccgacagcccctgcgagggcctgcccgccgccgacgccaccgccctgaccctggccaacagaaacctggagagactgcccggctgcctgcccagaaccctgagaagcctggacgccagccacaacctgctgagagccctgagcaccagcgagctgggccacctggagcagctgcaggtgctgaccctgagacacaacagaatcgccgccctgagatggggccccggcggccccgccggcctgcacaccctggacctgagctacaaccagctggccgccctgcccccctgcaccggccccgccctgagcagcctgagagccctggccctggccggcaaccccctgagagccctgcagcccagagccttcgcctgcttccccgccctgcagctgctgaacctgagctgcaccgccctgggcagaggcgcccagggcggcatcgccgaggccgccttcgccggcgaggacggcgcccccctggtgaccctggaggtgctggacctgagcggcaccttcctggagagagtggagagcggctggatcagagacctgcccaagctgaccagcctgtacctgagaaagatgcccagactgaccaccctggagggcgacatcttcaagatgacccccaacctgcagcagctggactgccaggacagccccgccctggccagcgtggccacccacatcttccaggacaccccccacctgcaggtgctgctgttccagaactgcaacctgagcagcttccccccctggaccctggacagcagccaggtgctgagcatcaacctgttcggcaaccccctgacctgcagctgcgacctgagctggctgctgaccgacgccaagagaaccgtgctgagcagagccgccgacaccatgtgcgcccccgccgccggcagcagcggccccttcagcgccagcctgagcctgagccagctgcccggcgtgtgccagagcgaccagagcaccaccctgggcgccagccaccccccctgcttcaacagaagcacctacgcccagggcaccaccgtggcccccagcgccgcccccgccaccagacccgccggcgaccagcagagcgtgagcaaggcccccaacgtgggcagcagaaccatcgccgcctggccccacagcgacgccagagagggcaccgcccccagcaccaccaacagcgtggccggccacagcaacagcagcgtgttccccagagccgccagcaccaccagaacccagcacagaggcgagcacgcccccgagctggtgctggagcccgacatcagcgccgccagcacccccctggccagcaagctgctgggccccttccccaccagctgggacagaagcatcagcagcccccagcccggccagagaacccacgccaccccccaggcccccaaccccagcctgagcgagggcgagatccccgtgctgctgctggacgactacagcgaggaggaggagggcagaaaggaggaggtgggcaccccccaccaggacgtgccctgcgactaccacccctgcaagcacctgcagaccccctgcgccgagctgcagagaagatggagatgcagatgccccggcctgagcggcgaggacaccatccccgacccccccagactgcagggcgtgaccgagaccaccgacaccagcgccctggtgcactggtgcgcccccaacagcgtggtgcacggctaccagatcagatacagcgccgagggctgggccggcaaccagagcgtggtgggcgtgatctacgccaccgccagacagcaccccctgtacggcctgagccccggcaccacctacagagtgtgcgtgctggccgccaacagagccggcctgagccagcccagaagcagcggctggagaagcccctgcgccgccttcaccaccaagcccagcttcgccctgctgctgagcggcctgtgcgccgccagcggcctgctgctggccagcaccgtggtgctgagcgcctgcctgtgcagaagaggccagaccctgggcctgcagagatgcgacacccacctggtggcctacaagaaccccgccttcgacgactaccccctgggcctgcagaccgtgagctag

SEQ ID NO: 244046 - DNA, 2223 bp, Artificial Sequence
  derived and/or modified sequence
atgagacaaactctgcctcttctgcttttaacagttcttagacctagttgggccgatccccctcaggagaaggttcccctgtttcgagtgacccagcaaggtccgtggggctcctcggggtctaatgcaaccgactctccctgtgaaggcttaccagccgccgatgccactgccttgacacttgccaatagaaaccttgaacgcctgcccgggtgtctcccacgcaccctccggagtttggatgcctcacacaatcttctgagggccctcagcacctctgaactgggtcacctcgagcagttgcaggtgttgaccttgagacataaccgcattgctgctctacggtgggggccgggcgggcccgccggcttacacaccctggatctatcttacaaccagttggctgcccttcccccctgcaccggtccggctctgagttctctgcgggctctggcactcgcagggaacccactgcgagcgctacaaccacgggcgtttgcgtgttttccagccctccagctactgaatttatcctgcaccgcactggggcgcggcgctcagggtggcatcgctgaagcagcttttgctggcgaagatggtgcccctctggttaccctcgaggttctcgatctgagcgggactttcctggaacgtgtcgaatccggttggatcagggacctgccaaaattaacctctctatacttacgcaaaatgcccagactcactacactggaaggggacatctttaagatgacccccaatctgcagcagctggactgtcaggacagccctgcgctcgcttctgtcgccacccatatatttcaggacacgcctcatctgcaagttctcctatttcagaattgcaatctctccagctttcccccatggacgctcgatagcagtcaagtgctgtccattaacctgttcggaaaccctctcacgtgtagctgcgatctatcctggctactcacagacgcgaaacgtaccgtgctatctcgagctgctgacacgatgtgcgccccagctgccggctctagcggcccttttagtgccagcctctcactgtctcaactgccaggcgtgtgtcagagcgaccagagtacaaccctcggggcctcccaccctccgtgcttcaatagatctacatatgcgcaggggaccaccgtcgctcctagcgccgcccccgcaacaagacccgccggggatcaacagagcgtatctaaggcccctaatgttgggagccggactatcgctgcctggccccattctgatgcgagagagggcacagccccatcaaccaccaattctgtcgcaggccacagtaactcatcggtcttccccagggctgccagtactacacgcactcaacatcggggtgaacatgctccagagctggtcctcgaacccgacatttccgccgccagtacgcctctggccagcaaattactcggcccttttcctacctcatgggatcggagcatcagcagcccccagccgggccagcggactcatgccacccctcaggcccccaacccctccttgtctgagggtgagatcccagtcctgttgctggatgattattccgaggaagaggagggacgcaaggaggaggtcgggacaccacaccaggatgtgccgtgcgattaccacccatgtaagcatctccaaaccccttgcgccgagttgcagagaagatggcgctgtcgttgcccaggcttatcaggagaggatactattcctgacccaccccggctacagggtgtcacagagacaaccgataccagcgctttggtccattggtgcgcccctaactcggttgtgcatgggtatcagatccgttattctgcagaaggatgggcagggaatcagagtgttgtgggcgtaatttacgccaccgccaggcagcatccattatatggactgagcccgggcacaacatacagggtatgtgttttggctgccaacagagccggtctgtcccaaccacgctcaagtggctggagatcaccctgcgctgcctttaccaccaaaccatcttttgctttgcttttgagtggactttgcgcagccagcgggcttctattggcaagcaccgttgttctttctgcctgtctttgtaggcggggacagaccctaggcctgcagcgttgcgatactcacttggtggcatacaaaaatccggccttcgacgactacccgctgggcctgcagaccgtaagctag

SEQ ID NO: 244047 - DNA, 2692 bp, Artificial Sequence
  derived and/or modified sequence
cgtcttgatgggaaaggaggagcaatgggaaagactggagtatctcagtccctctcagtggatgggggttgtgggagagaggcagctgggagacaggcctccctctggagttcatagctgagttgctgtccaaatcagtggtccctagaatctataaaacaaagctgagaacttcagaggtgcatccagagaagccacactccaaaaggaccacttccagacgccatgcggcaaaccctaccgctgctgctgctgacggtgctgcgccccagctgggcagaccctccccaggagaaggtcccgctcttccgggtcactcagcagggcccctgggggagcagtggcagcaacgccaccgactcgccctgcgaggggctgcccgccgcggatgcgacggccttgaccctggcgaaccgcaacctggagcgcctgcccggctgcctaccgcgcacactgcgcagcctcgacgccagccacaacctgctgcgcgccctgagcacttccgagctcggccacctggagcagctgcaggtgctgaccctgcgccacaaccgcatcgccgcgctgcgctggggcccgggtgggccggcggggctgcacaccctggacctcagctacaaccagctggccgctctgccgccgtgcaccgggcccgcgctgagcagcctccgcgccctggcgctcgccgggaatccgctgcgggcgctgcagccccgggccttcgcctgcttccccgcgctgcagctcctcaacctctcctgcaccgcgctgggtcgcggagcccaggggggcatcgccgaggcggcgttcgctggagaggatggcgcgcccctggtcacgctcgaagtcctggatctcagcggcacgttccttgaacgggttgagtcagggtggatcagagacctgccgaagctcacatccctctacctgaggaagatgcctcggctgacgaccctggagggggacattttcaagatgacccccaacctgcagcagctggactgtcaggactccccagcacttgcttctgtcgccacacacatctttcaagatactccacatctacaggtccttctgttccagaactgcaacttgagttccttccctccttggaccctggattcctcccaggtcctatcgatcaacctctttggcaaccccctcacttgcagttgtgacttgtcttggctcctcacggatgcaaagagaactgtcctaagcagggcagcagacactatgtgcgcgccagctgcgggatccagcggccccttctcagcctccctgtcactctcccagctgcccggagtgtgccagtccgaccaaagcaccactctcggggcttcacacccaccttgcttcaaccgctccacctacgcacagggtaccaccgtcgcgcccagcgcagcccccgccacccggcctgcgggagaccagcagagtgtctccaaggcccctaacgtgggctctcgcacgatagctgcatggccgcacagcgatgcacgggaggggactgccccctccacgaccaactctgtagcaggtcacagcaactccagcgttttccccagggctgccagcaccaccaggacccagcaccgaggagaacatgcccccgagcttgtccttgagcctgatatctcagctgcctccaccccactggccagcaagctcctgggccccttccctacctcgtgggaccgcagcataagctcgcctcagcccggccagaggacacacgccacaccccaagcccccaacccgagtctttccgagggcgagattccagtcttgctgctggacgactacagtgaggaggaggaagggaggaaggaggaggtgggaacgcctcaccaggacgtcccctgtgattaccatccctgcaagcacctgcagaccccgtgcgcggagctgcagaggcggtggcggtgccggtgccccggcctcagcggggaagacaccatcccagacccgcccaggctgcagggggtgacggagaccacggacacgtcggcgctggtccactggtgtgcccccaactcggtagtgcatgggtaccagatccgctactctgcggagggctgggcggggaaccagtcggtggtgggggtcatctacgccacggcccggcagcaccctctgtacgggctgtcgccgggcaccacctaccgcgtgtgcgtgctggcggccaacagggcgggcttgagccagccacggtcttcgggctggaggagcccgtgcgccgccttcaccaccaagcccagcttcgcgctcctgctctctgggctgtgcgccgccagcggcctgttgctcgccagcaccgtggtgctgtccgcatgtctctgcaggcggggccagacgctgggcctgcagcgctgcgacacgcacctggtggcctacaaaaacccggcctttgatgattacccgctggggctccagaccgtcagttagcccagcttctgggataacgcgtctcatcgaactggatctgagcgcaaaaaggaagacacagacggtcaaaaacgaccccatccgctcctagggtttctaattcccgtgaagccagaatgccttgagcacacatggaacttgccacactgagtgtctgggtccaaggaactgctgccctcccttccttctacttaactctgttcccagaaacctgatggtcaatgccagatcgctccccactgcc

SEQ ID NO: 244048 - DNA, 2223 bp, Artificial Sequence
  derived and/or modified sequence
atgaggcagaccctgcccctgctgctgctgactgtgctgcggcccagctgggccgaccccccccaggagaaggtgcccctcttccgggtgacccagcagggcccctggggcagcagcggcagcaatgccacagacagcccctgtgagggcctgcctgctgctgatgccacagccctgaccctggccaacagaaacctggagcggctgcccggctgcctgcccaggaccctgcggagcctggatgccagccacaacctgctgcgggccctgagcaccagcgagctgggccacctggagcagctgcaggtgctgaccctgcggcacaacagaattgctgccctgcgctggggccctgggggccctgctggcctgcacaccctggacctgagctacaaccagctggccgccctgcccccctgcaccggccctgccctgagcagcctgcgggccctggccctggccggcaaccccctgcgggccctgcagccccgggcctttgcctgcttccctgccctgcagctgctgaacctgagctgcacagccctgggccgcggggcccagggcggcattgctgaggccgcctttgctggggaggatggagcccccctggtgaccctggaggtgctggacctgagcggcaccttcctggagcgggtggagagcggctggatccgggacctgcccaagctgaccagcctgtacctgaggaagatgccccggctgaccaccctggagggggacatcttcaagatgacccccaacctgcagcagctggactgccaggacagccctgccctggcctctgtggccacccacatcttccaggacaccccccacctgcaggtgctgctcttccagaactgcaacctgagcagcttccccccctggaccctggacagcagccaggtgctgagcatcaacctgtttggaaaccccctgacctgcagctgtgacctgtcctggctgctgacagatgccaagaggacagtgctgagcagagctgctgacaccatgtgtgccccagctgctggcagcagcggccccttcagcgccagcctgagcctgagccagctgcccggggtgtgccagagcgaccagagcaccaccctgggcgccagccaccccccctgcttcaacagaagcacctacgcccagggcaccaccgtggcccccagcgctgccccagccaccaggcctgctggggaccagcagagcgtgtccaaggccccaaatgtgggcagcaggaccatcgccgcctggccccacagtgatgcccgggagggcacagcccccagcaccaccaacagcgtggccggccacagcaacagcagcgtcttccccagggctgccagcaccaccaggacccagcacagaggagaacatgcccctgagctggtgctggagccagacatctctgctgccagcacccccctggccagcaagctgctgggccccttccccacctcctgggacaggagcatcagcagcccccagcccggccagaggacccacgccaccccccaggcccccaaccccagcctgtctgagggggagatccctgtgctgctgctggatgactacagcgaggaggaggagggcaggaaggaggaggtgggcaccccccaccaggatgtgccctgtgactaccacccctgcaagcacctgcagaccccctgtgccgagctgcagaggcgctggcgctgccgctgccccggcctgagcggggaggacaccatcccagaccccccccggctgcagggcgtgacagagaccacagacaccagcgccctggtgcactggtgtgcccccaacagcgtggtgcacggctaccagatccgctacagcgctgagggctgggccggcaaccagagcgtggtgggcgtcatctatgccacagcccggcagcaccccctgtatggcctgagccctggcaccacctacagagtgtgtgtgctggccgccaacagagctggcctgagccagcccaggagcagcggctggaggagcccctgtgccgccttcaccaccaagcccagctttgccctgctgctgagcggcctgtgtgccgccagcggcctgctgctggccagcacagtggtgctgagcgcctgcctgtgcagaagaggccagaccctgggcctgcagagatgtgacacccacctggtggcctacaagaacccagcctttgatgactaccccctgggcctgcagacagtgtcctag

SEQ ID NO: 244049 - DNA, 2223 bp, Artificial Sequence
  derived and/or modified sequence
atgcggcagaccctgcccctgctgctgctgaccgtgctgcggcccagttgggcagacccaccccaagaaaaggtgcctctgttcagagtaactcagcaggggccctggggatcttccgggtccaacgccaccgattctccctgcgaaggactgccggccgcagacgcaacagcactgaccctggccaacagaaacttggaacgcctccctggctgtctgccaaggactcttcggagcctggacgccagccataatttgctgcgggccctatccaccagcgagctgggccacctagaacagctccaggtccttaccctccgtcataatcggatcgcagcccttcggtggggccctggtggtcccgccgggcttcacactcttgacctgagctacaaccaactggcagctctgccaccctgtacaggtccagcgctttcctctctgcgcgcgctggccctggctggaaatcctctgcgtgctttgcagcctagagcatttgcctgctttccagccttacagcttctcaacttgagctgcacagccctgggtagaggggcacagggggggattgcagaagccgcttttgcaggtgaggatggggcccccctcgttactctggaggttttagaccttagcgggactttcctggagagggtggagtctgggtggatcagagatttgcctaagctgacatctttgtacctccggaaaatgccacgcctgactactctggagggagatatatttaaaatgacgcctaaccttcaacagctagattgccaggacagtccagcactcgcctctgtagcgactcacatcttccaagacacaccacaccttcaggtcttgctgttccagaactgcaacctaagtagcttcccaccatggacactagacagctcccaagtcctgagcattaaccttttcgggaatcctctcacttgtagctgcgatctgagttggttgctcaccgacgccaagcggactgttctgtcccgggctgctgacaccatgtgtgccccagccgctggctcctccggccctttttccgcctccctgtccttgagccagctacctggggtgtgccagtctgaccagagcactacactcggcgcctctcaccctccttgttttaaccgctccacatacgcacagggcaccacggtggcccccagcgctgctcccgctacccgacccgccggtgaccagcagtccgtctctaaggcgccaaatgttggatcgagaaccatcgccgcttggcctcattctgacgcgagagagggcaccgctccatcaactacgaactccgtagctggtcactcaaactctagtgtgtttccccgggcagccagcaccacaaggacccagcacaggggcgaacatgcccctgagcttgtgctggagccggatatcagcgctgccagcactcctctggcctccaagctcctgggtcccttccctacttcgtgggaccggagcatttcttctccacagccagggcagagaacgcacgccacacctcaggcaccaaacccttccttgagcgaaggagaaattcctgttctgctgttggatgactacagcgaggaggaagaaggacgtaaggaggaggtgggcacaccacatcaggacgtcccttgtgattatcacccatgtaaacacctgcaaaccccatgcgcagagctccaacgtcgctggcgttgccgatgcccagggcttagcggcgaagacacaattcccgaccctccccgattacagggcgtcacagagaccactgacacatctgctctcgtacactggtgcgcccctaatagcgtggtacacgggtatcagatacggtactcggctgaagggtgggctggtaatcaaagtgtggtgggggtgatttacgccactgcaaggcagcaccctctctatggcttaagccctggcactacatacagagtctgtgtgctggcagcgaatcgcgccggtctcagtcagccgcggtcttctggttggcgctctccgtgcgctgctttcacaacaaaacccagctttgcacttcttctctcagggctctgtgcagcatctgggttgctgctggcttctaccgttgtgctttctgcatgtctctgcaggagaggtcagacactagggcttcagcggtgcgacacacatcttgtggcctacaaaaacccagcctttgatgattatcccctgggtcttcagaccgtttcctag

SEQ ID NO: 244050 - DNA, 2223 bp, Artificial Sequence
  derived and/or modified sequence
atgcgacagacattacctttgctgctgctcacggtgctccgcccatcctgggccgacccaccacaagaaaaggtacccctgtttcgagttacacagcaagggccatggggatcatccggatcaaacgcaacagattccccctgcgagggcctgcccgctgctgatgccactgcactaacattggcgaaccgtaatctggagcgactgcctggctgcctcccccgaaccctgcgtagcttggacgcctcccacaatctgcttcgtgctttgtcaacatctgagctcggtcatcttgaacagcttcaggtcctcaccttaaggcacaacagaatcgcagcactgagatgggggcctggcggaccagctggcttgcatacattggatctgagttacaaccaactcgctgccttgcccccatgcacagggccagctctctcatctttgcgagccttggcgctggcaggaaatccactccgggctctccagccccgagctttcgcctgtttcccagccctccaactgctgaacttaagctgcacagctctcggaaggggagctcaaggagggatagccgaagccgcatttgcaggcgaggacggcgcaccactggttacactggaggtgctggatctgagcggcacattcttggaacgagtcgaatcaggttggattagagacctacccaagttgaccagcctatatctgcggaagatgccgaggctgactacactggagggcgacatttttaaaatgacacctaacctccagcagctggattgtcaagacagtcctgctctggcatctgtggcaactcatattttccaggatactccacacttgcaggtgcttctgtttcaaaattgtaacctctcatccttccctccttggacactagactcctcccaggtcctctctatcaacttgtttggcaacccgttgacctgcagttgtgatctgtcctggttgctaaccgatgccaaacggacagtcttgtcacgcgcagcggacactatgtgcgcgccagctgccggaagtagcggcccattctctgcttctctatctctatcccagctaccaggggtctgtcagagcgaccagagtacgactttgggtgctagtcaccctccttgtttcaacagatctacatacgcccagggaacaactgtggcaccttctgccgctcccgctactcggccagcgggagatcaacagtcagtctccaaagcaccaaacgtgggttctagaactatagcagcgtggccacacagcgacgccagggagggaacagcaccatcgacgactaactctgtcgcgggacactccaatagtagcgtttttcccagagcagcatctaccacccggacccaacacaggggggagcatgcccctgaactggtattggagccagatatctctgccgcttcaacccctttggcatccaaactgctgggaccctttccaacaagctgggataggtcaatcagctccccccagcctggccagcgcacccatgccacacctcaagcgccaaatccttcactgtccgaaggagaaatacccgtgctgctgctggatgactacagcgaggaggaggaaggtaggaaggaggaagtagggacaccacatcaggacgtgccttgcgactatcacccctgtaagcatttgcagacaccatgcgcagagctgcaacggcgttggcgctgtaggtgccccggattgtcaggggaggacacaattccggaccctccccgattgcaaggggttacggagactacggatacgtcagcactggtccactggtgtgctccaaatagcgtagtgcatgggtatcagattcgatacagtgcagaggggtgggctgggaatcagtccgtcgttggagtcatctatgccaccgcccgacagcatcccctatacggcctgagccccggtactacctatcgagtgtgtgtcctcgctgccaatagagctgggctaagccagccccgttcttccgggtggcgcagcccctgcgctgcatttacaaccaaaccatcattcgcactcctgttatcaggcttatgtgcagcatctgggctgctcttggcaagtaccgtggttcttagcgcctgtctctgtcggcgaggtcagacactcgggttgcagcgatgcgatacccacttggtcgcttataagaaccccgcattcgatgactatccgctgggattgcagacagtctcgtag

SEQ ID NO: 244051 - protein, 395 aa, Artificial Sequence
  derived and/or modified sequence
MALPGYPLGNVDDSRSKDSPAGEPQGQVPLTADVLAVSSSVASTDWQDIDQASFKTATPRAISTSGDKDKSAVVPEHGQKTPRKITPLLPSQNPSPLQVSMSLQNPAWDRQVQDARTSQSLVVFPSHLLGKDKMSQMASVPEREPESAPSAPSAELQSTQHMEAQPVESDADHVTAGANGQHGPQAASTTKSAEEKAEHPKAPHPEAEALPSDESPVAMGANVVDSLGDLQTWFFPPPPAGSVSPSPGPHEVALGRRPLDSSLYTASEENSYMRSMTSLLDRGEGSISSLADILVWSETTMGMAIATGFLDSGHSTVADLLHSSGPSLRSVPSLVGSVSSAFSSGLVSGTSSALRTITRVLETVEQRTVEGIRSAMRYLTSHLTPRQAQADPNYD

SEQ ID NO: 244052 - DNA, 1420 bp, Artificial Sequence
  derived and/or modified sequence
actccctccaaccgccacaagcagcaaagggcatagatgaccacaggagagccctagggggaggccggctccaccagcagccccatacatggcactcccagggtaccccctgggcaacgtggatgacagcaggtctaaggacagcccagcaggagagccccaaggtcaggtcccactcacagcagatgtcttggcagtgagcagctctgtcgcatccactgactggcaggatatagatcaggcctccttcaagacggccacccccagggccatatcaacatctggagacaaagacaagagtgcagttgttccagaacacggccagaagacacccagaaaaatcacacctctgcttcccagccaaaatccaagtcccctgcaagtgtctatgagccttcagaatccagcgtgggacaggcaggttcaagacgcaaggacaagtcagagtctagtggttttcccaagtcacctcctgggtaaagacaagatgtcacaaatggcgagtgttcctgagagagagccggagtcagccccctctgccccgagtgctgagctacagtccacccagcacatggaggctcagcccgtcgagagtgatgctgaccatgtcacagcaggtgccaatggccagcatggccctcaggctgccagcaccaccaagtctgctgaggagaaagctgagcatccaaaggccccacaccctgaagctgaagctttaccatctgatgagtccccagtggcaatgggggcaaatgtggtggacagcttaggagacctgcagacttggttcttccctccacctccagcaggcagtgtgtccccgtcgcctggcccccacgaggtggccctggggagaaggcccctggactccagcctgtacacggccagtgaggagaacagctacatgcgctccatgaccagcctgctggacaggggcgagggctccatcagctccctggcagacatcctggtgtggtccgagaccaccatgggcatggccatagccacaggcttcctggattccggccacagcactgtggcagacctgctgcacagctcggggcccagcttgcgctcggtccccagcctggtgggaagcgtcagctcggccttctcctctgggctggtgtcagggaccagctcagccctgcgcaccatcacccgtgtgctggagacagtggagcagaggaccgtggagggcatccgctcagccatgcgctacctgaccagccacctcaccccacgccaggcccaggctgaccccaactatgattagagccctgcacagggacccccgaagggctggttcagtggcctccagagatccctgggaccctcacgccctgctcccttgcccattcttgctctggacggttcccccagcccatgcaataaatcaccagtgagcatttatttctaa

SEQ ID NO: 244053 - DNA, 1188 bp, Artificial Sequence
  derived and/or modified sequence
atggccctgcccggctaccccctgggcaacgtggacgacagcagaagcaaggacagccccgccggcgagccccagggccaggtgcccctgaccgccgacgtgctggccgtgagcagcagcgtggccagcaccgactggcaggacatcgaccaggccagcttcaagaccgccacccccagagccatcagcaccagcggcgacaaggacaagagcgccgtggtgcccgagcacggccagaagacccccagaaagatcacccccctgctgcccagccagaaccccagccccctgcaggtgagcatgagcctgcagaaccccgcctgggacagacaggtgcaggacgccagaaccagccagagcctggtggtgttccccagccacctgctgggcaaggacaagatgagccagatggccagcgtgcccgagagagagcccgagagcgcccccagcgcccccagcgccgagctgcagagcacccagcacatggaggcccagcccgtggagagcgacgccgaccacgtgaccgccggcgccaacggccagcacggcccccaggccgccagcaccaccaagagcgccgaggagaaggccgagcaccccaaggccccccaccccgaggccgaggccctgcccagcgacgagagccccgtggccatgggcgccaacgtggtggacagcctgggcgacctgcagacctggttcttcccccccccccccgccggcagcgtgagccccagccccggcccccacgaggtggccctgggcagaagacccctggacagcagcctgtacaccgccagcgaggagaacagctacatgagaagcatgaccagcctgctggacagaggcgagggcagcatcagcagcctggccgacatcctggtgtggagcgagaccaccatgggcatggccatcgccaccggcttcctggacagcggccacagcaccgtggccgacctgctgcacagcagcggccccagcctgagaagcgtgcccagcctggtgggcagcgtgagcagcgccttcagcagcggcctggtgagcggcaccagcagcgccctgagaaccatcaccagagtgctggagaccgtggagcagagaaccgtggagggcatcagaagcgccatgagatacctgaccagccacctgacccccagacaggcccaggccgaccccaactacgactag

SEQ ID NO: 244054 - DNA, 1188 bp, Artificial Sequence
  derived and/or modified sequence
atggccctccccggctacccgctgggaaacgttgatgacagccgcagcaaagacagccctgcaggagaacctcagggacaggtgcctctgaccgccgatgtgctcgctgtcagttcaagcgtggcttccacagattggcaagatatcgaccaggccagcttcaagacagctacccctagagcaataagtactagtggagacaaggataagtctgctgtggtgccggaacacggccagaaaacacctagaaaaataacgccactgctgcccagccagaacccttctcctctacaggtgtccatgtccctgcaaaaccctgcctgggatcgacaggtgcaggatgctcggacatcccagtctcttgtggtgttccccagtcacctcctgggaaaagacaaaatgagccagatggccagtgtcccagaacgcgagcctgagagcgctccctcagccccgagtgccgagctccaatctacccagcatatggaggcccagcccgtggaatctgacgccgatcacgtgactgccggagcaaatggccagcatggaccacaggccgcgagtacaacaaaaagcgccgaggagaaggccgagcatcctaaggcgcctcaccctgaggcggaagctctgccctccgatgagagccccgtcgcaatgggagctaatgtagttgactcgttaggcgacctgcagacttggttctttccacccccgccagcaggatctgtgtctcccagccctggaccccatgaagtggctctcgggcgtaggcccctggacagttccttgtacactgccagtgaagagaattcctacatgcgctccatgaccagtctattggatagaggagagggctcaatctcttctttagcggatattttagtgtggtcagagaccacaatggggatggccatagctaccggctttctggacagcgggcatagcacagtggcggatttgctgcacagcagcggtccttctcttcgatctgtaccttcgctcgtcggatcggtgtcttccgccttctcatcggggctggtaagtggcacttcttctgcactgaggaccataacccgcgtgctggagactgtggagcagagaacggtggagggaataagatctgctatgcgctatttgacctcccatttgacaccgcggcaggcccaggccgaccccaattacgattag

SEQ ID NO: 244055 - DNA, 1188 bp, Artificial Sequence
  derived and/or modified sequence
atggccctgcccggctaccccctgggcaatgtggatgacagccgcagcaaggacagccctgctggggagccccagggccaggtgcccctgacagcagatgtgctggccgtgagcagctctgtggccagcacagactggcaggacatcgaccaggccagcttcaagacagccaccccccgggccatcagcaccagcggggacaaggacaagtctgctgtggtgcctgagcacggccagaagacccccaggaagatcacccccctgctgcccagccagaaccccagccccctgcaggtgtccatgagcctgcagaacccagcctgggaccggcaggtgcaggatgcccggaccagccagagcctggtggtgttccccagccacctgctgggcaaggacaagatgagccagatggcctctgtgcctgagcgggagcctgagagcgcccccagcgcccccagcgctgagctgcagagcacccagcacatggaggcccagcctgtggagagtgatgctgaccacgtgacagctggggccaacggccagcacggcccccaggccgccagcaccaccaagtctgctgaggagaaggccgagcaccccaaggccccccaccctgaggccgaggccctgcccagtgatgagagccctgtggccatgggcgccaacgtggtggacagcctgggggacctgcagacctggttcttccccccacctcctgctggctctgtgagccccagccctggcccccatgaggtggccctgggccggcggcccctggacagcagcctgtacacagcctctgaagaaaattcctacatgaggtccatgaccagcctgctggacagaggagagggcagcatcagcagcctggccgacatcctggtgtggagcgagaccaccatgggcatggccatcgccaccggcttcctggacagcggccacagcacagtggccgacctgctgcacagcagcggccccagcctgcggtctgtgcccagcctggtgggctctgtgagcagcgccttcagcagcggcctggtgtctggcaccagcagcgccctgcggaccatcaccagggtgctggagaccgtggagcagaggacagtggagggcatccgcagcgccatgagatacctgaccagccacctgaccccccggcaggcccaggccgaccccaactatgactag

SEQ ID NO: 244056 - DNA, 1188 bp, Artificial Sequence
  derived and/or modified sequence
atggccctgcccggctaccccctgggcaacgtggacgacagccggtccaaggatagcccagctggagagccccaggggcaggtccctctgaccgcagatgttctggccgtctcctcctcagtggcgagcacggactggcaggacatcgaccaggcaagcttcaagacagccacacccagggcaatcagtacttcaggagataaggataaaagtgcagtcgtacctgagcatggacagaaaaccccacgcaagattactccacttttgcctagtcagaacccctcccctctgcaagtatctatgtcactgcaaaaccccgcctgggaccgccaggtccaggacgcaaggacttcacagagcttggtcgttttcccgagtcatctcttgggcaaggacaaaatgtctcagatggcctccgtaccggaacgtgaacccgaatccgcaccaagtgctccctctgcggagctccagagtacacagcacatggaagctcaaccggtcgagagcgacgccgatcacgtcacggctggtgccaatggacagcacggcccacaggctgcttcaactacgaagtcagctgaggagaaggctgaacacccaaaggctccccacccagaagcagaagctctcccctcagatgaaagccccgtggctatgggcgccaacgtggtggactcgctgggtgacctgcaaacatggtttttcccaccacctcccgccgggagcgtcagtcctagccctggtcctcacgaggtcgccctcgggcgaagaccgctggactcctctctgtacacggccagcgaggaaaattcatatatgagaagtatgacttccttactggaccgaggcgaaggaagcatttcttccttggcagatatcctcgtgtggtctgagaccaccatgggaatggctattgccacaggattccttgatagcggacattctactgtggcagatctattgcactcatccggcccatccctacgatctgtgccatccctggtgggtagcgtgagttctgctttctcatctgggcttgtgtccggtacgagcagcgcactgagaaccatcactcgcgttttagagaccgttgaacagaggacagtcgagggaatccgtagcgccatgcggtaccttacctcccacctcacaccacgacaggctcaggccgaccccaactacgactag

SEQ ID NO: 244057 - DNA, 1188 bp, Artificial Sequence
  derived and/or modified sequence
atggccttgccaggctatcctctgggtaacgtggatgactctcggtccaaagacagcccagcgggtgaaccccaaggccaggtcccactgacggctgatgtgcttgcagtcagctcatctgtggctagcactgattggcaggacatcgaccaagcatcctttaagaccgcaacgccacgcgctatctctaccagcggggacaaagataaaagcgccgtggtcccagaacacggacaaaaaacacctaggaagatcacacctcttttaccatctcaaaatccatcacccttacaggtgagtatgtccctccagaatccagcctgggatcgacaggtccaggacgcacgtacgtctcagtcgctggtggtgttccccagtcacctactgggtaaggataaaatgtctcaaatggctagcgtcccggaacgcgaaccagaatcagccccttctgccccttcagcagagctacaaagcacacagcacatggaagcacaacccgtggagagtgatgcggaccacgtaacagccggtgcaaatggccagcacggaccgcaagccgctagcacaacgaagtcagctgaagagaaagctgagcatccaaaggccccacaccctgaggcggaagccctgcctagtgatgagagcccagtggcaatgggggctaacgtcgtagactccctgggtgatctacagacgtggttcttccccccaccgccagccggatccgtatcgccttccccaggccctcacgaagtggccctgggcaggcgcccactggatagtagcctatatacagcctcagaggagaattcttacatgagaagcatgaccagtctgctggacaggggggaagggtcaattagcagccttgctgatatcttggtatggtcagagactactatgggcatggctattgccaccggattcttagatagtggacacagcacagtcgccgatttactgcatagctctgggccatcactgcggtccgttccctcccttgtgggctcagtgtctagcgcgtttagttccggtttggtatcagggacttcctcggcgctgaggaccattactagggtgttagagacagtggagcaacggaccgttgaggggattcgttccgctatgcgatacctaacctcccacctgacccccagacaggcacaggccgatcctaattacgactag

SEQ ID NO: 244058 - protein, 444 aa, Artificial Sequence
  derived and/or modified sequence
MLQRIGLIFLHNIVVVSNCFYFQAFLDEFTNWSRINPNKARIPMAGDTQGVVGTVSKPCFTAYEMKIGAITFQVATGDIATEQVDVIVNSTARTFNRKSGVSRAILEGAGQAVESECAVLAAQPHRDFIITPGGCLKCKIIIHVPGGKDVRKTVTSVLEECEQRKYTSVSLPAIGTGNAGKNPITVADNIIDAIVDFSSQHSTPSLKTVKVVIFQPELLNIFYDSMKKRDLSASLNFQSTFSMTTCNLPEHWTDMNHQLFCMVQLEPGQSEYNTIKDKFTRTCSSYAIEKIERIQNAFLWQSYQVKKRQMDIKNDHKNNERLLFHGTDADSVPYVNQHGFNRSCAGKNAVSYGKGTYFAVDASYSAKDTYSKPDSNGRKHMYVVRVLTGVFTKGRAGLVTPPPKNPHNPTDLFDSVTNNTRSPKLFVVFFDNQAYPEYLITFTA

SEQ ID NO: 244059 - DNA, 1335 bp, Artificial Sequence
  derived and/or modified sequence
atgttgcagaggatcggccttatctttctccataacattgtagtagtgtccaattgcttttatttccaggcctttctcgacgaattcactaactggtctagaattaatcctaacaaggcgaggatccccatggccggagacactcagggtgttgtcggcaccgttagcaagccgtgcttcactgcatacgaaatgaagataggagccatcaccttccaagttgcgaccggcgatatcgccactgagcaggtagatgtaattgtgaacagcactgcccggacgtttaatcggaaaagcggcgtgagccgcgccatcctggagggggctggccaggcagtcgaaagcgagtgtgctgtgctggccgctcaacctcacagagatttcatcatcacccctggcggatgtctgaaatgtaaaatcattatccacgttccaggtggcaaggatgttcgcaagaccgtgacctctgtgctggaggaatgcgaacaacgaaagtacacttctgttagcctgcccgccatcgggactgggaatgctggcaagaatcccattactgtggctgataatatcattgacgctatcgttgacttttctagccagcacagcacccccagtctcaaaaccgtaaaggtggtgatttttcagcccgagttattaaacattttttacgactctatgaaaaagcgagatttgtccgctagtttgaattttcagagcacattcagtatgaccacgtgcaacctgccagagcactggacagacatgaaccatcaactcttctgcatggtgcagctggaaccagggcagtctgagtataataccattaaagataaatttacaaggacttgcagtagctacgcgattgagaagattgagcggatccagaacgctttcttgtggcagtcttaccaggtaaaaaagcgacagatggacataaaaaacgaccacaaaaacaacgagaggctgctgttccatgggaccgacgctgactcagtgccctatgtaaaccaacacgggttcaacagatcttgcgctggaaagaacgctgtgtcctatggcaagggtacctacttcgctgtcgatgcctcctacagtgccaaggacacgtactccaaacccgacagtaacgggaggaaacacatgtacgtagtcagagtccttacaggcgtattcaccaagggaagggcaggactcgttacccctccccccaaaaaccctcacaatccaaccgatctcttcgatagtgtgaccaacaatacgagaagccctaaactattcgtcgtctttttcgataaccaggcctacccggagtacctcattacctttacagcttag

SEQ ID NO: 244060 - DNA, 1335 bp, Artificial Sequence
  derived and/or modified sequence
atgctgcagagaattggcctcatcttcctgcacaacatcgtggtggtgagcaactgcttctacttccaggccttcctggatgagttcaccaactggagccgcatcaaccccaacaaggcccgcatccccatggccggggacacccagggcgtggtgggcaccgtgtccaagccctgcttcaccgcctatgagatgaagattggagccatcaccttccaggtggccaccggggacatcgccacagagcaggtggatgtgattgtgaacagcacagcccggaccttcaacaggaagtctggagtgtcccgggccatcctggagggcgccggccaggccgtggagagtgaatgtgctgtgctggccgcccagccccaccgggacttcatcatcacccctgggggctgcctgaagtgcaagatcatcatccacgtgcctgggggcaaggatgtgaggaagacagtgacctctgtgctggaggagtgtgagcagaggaagtacacctctgtgtccctgcctgccatcggcactggaaatgccggcaagaaccccatcaccgtggccgacaacatcattgatgccatcgtggacttcagcagccagcacagcacccccagcctgaagacagtgaaggtggtgatcttccagcctgagctgctgaacatcttctatgacagcatgaagaagagggacctgagcgccagcctgaacttccagagcaccttctccatgaccacctgcaacctgcctgagcactggacagacatgaaccaccagctgttctgcatggtgcagctggagcccggccagagcgagtacaacaccatcaaggacaagttcaccaggacctgcagcagctatgccatcgagaagattgagcgcatccagaatgccttcctgtggcagagctaccaggtgaagaagaggcagatggacatcaagaatgaccacaagaacaatgaaaggctgctcttccatggaacagatgctgacagcgtgccctacgtgaaccagcacggcttcaacagaagctgtgccggcaagaatgctgtgtcctatggcaagggcacctactttgctgtggatgccagctacagcgccaaggacacctacagcaagccagacagcaatggaaggaagcacatgtatgtggtgcgggtgctgactggagtcttcaccaagggccgggccggcctggtgaccccaccacccaagaacccccacaaccccacagacctgtttgattctgtgaccaacaacaccaggagccccaagctgtttgtggtgttctttgacaaccaggcctacccagagtacctgatcaccttcaccgcctag

SEQ ID NO: 244061 - DNA, 1335 bp, Artificial Sequence
  derived and/or modified sequence
atgctgcagcggatcggcctgatcttcctgcacaacatcgtggtggttagcaattgtttctattttcaggccttccttgacgagtttacaaattggtcacggatcaatcctaataaggcccgaattcccatggcaggcgacactcagggcgtagtcgggacagtgagcaagccgtgtttcacagcctatgaaatgaagatcggggcgattacctttcaggtcgcaaccggggacatagcaactgagcaagttgatgtcattgttaactctacagcccggacctttaacagaaagtctggtgtgagtagggccattctggagggcgccggccaggcagtggagagtgagtgcgcagttctggccgcccagccgcatcgcgacttcatcataacaccaggtggatgtttaaaatgcaaaataatcattcacgtccctggagggaaggacgtccggaaaactgtgacaagtgtgctggaggaatgcgagcaaagaaaatatacgtcagtttccttgccagccattggtaccggcaatgcaggtaagaacccgattactgttgccgataacattatagatgccattgtggatttctccagccagcactctaccccttcactgaagaccgttaaggtcgtgatatttcagccggaacttttgaatatattttacgactctatgaaaaaaagagacttgtcagccagcctgaactttcagtctacgtttagtatgaccacttgcaaccttcccgaacattggacagatatgaaccaccaactcttttgtatggtgcagctagagcccggccagagcgagtacaacaccatcaaagacaagttcacacgcacctgcagctcttacgcaatagagaagattgagaggattcagaatgctttcctctggcaaagctatcaggtaaagaagcgtcagatggacattaagaacgaccacaagaataacgaacgactcctgtttcacgggacagacgccgattctgtaccttatgtgaatcaacacggatttaatagatcctgcgccggaaaaaacgcagtaagttacggcaagggtacgtatttcgccgttgatgcctcttatagcgccaaggatacgtactctaagcccgacagtaacggccggaagcacatgtatgttgtaagagttctgaccggggttttcacgaaggggcgcgctgggttggtcacccctccccctaaaaatcctcacaatccgaccgacctgtttgattccgttacaaataataccaggtcccccaagctcttcgtagtgtttttcgataatcaggcatatcctgagtacctcattacattcacagcctag

SEQ ID NO: 244062 - DNA, 1518 bp, Artificial Sequence
  derived and/or modified sequence
ttcctaggttgaaccgcaatcctttaagaagtctctgagggaagaggaaatattttgagaactattgttatcaactctttgatatctgatgatcaatgctccaaagaattggattaatatttttacacaatattgttgtagtcagtaactgtttctatttccaggcatttttagatgaattcactaactggtcaagaataaatcccaacaaggccaggattcccatggcaggagatacccaaggtgtggtcgggactgtctctaagccttgtttcacagcatatgaaatgaaaatcggtgcaattacttttcaggttgctactggagatatagccactgaacaggtagatgttattgtaaactcaacagcaaggacatttaatcggaaatcaggtgtgtcaagagctattttagaaggtgctggacaagctgtggaaagtgaatgtgctgtactagctgcacagcctcacagagattttataattacaccaggtggatgcttaaagtgcaaaataataattcatgttcctgggggaaaagatgtcaggaaaacggtcaccagtgttctagaagagtgtgaacagaggaagtacacatcggtttcccttccagccattggaacaggaaatgccggaaaaaaccctatcacagttgctgataacataatcgatgctattgtagacttctcatcacaacattccaccccatcattaaaaacagttaaagttgtcatttttcaacctgagctgctaaatatattctacgacagcatgaaaaaaagagacctctctgcatcactgaactttcagtccacattctccatgactacatgtaatcttcctgaacactggactgacatgaatcatcagctgttttgcatggtccagctagagccaggacaatcagaatataataccataaaggacaagttcacccgaacttgttcttcctacgcaatagagaagattgagaggatacagaatgcatttctctggcagagctaccaggtaaagaaaaggcaaatggatatcaagaatgaccataagaataatgagagactcctcttccatgggacagatgcagactcagtgccatatgtcaatcagcacggctttaatagaagttgtgctgggaaaaatgctgtatcctatggaaaaggaacctattttgctgtggatgccagttattctgccaaggacacctactccaagccagacagcaatgggagaaagcacatgtacgttgtgcgagtacttactggagtcttcacaaagggacgtgcaggattagtcacccctccacccaagaatcctcacaatcccacagatctctttgactcagtgacaaacaatacacgatctccaaagctatttgtggtattctttgataatcaggcttacccagaatatctcataactttcacggcttaaaaatatttttatcatcaaagagatgatttaagtcatctgtaagaacaacatgcaatctttgtctttgcttctggcctgtgtaagcaga

SEQ ID NO: 244063 - DNA, 1335 bp, Artificial Sequence
  derived and/or modified sequence
atgctccagagaatagggttgatatttctgcataacattgttgtggttagcaactgcttttattttcaggccttcttggatgaatttacaaactggagccggatcaacccgaataaggctaggattcctatggcaggcgacacccagggcgtggtgggcacagtgtccaagccctgcttcacagcatacgagatgaaaatcggcgctattaccttccaggttgcaaccggcgacatcgcgactgaacaggtggatgttatagtgaatagcacagctcgtacatttaatcgcaagagtggtgtgtccagggccatcctagaaggtgcaggtcaagcagtcgagagcgagtgtgcagtgttggccgctcaaccacacagagactttatcatcacacctggcggatgtctgaaatgtaaaattattattcatgtacctggcggaaaggacgtgaggaagacagtaacttccgtactggaagagtgcgagcagcgtaaatacacgagcgtgtctctgcctgccattgggactggcaacgccggaaaaaatcctataaccgtggcggacaacattattgacgctattgtggattttagcagccagcacagtacaccaagcctaaagaccgttaaggtggttatttttcagcctgaattgctcaacattttttatgactccatgaaaaaacgggatctgtcagcgagcctcaatttccagtccaccttctcaatgaccacctgcaaccttccagaacattggactgatatgaatcaccagctgttttgcatggttcaactggaaccaggccaatctgagtacaacaccatcaaggataaattcaccagaacgtgttctagctatgcaattgaaaaaatcgagcgaatccaaaacgcatttctttggcagtcctaccaggtgaaaaagaggcagatggatatcaaaaacgaccataaaaacaatgaacgcttattgtttcacggaacagacgccgattctgtcccttacgtgaaccagcacgggtttaacagatcttgcgctgggaagaacgcagtgagttacggaaaaggaacatattttgcagtggatgccagctattcagctaaggatacatactctaagcccgacagtaacggacgtaagcatatgtatgtggtcagggtgcttactggagtctttacaaaaggcagagcaggtctagtaaccccacccccaaaaaaccctcacaatccaaccgatctgttcgattcagtcacaaataatacaagatcacctaagctgtttgtggtctttttcgacaatcaggcatacccagaatatctcataaccttcacggcctag

SEQ ID NO: 244064 - DNA, 1335 bp, Artificial Sequence
  derived and/or modified sequence
atgctgcagagaatcggcctgatcttcctgcacaacatcgtggtggtgagcaactgcttctacttccaggccttcctggacgagttcaccaactggagcagaatcaaccccaacaaggccagaatccccatggccggcgacacccagggcgtggtgggcaccgtgagcaagccctgcttcaccgcctacgagatgaagatcggcgccatcaccttccaggtggccaccggcgacatcgccaccgagcaggtggacgtgatcgtgaacagcaccgccagaaccttcaacagaaagagcggcgtgagcagagccatcctggagggcgccggccaggccgtggagagcgagtgcgccgtgctggccgcccagccccacagagacttcatcatcacccccggcggctgcctgaagtgcaagatcatcatccacgtgcccggcggcaaggacgtgagaaagaccgtgaccagcgtgctggaggagtgcgagcagagaaagtacaccagcgtgagcctgcccgccatcggcaccggcaacgccggcaagaaccccatcaccgtggccgacaacatcatcgacgccatcgtggacttcagcagccagcacagcacccccagcctgaagaccgtgaaggtggtgatcttccagcccgagctgctgaacatcttctacgacagcatgaagaagagagacctgagcgccagcctgaacttccagagcaccttcagcatgaccacctgcaacctgcccgagcactggaccgacatgaaccaccagctgttctgcatggtgcagctggagcccggccagagcgagtacaacaccatcaaggacaagttcaccagaacctgcagcagctacgccatcgagaagatcgagagaatccagaacgccttcctgtggcagagctaccaggtgaagaagagacagatggacatcaagaacgaccacaagaacaacgagagactgctgttccacggcaccgacgccgacagcgtgccctacgtgaaccagcacggcttcaacagaagctgcgccggcaagaacgccgtgagctacggcaagggcacctacttcgccgtggacgccagctacagcgccaaggacacctacagcaagcccgacagcaacggcagaaagcacatgtacgtggtgagagtgctgaccggcgtgttcaccaagggcagagccggcctggtgacccccccccccaagaacccccacaaccccaccgacctgttcgacagcgtgaccaacaacaccagaagccccaagctgttcgtggtgttcttcgacaaccaggcctaccccgagtacctgatcaccttcaccgcctag

SEQ ID NO: 244065 - protein, 723 aa, Artificial Sequence
  derived and/or modified sequence
METAMCVCCPCCTWQRCCPQLCSCLCCKFIFTSERNCTCFPCPYKDERNCQFCHCTCSESPNCHWCCCSWANDPNCKCCCTASSNLNCYYYESRCCRNTIITFHKGRLRSIHTSSKTALRTGSSDTQVDEVKSIPANSHLVNHLNCPMCSRLRLHSFMLPCNHSLCEKCLRQLQKHAEVTENFFILICPVCDRSHCMPYSNKMQLPENYLHGRLTKRYMQEHGYLKWRFDRSSGPILCQVCRNKRIAYKRCITCRLNLCNDCLKAFHSDVAMQDHVFVDTSAEEQDEKICIHHPSSRIIEYCRNDNKLLCTFCKFSFHNGHDTISLIDACSERAASLFSAIAKFKAVRYEIDNDLMEFNILKNSFKADKEAKRKEIRNGFLKLRSILQEKEKIIMEQIENLEVSRQKEIEKYVYVTTMKVNEMDGLIAYSKEALKETGQVAFLQSAKILVDQIEDGIQTTYRPDPQLRLHSINYVPLDFVELSSAIHELFPTGPKKVRSSGDSLPSPYPVHSETMIARKVTFSTHSLGNQHIYQRSSSMLSFSNTDKKAKVGLEACGRAQSATPAKPTDGLYTYWSAGADSQSVQNSSSFHNWYSFNDGSVKTPGPIVIYQTLVYPRAAKVYWTCPAEDVDSFEMEFYEVITSPPNNVQMELCGQIRDIMQQNLELHNLTPNTEYVFKVRAINDNGPGQWSDICKVVTPDGHGKNRAKWGLLKNIQSALQKHF

SEQ ID NO: 244066 - DNA, 2172 bp, Artificial Sequence
  derived and/or modified sequence
atggagaccgccatgtgcgtgtgctgcccctgctgcacctggcagagatgctgcccccagctgtgcagctgcctgtgctgcaagttcatcttcaccagcgagagaaactgcacctgcttcccctgcccctacaaggacgagagaaactgccagttctgccactgcacctgcagcgagagccccaactgccactggtgctgctgcagctgggccaacgaccccaactgcaagtgctgctgcaccgccagcagcaacctgaactgctactactacgagagcagatgctgcagaaacaccatcatcaccttccacaagggcagactgagaagcatccacaccagcagcaagaccgccctgagaaccggcagcagcgacacccaggtggacgaggtgaagagcatccccgccaacagccacctggtgaaccacctgaactgccccatgtgcagcagactgagactgcacagcttcatgctgccctgcaaccacagcctgtgcgagaagtgcctgagacagctgcagaagcacgccgaggtgaccgagaacttcttcatcctgatctgccccgtgtgcgacagaagccactgcatgccctacagcaacaagatgcagctgcccgagaactacctgcacggcagactgaccaagagatacatgcaggagcacggctacctgaagtggagattcgacagaagcagcggccccatcctgtgccaggtgtgcagaaacaagagaatcgcctacaagagatgcatcacctgcagactgaacctgtgcaacgactgcctgaaggccttccacagcgacgtggccatgcaggaccacgtgttcgtggacaccagcgccgaggagcaggacgagaagatctgcatccaccaccccagcagcagaatcatcgagtactgcagaaacgacaacaagctgctgtgcaccttctgcaagttcagcttccacaacggccacgacaccatcagcctgatcgacgcctgcagcgagagagccgccagcctgttcagcgccatcgccaagttcaaggccgtgagatacgagatcgacaacgacctgatggagttcaacatcctgaagaacagcttcaaggccgacaaggaggccaagagaaaggagatcagaaacggcttcctgaagctgagaagcatcctgcaggagaaggagaagatcatcatggagcagatcgagaacctggaggtgagcagacagaaggagatcgagaagtacgtgtacgtgaccaccatgaaggtgaacgagatggacggcctgatcgcctacagcaaggaggccctgaaggagaccggccaggtggccttcctgcagagcgccaagatcctggtggaccagatcgaggacggcatccagaccacctacagacccgacccccagctgagactgcacagcatcaactacgtgcccctggacttcgtggagctgagcagcgccatccacgagctgttccccaccggccccaagaaggtgagaagcagcggcgacagcctgcccagcccctaccccgtgcacagcgagaccatgatcgccagaaaggtgaccttcagcacccacagcctgggcaaccagcacatctaccagagaagcagcagcatgctgagcttcagcaacaccgacaagaaggccaaggtgggcctggaggcctgcggcagagcccagagcgccacccccgccaagcccaccgacggcctgtacacctactggagcgccggcgccgacagccagagcgtgcagaacagcagcagcttccacaactggtacagcttcaacgacggcagcgtgaagacccccggccccatcgtgatctaccagaccctggtgtaccccagagccgccaaggtgtactggacctgccccgccgaggacgtggacagcttcgagatggagttctacgaggtgatcaccagcccccccaacaacgtgcagatggagctgtgcggccagatcagagacatcatgcagcagaacctggagctgcacaacctgacccccaacaccgagtacgtgttcaaggtgagagccatcaacgacaacggccccggccagtggagcgacatctgcaaggtggtgacccccgacggccacggcaagaacagagccaagtggggcctgctgaagaacatccagagcgccctgcagaagcacttctag

SEQ ID NO: 244067 - DNA, 2172 bp, Artificial Sequence
  derived and/or modified sequence
atggagactgcaatgtgtgtctgctgcccgtgctgtacctggcagcgatgttgccctcagttatgctcatgtctgtgctgcaagttcatctttaccagcgaacgcaactgcacttgtttcccatgtccatacaaggacgagcggaactgtcagttttgccactgcacttgcagcgagtctcctaactgccactggtgctgttgctcttgggccaacgaccctaactgtaagtgctgttgcactgcctcttcaaatcttaattgctactattacgagtccagatgttgtcgtaacacaatcatcaccttccacaagggcaggctgcgaagcatccacacttcttccaaaactgcactgcgtaccgggtccagtgatacccaggtcgatgaggtcaagtccattcctgccaattctcacctcgttaaccaccttaattgtccgatgtgctctcgcctccgcctgcactcgtttatgttaccctgcaaccactctctatgcgaaaaatgcttacggcaactccaaaagcacgcagaagtgacagaaaatttcttcattctgatatgtcctgtgtgcgatcggagccattgcatgccttattctaataagatgcaattgcccgaaaattacctgcacggcaggctgaccaaaaggtacatgcaggaacacggatatttgaaatggcgctttgatcggtcaagcggccccatcctttgccaggtttgtcggaataaacgcattgcttacaaacgctgcatcacatgcaggttaaacttatgtaatgactgcctgaaggcatttcactctgacgtagcaatgcaggaccatgttttcgtcgatacttccgcggaagaacaagacgaaaaaatctgtatccatcatccatcatcaaggatcatagaatactgtaggaacgacaataagctgctgtgtactttctgtaaattctcattccacaatggtcatgacaccatttcactcatcgacgcctgctctgaacgggcagcgtcattgttctccgctattgcaaaatttaaggcggtgcgctatgaaattgacaacgacttgatggagttcaatatccttaaaaatagttttaaagctgataaggaagctaagcgcaaggaaattcggaatggctttctgaagctgagatctatcctccaagagaaagagaaaatcatcatggagcagattgagaatctcgaggtcagccggcagaaggagattgagaaatatgtctatgtgaccacaatgaaggtaaatgagatggatggcttgatagcttatagtaaagaagcgttaaaggagacagggcaggtggccttccttcaatcagcaaagatcctcgtggatcagattgaggacggcatccagactacttaccgcccggatcctcagctcagattacacagtattaactacgtgccattggattttgtggaactatccagcgccatccatgaactgtttcctaccgggcccaagaaagtcagatcgtctggggactcactgccatctccgtatcctgttcactccgagacaatgatcgctcgaaaggtgaccttttcaacccattcactcggcaaccagcacatttaccagaggtccagttctatgctgagtttttccaacacagacaaaaaggccaaggtggggttggaagcttgcgggagggctcagagcgccactcctgccaaacccaccgacggattgtacacttattggtctgcaggggccgattcccagtcggtgcagaactcctctagcttccataattggtattcctttaatgatggaagcgtgaaaactcctgggccaatcgttatctatcagactttagtttatccccgagcagccaaggtgtactggacatgtccagctgaggatgtggacagttttgagatggagttctatgaagtgataacctcccctcccaacaacgtgcagatggaactttgtggacagatccgtgatatcatgcagcagaacctggagctccacaatctcactccaaataccgagtacgtatttaaggtgcgcgccatcaacgataacggcccaggtcagtggtctgatatctgcaaggtggtgaccccagacgggcacgggaaaaacagagcgaagtggggcctgctgaaaaatattcaatccgcactccagaagcacttttag

SEQ ID NO: 244068 - DNA, 2172 bp, Artificial Sequence
  derived and/or modified sequence
atggagacagccatgtgtgtgtgctgcccctgctgcacctggcagcgctgctgcccccagctgtgcagctgcctgtgctgcaagttcatcttcaccagcgagaggaactgcacctgcttcccctgcccctacaaggatgagaggaactgccagttctgccactgcacctgcagcgagagccccaactgccactggtgctgctgctcctgggccaatgaccccaactgcaagtgctgctgcacagccagcagcaacctgaactgctactactatgagagccgctgctgcaggaacaccatcatcaccttccacaagggccgcctgcggagcatccacaccagcagcaagacagccctgaggacaggcagcagtgacacccaggtggatgaggtgaagagcatcccagccaacagccacctggtgaaccacctgaactgccccatgtgcagccggctgcggctgcacagcttcatgctgccctgcaaccacagcctgtgtgagaagtgcctgcggcagctgcagaagcatgctgaggtgacagagaacttcttcatcctgatctgccctgtgtgtgacaggagccactgcatgccctacagcaacaagatgcagctgcctgagaactacctgcacggccgcctgaccaagcgctacatgcaggagcacggctacctgaagtggaggtttgacaggagcagcggccccatcctgtgccaggtgtgcaggaacaagagaattgcctacaagcgctgcatcacctgccgcctgaacctgtgcaatgactgcctgaaggccttccacagtgatgtggccatgcaggaccacgtgtttgtggacaccagcgctgaggagcaggatgagaagatctgcatccaccaccccagcagccgcatcatcgagtactgcagaaatgacaacaagctgctgtgcaccttctgcaagttctccttccacaatggacatgacaccatcagcctgattgatgcctgcagcgagcgggccgccagcctcttcagcgccatcgccaagttcaaggctgtgcgctatgaaattgacaatgacctgatggagttcaacatcctgaagaacagcttcaaggctgacaaggaggccaagaggaaggagatcagaaatggcttcctgaagctgcggagcatcctgcaggagaaggagaagatcatcatggagcagatcgagaacctggaggtgtcccggcagaaggagattgagaagtatgtgtatgtgaccaccatgaaggtgaatgagatggatggcctgattgcctacagcaaggaggccctgaaggagaccggccaggtggccttcctgcagagcgccaagatcctggtggaccagattgaagatggcatccagaccacctacagaccagacccccagctgcggctgcacagcatcaactacgtgcccctggactttgtggagctgagcagcgccatccacgagctgttccccaccggccccaagaaggtgcgcagcagcggggacagcctgcccagcccctaccctgtgcacagcgagaccatgattgccaggaaggtgaccttcagcacccacagcctgggcaaccagcacatctaccagaggagcagctccatgctgtccttcagcaacacagacaagaaggccaaggtgggcctggaggcctgtggccgggcccagagcgccaccccagccaagcccacagatggcctgtacacctactggagcgctggagctgacagccagagcgtgcagaacagcagcagcttccacaactggtacagcttcaatgatggctctgtgaagaccccaggccccatcgtcatctaccagaccctggtgtacccccgggccgccaaggtgtactggacctgcccagcagaagatgtggacagctttgagatggagttctatgaggtgatcaccagcccccccaacaacgtgcagatggagctgtgtggccagatccgggacatcatgcagcagaacctggagctgcacaacctgacccccaacacagaatatgtgttcaaggtgcgggccatcaatgacaatggacctggccagtggagcgacatctgcaaggtggtgaccccagatggccacggcaagaacagagccaagtggggcctgctgaagaacatccagagcgccctgcagaagcacttctag

SEQ ID NO: 244069 - DNA, 2172 bp, Artificial Sequence
  derived and/or modified sequence
atggagaccgccatgtgcgtgtgctgcccctgctgcacctggcagaggtgttgtccacagctgtgttcttgtctctgctgtaagttcatattcacatctgagaggaattgtacttgttttccatgcccctataaggacgagcgcaactgtcagttctgccactgcacatgctcggaatcacccaattgtcattggtgttgttgtagctgggcaaacgatcccaactgcaagtgctgttgtacagcatcttcaaatttgaactgctactactacgaatcaaggtgctgtagaaacaccattattaccttccacaagggtaggctcagatcgatacacacatcctccaagaccgccctgcgaaccggttcctcagacacccaagttgacgaggtgaagagcattcctgccaattcgcaccttgtgaatcatctgaactgccccatgtgcagcaggcttcgcctgcacagctttatgctgccatgtaaccactctctgtgtgaaaagtgccttcgacagctccagaagcacgcagaggtaaccgagaacttcttcatactgatctgcccagtgtgtgacaggtcacattgcatgccttattctaacaaaatgcagcttcctgagaattacctccacggtcgccttacaaagcgctacatgcaggaacatggttatctcaagtggcgttttgataggtcttctggtcctattctctgtcaggtctgcaggaacaagaggatcgcttacaagcgctgtataacctgtcggctgaacctttgtaacgattgccttaaggcctttcatagtgatgtcgccatgcaggaccacgtattcgtggatacatctgcggaggaacaggacgaaaagatctgtatccatcatccaagttcaaggattatcgagtattgcaggaacgacaataagcttctgtgcactttttgcaagtttagcttccataatggacacgatacgatctctcttattgacgcctgctccgaaagagccgcctccctgttctctgcgatcgccaaatttaaagccgtgaggtatgagattgataatgacttgatggaatttaatattctaaaaaactcctttaaagcagataaagaggccaaaaggaaggagatccgcaacggtttcctgaaattgaggagtattcttcaggaaaaagaaaaaatcatcatggagcagattgagaacctggaggtcagccgacagaaggaaattgaaaagtatgtgtacgtaactaccatgaaggtaaatgagatggatggacttattgcatattccaaagaggccctaaaggagacaggacaggtagccttcctgcagtctgcaaagattctggtggatcagatcgaagatgggattcagacaacttatagaccagacccacagctgagattacactcaattaattatgtcccactggattttgtagagctgagttctgcaatacacgaactctttcctaccggacctaagaaggtgcgcagttcaggcgactccctaccttcgccctaccccgtccactcggaaacaatgatcgcccggaaggtgacctttagcacccattccctggggaatcagcacatctaccagaggagttccagcatgttgtccttctctaacaccgataaaaaggctaaagtgggacttgaagcatgcggtcgggcccagtcagcaactccagccaaacccactgacgggctatacacttattggagcgcaggtgctgacagccagtctgtgcagaactccagcagcttccataattggtactccttcaacgacggttcagtgaagacgccaggaccaattgtgatctaccagaccctagtttatccgagagccgccaaggtttactggacctgccccgctgaagacgtggactcttttgagatggagttctatgaagttatcaccagccctcccaacaatgtgcagatggagttatgcggtcagattagggatattatgcagcagaacctggagctgcataatcttacccccaacactgagtacgtgttcaaggtaagagctatcaacgataatggacccgggcagtggtcagacatttgtaaggttgttacccccgatggacatggcaaaaaccgcgctaaatggggactactgaaaaacattcagtccgccctgcaaaagcacttttag

SEQ ID NO: 244070 - DNA, 2172 bp, Artificial Sequence
  derived and/or modified sequence
atggagacggccatgtgcgtttgctgtccgtgttgtacgtggcaaaggtgctgtccccaactgtgtagctgcctgtgctgcaaattcatttttacaagcgaaagaaattgtacctgttttccctgtccatacaaggatgagaggaactgccagttttgtcattgcacctgctcggagagcccaaattgtcactggtgttgctgctcctgggccaacgatcctaattgcaaatgttgctgtacagccagctcaaatctgaactgttactactacgagtcacggtgctgtcgcaacacgatcatcacttttcacaaggggcgactgcgctcaattcacacttcctccaagacagcactaagaaccgggtcctctgatacgcaggtggacgaggtgaagtctatacccgctaactcacatctggtgaatcacctcaactgccctatgtgcagtaggctccgcctgcactcattcatgctgccctgcaatcactccctctgcgagaagtgcctaagacaattgcagaagcatgcagaggtgaccgagaacttctttatactcatttgcccggtgtgcgaccgttcccattgtatgccttattcaaataagatgcagcttccagaaaactatctgcacggacgcctgaccaaaaggtatatgcaggaacatggatatctcaaatggagattcgataggtcctcgggccctatactttgccaggtttgtagaaataaaaggatcgcatataagcgttgcataacatgtagactgaatttgtgcaacgactgtctcaaggcgttccattctgatgtggccatgcaggatcatgtattcgttgacaccagtgcagaagagcaggatgagaagatttgtatccaccaccctagtagtcgtatcattgagtattgccgaaacgataataagctgttatgtacgttttgtaagttttccttccacaatggtcatgatacaatttcacttatcgatgcgtgcagcgaacgggctgccagcctgttttccgcgatagctaaattcaaggccgtgcggtatgagattgataatgatctcatggagttcaacatactgaagaattcctttaaggccgataaggaggccaaacgaaaggagatccgtaatgggttcctaaaattacgttccattctgcaagagaaggaaaagattatcatggagcagattgaaaacctggaggtgtcccgccaaaaagaaatcgaaaagtatgtgtatgtgaccaccatgaaagtgaatgagatggacgggctaatcgcctacagcaaagaggccctgaaggaaaccggccaagttgcttttctgcagtccgcgaagatcctggtggatcagatcgaagacggcatccagaccacctaccgaccagacccacagctgcgactccatagtatcaactacgttcctctggactttgtggaactgagtagcgcaatccatgagctctttccaacggggccaaaaaaggtccgatcatctggcgattccctgcccagcccttaccctgtacactcagagactatgatcgcgcgaaaagtgacgtttagcacacactctctgggaaaccagcacatctatcagaggagcagctcaatgctgtcattttctaacaccgacaagaaagccaaggttggattggaggcatgcggtcgcgctcagtctgctactcctgctaaacctacggacggtctgtatacttattggtccgcaggcgcagattctcagtctgtgcaaaactcctccagcttccataactggtacagcttcaacgacggttccgtgaaaacgcctggcccaatagtgatctaccagacgcttgtatatccccgagccgctaaagtctactggacatgtccagccgaggacgtggacagctttgaaatggaattctatgaggtgatcacaagccccccaaacaatgtacagatggaactctgcgggcagattcgagatatcatgcagcagaacctggaactgcataacctgaccccaaacaccgagtacgtctttaaggtgagagcaatcaatgacaatgggcctgggcagtggtctgatatatgcaaagtggtaactcctgacgggcacggtaagaatcgggcaaagtggggcttactcaagaacatacagtcggctcttcagaaacacttctag

SEQ ID NO: 244071 - DNA, 2539 bp, Artificial Sequence
  derived and/or modified sequence
aatgccagcctatgagcttcctggtagggacaccagctgtgaagtcctcataacagccaacttcttgcaactttcaagctgacggcctcaggaatgggaggaaggactcctccactggagaactgatagcagtattctggtagaggaggcatcaagagtcctgggaggccggtggtaatcatgtaggcaccatggaaactgctatgtgcgtttgctgtccatgttgtacatggcagagatgttgtcctcagttatgctcctgtctgtgctgcaagttcatcttcacctcagagcggaactgcacctgcttcccctgcccttacaaagatgagcggaactgccagttctgccactgcacctgttctgagagccccaactgccattggtgttgctgctcttgggccaatgatcccaactgtaagtgctgctgcacagccagcagcaatctcaactgctactactatgagagccgctgctgccgcaataccatcatcactttccacaagggccgcctcaggagcatccatacctcctccaagactgccctgcgcactgggagcagcgatacccaggtggatgaagtaaagtcaataccagccaacagtcacctggtgaaccacctcaattgccccatgtgcagccggctgcgcctgcactcattcatgctgccctgcaaccacagcctgtgcgagaagtgcctgcggcagctgcagaagcacgccgaggtcaccgagaacttcttcatcctcatctgcccagtgtgcgaccgctcgcactgcatgccctacagcaacaagatgcagctgcccgagaactacctgcacgggcgtctcaccaagcgctacatgcaggagcacggctacctcaagtggcgctttgaccgctcctccgggcccatcctctgccaggtctgccgcaacaagcgcatcgcttacaagcgctgcatcacctgccgcctcaacctgtgcaacgactgcctcaaggccttccactcggatgtggccatgcaagaccacgtctttgtggacaccagcgccgaggaacaggacgagaagatctgcatccaccacccatccagccgcatcatcgagtactgccgcaatgacaacaaattgctctgcaccttctgcaagttctctttccacaatggccacgacaccattagcctcatcgacgcctgctccgagagggccgcctcactcttcagcgccatcgccaagttcaaagcagtccgatatgaaattgataatgacctaatggaattcaacatcttaaaaaacagctttaaagctgacaaggaggcaaagcgaaaagagatcagaaatggctttctcaagttgcgcagcattcttcaggagaaagagaagatcatcatggagcagatagagaatctagaagtgtccaggcagaaggaaattgaaaaatatgtgtatgttacaaccatgaaagtgaacgagatggatggtctgatcgcctactccaaggaagccctgaaggagactggccaggtggcattcctgcagtcagccaagatcctggtggaccagatcgaggacggcatccagaccacctacaggcctgacccacagctccggctgcactcaataaactacgtgcccttggactttgttgagctttccagtgccatccatgagctcttccccacagggcccaagaaggtacgctcctcaggggactccctgccctccccctaccccgtgcactcagaaacaatgattgccaggaaggtcactttcagcacccacagcctcggcaaccagcacatataccagcgaagctcctccatgttgtccttcagcaacactgacaagaaggccaaggtgggtctggaggcctgtgggagagcccagtcagccacccccgccaaacccacagacggcctctacacctactggagtgctggagcagacagccagtctgtacagaacagcagcagcttccacaactggtactcattcaacgatggctctgtgaagaccccaggcccaattgttatctaccagactctggtgtacccaagagctgccaaggtttactggacatgtccagcagaagacgtggactcttttgagatggaattctatgaagtcattacttctcctcctaacaacgtacaaatggagctctgtggacaaattcgggacataatgcagcaaaatctggagctgcacaacctgacccccaacacagaatacgtgtttaaagttagagccatcaatgataatggtcctgggcaatggagtgatatctgcaaggtggtaacaccagatggacatgggaagaaccgagctaagtggggcctgctgaagaatatccagtctgccctccagaagcacttctgagccccttcagagcaggaaacaacctcagactcatcacaaagtagacatatacacacacatatatgtatgtatatttttctcaccacattcttcaaggaggttgtagacaaatgtttccatgacctctcagctttccaacaggaatcttgtaagagctaataaaaggaaatacctga

SEQ ID NO: 244072 - protein, 571 aa, Artificial Sequence
  derived and/or modified sequence
MALPKDAIPSLSECQCGICMEILVEPVTLPCNHTLCKPCFQSTVEKASLCCPFCRRRVSSWTRYHTRRNSLVNVELWTIIQKHYPRECKLRASGQESEEVADDYQPVRLLSKPGELRREYEEEISKVAAERRASEEEENKASEEYIQRLLAEEEEEEKRQAEKRRRAMEEQLKSDEELARKLSIDINNFCEGSISASPLNSRKSDPVTPKSEKKSKNKQRNTGDIQKYLTPKSQFGSASHSEAVQEVRKDSVSKDIDSSDRKSPTGQDTEIEDMPTLSPQISLGVGEQGADSSIESPMPWLCACGAEWYHEGNVKTRPSNHGKELCVLSHERPKTRVPYSKETAVMPCGRTESGCAPTSGVTQTNGNNTGETENEESCLLISKEISKRKNQESSFEAVKDPCFSAKRRKVSPESSPDQEETEINFTQKLIDLEHLLFERHKQEEQDRLLALQLQKEVDKEQMVPNRQKGSPDEYHLRATSSPPDKVLNGQRKNPKDGNFKRQTHTKHPTPERGSRDKNRQVSLKMQLKQSVNRRKMPNSTRDHCKVSKSAHSLQPSISQKSVFQMFQRCTK

SEQ ID NO: 244073 - DNA, 1716 bp, Artificial Sequence
  derived and/or modified sequence
atggccctgcccaaggacgccattccctcactttctgagtgccagtgtgggatctgtatggaaatcctggtggagcctgtgaccttaccctgtaatcatacactctgcaaaccatgctttcaaagcactgtcgaaaaggcaagcctgtgctgcccgttctgccgtagaagagtaagctcctggacacggtaccacacaaggcggaactcgttagtgaacgtagagctctggactattatacagaagcattacccacgggaatgtaagctaagagcgtctggacaggagagcgaagaggttgccgatgactaccagcccgtccgcctgctgagcaagccgggcgagctgcggcgggaatacgaggaggaaatttctaaagtggcagcagaaaggcgggcctccgaggaagaagagaacaaagcctccgaggagtatatccaaagattactggccgaggaggaggaggaagaaaaacgtcaggctgagaagagacgccgggccatggaggaacaactcaaaagtgacgaggaactcgcccgaaaactgagcattgacattaacaacttttgtgagggatctatctctgcctctccactcaacagtcggaagagtgaccccgtgacaccaaaatccgagaagaagagtaagaataaacagagaaacaccggggatatccaaaagtacctgacccccaaatcacagtttggttccgctagccattcagaggctgtgcaggaggtgcggaaggatagcgtgtctaaagatatagacagcagcgacaggaaaagccctacgggacaggacacagaaatcgaagatatgcccactttgagtccccagatcagcctcggcgtcggggagcagggcgcagattcctccattgagtctccaatgccctggctctgcgcgtgcggagcggaatggtaccacgaaggaaacgtcaagacccgaccatctaaccatggtaaagaattgtgtgtattgagccatgaacgcccgaaaacccgggttccatacagcaaagagactgccgtaatgccctgcggaaggaccgagagcgggtgtgcccccacttcaggagtgacccagaccaatggcaataataccggcgagacagagaatgaggagtcttgtctgctcatttctaaagaaatctccaagcgaaagaatcaggagagctcttttgaagctgtcaaggatccatgcttttctgcaaagcgacggaaggtgtcacctgaatcttcccccgaccaggaggaaacagaaatcaacttcactcagaagttgatcgatctggaacacctgctttttgagaggcacaagcaggaagaacaggaccggctgctcgccctgcagctacagaaagaagttgataaggagcaaatggtccccaacagacagaagggatcccccgatgagtaccacctccgggccacatctagtcctccagacaaggtcctgaatggacagaggaagaacccaaaggacgggaatttcaaacggcagacccatacaaagcatcccactccggaaaggggatcccgagataagaatcgtcaagtgtctctgaagatgcagctgaagcaatcagtgaatcgccgcaagatgcctaattcgactcgggatcattgtaaggtgtccaagtccgcccactccctccaaccttccatatcccagaaatccgtttttcagatgtttcaacgctgcaccaagtag

SEQ ID NO: 244074 - DNA, 1716 bp, Artificial Sequence
  derived and/or modified sequence
atggccctcccaaaggacgccattccatcactgtctgagtgtcagtgcgggatttgcatggagattctggttgaacccgtgacactcccatgcaaccatacactgtgtaagccttgcttccagagtaccgtggaaaaggcgagtctttgttgtccgttctgtcgcaggagggtttctagctggacacgctatcacactagaaggaattctcttgtcaacgtggagctgtggacaatcattcagaagcactatcctagagaatgcaagctccgagcgagtgggcaggagagcgaggaagttgctgacgactaccaacctgtaaggctcctgagtaagccaggagagctgcggcgggagtatgaggaggagatctcgaaagtggctgcagagagacgagcatccgaagaggaagagaataaagcatctgaagagtatatacaacgcctgttagctgaggaagaggaagaagaaaaaaggcaggccgaaaaaaggcgcagagccatggaagaacagttaaagagcgacgaagaacttgcacggaaactcagcattgacataaataatttttgcgaggggtctatctccgcatcccccctgaactcccggaaaagtgacccggtgacccctaaatcagaaaaaaaaagtaaaaacaagcaaagaaacacaggagatattcagaagtatctgacgcctaagagccaatttgggtccgcttcacactccgaggctgtgcaggaggtcaggaaggattctgtgtcgaaagatatagattccagtgataggaagagccctacaggccaggatacggaaattgaggacatgcccaccctgtctcctcaaatcagtctgggcgtgggagaacagggggccgactcttctatagaatctcccatgccctggttgtgtgcctgcggcgcagagtggtaccacgaagggaacgtgaagaccagaccctccaatcacggcaaagagctctgcgtgctttctcacgagagacctaaaactcgagttccctacagtaaagaaactgcagttatgccctgcggtcgcaccgagtcaggctgcgcaccaacttcaggggtgacccagaccaatggaaacaacaccggagagactgagaacgaagagtcatgtttattaatctcaaaagagatctctaagcggaagaatcaggaatccagcttcgaagccgtgaaggacccgtgttttagcgctaagaggaggaaggtttctcctgagagcagtcccgatcaggaagaaaccgagatcaacttcacccagaagcttattgacctggagcatcttctgttcgagagacacaaacaggaggaacaggaccgtctgttagctcttcagctccaaaaggaggtggacaaggaacaaatggtgcccaataggcaaaagggatctcccgacgaataccacttgcgagctactagttcccctcctgataaagtgcttaacggacagcggaaaaatcctaaagatggcaattttaaaagacagacccacacaaagcatccaactccagagcggggatcgagggacaagaaccgtcaggtcagcctgaagatgcaacttaaacagtcagtcaacaggcggaaaatgccaaacagtaccagggaccactgcaaggtgagcaagagtgcccattcactgcagccttcaatctcacagaagagcgtatttcagatgtttcaacggtgtaccaaatag

SEQ ID NO: 244075 - DNA, 1716 bp, Artificial Sequence
  derived and/or modified sequence
atggccctgcccaaggatgccatccccagcctgtctgagtgccagtgtggcatctgcatggagatcctggtggagcctgtgaccctgccctgcaaccacaccctgtgcaagccctgcttccagagcacagtggagaaggccagcctgtgctgccccttctgcagaagaagagtgtcctcctggacccgctaccacaccaggaggaacagcctggtgaatgtggagctgtggaccatcatccagaagcactacccccgggagtgcaagctgcgggccagcggccaggagagcgaggaggtggctgatgactaccagcctgtgcggctgctgagcaagccaggagagctgcggcgggagtatgaggaggagatcagcaaggtggccgctgagcggcgggccagcgaggaggaggagaacaaggccagcgaggagtacatccagaggctgctggccgaggaggaggaggaggagaagaggcaggccgagaagagaagaagagccatggaggagcagctgaagagtgatgaggagctggccaggaagctgagcattgacatcaacaacttctgtgagggcagcatcagcgccagccccctgaacagcaggaagagtgaccctgtgacccccaagtctgagaagaagagcaagaacaagcagaggaacacaggagacatccagaagtacctgacccccaagagccagtttggaagtgccagccacagcgaggccgtgcaggaggtgaggaaggacagcgtgtccaaggacatcgacagcagtgacaggaagagccccaccggccaggacacagaaattgaggacatgcccaccctgagcccccagatcagcctgggcgtgggggagcagggcgctgacagcagcattgagagccccatgccctggctgtgtgcctgtggggctgagtggtaccacgagggcaatgtgaagacccggcccagcaaccacggcaaggagctgtgtgtgctgagccatgagcggcccaagaccagggtgccctacagcaaggagacagctgtgatgccctgtggccgcacagaaagtggctgtgcccccaccagcggcgtgacccagaccaatggaaacaacacaggagaaacagaaaatgaggagagctgcctgctgatcagcaaggagatcagcaagaggaagaaccaggagagcagctttgaagctgtgaaggacccctgcttcagcgccaagaggaggaaggtgtccccagagagcagcccagaccaggaggagacagagatcaacttcacccagaagctgattgacctggagcacctgctgtttgagcggcacaagcaggaggagcaggaccggctgctggccctgcagctgcagaaggaggtggacaaggagcagatggtgcccaaccggcagaagggcagcccagatgagtaccacctgcgggccaccagcagccccccagacaaggtgctgaatggccagaggaagaaccccaaggatggcaacttcaagaggcagacccacaccaagcaccccaccccagagcggggcagccgggacaagaaccggcaggtgtccctgaagatgcagctgaagcagagcgtgaacagaaggaagatgcccaacagcacccgggaccactgcaaggtgtccaagagcgcccacagcctgcagcccagcatcagccagaagtctgtgttccagatgttccagcgctgcaccaagtag

SEQ ID NO: 244076 - DNA, 1716 bp, Artificial Sequence
  derived and/or modified sequence
atggccctgcccaaggacgccatccccagcctgagcgagtgccagtgtggcatttgcatggagattttggtggaacctgtcactcttccatgtaatcacaccctatgcaagccctgcttccaatccacggtggagaaggcgtcactgtgttgcccattttgtagacgccgcgttagtagctggacaagatatcacacgcgaagaaattctctggtcaacgtggagctgtggacaattattcaaaaacattatccccgagagtgcaaactgagagcgtccgggcaagagtccgaagaagtcgcagacgactatcagccggtcagattgctgtccaagcctggtgagctgcggagggagtatgaggaggagatctccaaggtagctgctgagagaagggcctccgaagaggaggagaacaaagccagtgaggagtacatccaaaggctgctcgcggaagaggaggaggaagaaaagagacaggcagagaagaggcgtagggctatggaagaacagctgaaaagcgacgaagagcttgcacgaaaactctcaatagatatcaataacttttgcgagggcagcataagtgcaagtcccctcaatagtaggaagagtgacccagtgactccaaaatccgagaagaaatctaaaaacaagcagagaaataccggagacattcagaagtatttgacacccaaaagccaatttgggtctgcttcacacagcgaggctgtacaagaagtgcggaaggattctgtcagcaaagatattgactcttctgataggaagtctcctaccgggcaggacaccgaaatcgaagacatgcccacattgtcaccccaaatctcgttgggcgtaggagagcagggggccgattcctctattgagtcacctatgccctggctgtgcgcatgcggcgcagagtggtatcacgaggggaatgtaaaaacaagaccatccaatcacggaaaagaattatgcgtgctcagccacgagcgacctaagactcgggtaccatactctaaggaaaccgccgtcatgccatgtggcagaacagagagtggctgtgcgccaacttcaggagtgacccagaccaacggcaacaataccggggaaaccgagaacgaggagagctgcttgttaatctctaaggaaatctccaagcgaaaaaaccaggagagtagcttcgaagctgtgaaagacccctgcttcagtgccaaaaggcggaaagttagccccgagagcagtcctgaccaggaggagacagaaataaatttcactcaaaagctcatcgatttagagcatttactctttgagagacataagcaggaggagcaagaccggctgctggctctgcaacttcagaaagaggtcgacaaagagcagatggttcctaatcggcagaagggtagccccgatgagtatcacctacgggctactagcagcccccccgacaaggtgctaaatgggcagcgcaaaaatcctaaagatgggaatttcaaaaggcagacacacacgaaacacccgaccccagagcgcggatcacgtgataagaaccggcaggtatccctgaagatgcaactgaaacaatcagtgaataggaggaaaatgccgaactccactcgcgaccactgcaaggtctccaagagtgctcatagtttgcagcctagcatctcccaaaaaagtgtgttccagatgtttcaacggtgcaccaagtag

SEQ ID NO: 244077 - DNA, 1716 bp, Artificial Sequence
  derived and/or modified sequence
atggccctgcccaaggacgccatccccagcctgagcgagtgccagtgtgggatatgtatggagattctggtcgagcccgtgactctgccgtgtaaccacaccctgtgcaaaccttgttttcagtcgacagtggaaaaggccagcctgtgctgccctttttgcagacgccgggtctcttcttggacgcgttatcacacgcggcgtaactccctggtaaatgtggagctctggacaattatccagaaacattacccgcgagagtgcaagctacgcgccagtggccaagagtccgaggaagtggccgacgactaccagccagtgcgcctattgtctaaaccgggagagctgcggagagagtatgaggaggagatctcaaaagtcgccgcggaaagacgggcctctgaagaagaagagaacaaagccagcgaggagtatatccagcgcctcttagccgaggaggaagaagaggagaagcggcaggcagagaagagacggcgcgctatggaggagcagctgaaaagtgatgaggagttggcgaggaagttaagcatagatataaataacttttgtgaaggtagcatttcagctagccccctgaactcacggaagtcagatcccgtaacgcccaaatcagagaaaaaatccaaaaacaagcagaggaataccggcgatatccaaaagtaccttactccaaaaagccagtttggctctgcctcacattcagaggcagttcaagaagtgagaaaagattcagtgtctaaagatattgacagttctgacaggaagagtccaaccgggcaggataccgagatagaagatatgcccaccctttctccgcagataagtctgggcgtgggcgagcagggggctgactcatcaatagagtccccaatgccctggttgtgcgcctgcggcgctgagtggtatcacgaagggaatgtgaagacacgcccaagcaatcacggaaaggagctttgtgtgctctctcacgagcggcccaagacccgtgtcccgtatagcaaggagaccgccgtgatgccttgcggcagaactgaatccgggtgtgcacccactagcggcgtgacccagactaacggtaacaacacaggtgagacagaaaacgaggagtcatgtctgctgatcagtaaagaaatctcaaagaggaagaaccaagagtcttcattcgaggcagttaaagacccgtgtttcagcgccaagaggaggaaagttagcccggaaagtagcccagatcaggaggagacggaaatcaacttcacccagaaactgattgaccttgaacaccttttgttcgagaggcataagcaagaggagcaggatagactgctcgcattacagctgcaaaaagaggtggacaaggagcagatggttcctaaccgtcaaaaaggatcccccgacgaataccatcttcgcgccacaagctccccacccgacaaggtgctgaacggacagcgtaaaaatcccaaagatggcaactttaaaaggcagactcataccaaacaccccacccccgagagaggtagccgagacaagaatcggcaggtatcccttaaaatgcagctgaaacagtcggtgaatagacgcaagatgccaaactctacaagggatcattgcaaggtctcaaagtccgcacactctctgcagccttccatcagtcagaagtccgttttccagatgttccaaagatgcacaaaatag

SEQ ID NO: 244078 - DNA, 1716 bp, Artificial Sequence
  derived and/or modified sequence
atggcgctgcccaaggatgcaattcccagtctcagtgaatgccagtgcgggatttgcatggagatcctcgtagaacccgtcactctgccttgcaatcatacgctgtgcaagccctgttttcagtctacggtagagaaggccagtctgtgttgtcccttctgccgtagacgcgtgtcatcttggacacggtaccacacgagaaggaatagcttagtgaatgtcgagttatggacgatcattcaaaaacactacccacgcgagtgtaagctacgtgcttcgggccaggaaagtgaggaagtggcggatgactatcagcccgtcagacttctctccaaaccaggcgaactgcgccgagaatacgaggaagagatcagcaaagtggccgcagaaagacgggctagcgaagaggaagaaaataaggcctcagaggaatatattcaacggctcctggcagaggaagaggaagaggagaaaagacaggcagagaagcgcaggcgggcaatggaagagcagcttaagagtgatgaggagttagcgagaaaactatcaattgatatcaacaacttttgtgaaggttctatttcagcatccccattgaactcgcggaagagtgaccccgtgactcccaagtctgagaagaaatctaagaacaagcagcggaacacaggagatattcaaaaatacctcacacccaaatcacagttcggttccgcttcacattccgaggctgtgcaggaggtgcgtaaggacagcgtcagcaaggacatagactccagcgacaggaagtctccaactggtcaggataccgagattgaggacatgcctacgctgtccccgcagattagtctgggggtgggggagcagggggcagattcctcgatagaatctcccatgccatggctctgcgcctgtggggctgagtggtatcacgaaggaaacgtaaagacacgcccatctaaccacggcaaggaactgtgtgtgctgtctcacgagaggcccaaaacaagggttccttacagtaaagagaccgccgtaatgccctgtgggagaacggaatccgggtgcgcccctacatctggggttacacagactaatggaaacaatacaggcgaaacagagaacgaggaatcttgccttttgatatccaaagaaatctctaaacgcaagaaccaagagtcaagttttgaggccgtaaaagacccttgcttttccgccaaaagacgcaaagttagccccgagtccagtcccgaccaagaggagactgaaatcaacttcacccaaaaactgatagaccttgagcacctactgttcgagcgacataagcaggaggagcaggatagattgctcgccctacagctgcaaaaagaggttgataaggagcagatggtgccaaaccgtcaaaagggttcacccgacgagtaccatctgagagccaccagtagccctcccgataaagtgctgaacgggcaaagaaaaaaccccaaggacggtaactttaagcgccagacacacactaagcacccgacccctgagcgaggctctagggacaaaaatcgccaggtctcactaaagatgcagttgaagcagagcgttaatcggcgaaaaatgcccaattctacgagagaccactgcaaagtgtccaaaagcgcccatagtctgcagccttctatttctcaaaaaagtgtgtttcagatgtttcaaagatgtaccaaatag

SEQ ID NO: 244079 - DNA, 1716 bp, Artificial Sequence
  derived and/or modified sequence
atggctctcccgaaagatgccatcccatccctgagcgagtgtcaatgtggtatttgtatggagattcttgtcgagccagtaaccttaccctgtaatcacaccctctgcaaaccatgctttcagtccaccgtcgaaaaggcctcactctgctgccccttctgtcgaaggagagtgagcagctggaccagatatcacaccagacggaactctcttgttaatgtcgagctgtggacaatcatccaaaaacactatcctcgtgagtgcaagctgcgagcaagcggccaggagtccgaagaagtggcagacgattatcagcccgtgcggttgctgagtaagcccggtgaattaaggcgagaatatgaagaggaaatctcaaaagtggccgcagaacgtagggcctcagaggaggaggagaataaagcttccgaggagtatatccagagactactggccgaagaggaagaggaagagaaaaggcaagcagagaagcgaaggcgggcaatggaggagcagctaaagtctgacgaagagctcgccagaaagttatccatcgatatcaacaacttttgtgaggggtccattagtgcatcacccctcaattctcgtaaatcggatccagttactccgaaatccgaaaagaaatcaaaaaataaacagaggaataccggggacatacagaagtatctcacacccaaaagccagttcggctctgccagccactccgaggctgtgcaggaggtgcgaaaggatagtgtgtctaaggacattgacagctccgaccgaaagagtcccaccggccaggacaccgagatcgaggatatgcccaccctttctccacagatcagcctcggggtgggtgagcagggcgcagacagttctattgaatctcctatgccatggctttgtgcatgtggggctgagtggtaccacgaaggaaacgttaaaactagaccttccaaccatggaaaagagctctgcgtgctgtcccacgagcgaccaaagacacgtgtcccgtatagtaaggagactgccgtgatgccctgcggcaggaccgagagtggctgcgctcctacctctggtgtaacccaaactaacggcaataacaccggggaaaccgagaacgaagagtcttgtcttctcatctcgaaggagatttcaaagagaaagaaccaagagtctagcttcgaagccgtgaaagacccatgtttttccgcaaaaaggaggaaagtttctcccgagtcctcccctgaccaggaagagactgaaattaactttactcagaagttgattgacttagaacatctgctatttgagcgtcataagcaggaggaacaagacaggctgctcgccctgcagctgcagaaggaggtcgataaagaacagatggtaccaaacaggcagaagggcagccctgacgaataccacctaagagcgacatcaagcccaccagataaggtgctcaatgggcagagaaaaaatcctaaggacggcaacttcaaaaggcagacgcacaccaagcacccaacgcctgagcgcggatcaagagacaagaataggcaggtgtctctgaagatgcagctcaagcagtcagtgaataggcgaaagatgcccaattccacgagggaccactgcaaggtctctaaatccgctcacagcttacagccctctataagccaaaagtctgtgttccagatgtttcagaggtgtaccaagtag

SEQ ID NO: 244080 - DNA, 5347 bp, Artificial Sequence
  derived and/or modified sequence
gcttgtccggtggctgctgcgctgccgcaacgaatagggtttctggctgcgtaggagggacgggggcgcggagctctgggaaactgcgccaggcgcccgaaaggtgaacacgggagtcgcgcgtctcccccgcagcagcggtaaagcggaagttatgctgcagccggagcccgggcttcctcccggagccgcgtcccggggcccggctgccccgagctgagcggagcatcctttccgggtgaggggaggagaggacttggcgcgttcccctcgctgccccgggagccgcagccgcggtgttcatgccgcggagcagccaggctcctccgacgaaaacctgcatttatttgctggcgggacgtttgccttgaaaatggacaaagacgccgccctccggggtattcctgtttgcctgaccctgagagcgcctttttgcttcaagacgtgttggatgctcctgttctccgaattctgatacgcttctgggcataatactgaaacacaaaactgcttttgctctctctgtggttggccgaaaataggattctttttcgtgcaggtgtcgttgtttagtcggctttactaacatattgaaatggctctacccaaagacgccatcccctcgctgtccgagtgccagtgcgggatctgcatggaaatcctcgtggagcccgtcaccctcccgtgtaaccacacgctgtgtaaaccgtgcttccagtcgaccgtcgaaaaggcgagtttatgctgtcccttctgtcgccgccgggtatcgtcgtggactcggtaccatacccgaagaaattctctcgtcaacgtggaactgtggacgataattcaaaaacactatcccagggagtgcaagcttagagcgtctggccaagaatcagaggaagtggctgatgactatcagccagttcgtctgctcagtaaacctggggaactgagaagagaatatgaagaggaaataagcaaggtggcggcagagcgacgggccagcgaggaagaagaaaacaaagccagtgaagaatacatacagaggttgttggcagaggaggaagaagaggaaaaaagacaggcagaaaaaaggcgaagagcgatggaagaacaactgaaaagtgatgaggaactggcaagaaagctaagcattgatattaacaatttctgtgagggaagtatctcggcttctcccttgaattccagaaaatctgatccagttacacccaagtctgaaaagaaaagtaagaacaaacaaagaaacactggagatattcagaagtatttgacaccgaaatctcagtttgggtcagcctcacactctgaagctgtacaagaagtcaggaaagactccgtatctaaggacattgacagtagtgataggaaaagcccaacagggcaagacacagaaatagaagatatgccgacactttctccacagatatcccttggagttggagaacaaggtgcagattcttcaatagagtcccctatgccatggttatgtgcctgtggtgccgaatggtaccatgaaggaaacgtcaaaacaagaccaagcaatcatgggaaagagttatgtgtcttaagtcacgagcgacctaaaaccagagttccctactcgaaagaaactgcagttatgccttgtggcagaacagaaagtgggtgcgcccccacatcaggggtgacacagacaaatggaaacaacacaggtgagacagaaaatgaagagtcgtgcctactgatcagtaaggagatttccaaaagaaaaaaccaagaatcttcctttgaagcagtcaaggatccatgcttttctgcaaaaagaagaaaagtgtcccccgaatcttccccagatcaagaggaaacagaaataaactttacccaaaaactgatagatttggagcatctactgtttgagagacataaacaagaagaacaggacaggttattggcattacaacttcagaaggaggtggataaagagcaaatggtgccaaaccggcaaaaaggatccccagatgagtatcacttacgcgctacatcctcccctccagacaaagtgctaaatggacagaggaagaatcccaaagatgggaacttcaaaaggcaaactcacacaaagcatccaacaccagagagaggctcaagggacaaaaataggcaagtgtctttaaagatgcagttgaagcagtcagttaatagaagaaagatgccaaattctactagagatcactgtaaggtatccaaaagtgctcactccctacagcctagcatttcacagaaaagtgtttttcagatgtttcagagatgcacaaagtaaggcctggtaaagggagtgctttgtgatctagtaaagctggaatgtgaagctctttcctatcatggaatcttcatccatgtgtcattcatgctgctctctaggcacactcattgtccttaatgaaggtctgtgtgattgtaaggactgcatagacacatgagcttctgcacagctcagcggtaagcaggggtcccctgtcgtttcccttcttaataacagatgtgtattaagctttacaattcttagagatatcttaagctttggccaactccaggaaatcttcaagtgccattgtctttccaaaaactgcatgttttatggcctttgctcacctttttgtcgtgactggtaatcaaagcaagattatactattctgagtgattaaggaacccatgcagggtttaaaatccattttcttgctattgtccaatgtttacagagtactcaaaaggttttcctaaagtaatctaatttccatctccaatttaattcaattttcagcattgtagcatttcctttggtgtttgttttttttttttagacggagtttcaaaatttggattcatattcatatgtgggaaatcccagatttttttttttttttttttttttttttttttttggagacagagtcttgctctgtcacgcaggctggtgtgcaatggcgcgatctcagctcactgcaacctccgcctcccgagttcaagcgattcttctgcctcagcctcccgagtagctgggatcataggcatgtgccactacacccagctacccagctaatttttttttttttttgtacttttagtagagatgggatttcaccatgttggccaggctggtcttgaactcctgtcctcaggtgatccacctgcttcggcctcccagagtgctgggattataggcgtgagccaccacgcccggcctgtttcctttggtttaaagtggattcgaatcagtgttaaatcagaaaatcagggttttctaggaaattgggaattagttgccagaaaggaaactgaactatgcagaaggagttaagagctgggatgaggctggatggggtgactgacagtccagatcattgaaacagattgggtcgtcggaaactggtccagatgaggctggatggggtgactgacagtctggatcattgaaactgattaggtcgtcagaaacgggtccagacgaggatgaggctgaggctggatggggtgactgacagtctggatcattgaaactgattgggtggttggtcagaaacgggtccagatgaggatgaggctgaggctggatggggtgactgacagtctggatcattgaaactgattgggtggttggtcagaaacgggtccagatgaggatgaggctggatggggtgactgacagtctggatcattgaaactgattgggtcgtcagaaactggtccagatgaggctgggtggggtgactgacagtttggatcattgaaactgattgggtggtcagaaactggtccagatgaggatgtggctggatggggtgactgacagtctggatcattgaaactgattgggtggtcagaaactggtccagatgaggatgtggctggatggggtgactgacagtctggatcattgaaactgattgggtggtgagaaatgggtccagatgaggatgaggctggatggggtgactgacagtctggatcattgaaactgattgggtggtgagaaatgggtccagatgaggatgaggctggatggggtgactgacagtctggatcattgaaactggtccactatgacgcagcaggggcagtttggcagagcatcctcttcccttgtccttgtgaaagaacacaggaaacatttgggttttacagcttttcacaccctactatcaggcatcagaatcaaaattagttactaaattgggtgaatttttggaaacctgcatttctatgcatctgctattccagaaaaaaatgggaatgtattacaggagagttacctcacagtgtcttatgttgtggaacctgaaacataaccacgtgttttcttatatgatcatttgtgttgatactgcttttatttgagtttatgaacagaaatagaaagtatggtgcttgggttttgccctttcttactcctgaaagttaaatcagaagacactgatttcattttgtgaaatttagctcagagactattgatcttttgtttcattaatatgaacaactattagtaaaaaatagctttaacagcatttctgctgatatctagtaatctattcttttaatgtgaaaataagataaaatgtcctggagctaattctagcttaaatttgccagtatttctgtatgtcattaagtttttttcctctaaggttggtaatagaattttgttaatctttgcatacctgatggcatctatgtcaatgctgattgggtaattataaattctgtgctaatttaaaacttaatttgcctcttaaggtgattgtcctctgagtaatgattgtagttaaatgaagtatagcttgcaactatactatcacatgggtcgttaagtaaaaataaataaaccaaatttgtctgagacaggctaagatcaatcttctcatcaaaccaatttttctctaagagcaatttcactttcagttttagggtggacattcttgaatgcctcaaattaaacgttatctatttaatcttcctggaatagtctgtgaccaaaaaggagggtgtgatatatttaggtgtaaatatatcacatatatggtgtgatatatttgggatttatatattcagctcattctctgtgaagaagtcttcctgactaaaattggtttcaagataaactaatttctgttagtatttctactctgcctaccatgtatgcctttttgttagaaactaataaatgtatcagtcactagcaggtactggtcctttttcctctcatttttgtggaaaggatatgcaaacactgaatttctcagggagtactaaggctgtgcagaggctgagaatctgaaaaataaaatactaaaaataaaaa

SEQ ID NO: 244081 - DNA, 1716 bp, Artificial Sequence
  derived and/or modified sequence
atggccctgcccaaggacgccatccccagcctgagcgagtgccagtgcggcatctgcatggagatcctggtggagcccgtgaccctgccctgcaaccacaccctgtgcaagccctgcttccagagcaccgtggagaaggccagcctgtgctgccccttctgcagaagaagagtgagcagctggaccagataccacaccagaagaaacagcctggtgaacgtggagctgtggaccatcatccagaagcactaccccagagagtgcaagctgagagccagcggccaggagagcgaggaggtggccgacgactaccagcccgtgagactgctgagcaagcccggcgagctgagaagagagtacgaggaggagatcagcaaggtggccgccgagagaagagccagcgaggaggaggagaacaaggccagcgaggagtacatccagagactgctggccgaggaggaggaggaggagaagagacaggccgagaagagaagaagagccatggaggagcagctgaagagcgacgaggagctggccagaaagctgagcatcgacatcaacaacttctgcgagggcagcatcagcgccagccccctgaacagcagaaagagcgaccccgtgacccccaagagcgagaagaagagcaagaacaagcagagaaacaccggcgacatccagaagtacctgacccccaagagccagttcggcagcgccagccacagcgaggccgtgcaggaggtgagaaaggacagcgtgagcaaggacatcgacagcagcgacagaaagagccccaccggccaggacaccgagatcgaggacatgcccaccctgagcccccagatcagcctgggcgtgggcgagcagggcgccgacagcagcatcgagagccccatgccctggctgtgcgcctgcggcgccgagtggtaccacgagggcaacgtgaagaccagacccagcaaccacggcaaggagctgtgcgtgctgagccacgagagacccaagaccagagtgccctacagcaaggagaccgccgtgatgccctgcggcagaaccgagagcggctgcgcccccaccagcggcgtgacccagaccaacggcaacaacaccggcgagaccgagaacgaggagagctgcctgctgatcagcaaggagatcagcaagagaaagaaccaggagagcagcttcgaggccgtgaaggacccctgcttcagcgccaagagaagaaaggtgagccccgagagcagccccgaccaggaggagaccgagatcaacttcacccagaagctgatcgacctggagcacctgctgttcgagagacacaagcaggaggagcaggacagactgctggccctgcagctgcagaaggaggtggacaaggagcagatggtgcccaacagacagaagggcagccccgacgagtaccacctgagagccaccagcagcccccccgacaaggtgctgaacggccagagaaagaaccccaaggacggcaacttcaagagacagacccacaccaagcaccccacccccgagagaggcagcagagacaagaacagacaggtgagcctgaagatgcagctgaagcagagcgtgaacagaagaaagatgcccaacagcaccagagaccactgcaaggtgagcaagagcgcccacagcctgcagcccagcatcagccagaagagcgtgttccagatgttccagagatgcaccaagtag

SEQ ID NO: 244082 - protein, 710 aa, Artificial Sequence
  derived and/or modified sequence
MVMACRVVNKRRHMGLQQLSSFAETGRTFLGPLKSSKFIIDEECHESVLISSTVRLLESLDLTSAVGQLLNEAVQAQNNTYRTGISTLLFLVGAWSSAVEECLHLGVPISIIVSVMSEGLNFCSEEVVSLHVPVHNIFDCMDSTKTFSQLETFSVSLCPFLQVPSDTDLIEELHGLKDVASQTLTISNLSGRPLKSYELFKPQTKVEADNNTSRTLKNSLLADTCCRQSILIHSRHFNRTDNTEGVSKPDGFQEHVTATHKTYRCNDLVELAVGLSHGDHSSMKLVEEAVQLQYQNACVQQGNCTKPFMFDISRIFTCCLPGLPETSSCVCPGYITVVSVSNNPVIKELQNQPVRIVLIEGDLTENYRHLGFNKSANIKTVLDSMRLQEDSSEELWANHVLQVLIQFKVNLVLVQGNVSERLIEKCINSKRLVIGSVNGSVMQAFAEAAGAVQVAYITQVNEDCVGDGVCVTFWRSSPLDVVDRNNRIAILLKTEGINLVTAVLTNPVTAQMQIKEDRFWTCAYRLYYALKEEKVFLGGGAVEFLCLSCLHILAEQSLKKENHACSGWLHNTSSWLASSLAIYRPTVLKFLANGWQKYLSTLLYNTANYSSEFEASTYIQHHLQNATDSGSPSSYILNEYSKLNSRIFNSDISNKLEQIPRVYDVVTPKIEAWRRALDLVLLVLQTDSEIITGHGHTQINSQELTGFLFL

SEQ ID NO: 244083 - protein, 191 aa, Artificial Sequence
  derived and/or modified sequence
MVMACRVVNKRRHMGLQQLSSFAETGRTFLGPLKSSKFIIDEECHESVLISSTVRLLESLDLTSAVGQLLNEAVQAQNNTYRTGISTLLFLVGAWSSAVEECLHLGVPISIIVSVMSEGLNFCSEEVVSLHVPVHNIFDCMDSTKTFSQLETFSVSLCPFLQVPSDTDLIEELHGLKDVASQTLTISNLSG

SEQ ID NO: 244084 - DNA, 2133 bp, Artificial Sequence
  derived and/or modified sequence
atggtgatggcatgtagggttgtgaacaagcggcgacacatgggactgcagcagctcagcagcttcgctgagaccggacgcacgtttttaggtccattgaagtcctcaaagtttatcatcgacgaagaatgtcacgaaagtgtactcatttcctccacagtgaggttattggagagcttagatctcacatcagccgtgggccaactgcttaatgaagccgtgcaagcccagaataacacctacagaacggggattagcaccctcttgttcctcgtcggcgcctggtcttcggccgtggaggagtgtcttcatttgggcgtcccaatcagcattatagttagcgtgatgagcgagggactgaacttttgtagcgaagaagtggtctcactacatgttcctgtgcacaatattttcgattgtatggattcaaccaaaactttttcgcagcttgagacattctccgtttctctgtgcccctttctgcaggtgccctcagatacggacctgatcgaggagcttcatggcctgaaagatgtggcgtcacagacactgactatttcaaacctttccggtaggcccttgaagagttacgagctgtttaagcctcagacaaaggtcgaggcggataataacacgtcccgaactctgaagaactctcttctggccgacacatgctgtcggcagagtatactgattcatagccggcatttcaaccgtaccgataacaccgagggagttagtaaacccgacggcttccaagaacacgtaacagccacacataaaacctacagatgcaatgatttggtagaactagctgtgggcttgagccacggggaccacagcagcatgaaactggtggaagaggctgtgcaactccaataccaaaacgcctgcgtacagcagggaaattgtactaagccattcatgtttgacatttcaaggattttcacctgctgcctgcctggactgccagagacctcttcctgtgtgtgtccaggctacatcaccgttgtcagtgtatccaacaatccagtaatcaaggagctacagaaccagccagtgcgcatcgtgctcatcgagggagacctgaccgagaactaccgacacctcggttttaacaaatctgccaacattaagactgttcttgattccatgcggttacaagaagactcaagcgaagagctgtgggccaaccatgtactgcaggtcctcatccagttcaaagtgaatcttgttctcgtgcaaggtaacgttagcgagaggctcatcgagaaatgtattaatagcaaaaggttggttataggcagtgttaatggctccgtgatgcaggccttcgccgaggctgcaggcgcagttcaagtggcgtatatcacacaggtgaacgaggactgcgtaggagatggggtctgcgtgaccttctggcggtcctcccctctggatgtcgtggatcggaataatcggatcgccatcctgctgaagacagaggggatcaacctcgtgaccgctgtgctgacgaatccagtgacagcgcagatgcagattaaggaagaccgcttttggacctgtgcgtatcgtctgtactatgcgctgaaggaggaaaaggtgtttttaggaggcggtgcggtggaatttctgtgcttaagttgtctgcacatattggcggagcagagcctgaagaaagagaaccatgcatgctccggctggctgcataacacaagctcttggctggccagctctttggcaatttataggccgaccgttctaaaatttctagccaacggctggcagaaatacctttctacactgctttacaacaccgctaactactcctccgaattcgaggcgtccacatacattcagcaccacctgcagaacgctaccgactccggttcacctagtagttatattttgaatgaatactccaagcttaactcccgaatctttaactcagatatctctaacaagctggagcagatcccgagagtgtacgatgttgtcacaccgaaaatagaggcctggcgtcgagccttggacctggtcttgctggtgctgcagactgattcagagattatcacaggtcatggccatactcagataaattcacaggaacttaccgggtttctgttcttatag

SEQ ID NO: 244085 - DNA, 576 bp, Artificial Sequence
  derived and/or modified sequence
atggtgatggcctgccgggtggtcaataaacgccgccacatgggactgcagcagcttagtagcttcgcagagaccgggagaacgttcctcggtcccctgaaaagttctaaattcataatagacgaggagtgccacgagtcagtgcttatcagttccacagtcagactgctggagagcctggacctgacgtcagctgtggggcaacttttgaatgaggccgtgcaggcccaaaacaatacgtacagaaccggcattagtacgttgcttttcttggtaggagcctggtcaagcgccgtcgaagagtgcctgcatctcggggtgcctatctcgatcatagtgtcagttatgtccgaaggactgaatttctgctcagaagaggtggtgtcactgcacgttccggtccataacatctttgactgtatggattccaccaagaccttctcccagttggaaaccttctctgtctcgctgtgcccttttctgcaggttccttccgataccgatctgattgaggagctccacggcctgaaggatgtggcatcccagacacttaccataagtaacctgagcggctag

SEQ ID NO: 244086 - DNA, 2133 bp, Artificial Sequence
  derived and/or modified sequence
atggttatggcctgcagggttgttaacaaacggagacacatgggcctgcaacaattaagttcctttgcagaaacaggacggactttcctgggtcctctaaagagttccaagtttatcatcgacgaggagtgccacgagtccgtccttatcagcagcacagtccggttgttggaatcccttgatctgacttccgctgtcgggcagctgttgaatgaggctgtgcaagcccagaacaatacctaccgcacggggatctctactctcctctttctggttggggcctggtcctccgcagtggaggagtgcttgcacctgggagttccaatcagtattattgtaagcgtgatgtcggagggcctgaacttctgttctgaagaggtcgtgagcctgcatgtcccggttcacaacatcttcgattgcatggattccacgaagacattttcacaactggagactttctccgtgtccctgtgtcctttcctgcaagtgcctagcgacactgacctcatcgaggagctgcacggactcaaagatgtggcttcacagacactgaccatctccaacctcagtgggcgaccactgaagtcatatgaactgttcaaaccacagactaaagttgaagcggacaataacactagcaggacattaaaaaattcactgctcgcggacacgtgctgccgacagagcatcctaatccatagccggcattttaataggaccgacaacaccgaaggggtctctaagcctgatggattccaggagcatgtcacggccacgcataagacttaccgctgcaacgatctggttgaactggctgtcggactcagtcacggtgatcattcttctatgaaactggtggaggaagcggtgcaactgcaatatcagaacgcatgtgtgcagcagggtaattgtaccaagcccttcatgttcgatattagcaggattttcacatgttgtcttcctggactgcccgagacttcttcgtgcgtttgccctggatatatcactgtcgtgtccgttagcaataaccctgtcatcaaggagctgcaaaatcagccggtgcgcatagtcttaattgagggggatctgacagagaactatcggcacctggggttcaacaaatccgccaatataaaaacggtcttggattccatgaggctgcaggaggatagctcagaagaactgtgggccaaccatgtgttacaggtacttattcaattcaaggtgaatctggtgctcgtgcaaggcaacgtgagcgagaggctgattgaaaaatgtataaactctaaacggctcgtgatcggatcagtgaatggatcagttatgcaggcgttcgctgaggccgcaggtgccgttcaagtggcatacataactcaggtgaacgaagattgcgttggcgacggcgtgtgtgtgaccttctggaggtcctccccgctcgatgtggttgatcgtaataatcgcattgctattctgttaaagaccgaaggcattaacctcgtaactgcagttcttacgaaccccgtgactgcccagatgcagataaaggaggaccggttctggacatgcgcttataggctgtactacgctctcaaggaggaaaaggtctttctggggggcggtgctgtcgaattcttatgcttatcctgtttacacatcttggcagagcagagtcttaaaaaagaaaatcatgcatgtagcggctggttgcacaacacaagttcttggctcgcatcctcactcgctatataccgacctaccgtcctaaagtttctcgcaaacgggtggcagaaatatctgagcacgctcctgtacaacactgccaactactcatcagaattcgaggcctctacatatatccaacaccacctgcagaacgcgacggatagcggaagcccatcaagctatatacttaacgaatactctaaactcaactcacgcatcttcaactccgacatctcaaacaagctggaacaaatccctagggtctacgacgtcgtaacaccaaaaattgaagcatggcgtagggccctggatttagtgctgctggtgcttcagactgacagcgaaatcatcacaggtcatggacacactcaaataaattctcaggaactgacagggttcctgtttctgtag

SEQ ID NO: 244087 - DNA, 2133 bp, Artificial Sequence
  derived and/or modified sequence
atggtgatggcctgccgggtggtgaacaagagaagacacatgggcctgcagcagctgagcagctttgctgagactggaagaaccttcctgggccccctgaagagcagcaagttcatcattgatgaagaatgtcatgaatctgtgctgatcagcagcacagtgcggctgctggagagcctggacctgaccagcgctgtgggccagctgctgaatgaagctgtgcaggcccagaacaacacctacagaacaggcatcagcaccctgctcttcctggtgggcgcctggagcagcgctgtggaggagtgcctgcacctgggcgtgcccatcagcatcatcgtgtctgtgatgtctgagggcctgaacttctgcagcgaggaggtggtgtccctgcacgtgcctgtgcacaacatctttgactgcatggacagcaccaagaccttcagccagctggagaccttctctgtgtccctgtgccccttcctgcaggtgcccagcgacacagacctgattgaggagctgcacggcctgaaggatgtggccagccagaccctgaccatcagcaacctgagcggccggcccctgaagagctatgagctgttcaagccccagaccaaggtggaggccgacaacaacaccagcaggaccctgaagaacagcctgctggccgacacctgctgccggcagagcatcctgatccacagccgccacttcaacagaacagacaacacagaaggagtgtccaagccagatggcttccaggagcacgtgacagccacccacaagacctaccgctgcaatgacctggtggagctggccgtgggcctgagccatggagaccacagctccatgaagctggtggaggaggccgtgcagctgcagtaccagaatgcctgtgtgcagcagggcaactgcaccaagcccttcatgtttgacatcagccgcatcttcacctgctgcctgcccggcctgcctgagaccagcagctgtgtgtgccccggctacatcaccgtggtgtctgtgagcaacaaccctgtgatcaaggagctgcagaaccagcctgtgcgcatcgtgctgattgaaggagacctgacagagaactaccgccacctgggcttcaacaagagcgccaacatcaagacagtgctggacagcatgaggctgcaggaggacagcagcgaggagctgtgggccaaccacgtgctgcaggtgctgatccagttcaaggtgaacctggtgctggtgcagggcaatgtgtctgagcggctgattgagaagtgcatcaacagcaagaggctggtgattggctctgtgaatggatctgtgatgcaggcctttgctgaggccgccggggctgtgcaggtggcctacatcacccaggtgaatgaagactgtgtgggagatggagtgtgtgtgaccttctggaggagcagccccctggatgtggtggacaggaacaaccgcatcgccatcctgctgaagacagagggcatcaacctggtgacagctgtgctgaccaaccctgtgacagcccagatgcagatcaaggaggaccgcttctggacctgtgcctaccgcctgtactatgccctgaaggaggagaaggtgttcctgggcggcggcgctgtggagttcctgtgcctgagctgcctgcacatcctggccgagcagagcctgaagaaggaaaatcatgcctgcagcggctggctgcacaacaccagctcctggctggccagcagcctggccatctaccggcccaccgtgctgaagttcctggccaacggctggcagaagtacctgagcaccctgctgtacaacacagccaactacagcagcgagtttgaggccagcacctacatccagcaccacctgcagaatgccacagattctggcagccccagcagctacatcctgaatgagtacagcaagctgaacagccgcatcttcaacagcgacatcagcaacaagctggagcagatcccccgggtgtatgatgtggtgacccccaagattgaggcctggaggcgggccctggacctggtgctgctggtgctgcagacagacagcgagatcatcaccggccacggccacacccagatcaacagccaggagctgaccggcttcctgttcctgtag

SEQ ID NO: 244088 - DNA, 576 bp, Artificial Sequence
  derived and/or modified sequence
atggtgatggcctgccgggtggtgaacaagagaagacacatgggcctgcagcagctgagcagctttgctgagactggaagaaccttcctgggccccctgaagagcagcaagttcatcattgatgaagaatgtcatgaatctgtgctgatcagcagcacagtgcggctgctggagagcctggacctgaccagcgctgtgggccagctgctgaatgaagctgtgcaggcccagaacaacacctacagaacaggcatcagcaccctgctcttcctggtgggcgcctggagcagcgctgtggaggagtgcctgcacctgggcgtgcccatcagcatcatcgtgtctgtgatgtctgagggcctgaacttctgcagcgaggaggtggtgtccctgcacgtgcctgtgcacaacatctttgactgcatggacagcaccaagaccttcagccagctggagaccttctctgtgtccctgtgccccttcctgcaggtgcccagcgacacagacctgattgaggagctgcacggcctgaaggatgtggccagccagaccctgaccatcagcaacctgagcggctag

SEQ ID NO: 244089 - DNA, 2133 bp, Artificial Sequence
  derived and/or modified sequence
atggtgatggcctgccgggtggtgaacaagcggcggcacatgggccttcagcagctctcatccttcgccgagaccggcagaacttttctggggcccctgaagagctccaagttcattattgacgaggaatgccatgagtctgtgctgatttctagcactgtcaggctgttagagtctcttgatctgacctccgccgtagggcagcttctgaatgaagctgtccaagctcaaaataatacctaccgcacgggtatcagtaccctgctctttctggtcggcgcgtggagctccgcagtggaggagtgtctgcacctgggcgttcctataagcatcatcgtcagcgttatgtcggagggcctgaatttttgtagcgaagaggttgtcagtctgcatgtaccagttcataatatattcgattgcatggattccaccaagactttctctcagctcgagacattttccgtgagtttatgccccttcctgcaggtccccagcgacaccgaccttatcgaggaattacacggactcaaggacgtcgcgtctcagactttaacaatctctaacctgtcagggaggcctttgaagtcttacgagttattcaaaccgcagacaaaggttgaggccgacaacaacaccagccgcaccctgaagaattccttattggcggatacctgttgcaggcagtctattctgattcattcaaggcatttcaacagaaccgacaatacggagggggtgagcaaaccagacggcttccaagagcatgtgacagcaacacacaagacgtatcgatgtaacgatctggtggagctcgccgttggtctcagccacggcgaccactcatccatgaagctggtcgaggaagctgtacagctgcagtatcagaacgcctgtgtgcagcagggaaactgtaccaaaccattcatgtttgatatatctcggatctttacctgttgcctcccaggcctacctgaaacgagttcctgtgtgtgccccggatacattacggtggtctcagtgtccaacaatcccgtgataaaagagctccagaatcaacctgtgaggattgtgctcatcgaaggcgacctgaccgagaactaccgtcacttgggcttcaataaaagcgcaaacatcaagacagtgctcgattccatgagacttcaggaagatagctccgaggagctgtgggctaaccatgtactgcaggttctaatccagttcaaggtgaatctcgttctggtgcaggggaatgtctccgagaggctcattgagaagtgcatcaatagcaagaggttggtgattggctccgtcaatggatccgttatgcaggcctttgccgaggcggccggcgccgtccaggtggcctacatcacacaggtcaacgaagactgtgtaggcgacggcgtctgtgtgacattctggcgctcttctcccctcgatgtggtcgatagaaataatcgcattgctattcttctaaagacagagggaatcaatcttgttacagcggtgcttacaaatccagtgactgcgcagatgcagattaaggaagacaggttttggacttgcgcctatagactctactacgcactcaaggaagagaaagtgtttctggggggtggcgccgttgagtttctctgtctcagctgcctgcacatcctggccgaacagtcactcaagaaggaaaaccatgcatgctctgggtggctgcataacacctcatcctggctggcatccagtcttgccatctatcgccccactgtactgaagttccttgctaacggatggcagaaatacctttcaaccctgctgtataacactgccaactacagcagcgagttcgaagcttctacctacattcagcaccatttgcagaacgccacggacagtggcagcccctctagttacatcctgaacgagtattcaaaattaaattcaaggatctttaactctgacatcagcaacaaactggaacagatccctcgcgtttatgacgtcgtcaccccaaaaatcgaggcctggcgcagggctttggatttagtcttgctggtcttgcaaactgacagcgagatcataaccggccacggacatactcagataaacagtcaggaacttacaggttttttgttcctatag

SEQ ID NO: 244090 - DNA, 576 bp, Artificial Sequence
  derived and/or modified sequence
atggtgatggcctgccgggtggtgaacaagcggcggcacatgggcctgcaacagctttccagcttcgccgaaactggacgcacctttctcgggcctttaaagtcctcaaaatttataatcgatgaagagtgccacgaatccgtgcttatctcctcgacagttcgcttgctggagagtcttgatctgaccagtgccgtggggcagctacttaacgaggctgtgcaggcgcagaacaacacgtaccgtaccggaatttctacactgttgtttctagttggcgcgtggtcttccgctgtggaagaatgcttgcacctgggcgtccctatctccataatcgttagcgtcatgtctgaaggactgaacttctgttccgaagaggttgtaagcctccacgtgccggtgcataatatattcgactgtatggattctaccaagacatttagtcagcttgagacgtttagtgtatccctatgtccctttttgcaggtgccctctgatacagatctcatcgaagaactgcatggcctcaaagacgtggcatcccaaacccttaccatatctaatctgtcaggatag

SEQ ID NO: 244091 - DNA, 2133 bp, Artificial Sequence
  derived and/or modified sequence
atggtgatggcctgccgggtggtgaacaagcggcggcacatgggcctgcagcagctcagctccttcgctgaaacaggtcggacatttttaggaccactgaagtcaagcaaattcataatcgacgaggagtgccatgaatccgttctcatctcctcaacagtgcgcctcctggaaagtttagatcttacttcagctgtgggtcaactgctgaatgaggctgtccaggctcaaaacaacacctacagaacaggaatctctacactgctgttcctagtcggggcatggagctccgccgtggaagaatgtctgcacttaggagtgccaatcagcattatcgtctctgtgatgtcagagggcctgaatttttgcagcgaggaggtggtgagcctacatgtccccgtccacaacatcttcgactgtatggatagtaccaagactttctcccagttagaaactttcagcgtcagtctgtgcccatttttacaggtgcccagtgacaccgacctgattgaggaactacacgggttaaaagacgtggcatcccaaacactcaccattagcaacctgtccgggcgacccctgaagtcctatgaactcttcaagcctcaaactaaagtggaggcagacaataacacctcccgtaccctgaagaacagccttctggctgacacctgttgtagacagagcatcctaattcactctcgacactttaaccgtaccgataacactgaaggagtgtccaaacccgacggtttccaggagcatgtcaccgccacacacaaaacttatcgttgtaacgatcttgtcgaactggcagtaggactttctcacggtgatcactcctccatgaaactggtcgaggaggcagtccagctccagtatcagaatgcttgcgttcagcagggcaactgtacaaagcctttcatgttcgacatatccagaatttttacctgctgcctccctgggctgccagagacctcgtcttgtgtgtgccccggttatatcaccgtggtttccgtgagcaataatcctgtaataaaggaactgcagaaccagccagtgcgtattgtgttgattgagggagatctcactgagaattaccgacatctggggttcaacaaaagtgctaatattaagactgttctggacagcatgcgcctccaggaagactcaagtgaagaactgtgggctaatcacgtcctgcaggtcctgatccagttcaaggtgaatctggtcctggtccagggcaacgtgtctgaacggcttatagaaaagtgcataaattccaagagactcgtgattgggtcagtgaatggcagtgttatgcaggcttttgcagaggccgcaggcgccgtgcaggtggcctatataacccaggtgaatgaagattgcgtgggcgatggcgtgtgtgtgacattctggaggtcgagtccccttgacgtagtcgatcgcaataaccggatcgccattctcctcaaaacagaagggattaatctcgttacagccgtgttgactaacccagttacagcacagatgcagatcaaggaggaccgtttttggacgtgcgcttaccggctgtactacgcccttaaagaggagaaggtatttctcgggggcggcgccgtcgagttcctgtgcctctcttgtttacatatattggccgaacagtctttaaagaaggagaatcatgcctgctctggctggcttcataacaccagctcgtggctagctagttcattggcaatctatcggcctacagtgttgaagttcttggccaacggttggcagaaatacctctccaccctgctgtacaacacggcaaattacagctctgaattcgaggctagcacatacatccagcaccacctgcagaatgctactgatagcggcagcccttcctcatatattctcaacgaatacagcaaactgaactcacgaatttttaactctgatatctccaataagcttgagcagatccctcgcgtgtacgacgttgtgacaccgaaaattgaggcatggcgaagggcacttgatttggtcctgctggtgctgcagacagattcagaaatcattacaggacacgggcacacacagataaactcgcaggaactgacggggttcttgtttctgtag

SEQ ID NO: 244092 - DNA, 2133 bp, Artificial Sequence
  derived and/or modified sequence
atggtcatggcctgtcgcgtggtgaataagcgtcgtcatatgggcctgcagcaattatcaagctttgctgagacgggtcggacattcctgggaccactaaagtctagcaagttcataatcgacgaggagtgtcacgagtctgtcctgattagcagcaccgtccggctgttggagtcgctcgatctgacatctgccgtgggccagctactcaacgaagcagtccaagcacagaataatacatacaggaccggaatctctaccctgctgtttctggtgggcgcttggagcagtgcggtcgaggaatgtctgcatcttggggttcctatttccattattgtcagcgtgatgtctgaggggctgaatttctgttcagaagaggtggtatctctccatgtccccgttcacaacattttcgattgcatggattccaccaagacgttctcccagctagaaacattttctgttagcttatgtccctttttgcaggtccctagcgacactgatttgatagaagagctgcacggactgaaagacgtggcgtctcagaccctgactatctccaatctgagcggaagacccttaaagtcttacgaattgttcaaacctcagactaaagtcgaggccgacaataacactagccgcaccctaaaaaattcactgttggctgacacctgttgtaggcagtcaatcttgattcacagtcgacacttcaatcgcaccgataacacagagggcgtgagcaagccagatgggtttcaggagcatgtgacggcgacccataaaacctaccgctgcaatgatttggtggagcttgctgtcggtttgtctcatggagaccacagctcaatgaaactcgtggaggaagccgtgcagctgcagtaccagaatgcatgcgtccagcaggggaactgcacaaaacctttcatgttcgacattagtagaatctttacttgctgtctgcctggacttcccgagacctcctcctgcgtgtgcccaggctacataaccgtcgtgagtgtaagtaataatcctgtgatcaaggaactgcagaaccagcctgtacgaatagtgctgattgagggggatctcaccgaaaactatcgccatttgggcttcaacaaatccgccaatatcaaaactgttcttgactccatgcgcctccaagaagactcctccgaagaattatgggccaaccacgtgctccaagtccttattcagtttaaggtgaacctggtgctggtgcagggcaacgtgtccgaacgcttgatcgaaaagtgtattaatagcaagagactggtcattggtagtgtcaatggatccgtgatgcaagcattcgcagaggccgcaggggcagtgcaggtggcatacataacccaggttaatgaagactgcgtgggcgacggtgtctgcgtgactttctggaggtctagtcccctggatgtggtggatcgtaataacaggatagcgatcttactcaagactgaggggataaacctggtgacagctgtgctgaccaatccagtgactgctcagatgcagatcaaggaggaccggttctggacatgtgcctataggctttattacgccctgaaggaggagaaagtattcctgggaggcggagccgtggaattcctctgcctgtcttgtcttcatatcctcgccgagcagtcactgaaaaaagagaatcatgcttgtagtgggtggctgcataacacaagtagttggctggcatcttcactcgctatttaccgccctacagtgctgaagttccttgctaatgggtggcaaaaatatctgtcgacactgttatacaataccgccaactattcatcggagttcgaagcttccacctatattcagcatcacctgcaaaatgcaaccgacagcggcagtccatcttcatacatactcaacgagtactcaaaacttaactcccggatttttaactctgacatctcaaataaattagaacaaattcccagagtatacgatgtcgtcactcccaagatcgaggcctggaggcgagccctagacctggtccttctggtgctccagaccgattctgaaattatcaccggacatgggcatacacaaatcaatagccaggagttaacaggctttctttttctgtag

SEQ ID NO: 244093 - DNA, 576 bp, Artificial Sequence
  derived and/or modified sequence
atggttatggcctgccgcgtggtgaataagagacgtcacatgggactacagcaactcagcagcttcgccgaaaccggacgcacgttcctaggccctctgaagtcaagcaaatttataattgacgaggaatgccatgagtcggttctgatttcttctacagtgagactgctggagagtctcgatctgacttctgccgtggggcagctattgaatgaagcagtccaggcccagaacaacacatacagaaccggcatcagcacgctcctcttcttggtgggggcatggtccagtgccgtagaggagtgtctgcatttaggcgtacctatctcgatcattgtgtccgtcatgtccgagggtctgaatttttgtagcgaagaggtggtctccctccacgtgccagttcacaacattttcgactgcatggatagcacaaaaacgttttctcagttagagacattttcagtctctctgtgcccctttcttcaagtgccaagcgatactgacctgattgaggagctacatggcctgaaggatgtggcatctcagacattaacgattagtaacctttccggctag

SEQ ID NO: 244094 - DNA, 2133 bp, Artificial Sequence
  derived and/or modified sequence
atggtcatggcttgcagggtcgttaacaagcggagacacatgggtttacagcaattaagctcgttcgctgaaacaggccgaacatttctcggaccactgaagagttctaagttcattatcgacgaggagtgccatgagtcagtgctcatttcttctacagtgagactgcttgagagcctcgacctgacttcagccgtcgggcagctgctgaacgaggccgtgcaggcccagaacaacacctatcgaaccggcatttcaacgttgctctttttggttggtgcctggagcagtgcagtggaagaatgcttgcatttgggggtgcctatctcgatcatcgtgagcgtaatgagcgagggcctgaatttttgttccgaagaagttgtttctctgcatgtcccagttcacaacatcttcgattgcatggatagcaccaagacattctctcaactcgagacgttctccgtttctctttgcccattccttcaagttcctagcgacaccgacctgatcgaggagcttcatggacttaaggacgttgcatcgcagacactcactatcagcaatctctcaggtagacccttaaaatcctatgaattgttcaaacctcaaaccaaggtggaagctgacaataatacctcccggactctgaaaaacagtctacttgctgacacatgctgccggcagtccattctcatccattcccgccattttaacagaaccgataatacagaaggcgtctctaagccggatggctttcaggaacacgtgaccgccacacacaagacgtatcgttgcaatgacctggttgagctggcagttggactgagccacggagaccatagcagtatgaagctcgtggaggaagccgtacagctgcagtatcagaatgcctgcgtccagcagggaaattgcacgaagccttttatgttcgatatctcacgcatatttacctgttgtctgccgggtctgccagaaacgtcaagttgcgtctgtcctggatatatcactgtggtctctgtgagcaacaatcctgtaattaaggagcttcaaaaccaacctgtcagaattgtgctgattgagggggacctgaccgagaattatagacatctgggatttaataagtcagccaacattaaaacggtgctggattccatgcgactgcaagaagactcaagcgaggagctctgggcaaatcatgtgctccaggtgttgattcaatttaaggttaacctcgtactcgtacagggcaatgtgtccgaaagactgatagagaagtgcataaattctaagcgtctggtcatcggttcagtgaacggcagcgtgatgcaggcgttcgccgaggccgctggtgcggtgcaggtagcctacatcacccaagtgaacgaggattgcgtgggggacggcgtttgcgtgaccttctggaggtcctcgcccctcgatgtggtggacaggaacaatcgcatcgccattctcttgaaaactgagggaattaacctagtcactgcagttctaacgaaccccgtcacagcgcagatgcagattaaggaggacaggttttggacttgtgcgtacagactctattacgccctcaaggaggaaaaagtcttcctggggggtggagctgtggagttcctctgcctgtcatgtctccacatactggcagagcaaagccttaagaaagagaatcatgcctgctcaggatggctgcacaatactagttcctggcttgccagctcattggccatttacaggcctacggtcctgaaattcctggctaacgggtggcaaaagtacttgtctaccctgctgtacaacacagctaactactcatccgaattcgaagcttcgacctatatccagcatcaccttcagaatgctaccgacagtggctctcctagctcctacatcctcaatgaatactcgaagctaaattcccggatctttaacagtgatataagcaacaaactggagcagattccgagggtgtacgacgtggtcactcccaagatcgaagcctggaggagggccttggacctggtgctgctggtgctgcagactgacagcgagattattaccggacatggccatacacagatcaattctcaggaactgactgggttcttgtttttgtag

SEQ ID NO: 244095 - DNA, 3244 bp, Artificial Sequence
  derived and/or modified sequence
gtctcttagcaactaagcccccggctcctccagaagcccctcttcgcacatgcgcaaactgcggacggggaactgggctccctagccctggcgtttttggtgttgctgtcccagccagaatcgcgtctggccggtgggaagccgggaactccagccccctgtaggagaggagaaaggagcgagatcatgatacatggtgatggcttgcagagtcgtaaacaaaagaagacacatgggacttcaacaactttcatcattcgcggaaacaggaagaactttcctaggcccactaaaatcatccaaatttattatagatgaagaatgtcatgaaagtgtattaatcagttcaacagtaaggcttcttgaaagtttggatttaaccagtgcagtgggacaacttctcaatgaagcagttcaagcacaaaacaacacatatagaactggaatcagtactcttttgtttcttgttggtgcttggagcagtgcagttgaagaatgtcttcatcttggtgtccccatttccataatagtatcagtaatgtcagaaggcttaaacttttgtagtgaagaggtagtttctcttcatgtacctgttcacaatatatttgactgtatggacagcacaaaaacattttctcaacttgaaacatttagtgtaagtttgtgtccttttctacaggtcccttcagatactgatttgatagaggaattgcatggtctcaaagatgttgcctctcaaacactgaccatttccaacctttctgggagacctcttaaatcatatgaattatttaaacctcagacaaaggttgaagcagataacaacacatcacgaactctgaaaaacagcctgcttgcagatacctgctgcagacagtcaatactaatccacagtaggcattttaataggacagataatactgaaggggtaagcaaaccagatggatttcaagaacatgttacagctactcacaaaacttacagatgtaatgatttggtagagttggcagtaggcttgagtcatggagatcacagcagcatgaagttagtagaagaagcagtacagctgcaatatcagaatgcttgtgtgcaacaaggcaactgtacaaaaccatttatgtttgacatttcaagaattttcacttgctgtctaccaggcttacctgaaacttcttcttgtgtttgtccaggatatatcactgttgtgtcagtatctaataatcctgtgatcaaggaattgcagaatcagcctgtgcgaatagttctcattgagggtgacctcacagagaattaccgccacctgggatttaataagtctgcaaatattaaaacagtattagatagcatgcggcttcaagaagacagctcagaagaactgtgggcaaatcacgtgttacaggtgttaatccagttcaaggtgaaccttgtcctggtacaaggaaatgtgtccgaacgcttaattgaaaaatgtataaacagtaagcggttggtaatcggctcagtgaatggcagtgtgatgcaggcttttgcagaggctgcaggagcagtacaggtggcctacattacacaagtgaatgaagattgtgtgggcgacggggtctgcgtgaccttctggagaagcagccctttggatgttgtagataggaacaacagaatcgcaatcttattaaaaacagaaggaattaatttggttacggccgtgctcactaacccagttactgcacagatgcaaatcaaagaagataggttctggacatgtgcctatcgtttgtattatgctctaaaagaggaaaaggtcttccttggaggtggtgcagttgaatttttgtgtcttagctgtcttcatattcttgcagagcaatctctgaaaaaagaaaaccatgcctgctcagggtggctgcataatacttcctcttggctggcttcatctctggcaatatacagaccaactgtgcttaaattcctggcaaatggatggcagaaatacctttcaactctcctatataacactgccaattactcatcagaatttgaagccagcacatacattcaacatcatctgcaaaatgccacagactctggctctccttcatcttacatcttgaatgaatatagtaaactaaatagtagaatttttaattcagacatttcaaataaactggagcagattccgagagtttatgacgttgttacaccaaagattgaggcgtggcgccgagcattggatttagtattgttagtacttcagacagacagtgaaataattactggacatggacacacacagataaattcacaggaattaacgggctttctatttttgtagtgttactggctaagtctttggaaaataatttttcataatatgtcatgctaataataaatatattgatagccaagtcatggtgcctaaaatgccagctattgccaagaagaaaatagttgatgtctgtcaataactgtgcatggtctgagattttaccctacttataagctaacaagttagcctgttactgtttcgtgggatgctacagaatgcataagacacctgggtcagaaacaaaggacttatcgctcacagcaaaagctgtagccagagcttcatgttggttttattcagttcctcatttttctagttcccacaggaggaacacaaagggcccatgatgaaagcctgcacacagtgggttatgttgtaagcttgggttattaactgcttttatagtaagcaaaaaaatcctggtctttgtccaaagggagttattaccccatacttgaagatagcttagtgtaaacacaagcctaggacatggactaggtaaagacaaagtccttgcattcttgacatacccagtaagtatgcagggacactcagagcccatagtggatagtctcttccaacagtctgctcctcagcctgagatgttcttggccaaacttgaattttcacatgagtatgccactctatcagctactctgattaacctgacagtcgggttgtttagtcagtaccaaatttgttcatttggtctcatatagcaattaatgcaggctattatcagacacagcagcaggatgaagccaacctgcagtattaacctcagtcctgtcccccaaggtcttgactcaatcaactctaagttccaagggaggaccaataggtctttttattaggcagccagaatgtagtgaaggacaatttattatactttatgacccaataaagggagctttgactgacgta

SEQ ID NO: 244096 - DNA, 859 bp, Artificial Sequence
  derived and/or modified sequence
tttggtgttgctgtcccagccagaatcgcgtctggccggtgggaagccgggaactccagccccctgtaggagaggagaaaggagcgaggcaggagaggaaaacaagtgcaaagtgcattcttgaagcactctgtcaaatcacttttcatgcttcattgagtagaaacatggcacattttccaaagccatcagcctgtcttgttcatattatatcccagacagacacgcaagtattgtaatcattgataaaaatctcattaggcttctggaaaatagatcatgatacatggtgatggcttgcagagtcgtaaacaaaagaagacacatgggacttcaacaactttcatcattcgcggaaacaggaagaactttcctaggcccactaaaatcatccaaatttattatagatgaagaatgtcatgaaagtgtattaatcagttcaacagtaaggcttcttgaaagtttggatttaaccagtgcagtgggacaacttctcaatgaagcagttcaagcacaaaacaacacatatagaactggaatcagtactcttttgtttcttgttggtgcttggagcagtgcagttgaagaatgtcttcatcttggtgtccccatttccataatagtatcagtaatgtcagaaggcttaaacttttgtagtgaagaggtagtttctcttcatgtacctgttcacaatatatttgactgtatggacagcacaaaaacattttctcaacttgaaacatttagtgtaagtttgtgtccttttctacaggtcccttcagatactgatttgatagaggaattgcatggtctcaaagatgttgcctctcaaacactgaccatttccaacctttctggg

SEQ ID NO: 244097 - DNA, 3431 bp, Artificial Sequence
  derived and/or modified sequence
gtctcttagcaactaagcccccggctcctccagaagcccctcttcgcacatgcgcaaactgcggacggggaactgggctccctagccctggcgtttttggtgttgctgtcccagccagaatcgcgtctggccggtgggaagccgggaactccagccccctgtaggagaggagaaaggagcgaggcaggagaggaaaacaagtgcaaagtgcattcttgaagcactctgtcaaatcacttttcatgcttcattgagtagaaacatggcacattttccaaagccatcagcctgtcttgttcatattatatcccagacagacacgcaagtattgtaatcattgataaaaatctcattaggcttctggaaaatagatcatgatacatggtgatggcttgcagagtcgtaaacaaaagaagacacatgggacttcaacaactttcatcattcgcggaaacaggaagaactttcctaggcccactaaaatcatccaaatttattatagatgaagaatgtcatgaaagtgtattaatcagttcaacagtaaggcttcttgaaagtttggatttaaccagtgcagtgggacaacttctcaatgaagcagttcaagcacaaaacaacacatatagaactggaatcagtactcttttgtttcttgttggtgcttggagcagtgcagttgaagaatgtcttcatcttggtgtccccatttccataatagtatcagtaatgtcagaaggcttaaacttttgtagtgaagaggtagtttctcttcatgtacctgttcacaatatatttgactgtatggacagcacaaaaacattttctcaacttgaaacatttagtgtaagtttgtgtccttttctacaggtcccttcagatactgatttgatagaggaattgcatggtctcaaagatgttgcctctcaaacactgaccatttccaacctttctgggagacctcttaaatcatatgaattatttaaacctcagacaaaggttgaagcagataacaacacatcacgaactctgaaaaacagcctgcttgcagatacctgctgcagacagtcaatactaatccacagtaggcattttaataggacagataatactgaaggggtaagcaaaccagatggatttcaagaacatgttacagctactcacaaaacttacagatgtaatgatttggtagagttggcagtaggcttgagtcatggagatcacagcagcatgaagttagtagaagaagcagtacagctgcaatatcagaatgcttgtgtgcaacaaggcaactgtacaaaaccatttatgtttgacatttcaagaattttcacttgctgtctaccaggcttacctgaaacttcttcttgtgtttgtccaggatatatcactgttgtgtcagtatctaataatcctgtgatcaaggaattgcagaatcagcctgtgcgaatagttctcattgagggtgacctcacagagaattaccgccacctgggatttaataagtctgcaaatattaaaacagtattagatagcatgcggcttcaagaagacagctcagaagaactgtgggcaaatcacgtgttacaggtgttaatccagttcaaggtgaaccttgtcctggtacaaggaaatgtgtccgaacgcttaattgaaaaatgtataaacagtaagcggttggtaatcggctcagtgaatggcagtgtgatgcaggcttttgcagaggctgcaggagcagtacaggtggcctacattacacaagtgaatgaagattgtgtgggcgacggggtctgcgtgaccttctggagaagcagccctttggatgttgtagataggaacaacagaatcgcaatcttattaaaaacagaaggaattaatttggttacggccgtgctcactaacccagttactgcacagatgcaaatcaaagaagataggttctggacatgtgcctatcgtttgtattatgctctaaaagaggaaaaggtcttccttggaggtggtgcagttgaatttttgtgtcttagctgtcttcatattcttgcagagcaatctctgaaaaaagaaaaccatgcctgctcagggtggctgcataatacttcctcttggctggcttcatctctggcaatatacagaccaactgtgcttaaattcctggcaaatggatggcagaaatacctttcaactctcctatataacactgccaattactcatcagaatttgaagccagcacatacattcaacatcatctgcaaaatgccacagactctggctctccttcatcttacatcttgaatgaatatagtaaactaaatagtagaatttttaattcagacatttcaaataaactggagcagattccgagagtttatgacgttgttacaccaaagattgaggcgtggcgccgagcattggatttagtattgttagtacttcagacagacagtgaaataattactggacatggacacacacagataaattcacaggaattaacgggctttctatttttgtagtgttactggctaagtctttggaaaataatttttcataatatgtcatgctaataataaatatattgatagccaagtcatggtgcctaaaatgccagctattgccaagaagaaaatagttgatgtctgtcaataactgtgcatggtctgagattttaccctacttataagctaacaagttagcctgttactgtttcgtgggatgctacagaatgcataagacacctgggtcagaaacaaaggacttatcgctcacagcaaaagctgtagccagagcttcatgttggttttattcagttcctcatttttctagttcccacaggaggaacacaaagggcccatgatgaaagcctgcacacagtgggttatgttgtaagcttgggttattaactgcttttatagtaagcaaaaaaatcctggtctttgtccaaagggagttattaccccatacttgaagatagcttagtgtaaacacaagcctaggacatggactaggtaaagacaaagtccttgcattcttgacatacccagtaagtatgcagggacactcagagcccatagtggatagtctcttccaacagtctgctcctcagcctgagatgttcttggccaaacttgaattttcacatgagtatgccactctatcagctactctgattaacctgacagtcgggttgtttagtcagtaccaaatttgttcatttggtctcatatagcaattaatgcaggctattatcagacacagcagcaggatgaagccaacctgcagtattaacctcagtcctgtcccccaaggtcttgactcaatcaactctaagttccaagggaggaccaataggtctttttattaggcagccagaatgtagtgaaggacaatttattatactttatgacccaataaagggagctttgactgacgt

SEQ ID NO: 244098 - DNA, 2133 bp, Artificial Sequence
  derived and/or modified sequence
atggtgatggcctgcagagtggtgaacaagagaagacacatgggcctgcagcagctgagcagcttcgccgagaccggcagaaccttcctgggccccctgaagagcagcaagttcatcatcgacgaggagtgccacgagagcgtgctgatcagcagcaccgtgagactgctggagagcctggacctgaccagcgccgtgggccagctgctgaacgaggccgtgcaggcccagaacaacacctacagaaccggcatcagcaccctgctgttcctggtgggcgcctggagcagcgccgtggaggagtgcctgcacctgggcgtgcccatcagcatcatcgtgagcgtgatgagcgagggcctgaacttctgcagcgaggaggtggtgagcctgcacgtgcccgtgcacaacatcttcgactgcatggacagcaccaagaccttcagccagctggagaccttcagcgtgagcctgtgccccttcctgcaggtgcccagcgacaccgacctgatcgaggagctgcacggcctgaaggacgtggccagccagaccctgaccatcagcaacctgagcggcagacccctgaagagctacgagctgttcaagccccagaccaaggtggaggccgacaacaacaccagcagaaccctgaagaacagcctgctggccgacacctgctgcagacagagcatcctgatccacagcagacacttcaacagaaccgacaacaccgagggcgtgagcaagcccgacggcttccaggagcacgtgaccgccacccacaagacctacagatgcaacgacctggtggagctggccgtgggcctgagccacggcgaccacagcagcatgaagctggtggaggaggccgtgcagctgcagtaccagaacgcctgcgtgcagcagggcaactgcaccaagcccttcatgttcgacatcagcagaatcttcacctgctgcctgcccggcctgcccgagaccagcagctgcgtgtgccccggctacatcaccgtggtgagcgtgagcaacaaccccgtgatcaaggagctgcagaaccagcccgtgagaatcgtgctgatcgagggcgacctgaccgagaactacagacacctgggcttcaacaagagcgccaacatcaagaccgtgctggacagcatgagactgcaggaggacagcagcgaggagctgtgggccaaccacgtgctgcaggtgctgatccagttcaaggtgaacctggtgctggtgcagggcaacgtgagcgagagactgatcgagaagtgcatcaacagcaagagactggtgatcggcagcgtgaacggcagcgtgatgcaggccttcgccgaggccgccggcgccgtgcaggtggcctacatcacccaggtgaacgaggactgcgtgggcgacggcgtgtgcgtgaccttctggagaagcagccccctggacgtggtggacagaaacaacagaatcgccatcctgctgaagaccgagggcatcaacctggtgaccgccgtgctgaccaaccccgtgaccgcccagatgcagatcaaggaggacagattctggacctgcgcctacagactgtactacgccctgaaggaggagaaggtgttcctgggcggcggcgccgtggagttcctgtgcctgagctgcctgcacatcctggccgagcagagcctgaagaaggagaaccacgcctgcagcggctggctgcacaacaccagcagctggctggccagcagcctggccatctacagacccaccgtgctgaagttcctggccaacggctggcagaagtacctgagcaccctgctgtacaacaccgccaactacagcagcgagttcgaggccagcacctacatccagcaccacctgcagaacgccaccgacagcggcagccccagcagctacatcctgaacgagtacagcaagctgaacagcagaatcttcaacagcgacatcagcaacaagctggagcagatccccagagtgtacgacgtggtgacccccaagatcgaggcctggagaagagccctggacctggtgctgctggtgctgcagaccgacagcgagatcatcaccggccacggccacacccagatcaacagccaggagctgaccggcttcctgttcctgtag

SEQ ID NO: 244099 - DNA, 576 bp, Artificial Sequence
  derived and/or modified sequence
atggtgatggcctgcagagtggtgaacaagagaagacacatgggcctgcagcagctgagcagcttcgccgagaccggcagaaccttcctgggccccctgaagagcagcaagttcatcatcgacgaggagtgccacgagagcgtgctgatcagcagcaccgtgagactgctggagagcctggacctgaccagcgccgtgggccagctgctgaacgaggccgtgcaggcccagaacaacacctacagaaccggcatcagcaccctgctgttcctggtgggcgcctggagcagcgccgtggaggagtgcctgcacctgggcgtgcccatcagcatcatcgtgagcgtgatgagcgagggcctgaacttctgcagcgaggaggtggtgagcctgcacgtgcccgtgcacaacatcttcgactgcatggacagcaccaagaccttcagccagctggagaccttcagcgtgagcctgtgccccttcctgcaggtgcccagcgacaccgacctgatcgaggagctgcacggcctgaaggacgtggccagccagaccctgaccatcagcaacctgagcggctag

SEQ ID NO: 244100 - protein, 549 aa, Artificial Sequence
  derived and/or modified sequence
MAEASFGSSSPVGSLSSEDHDFDPTAEMLVHDYDDERTLEEEEMMDEGKNFSSEIEDLEKEGTMPLEDLLAFYGYEPTIPAVANSSANSSPSELADELPDMTLDKEEIAKDLLSGDDEETQSSADDLTPSVTSHETSDFFPRPLRSNTACDGDKESEVEDVETDSGNSPEDLRKEIMIGLQYQAEIPPYLGEYDGNEKVYENEDQLLWCPDVVLESKVKEYLVETSLRTGSEKIMDRISAGTHTRDNEQALYELLKCNHNIKEAIERYCCNGKASQGMTAWTEEECRSFEHALMLFGKDFHLIQKNKVRTRTVAECVAFYYMWKKSERYDYFAQQTRFGKKRYNHHPGVTDYMDRLVDETEALGGTVNASALTSNRPEPIPDQQLNILNSFTASDLTALTNSVATVCDPTDVNCLDDSFPPLGNTPRGQVNHVPVVTEELLTLPSNGESDCFNLFETGFYHSELNPMNMCSEESERPAKRLKMGIAVPESFMNEVSVNNLGVDFENHTHHITSAKMAVSVADFGSLSANETNGFISAHALHQHAALHSE

SEQ ID NO: 244101 - DNA, 1650 bp, Artificial Sequence
  derived and/or modified sequence
atggccgaagcgagttttggcagctcctcccccgtgggttccttgagctcagaagaccacgatttcgatcctaccgctgaaatgttagtgcacgactatgatgatgaaaggacgcttgaagaggaggagatgatggacgagggaaagaatttctcttccgaaattgaggacctggagaaagagggcaccatgcccctggaggacttactggccttctatgggtacgaacctactataccggcggtggctaatagcagtgcaaatagctcaccatctgagctcgctgacgagctgccagacatgacactagataaggaagagatcgccaaggacctcctgtctggagatgatgaggagacccagtcttccgccgatgatctcacgcctagtgttacatcccacgaaacctctgacttctttcctcggcctctccgatccaatacggcgtgtgacggggacaaagaatcagaggtggaggatgtcgagaccgactctgggaactctcctgaagatctgcgcaaagagatcatgattggactgcagtatcaagccgagattcctccttacttaggagagtacgacgggaatgaaaaagtgtatgaaaacgaggatcagctattgtggtgccccgatgtcgtgctggaatctaaagtgaaggaatatttggtcgagactagtctccgcaccggctccgagaaaattatggacaggatcagcgcaggcacccacacaagggataacgagcaggcactgtacgagttgcttaaatgcaaccataatattaaagaagccattgaaagatactgctgtaacggaaaggcatctcaaggaatgacagcgtggaccgaggaagagtgccgttctttcgaacacgctcttatgctttttggaaaggattttcatttgatccaaaaaaacaaagtgaggaccaggactgtcgccgagtgtgtcgctttctattacatgtggaagaaatctgagcgctacgactactttgcacaacagactcgctttggcaagaagcgttacaatcatcacccaggcgtcaccgattacatggatcggctcgtggacgaaacggaggctttaggtgggacggtgaatgcctctgcgctcacttcgaaccggcccgagccaatccccgaccaacagctgaacatacttaactcattcacagcatctgatctgacagctctcacaaatagtgtagctacagtgtgtgaccccacggatgtgaactgcttggatgactcgtttcctccactcggtaataccccgcgaggccaggtgaaccacgtgccagtggttaccgaggaactgctcacactgcccagcaatggggaatccgactgctttaatttattcgaaaccggtttctatcactctgagctcaatcctatgaatatgtgctccgaggagagtgaacgaccagccaagcggctgaagatggggatcgccgtgcccgagtccttcatgaatgaggtctccgtcaacaacctcggtgtggattttgaaaatcatacccaccacatcacgtcagccaagatggccgttagcgtagcagattttggcagtctttccgccaatgaaaccaacggattcatttctgcccacgctctccatcagcatgccgccttacattccgagtag

SEQ ID NO: 244102 - DNA, 5198 bp, Artificial Sequence
  derived and/or modified sequence
tcgttcgccctaaaggtaccaatatggcggaggcttcttttggaagttcgagcccagttgggtctttgtcttctgaggatcatgattttgaccccactgctgagatgttggtccatgactatgatgatgaaagaactcttgaagaagaggaaatgatggatgagggtaaaaacttcagttcagaaattgaagacttagaaaaggaaggaaccatgcctctagaagatttactggcattctatggctatgaacctacaattccagcagttgcaaattccagtgcaaatagttccccaagtgaactggcagatgaactaccagacatgacactagacaaagaggaaatagcaaaagacctgttgtcaggtgatgacgaggaaactcagtcttctgcggatgatctgacgccatctgtgacttcccatgaaacttctgatttcttccctaggcctttacgatcaaatactgcatgtgatggtgataaggaatcagaggttgaagatgttgaaacagacagtggtaattcacctgaagatttgaggaaggaaataatgattggtttacaatatcaggcagagattcccccttatcttggagagtacgatggtaatgagaaagtatatgaaaacgaagaccagttactttggtgtcctgatgtggttttggagagcaaagttaaggaataccttgttgagacttcattaaggactggcagtgaaaaaataatggataggatttctgcaggaacacacacaagggacaatgaacaggcattatatgaacttctcaagtgtaaccacaatataaaggaagcaatcgaaagatactgctgcaatggaaaggcctctcaaggaatgactgcatggacggaagaagaatgccgaagctttgaacatgcactcatgctttttggaaaagattttcatcttatacagaagaataaggtgagaactaggacagttgctgagtgtgtagcattctactatatgtggaagaaatctgaacgttatgattactttgctcaacagacaagatttgggaaaaaaagatataaccatcaccctggagttacggactatatggatcgtttagtagatgaaacagaagctttgggtgggacggtaaatgcttcagccttaacttctaaccggcctgagcctattcctgatcaacagctaaacattctcaactccttcactgccagtgacttgacagctttgaccaacagtgtagcaaccgtctgcgaccccacagatgtgaattgtttggatgatagctttcctccactgggcaacacaccccgtggacaagttaatcatgtgcctgttgtaacagaagagttactcaccctgcccagcaatggggaaagtgattgttttaatttatttgagactggattttatcactcggagctaaaccctatgaacatgtgcagtgaagagtcagagagaccagcaaaaagattgaaaatgggcattgccgtccctgaatcctttatgaatgaagtttctgtaaataacctgggtgtggactttgaaaatcacacacatcacatcaccagtgccaaaatggctgtttctgtggctgactttggcagtctctctgccaacgagaccaatggtttcatcagtgcccatgctctgcatcagcacgcggccctacactctgagtgacctgagtgaggatcccggaactgcgtgtgcagcaccagtaaacttgaggggagctatcaggtttgcatagtctttcactggaagtttgaacctttctcactatgacatcagtgatgtcagtatgtatagaactatatcttgatttatcaagagtattttcatttttcaatccataaatgtggaaatgaactatgatcagcagagttgggaactaagattgaactctgtggtgcagctttaagctctgcttctctcttcctcatctcccaatacctcttccccactcccttctttttctattcttttgtgttccccactgccctcactcccaattttaaaacctgtagacagaggccaccagctcaaaaccagcacagatgttctgaactgaatggtgtggcctgtttttgtgtaaattccttttgccgtaatggatgcagtggaataacaatgtttacaggtaccgatcccgatccctgctcaatgtagcatttttttggttttattttcttaataaaagcaggggtaggtttctttaaactgcacaaacatgcaaggattttttaaaaatggaaacttctctcatgttattcaactagagcacttcagtttacaaaacagcaagtccatctttatggaagccagcacaaggaactgtgtgcaaataatgaagacgcttgcttggatcctgtttcaaaattctagaccagggctaccttacacagaattggtcatgttactgccaggagatttctgtgtaacttcatttattggctacagttttggcatttgaagatgtggtactcagatggggttttgtccaccattgtcaagattgtaatcttaaaaatcataccagtcattgataatttagtttatcctgaggcagtcgacttgcagaggcacagtctacaaagcctaggatgttgccactcaatggtttacattttgggacatcttttaagttgtttgtagcactgcagttcaaagtgttaatatttagagggacttctagattttatacctaatgcagtagaaccttgaagtatatttaagcttttttgttaagcttgaacagttggcaagaataatgtgagttcctatctgaaatagaatggtacattaccacttttaagttttaaaaattgatagatgttcagatgtatctcaaactcagttttatttttattccaaatattgtgaatgagaagccattgtcctaaactttggccatttttgtgctataaacatgcatttttaagttataaggtgaatcaaacaatatgtaatacagtattaggatgtaatctttgcttttgtagtactgttaaaatagagaattatgttgtttgcaccgtcttaattaaaattcttgatttttactagttgctttgcaaaaaacaaatgtttggctgcattgctaatatttgtaagtataagttgcttcaaggttgtgctgatgagtagataggatgtagtgatcttagtagtgattgaaagggagggtatttattatacaaactgtgaactgcaatgacatccttagttttggatgatgtgtattcttgtttttctttgcagcattttaatgaagattgctttgaagtgtttacgcagtagcacattagtataaaatttagtttagcacagtggacaaaaagtagttaaattaataacttaaaatcagtctctaatttatacatctgaagtatagcattcctgtatgcacacagtaaataatgggtagcctgggctctgtgttactttcttgtatttttatccaagttgtcagcttcttattgctgtgttgttgtgctaaactttgaaccttatttcttttattaaaaatcagtacactttctataatttagtaagatactggccataatcttccattgttataaccttaattttcactctgggtttacagtggctggtctgtataaataatttacacaaagatgactgaatgctaataccagttgcacttaaatgaacatgcccattctcagtagctgatgcagtaatatattcagtttatctatgcattgctggggtcttgatataagatggaaacagtgtttcttatctaaagttttgattatcagcaagttgaatggacactttagttatttaaataaagatttttgaccaaaatccagaaaatggtatgagagaaaaataaattccagctagtttaatagatttttaaatgtcaatctgattttagcctcttagagagtgctaactagctggtaatgtttacttttaattccttgttaaaatgaggcaataatttgcaagatttttgtatataagtgtaaattcttcatatctttttagatctaattcaatattttctgactacttctgccatgtataataccatttttgtgcatgcttgatgtgacattcataaattgtaccactatgactttatccatgtaaaatagctatttattgaattttcttttaaaagctggatttactgggttttttttttctctcagtttaaacatcttaacagagaatttgttactgtttattaaaagaattgcatttggaagcaagaaaacaaccggatttgcaatcatgtgaagaaacaataatgcctttattatcaagtgttaagcacaattcttataacaaactgtgataaattctttttgtttttttttcctttgccccattattttcttatgaacaaaccaaaaattcatggtgagcagttgcagtgttggctgatatatcttttatgtacagggaatttgaaaaggacagtggattcatttagaagtgtaactggtgctgtgattatagcaatacatttgttagttgtacttcatctttttcatgctagctttttaaatgtttagttttcctcttgtcatggtcagctgctgaatttacttgaaggatgtagaatactgtttaaaaaatactaaaatttgtacaattagatcaaagaattgtgcaatcatttcctttttaatttttaaaatgttgaggctcataaatatttgagaacatcagatctaatagagcatagtgatactatttaatttaaccaaagtctctagtgaatatttcaactttgaatgtaaactaacaaataaacctgaccaccaaggagattgtttgcccagagtttcaaagcacattgtctacaaatggaaattgaaataatttataaaatattgacgttactatgttttttaaaaagttcctaattttttcactaaatggaggaaactattagttttattgttaaatatggtagatattaatattcctcttagatgaccagtgattccaattgtcccagtttgaaataagtaccctgtgagtatgagataaattagtgacaatcagaacaagtttcagtatcagatgttcaagaggaagttgctattgcattgattttaatatttgtacataaacactgatttttttgagcattattttgtatttgttgtactttaatacctggtgtacagttccagaaataaaaatctgggaatcttt

SEQ ID NO: 244103 - DNA, 1650 bp, Artificial Sequence
  derived and/or modified sequence
atggccgaggccagctttggcagcagcagccctgtgggcagcctgagcagcgaggaccatgactttgaccccacagctgagatgctggtgcatgactatgatgatgagaggaccctggaggaggaggagatgatggatgagggcaagaacttcagcagcgagattgaggacctggagaaggagggcaccatgcccctggaggacctgctggccttctacggctatgagcccaccatcccagctgtggccaacagcagcgccaacagcagccccagcgagctggctgatgagctgcctgacatgaccctggacaaggaggagatcgccaaggacctgctgtctggagatgatgaggagacccagagcagcgcagatgacctgacccccagcgtgaccagccatgagaccagtgacttcttcccccggcccctgcggagcaacacagcctgtgatggagacaaggagagcgaggtggaggatgtggagacagattctggcaacagccctgaggacctgaggaaggagatcatgattggcctgcagtaccaggccgagatccccccctacctgggggagtatgatggaaatgagaaggtgtatgaaaatgaagaccagctgctgtggtgcccagatgtggtgctggagagcaaggtgaaggagtacctggtggagaccagcctgaggactggaagtgagaagatcatggaccgcatctctgctggcacccacacccgggacaatgagcaggccctgtatgagctgctgaagtgcaaccacaacatcaaggaggccatcgagcgctactgctgcaatggcaaggccagccagggcatgacagcctggacagaggaggagtgccgcagctttgaacatgccctgatgctgtttgggaaggacttccacctgatccagaagaacaaggtgaggaccaggacagtggctgaatgtgtggccttctactacatgtggaagaagtcagaaagatatgactactttgcccagcagaccaggtttgggaagaagcgctacaaccaccaccctggggtgacagactacatggaccggctggtggatgaaacagaggccctgggcggcaccgtgaatgccagcgccctgaccagcaacagacctgagcccatcccagaccagcagctgaacatcctgaacagcttcaccgccagtgacctgacagccctgaccaacagcgtggccaccgtgtgtgaccccacagatgtgaactgcctggatgacagcttcccccccctgggcaacaccccccggggccaggtgaaccacgtgcctgtggtgacagaggagctgctgaccctgcccagcaatggagagagtgactgcttcaacctgtttgaaacaggcttctaccacagcgagctgaaccccatgaacatgtgcagcgaggagagcgagaggcctgccaagaggctgaagatgggcattgctgtgcctgagagcttcatgaatgaggtgtctgtgaacaacctgggcgtggactttgagaaccacacccaccacatcaccagcgccaagatggctgtgtctgtggccgactttggcagcctgagcgccaatgagaccaacggcttcatcagcgcccacgccctgcaccagcacgccgccctgcacagcgagtag

SEQ ID NO: 244104 - DNA, 1650 bp, Artificial Sequence
  derived and/or modified sequence
atggccgaggccagcttcggcagcagcagccccgtgggcagcctgagttctgaggaccacgactttgaccccactgcggagatgcttgtacacgactatgacgacgaacgaacattagaggaagaagagatgatggacgagggcaagaacttttcctctgagattgaggatttggaaaaagagggaaccatgccattggaggatctccttgccttctatggatacgaacccactatccccgccgtcgcaaactctagtgcaaatagctcaccctctgagcttgcagatgaacttcctgatatgactctggacaaggaggaaatagctaaagaccttctcagcggcgatgacgaggaaacacaatcatccgctgacgacctcacgccaagcgtgacatctcatgagacatctgacttctttccacggcccctacggtccaataccgcttgcgatggggataaggaaagcgaagtcgaggatgtggagacagatagcggtaattcccctgaagatcttcgaaaggaaattatgatcgggttacagtaccaagccgaaatacctccataccttggagagtacgatggcaatgaaaaagtttatgagaacgaggaccaactcctttggtgccctgatgtggttttggagagcaaagtgaaggagtacctggtggaaaccagcctgaggaccggttccgagaagataatggacaggatttccgccgggacacataccagggataacgagcaggccctgtacgagctgttgaagtgcaatcacaacatcaaggaggctatcgagaggtactgttgtaacggaaaggcatcacaggggatgactgcttggacagaggaagagtgccggagttttgaacatgccctgatgttgttcggcaaagacttccatctcatccagaaaaacaaggttaggacgcggactgtggccgaatgtgtcgcattttattacatgtggaagaaaagtgagcggtacgactatttcgcccagcaaacccggtttggtaagaaaaggtataaccatcatccgggtgttactgattacatggaccgcttggtggatgaaactgaggcactgggcggcactgtcaatgcttctgcgctcaccagcaacagaccagagcctattcccgatcagcagctgaacatcctcaatagctttaccgcgtccgacctcaccgcgcttactaattctgtggccaccgtgtgtgaccccacagacgtaaactgcctggacgactccttccctccactcggcaacacaccgagagggcaggtcaatcacgtgccagtagttactgaagaacttttaacgttgccaagcaatggggagtcagactgcttcaatctgttcgagactggtttttatcattcggagctgaacccaatgaatatgtgcagcgaagaatctgagagaccagccaagaggttaaagatgggaatcgctgtgcccgaatcatttatgaacgaggttagcgtcaacaatcttggcgtcgactttgaaaaccacactcaccacataacttctgctaagatggctgtgtctgttgctgattttggcagcctgagtgccaacgagacaaatgggtttatttctgcacatgcacttcaccagcatgcggccttacacagtgagtag

SEQ ID NO: 244105 - DNA, 1650 bp, Artificial Sequence
  derived and/or modified sequence
atggctgaggcttcattcgggtctagttctcccgtgggcagtctctccagcgaggatcatgattttgaccccactgccgagatgctcgtgcatgactatgatgacgaacggacgttggaggaagaagagatgatggacgagggcaagaatttcagctcagagatcgaagacctggagaaggagggaaccatgcccctggaggaccttctcgcgttttacggctacgagcccacgataccagccgtcgccaatagctctgctaactcctcccccagcgagttagctgacgaactcccagacatgacacttgataaggaggagatcgctaaggatctgctgtccggcgatgacgaagaaactcagtccagcgccgatgatctcacgccttccgtcacctcccacgaaacaagcgattttttccctcgtccactcagaagtaataccgcctgcgatggcgacaaggagtccgaagtggaagacgtggaaaccgatagtgggaactcccctgaggatttgcggaaggagataatgatcggtctgcaataccaggcagagattcccccttacctcggggagtacgacgggaacgaaaaggtgtatgagaacgaagatcagctgctgtggtgtcctgatgttgtgctggagtccaaggtgaaagagtacctggtagaaacttcccttcggactggctcagagaagataatggaccggataagcgccggtacgcatacacgggacaacgagcaggcactctatgagttgctgaaatgtaaccacaatatcaaggaggccatagagagatactgttgtaacggaaaggccagtcaggggatgaccgcttggaccgaagaagaatgcagatcttttgagcacgcattgatgctgttcgggaaagacttccatctaatccagaaaaacaaggtgcgaacacgcacagtggccgaatgtgttgctttttattacatgtggaagaagagtgagcgctacgactacttcgctcagcagactcgcttcggaaagaaaaggtacaaccatcaccccggtgtcacagattatatggaccggctggtggacgagaccgaggcactgggtgggactgtcaacgcctcagctctgacatcaaataggcctgagcccattccagatcaacagctgaacattctcaacagcttcactgcctccgacctgaccgcgctgacaaactcagtggccacggtctgcgatcccaccgatgtaaactgtctggacgacagctttccacctctgggaaatacccccaggggtcaagtgaaccatgtgcccgtggtgacagaggagctactaacacttccctccaatggagagtccgactgctttaacctgtttgagacaggcttctaccatagtgagcttaatccgatgaacatgtgtagtgaagaatctgaacggccagccaagcgcctaaagatgggcattgcggtgcccgaatcctttatgaatgaggtgagtgtgaataatctgggcgtagactttgagaatcacacccaccacatcaccagcgctaagatggcagtgtctgtcgcagactttggatctctgagtgctaatgaaaccaacggatttatttcagcgcacgccctgcaccagcacgccgctttgcacagcgagtag

SEQ ID NO: 244106 - DNA, 1650 bp, Artificial Sequence
  derived and/or modified sequence
atggccgaggccagcttcggcagcagcagccccgtgggcagcctgagcagcgaggaccacgacttcgaccccaccgccgagatgctggtgcacgactacgacgacgagagaaccctggaggaggaggagatgatggacgagggcaagaacttcagcagcgagatcgaggacctggagaaggagggcaccatgcccctggaggacctgctggccttctacggctacgagcccaccatccccgccgtggccaacagcagcgccaacagcagccccagcgagctggccgacgagctgcccgacatgaccctggacaaggaggagatcgccaaggacctgctgagcggcgacgacgaggagacccagagcagcgccgacgacctgacccccagcgtgaccagccacgagaccagcgacttcttccccagacccctgagaagcaacaccgcctgcgacggcgacaaggagagcgaggtggaggacgtggagaccgacagcggcaacagccccgaggacctgagaaaggagatcatgatcggcctgcagtaccaggccgagatccccccctacctgggcgagtacgacggcaacgagaaggtgtacgagaacgaggaccagctgctgtggtgccccgacgtggtgctggagagcaaggtgaaggagtacctggtggagaccagcctgagaaccggcagcgagaagatcatggacagaatcagcgccggcacccacaccagagacaacgagcaggccctgtacgagctgctgaagtgcaaccacaacatcaaggaggccatcgagagatactgctgcaacggcaaggccagccagggcatgaccgcctggaccgaggaggagtgcagaagcttcgagcacgccctgatgctgttcggcaaggacttccacctgatccagaagaacaaggtgagaaccagaaccgtggccgagtgcgtggccttctactacatgtggaagaagagcgagagatacgactacttcgcccagcagaccagattcggcaagaagagatacaaccaccaccccggcgtgaccgactacatggacagactggtggacgagaccgaggccctgggcggcaccgtgaacgccagcgccctgaccagcaacagacccgagcccatccccgaccagcagctgaacatcctgaacagcttcaccgccagcgacctgaccgccctgaccaacagcgtggccaccgtgtgcgaccccaccgacgtgaactgcctggacgacagcttcccccccctgggcaacacccccagaggccaggtgaaccacgtgcccgtggtgaccgaggagctgctgaccctgcccagcaacggcgagagcgactgcttcaacctgttcgagaccggcttctaccacagcgagctgaaccccatgaacatgtgcagcgaggagagcgagagacccgccaagagactgaagatgggcatcgccgtgcccgagagcttcatgaacgaggtgagcgtgaacaacctgggcgtggacttcgagaaccacacccaccacatcaccagcgccaagatggccgtgagcgtggccgacttcggcagcctgagcgccaacgagaccaacggcttcatcagcgcccacgccctgcaccagcacgccgccctgcacagcgagtag

SEQ ID NO: 244107 - protein, 515 aa, Artificial Sequence
  derived and/or modified sequence
MEWKLERTAPRRVRTEEEMLWESIMRVLSKDLKQKRSQDSANVLDSVNATYSDFKSNFAKRLSAEVPVASSPITTRWQQSQTRALSSDSFGEEQSTTYLPEASGSVLKTPPEKETLTLGSRKEQLKTPSKGISETSNSALHFCKAPHAMDRDWKESVASKGQKCLKQLFVTQNVVQQANGKMQLCEQSECVWKGCKDGVRDESFHLKSSGDINDSILQPEVKIHITGLRNDYYLNILDWSFQNLVAIALGSAVYIWNGENHNGIENIDLSLTCNYISSVSWIKEGTCLAVGTSEGEVQLWDVVTKKRLRNMLGHLSVVGALSWNHFILSSGSRLGRVYHHDVRVAQHHVGTLRHKQAVCALKWSPDGRLLSSGCSDGLLTIWPHDPGASAQGQPLKVITQSTAVKAMDWCPWQSGVLAIGGGMKDGRLHILDINAGKSIQTPSTNSQICSLIWLPKTKEIATGQGTPKNDVTVWTCPTVSRSGHRGRVLHLSLSPDQTRVFSAAADGTASVWNCY

SEQ ID NO: 244108 - DNA, 1548 bp, Artificial Sequence
  derived and/or modified sequence
atggagtggaagctggagagaaccgcccccagaagagtgagaaccgaggaggagatgctgtgggagagcatcatgagagtgctgagcaaggacctgaagcagaagagaagccaggacagcgccaacgtgctggacagcgtgaacgccacctacagcgacttcaagagcaacttcgccaagagactgagcgccgaggtgcccgtggccagcagccccatcaccaccagatggcagcagagccagaccagagccctgagcagcgacagcttcggcgaggagcagagcaccacctacctgcccgaggccagcggcagcgtgctgaagaccccccccgagaaggagaccctgaccctgggcagcagaaaggagcagctgaagacccccagcaagggcatcagcgagaccagcaacagcgccctgcacttctgcaaggccccccacgccatggacagagactggaaggagagcgtggccagcaagggccagaagtgcctgaagcagctgttcgtgacccagaacgtggtgcagcaggccaacggcaagatgcagctgtgcgagcagagcgagtgcgtgtggaagggctgcaaggacggcgtgagagacgagagcttccacctgaagagcagcggcgacatcaacgacagcatcctgcagcccgaggtgaagatccacatcaccggcctgagaaacgactactacctgaacatcctggactggagcttccagaacctggtggccatcgccctgggcagcgccgtgtacatctggaacggcgagaaccacaacggcatcgagaacatcgacctgagcctgacctgcaactacatcagcagcgtgagctggatcaaggagggcacctgcctggccgtgggcaccagcgagggcgaggtgcagctgtgggacgtggtgaccaagaagagactgagaaacatgctgggccacctgagcgtggtgggcgccctgagctggaaccacttcatcctgagcagcggcagcagactgggcagagtgtaccaccacgacgtgagagtggcccagcaccacgtgggcaccctgagacacaagcaggccgtgtgcgccctgaagtggagccccgacggcagactgctgagcagcggctgcagcgacggcctgctgaccatctggccccacgaccccggcgccagcgcccagggccagcccctgaaggtgatcacccagagcaccgccgtgaaggccatggactggtgcccctggcagagcggcgtgctggccatcggcggcggcatgaaggacggcagactgcacatcctggacatcaacgccggcaagagcatccagacccccagcaccaacagccagatctgcagcctgatctggctgcccaagaccaaggagatcgccaccggccagggcacccccaagaacgacgtgaccgtgtggacctgccccaccgtgagcagaagcggccacagaggcagagtgctgcacctgagcctgagccccgaccagaccagagtgttcagcgccgccgccgacggcaccgccagcgtgtggaactgctactag

SEQ ID NO: 244109 - DNA, 1548 bp, Artificial Sequence
  derived and/or modified sequence
atggagtggaagttagaaaggacggcgcctaggcgggtacggacagaagaagaaatgctgtgggagagcataatgagggtcctaagtaaagaccttaaacagaagcggagtcaagactctgcaaatgtgttagattcagtcaatgctacatattctgatttcaagtctaactttgccaagcgactgagcgcagaagttcctgtcgcatccagtcctatcaccacccgatggcagcagagtcagacacgggctctgagctctgacagctttggcgaagagcagtctacaacctatttgcctgaggcctctggtagtgtcttgaagacaccacccgagaaagagaccctgacactgggtagtcgtaaagagcagctgaagacccctagcaaaggaatctctgagacgtctaactccgccttacatttttgcaaggccccacacgccatggacagagattggaaagagtccgtcgctagcaaaggtcagaagtgcctgaagcagctgttcgtcactcagaacgtggtacagcaggctaatggcaagatgcagctgtgcgagcaaagtgaatgcgtctggaagggttgtaaagatggtgtccgcgacgaatctttccacttaaagagcagcggggacatcaacgattctattttacagcctgaggtcaagatccatatcacaggcttgcggaatgattattatctgaatatccttgactggtccttccagaatctggtagcaatcgcccttggaagcgctgtgtacatctggaatggggagaatcataacggaatagagaacatcgatctgtcgctcacatgtaactacataagctccgtcagctggattaaggagggtacctgcctggctgtggggacaagtgaaggggaggtgcaactctgggacgtcgtgactaaaaaaagactccggaatatgttgggtcatctgagcgttgtgggagcgctgtcctggaaccacttcattctctcctcaggatcccgtctggggcgcgtgtaccaccacgacgtgagggtggctcaacatcacgtcgggacactgcggcataaacaggctgtgtgcgctcttaaatggtcccccgacggaagactattatctagtgggtgctctgatggactcctcacgatatggccacatgacccaggagccagtgcccagggacaaccattgaaggtgataacacaaagtactgccgttaaggccatggactggtgcccttggcagagcggagtcctcgcaataggaggcggcatgaaggacggtaggttacacatcctagatattaacgctggaaaatccattcaaacgccaagtacaaactctcagatttgcagtcttatttggttgcctaaaactaaggagatcgcgaccggtcaaggaacccctaagaacgacgtcacggtctggacctgtcctaccgtgagtagaagtggccataggggtagggtgctacacttatccctgtcccctgaccagaccagggtgttctcagcggcagctgatggtactgcttcagtctggaactgttactag

SEQ ID NO: 244110 - DNA, 1548 bp, Artificial Sequence
  derived and/or modified sequence
atggagtggaagctggagaggacagcccccaggagagtgaggacagaggaggagatgctgtgggagagcatcatgagggtgctgagcaaggacctgaagcagaagaggagccaggacagcgccaacgtgctggacagcgtgaatgccacctacagcgacttcaagagcaactttgccaagaggctgtctgctgaggtgcctgtggccagcagccccatcaccacccgctggcagcagagccagacccgggccctgagcagtgacagctttggagaggagcagagcaccacctacctgcctgaggccagcggctctgtgctgaagaccccacctgagaaggagaccctgaccctgggcagcaggaaggagcagctgaagacccccagcaagggcatcagcgagaccagcaacagcgccctgcacttctgcaaggcccctcatgccatggaccgggactggaaggagagcgtggccagcaagggccagaagtgcctgaagcagctgtttgtgacccagaatgtggtgcagcaggccaacgggaagatgcagctgtgtgagcagagtgaatgtgtgtggaagggctgcaaggatggagtgagagatgagagcttccacctgaagagcagcggggacatcaatgacagcatcctgcagcctgaggtgaagatccacatcaccggcctgagaaatgactactacctgaacatcctggactggagcttccagaacctggtggccatcgccctgggcagcgctgtgtacatctggaatggagagaaccacaacggcattgaaaatattgacctgagcctgacctgcaactacatcagctctgtgtcctggatcaaggagggcacctgcctggccgtgggcaccagcgagggggaggtgcagctgtgggatgtggtgaccaagaagaggctgaggaacatgctgggccacctgtctgtggtgggcgccctgtcctggaaccacttcatcctgagcagcggcagccggctgggccgggtgtaccaccatgatgtgcgggtggcccagcaccacgtgggcaccctgcggcacaagcaggccgtgtgtgccctgaagtggagcccagatggccgcctgctgagcagcggctgcagtgatggcctgctgaccatctggccccatgaccccggggccagcgcccagggccagcccctgaaggtgatcacccagagcacagctgtgaaggccatggactggtgcccctggcagagcggcgtgctggccatcggcggcggcatgaaggatggccgcctgcacatcctggacatcaatgccggcaagagcatccagacccccagcaccaacagccagatctgcagcctcatctggctgcccaagaccaaggagatcgccaccggccagggcacccccaagaatgatgtgacagtgtggacctgccccaccgtgagccgcagcggccaccggggccgggtgctgcacctgagcctgagcccagaccagaccagggtcttctctgctgctgctgatggaacagcctctgtgtggaactgctactag

SEQ ID NO: 244111 - DNA, 1548 bp, Artificial Sequence
  derived and/or modified sequence
atggagtggaagctggagcggaccgccccccggcgggtgcggaccgaagaggagatgctgtgggaatctatcatgagagttctaagcaaagatctgaaacagaagaggtcacaggattcagctaatgtactggattctgtgaacgctacttacagtgatttcaaatcaaactttgccaagagactgtcggccgaggtaccagtggctagctctcctattactaccaggtggcaacaatctcagacacgcgctctgtcttccgactccttcggagaggaacagtcaaccacatatctgcctgaggccagcggctctgtgctgaagactccaccagaaaaggagacattgactctgggaagcagaaaggagcaactcaaaacccccagcaaaggaatctctgaaacatccaacagcgccttgcatttctgtaaagccccccatgccatggatcgcgactggaaagaatcagtggcctccaaagggcagaaatgcctgaaacaattgtttgttactcagaatgtggtacagcaggcaaacggaaagatgcagctatgcgaacagagcgagtgtgtctggaaggggtgtaaagatggcgttcgcgatgaatcatttcacctgaagtcatccggtgatatcaatgattctatcttacagccagaggtgaaaatccatataactggcttacgcaatgattactatctcaacatcttagactggagtttccagaaccttgtggctattgcgctaggttcagcagtgtatatctggaatggggagaaccataatggtattgagaatattgatttgtccctcacgtgtaactacatatcttcggtatcctggattaaagagggtacctgcctggctgtagggacctctgaaggtgaggtgcaactatgggacgtcgtgacaaagaagagacttcgtaacatgctcggtcatctctccgttgtgggcgctttgtcttggaatcactttattctgtcttctggatcgaggctcggtcgtgtctatcaccacgacgtgcgagttgcccagcatcacgttggcacacttcgtcataaacaggccgtttgcgcccttaagtggtcccccgacggcaggctcctctcttccgggtgtagtgatggcctgttaacaatctggcctcacgatcctggagctagcgcccaggggcagccattgaaggtgattacccagagcacagccgtcaaggcaatggactggtgcccctggcagtcaggtgtcttggccatcgggggcggcatgaaggacggccgtctgcacatcctcgacattaacgccgggaagtccattcagaccccctcaacaaattcccagatatgctcgctgatatggctcccaaaaactaaggagattgcaaccggccagggaaccccaaagaacgacgtgacggtctggacatgccccactgtctcgcggagtgggcaccgggggagagttctccacctgtccttgtcaccggaccagactcgggtgttctcagccgccgctgatggcacagcatccgtttggaactgttattag

SEQ ID NO: 244112 - DNA, 1548 bp, Artificial Sequence
  derived and/or modified sequence
atggaatggaagctcgaaaggacggctcctaggcgtgtgcggaccgaagaagagatgctgtgggaatccatcatgagggttctgagtaaagacctgaaacaaaagagatcacaggactctgcaaacgtgctggattccgtcaatgctacatattcagatttcaagtccaactttgcaaagagactgtccgccgaagttcctgtggcatcctctccgatcactacccgatggcaacagtctcagacccgggctctgtccagcgatagcttcggagaggaacagagcacgacctatttgcccgaagcgtccggaagtgtgctgaaaaccccacctgaaaaagagaccctcacactcggaagccgcaaagaacaacttaagaccccatctaaagggatctccgagacgtcaaacagcgccctccatttctgcaaggcacctcatgcaatggaccgtgattggaaagaatctgtggcctcaaagggccaaaagtgcctaaaacagctgtttgtgactcagaacgttgtccagcaggctaacggcaagatgcaactgtgtgaacagagcgagtgtgtctggaaagggtgtaaagacggcgtgcgggacgagagttttcacctaaaatcctcaggggacattaacgatagtatactgcagcccgaggtcaaaattcacattaccgggctgagaaatgactactatcttaacatcttagactggagtttccagaacttagtggctattgcgcttggctccgccgtctacatttggaatggtgagaaccataatggtattgaaaacatagacctttcactcacatgtaactatatctcatctgtttcctggattaaggagggtacatgcctggcagtcgggacaagcgaaggcgaagtccagctgtgggacgtcgtgactaaaaagagactacgtaacatgctcggtcatctgtcagttgttggagctctaagttggaaccacttcatactcagttctggctccagattgggtagggtctaccaccatgatgtaagagtggcacagcatcatgtcgggacccttagacacaaacaggccgtgtgcgcgctcaaatggagtcctgacgggagactgctgtccagcggttgttcagacggcttactaactatctggccacatgaccccggagcgtcggcacagggacagcccctcaaagtgataactcagtccactgcggtgaaagccatggactggtgtccttggcagagcggcgttctggctatcgggggagggatgaaagatggcaggcttcatatcctggacattaacgctggcaaatccatccagaccccttccactaactcacaaatatgtagtctaatatggctgcctaagacgaaggagattgctactggccagggaacacccaaaaacgatgtgacagtttggacctgtcctaccgtttccaggtccggacaccggggaagagtcctgcacctgtccctctctccagatcagactagagtattcagcgccgctgcagacgggacagcgtcagtgtggaattgttactag

SEQ ID NO: 244113 - DNA, 2946 bp, Artificial Sequence
  derived and/or modified sequence
agcggcggtgggaggagtgggggacctggagggaggtggtgaaatagaatggtcctgggggacgggactccaggggtttgacgattaggcgtcaagactgacttagacctgggaagaaaaccagaggcagtcgagcagagaggccaaacgccaggcagggcgaagtcagccggagatggagtggaaactggagcgcaccgcgcctcggagggtccgcacggaagaggagatgctgtgggaaagtatcatgcgtgtgctctccaaagacttgaagcagaagagaagtcaagattccgccaacgtactcgattcagttaatgctacgtattctgactttaagagcaactttgcgaagaggctgtccgcagaggttcctgttgcgagtagccccattaccacaaggtggcagcaaagtcaaactagggctctgtcctctgattcctttggggaagagcagtcaaccacctacctcccagaagcttccggatcagtgctgaagacaccgcctgagaaagagaccttgactctaggatcccgcaaagaacaactgaagacccccagcaaaggaatttctgaaacaagtaactctgctctccatttttgcaaggcacctcatgcaatggacagagactggaaagaaagtgttgcctcaaaagggcagaaatgcctaaaacaactctttgtaacccagaacgtggttcagcaggctaatggaaaaatgcagctctgtgagcaatccgaatgtgtttggaaaggctgcaaagatggagtcagagatgaatccttccatcttaaaagttctggtgatataaacgattccatactccaaccagaggtgaagattcatattactggtcttcgaaatgactactatctgaatatcctagattggagttttcagaatcttgttgccatagccctgggctctgctgtatacatctggaatggggagaaccacaatgggattgaaaacatagacttaagtctcacttgtaactatatctcttctgtgtcctggataaaagagggaacttgcctggcagttggcaccagcgagggagaagtgcaattatgggatgtggtaactaaaaagcggctgagaaatatgcttggtcatttgtcagtagttggggctctgagctggaatcactttatcctcagcagtgggtcaagactggggcgtgtttatcatcacgatgttcgggtagcccagcatcatgttggaacacttcgccacaagcaagctgtgtgtgctctgaagtggtcaccggatggcaggctgctttccagcggctgcagtgatggactgctgacaatatggccccacgatccaggtgccagtgcacagggccaaccgctgaaagtcataacccagtctacggcagtcaaggccatggattggtgtccctggcagtctggggtccttgccattggaggaggaatgaaggatggacgcttacacatcttggatataaatgctgggaagagcatccagaccccaagcacaaactcacagatttgttccttaatctggctacctaagacaaaggagattgcaactggtcaaggtactcccaagaatgatgtgactgtgtggacctgtcccactgtgtccaggtcaggccacaggggcagagtgctgcacctgtctttgagtccagaccagacccgggtgttttctgctgcagctgatgggacggcctctgtatggaattgctactagcacccagcccctctaggtttcagtttccttatttctgagtgaagatgatgatgttggctatgtcttctccatggggtttttatgagtatcaaacaagttgaaatactcttcttgatgtgaatgcctgttctcctgttcttcttttgcagattgctttacttgctctgcttcccagagatccgcttcttttcttctctgctttcttctttctgcccctcttcctccccctcctcttcttcctcccattcttacccctttctagagattcattttcactactttattcagaataacatctatagcaaagatttctacttctttcccgtatgacttttctccccagctccaaacctcatatttctgattgcctcaggatagttcccttttgagatactttcctgtctttagctcaatctcaacacattgaaaacacaactcattcacttgaaaaacacttactaaaatctcactatatgctaggcagtatgttaagcatgcatattgctctctctaaaaatcagttctgtaggaatccctttcccctcctgatggtctcatccttatcctggtctcccactcagggaacctcctgattattctgctctgtgcttcctcagttcaccctttgctctcttttcttttgcttcacctagtcacatcctgtgtgcctgacagccagtctgctgtaattgtcttagaactgatcctcttgactccacaccactgctaggttgaacatctaaaagtcctgtgctgatcctctcagtcccctgctcatcaactctcaaggacaacctattaccaaacacctttgacctcaacctctggagtcctcagcccaggacttgaagttaggagatctttttttgccttggctctgccataaatacaccctgtaaccttggatgtgttgcaacatctgcaaggataggaatttgatcactgctaaggttccttcaaacttgatcagttcgctgttctgtcttttgaatgttaattcacattcatctcctatattaagactttggctaagtcttgtgatttcttgccttattggagcttttcttctaatctgaattcttgcttctctctccttttcctttacacacccacacaagtcctaacctctccaggaagtgttttgaaatgatgttacctgggtttgagttcttggcattagcctgtatcatctatttggtattattatactattatagctgttt

SEQ ID NO: 244114 - protein, 744 aa, Artificial Sequence
  derived and/or modified sequence
MQKEMKMIKDEDVHFDLAVKKTPSFPHCLQPVASRGKAPQRHPFPEALRGPFSQFRYEPPPGDLDGFPGVFEGAGSRKRKSMPTKMPYNHPAEEVTLALHSEENKNHGLPNLPLLFPQPPRPKYDSQMIDLCNVGFQFYRSLEHFGGKPVKQEPIKPSAVWPQPTPTPFLPTPYPYYPKVHPGLMFPFFVPSSSPFPFSRHTFLPKQPPEPLLPRKAEPQESEETKQKVERVDVNVQIDDSYYVDVGGSQKRWQCPTCEKSYTSKYNLVTHILGHSGIKPHACTHCGKLFKQLSHLHTHMLTHQGTRPHKCQVCHKAFTQTSHLKRHMMQHSEVKPHNCRVCGRGFAYPSELKAHEAKHASGRENICVECGLDFPTLAQLKRHLTTHRGPIQYNCSECDKTFQYPSQLQNHMMKHKDIRPYICSECGMEFVQPHHLKQHSLTHKGVKEHKCGICGREFTLLANMKRHVLIHTNIRAYQCHLCYKSFVQKQTLKAHMIVHSDVKPFKCKLCGKEFNRMHNLMGHMHLHSDSKPFKCLYCPSKFTLKGNLTRHMKVKHGVMERGLHSQGLGRGRIALAQTAGVLRSLEQEEPFDLSQKRRAKVPVFQSDGESAQGSHCHEEEEEDNCYEVEPYSPGLAPQSQQLCTPEDLSTKSEHAPEVLEEACKEEKEDASKGEWEKRSKGDLGAEGGQERDCAGRDECLSLRAFQSTRRGPSFSDYLYFKHRDESLKELLERKMEKQAVLLGI

SEQ ID NO: 244115 - DNA, 2770 bp, Artificial Sequence
  derived and/or modified sequence
attgttcctgttctctttcttaagtcattcgaaacactgtccctgcgagttctttaagttccctgcaatctgtacacaagagaaagagggagagagagagggagagagacagagagagcagggatcaggtaaaggagtggggctgctgcagccattcagacctcaggagctggaaaattgccaaggatgcagaaggaaatgaagatgatcaaagacgaggatgtgcatttcgacttggctgtgaagaagaccccctcctttccccactgcctgcagccagtggcttctcggggaaaggctccccaaagacaccccttcccggaagctctccgagggccattttcccagtttcggtatgaacctcccccaggagacctagatgggttccccggggtcttcgaaggagcagggtctaggaaacggaagagcatgcccacaaagatgccctataaccaccctgcagaagaagtcaccctcgccctccactcagaggagaacaaaaaccacggccttcccaacctccctttgctgttcccgcagcccccgcgccccaagtatgactctcagatgatcgacctgtgcaacgtgggcttccaattctaccgcagcctggaacactttgggggcaagcccgtcaagcaggaacccattaagcccagcgccgtgtggccccagccaacgcccactccattcctgcccacgccctacccctactaccccaaagtccacccgggcctcatgttccccttcttcgtgccctcgtcctcgcccttccccttcagccggcacaccttcctgcccaagcagcccccggaacctctgctgccccggaaagccgaaccccaggagagcgaggagaccaagcagaaggtggagagggtggacgtgaacgtgcagatcgatgacagctactacgtggacgtgggcggctcgcagaagcgctggcagtgccccacctgcgagaagtcctacacctccaagtacaacctggtcacccacatcctgggccacagtgggatcaagccgcacgcgtgcacgcactgcgggaagctcttcaagcagctcagccacctgcatacccacatgctgacccaccagggcacgcggccccacaagtgccaggtgtgccacaaggccttcacccagaccagccacctgaagcgccacatgatgcagcacagcgaggtgaagccgcacaactgccgcgtgtgcggccgcggctttgcctaccccagcgagctcaaggcccacgaagccaagcacgccagtgggcgcgagaacatctgtgtggagtgcggcctcgacttccccaccttggcccagctgaagagacacctcaccacgcaccggggccccatccagtacaactgctccgagtgcgacaagaccttccagtacccgagccagttgcagaaccacatgatgaagcacaaggacatccggccctacatctgctcagagtgtggcatggagtttgtgcagccgcaccacctcaagcagcactccctcacccacaagggtgtgaaggagcataagtgtgggatttgtgggcgggagttcaccctgctggccaacatgaagcgacacgtgctgatccacaccaacatccgcgcctaccagtgtcacctctgctacaagagcttcgtgcagaagcagaccctcaaggcacacatgatcgtccactctgacgtgaagcctttcaaatgcaagctttgtgggaaggaattcaaccggatgcacaacctgatgggccacatgcacctgcactcagacagcaaacccttcaagtgcctctattgcccaagcaaattcaccctgaaggggaacctgacacgccacatgaaagtcaagcatggagtcatggagcggggccttcattcccaaggtctgggaagggggagaatcgccctggcacagacagccggtgtcctgaggagtctggagcaggaggagccctttgacctctctcagaagcgccgggccaaggtgccggtgttccagtcagacggggagagtgcccagggcagccactgccacgaggaggaagaggaggataactgctacgaggtggagccctacagccctggcctggccccccagagccagcagctctgcacacccgaggatctgtccaccaagtcggagcacgcccccgaggtgctggaggaagcctgcaaggaggagaaggaggatgcatccaagggagaatgggagaagaggagcaagggtgaccttggggcagagggcggccaggagagagactgtgccggcagagatgagtgtctcagtctcagggcttttcagagtacccggcggggcccctctttttctgattacttatacttcaagcacagagatgagagtttgaaagaattactggagaggaaaatggaaaaacaagcagtgcttttaggtatctaagtggacagttttaaaattacatttggaaaatgagaacgaggcagttcaaatatagctttctgtatgaactgtcattttctggagactggcgaatagtaccaatctctacaaatggcttagactaaatgagcagggatgtaggtaatggaaagccttctcaggtcattcacggggcccttgatacccttcacacatgtgcagggtcttcatcagtggcgttttatgcattgccagtataataaactgtgagtattcttccagatatctaattgtaagctgatgctgaggtgcttttagaaattctactttcctttgattcatatgcaatacatggtaaatttctaattgc

SEQ ID NO: 244116 - DNA, 2235 bp, Artificial Sequence
  derived and/or modified sequence
atgcagaaggagatgaagatgatcaaggacgaggacgtgcacttcgacctggccgtgaagaagacccccagcttcccccactgcctgcagcccgtggccagcagaggcaaggccccccagagacaccccttccccgaggccctgagaggccccttcagccagttcagatacgagcccccccccggcgacctggacggcttccccggcgtgttcgagggcgccggcagcagaaagagaaagagcatgcccaccaagatgccctacaaccaccccgccgaggaggtgaccctggccctgcacagcgaggagaacaagaaccacggcctgcccaacctgcccctgctgttcccccagccccccagacccaagtacgacagccagatgatcgacctgtgcaacgtgggcttccagttctacagaagcctggagcacttcggcggcaagcccgtgaagcaggagcccatcaagcccagcgccgtgtggccccagcccacccccacccccttcctgcccaccccctacccctactaccccaaggtgcaccccggcctgatgttccccttcttcgtgcccagcagcagccccttccccttcagcagacacaccttcctgcccaagcagccccccgagcccctgctgcccagaaaggccgagccccaggagagcgaggagaccaagcagaaggtggagagagtggacgtgaacgtgcagatcgacgacagctactacgtggacgtgggcggcagccagaagagatggcagtgccccacctgcgagaagagctacaccagcaagtacaacctggtgacccacatcctgggccacagcggcatcaagccccacgcctgcacccactgcggcaagctgttcaagcagctgagccacctgcacacccacatgctgacccaccagggcaccagaccccacaagtgccaggtgtgccacaaggccttcacccagaccagccacctgaagagacacatgatgcagcacagcgaggtgaagccccacaactgcagagtgtgcggcagaggcttcgcctaccccagcgagctgaaggcccacgaggccaagcacgccagcggcagagagaacatctgcgtggagtgcggcctggacttccccaccctggcccagctgaagagacacctgaccacccacagaggccccatccagtacaactgcagcgagtgcgacaagaccttccagtaccccagccagctgcagaaccacatgatgaagcacaaggacatcagaccctacatctgcagcgagtgcggcatggagttcgtgcagccccaccacctgaagcagcacagcctgacccacaagggcgtgaaggagcacaagtgcggcatctgcggcagagagttcaccctgctggccaacatgaagagacacgtgctgatccacaccaacatcagagcctaccagtgccacctgtgctacaagagcttcgtgcagaagcagaccctgaaggcccacatgatcgtgcacagcgacgtgaagcccttcaagtgcaagctgtgcggcaaggagttcaacagaatgcacaacctgatgggccacatgcacctgcacagcgacagcaagcccttcaagtgcctgtactgccccagcaagttcaccctgaagggcaacctgaccagacacatgaaggtgaagcacggcgtgatggagagaggcctgcacagccagggcctgggcagaggcagaatcgccctggcccagaccgccggcgtgctgagaagcctggagcaggaggagcccttcgacctgagccagaagagaagagccaaggtgcccgtgttccagagcgacggcgagagcgcccagggcagccactgccacgaggaggaggaggaggacaactgctacgaggtggagccctacagccccggcctggccccccagagccagcagctgtgcacccccgaggacctgagcaccaagagcgagcacgcccccgaggtgctggaggaggcctgcaaggaggagaaggaggacgccagcaagggcgagtgggagaagagaagcaagggcgacctgggcgccgagggcggccaggagagagactgcgccggcagagacgagtgcctgagcctgagagccttccagagcaccagaagaggccccagcttcagcgactacctgtacttcaagcacagagacgagagcctgaaggagctgctggagagaaagatggagaagcaggccgtgctgctgggcatctag

SEQ ID NO: 244117 - DNA, 2235 bp, Artificial Sequence
  derived and/or modified sequence
atgcagaaagaaatgaaaatgattaaggacgaagatgtccacttcgatctggccgttaaaaaaaccccttctttcccgcattgtttacagcctgtggcttctcgcggcaaggccccccaacgtcatccattccctgaggccctgcgcgggcctttctcccagttcaggtatgagccgccccccggggatcttgatggattcccaggtgtctttgaaggagctggatcaaggaaaaggaagtcaatgcctacgaagatgccttacaatcatcccgccgaggaggtcacactggcgctacatagtgaggaaaacaaaaaccacggcctgcccaatctgccacttttgttccctcagcctccccgtcccaagtatgacagccagatgattgacttatgtaatgtggggttccaattctataggtctcttgaacactttggcggcaaacctgttaaacaggaaccaatcaaaccgtctgctgtgtggccacagcccacccccaccccgttcctgccgactccctacccgtattaccccaaggttcatcctggcctgatgtttcctttttttgtccccagttcttcgccctttccattctcccgccacacctttttacctaagcaacctcccgagccactgttgccccggaaagcggagccccaggagagcgaggaaacgaagcagaaggtagagcgcgttgacgtcaacgttcagattgacgatagctactacgtagacgtgggaggcagtcagaagagatggcaatgcccaacctgcgaaaagagctataccagcaagtataacttggtcacgcacatcttagggcactccgggatcaaaccacatgcctgtacacattgcgggaagttgttcaaacaattgtcccacctgcacacacatatgctgactcatcaagggactagaccacataaatgccaagtatgtcacaaagcgtttacacagacgtctcacttaaaaagacacatgatgcagcactctgaagtaaagccccataactgcagggtgtgcgggaggggcttcgcttacccctccgaactgaaagcgcacgaagcaaagcacgctagcggacgcgaaaatatctgcgtggagtgcggtttggattttccaacactagctcagctgaaacgccatcttactacccaccgggggccaatccaatacaattgcagcgaatgtgacaagacctttcagtacccaagccaactacagaatcacatgatgaagcacaaggatataagaccctacatttgttccgaatgcggaatggagtttgtgcaacctcaccacctgaagcaacattcattgacccataaaggagtgaaagagcacaaatgtgggatatgtggccgggaatttacgctccttgccaacatgaaacggcatgtcctgatccacaccaacataagggcttatcaatgccacctctgttacaagagcttcgtgcagaagcagactttgaaagcacacatgatcgtccacagtgacgttaagccgttcaagtgtaagctgtgcgggaaggagtttaacaggatgcacaaccttatggggcacatgcatctgcatagtgactcaaagccatttaagtgtttatattgtccctcaaagttcacgctaaaaggcaacttaacacggcatatgaaagtaaagcatggagttatggagcgaggcctccactcacaagggctaggccgcggaagaatcgcccttgcccagactgctggagtgcttaggtccctggaacaggaggagccttttgacttaagtcaaaagaggagggccaaagtgccagtgtttcagagtgacggagaaagcgcacaaggcagtcattgtcacgaggaggaggaggaagataattgctacgaggtggagccttactctccaggcctcgcgcctcagtcgcagcagctttgtacaccagaagacctgagtacaaaaagcgaacacgcccctgaagttcttgaagaagcctgcaaggaagaaaaagaggacgcctctaagggcgaatgggaaaagagaagtaagggcgatttgggggcagaaggcggtcaagagcgggattgcgccggcagggatgagtgcctgagccttagagccttccaaagcacccggcggggtccttcattctcggactatctgtacttcaaacatagagatgagagtctgaaagaactccttgagagaaagatggagaaacaggccgttttactgggaatctag

SEQ ID NO: 244118 - DNA, 2235 bp, Artificial Sequence
  derived and/or modified sequence
atgcagaaggagatgaagatgatcaaggatgaagatgtgcactttgacctggccgtgaagaagacccccagcttcccccactgcctgcagcctgtggccagccggggcaaggccccccagaggcaccccttccctgaggccctgcggggccccttcagccagttccgctatgagcccccacctggggacctggatggcttccctggggtgtttgaaggagctggcagcaggaagaggaagtccatgcccaccaagatgccctacaaccaccctgctgaggaggtgaccctggccctgcacagcgaggagaacaagaaccacggcctgcccaacctgcccctgctcttcccccagcccccccggcccaagtatgacagccagatgattgacctgtgcaatgtgggcttccagttctaccgcagcctggagcactttggaggcaagcctgtgaagcaggagcccatcaagcccagcgctgtgtggccccagcccacccccacccccttcctgcccaccccctacccctactaccccaaggtgcaccctggcctgatgttccccttctttgtgcccagcagcagccccttccccttcagccgccacaccttcctgcccaagcagcccccagagcccctgctgcccaggaaggccgagccccaggagagcgaggagaccaagcagaaggtggagcgggtggatgtgaatgtgcagattgatgacagctactacgtggatgtgggcggcagccagaagcgctggcagtgccccacctgtgagaagagctacaccagcaagtacaacctggtgacccacatcctgggccacagcggcatcaagccccacgcctgcacccactgtgggaagctgttcaagcagctgagccacctgcacacccacatgctgacccaccagggcacccggccccacaagtgccaggtgtgccacaaggccttcacccagaccagccacctgaagaggcacatgatgcagcacagcgaggtgaagccccacaactgccgggtgtgtggccggggctttgcctaccccagcgagctgaaggcccacgaggccaagcacgccagcggccgggagaacatctgtgtggagtgtggcctggacttccccaccctggcccagctgaagaggcacctgaccacccaccggggccccatccagtacaactgcagtgaatgtgacaagaccttccagtaccccagccagctgcagaaccacatgatgaagcacaaggacatccggccctacatctgcagtgaatgtggcatggagtttgtgcagccccaccacctgaagcagcacagcctgacccacaagggcgtgaaggagcacaagtgtggcatctgtggccgggagttcaccctgctggccaacatgaagagacatgtgctgatccacaccaacatccgggcctaccagtgccacctgtgctacaagagctttgtgcagaagcagaccctgaaggcccacatgattgtgcacagtgatgtgaagcccttcaagtgcaagctgtgtgggaaggagttcaacaggatgcacaacctgatgggccacatgcacctgcacagcgacagcaagcccttcaagtgcctgtactgccccagcaagttcaccctgaagggcaacctgaccaggcacatgaaggtgaagcacggcgtgatggagcggggcctgcacagccagggcctgggccggggcagaattgccctggcccagacagctggggtgctgcggagcctggagcaggaggagccctttgacctgagccagaagagaagagccaaggtgcctgtgttccagagtgatggagagagcgcccagggcagccactgccacgaggaggaggaggaggacaactgctatgaggtggagccctacagccctggcctggccccccagagccagcagctgtgcaccccagaggacctgagcaccaagtctgagcacgcccctgaggtgctggaggaggcctgcaaggaggagaaggaggatgccagcaagggggagtgggagaagaggagcaagggggacctgggcgctgagggcggccaggagcgggactgtgccggcagagatgagtgcctgagcctgcgggccttccagagcacccggcggggccccagcttcagtgactacctgtacttcaagcacagagatgagagcctgaaggagctgctggagaggaagatggagaagcaggccgtgctgctgggcatctag

SEQ ID NO: 244119 - DNA, 2235 bp, Artificial Sequence
  derived and/or modified sequence
atgcagaaggagatgaagatgatcaaggacgaggacgtgcacttcgatcttgccgtcaagaagactcccagcttcccccattgcctacagcctgtggcaagtcgtggaaaagccccccagaggcatccattccccgaagcactgcggggcccgttttctcagtttcggtacgaaccacctccgggagatctcgatggctttcccggcgtatttgaaggcgctgggagcaggaagaggaaatctatgccgactaagatgccatataaccatccagcagaggaagtcaccctcgccttgcatagcgaagagaataagaatcatgggctccctaacctccccctgctctttccacagccgcccagaccgaaatatgattctcagatgatcgatttgtgtaatgtggggttccaattctataggagtttagagcacttcggcggaaagcctgtgaagcaggaaccgatcaagccgtccgcagtgtggccacaaccgacacctacaccattcttgcctaccccatatccatactatcctaaggtccaccctggattaatgttcccatttttcgtgccctctagcagcccctttccgtttagcaggcacacatttctgcccaagcagcctccggaacctttattgcctcgaaaggccgaaccccaggagtccgaggaaacaaaacagaaagtcgaacgggtggatgtgaatgttcagattgacgattcctactacgtggatgtgggtggatctcagaagcggtggcagtgccctacttgtgagaaaagctacacttcaaagtacaacctcgtcacccacatcctcggccacagtggaatcaaaccacacgcctgtacacactgtggtaagctcttcaagcagctctctcacctgcatacacatatgctgacacaccagggtacccgcccgcacaaatgtcaggtctgccacaaggctttcactcagacttcccacctaaagagacacatgatgcaacacagtgaggttaagccacacaactgtcgcgtctgtggacggggcttcgcctacccgtctgaattgaaagcacacgaggccaaacacgcctctgggcgagaaaatatctgtgttgaatgtggcctagatttccctacgctggctcagctgaagcgccatctaaccacccatagaggccccatccaatacaattgcagcgaatgcgacaagacattccagtatccaagccagctccagaaccacatgatgaagcataaggacatcaggccatacatctgcagcgaatgtggcatggagtttgtgcagccccatcatctgaagcaacattctctgacacacaagggcgtgaaagagcacaagtgtggaatttgtgggcgggagttcacccttctggctaacatgaagagacacgtgttgattcataccaacatacgggcttaccagtgtcacctatgctacaagagtttcgttcagaagcagaccctcaaggcccacatgatcgtacacagcgacgtgaaacccttcaaatgcaagctttgtggaaaggagtttaacaggatgcacaatttaatgggccacatgcacttacacagcgattccaaacccttcaagtgcctgtactgccctagcaaattcacgttgaagggcaatttgactagacacatgaaggttaaacatggcgttatggaaaggggactgcactcgcagggactgggccgggggaggatcgcactggctcagaccgccggcgtgttgaggtccctcgaacaagaggaaccctttgacctgtcccaaaaacgccgcgccaaagtccccgtgttccagtcagatggcgagtccgcacaagggagccactgccatgaggaggaagaggaggacaactgttacgaggtcgagccatacagccctggtttggctccacagagccagcagctgtgcacaccagaggacctctcgacaaagtccgaacatgctcctgaggtccttgaggaggcttgcaaagaggagaaggaagatgctagtaagggagaatgggagaagcgctctaaaggcgacctcggcgccgagggaggtcaggagagggactgtgccggaagagatgagtgcctgtcactcagggcgtttcagtcgacacgcagaggtccatctttctccgactatctttatttcaagcacagagacgagagcttaaaagaattgctcgaaagaaagatggagaaacaagccgtgctcttaggcatctag

SEQ ID NO: 244120 - DNA, 2235 bp, Artificial Sequence
  derived and/or modified sequence
atgcagaaagaaatgaagatgattaaagatgaggatgtccacttcgatctggccgtcaagaagacaccatcctttccccattgcctgcaaccagtggcttcccggggtaaggcccctcagaggcaccctttcccggaggccctgagaggacccttctctcagtttcgctacgagccaccacctggtgatctggacgggtttcccggagtctttgagggtgcaggctctaggaaacgaaaaagcatgccaacgaaaatgccatataatcacccagcagaagaggtaacactggcccttcactcggaagaaaacaaaaatcacggcctgccgaacctgccgctgctgttccctcagccgcctcgccctaagtatgactcacaaatgattgacctctgcaacgtcggatttcagttttacagatcactggaacatttcggaggcaagcccgtgaagcaggaacccatcaagccttctgctgtctggccccagccaacgcctaccccgttcctgcccactccttatccctactaccctaaggtccaccctggattgatgttcccattcttcgtgcccagcagttcgccgtttcccttttcccggcatacgttcctgccaaagcagccccctgaacctctactgccaagaaaggccgagccacaagaatccgaagaaacaaaacagaaagtcgaacgagttgacgtcaacgttcaaattgacgacagctactacgtggacgtgggcggtagccagaaaaggtggcaatgccctacctgtgagaaatcatatacttcaaaatacaacttggttactcatattctagggcactctggtatcaaacctcacgcctgtactcactgtggcaaactgttcaagcagctttctcacttgcacacccacatgttaactcatcaaggaactcgcccacataagtgtcaggtgtgtcacaaggccttcacccagactagccatttgaagaggcatatgatgcagcacagcgaggtaaagccccataactgccgggtgtgtgggagaggcttcgcttatccgtcagagctcaaagcacacgaggccaagcatgctagcgggagagagaacatctgcgttgagtgtggcctggactttcctacacttgcacagctcaagcgacatctcactacccatcggggacctatccaatataattgttcggaatgtgataaaacgttccagtatccttctcaacttcaaaatcacatgatgaaacacaaggatatccggccttatatatgttcggagtgtggcatggagtttgtccaaccacatcatctgaagcagcacagtttgacacacaaaggagtgaaagagcataagtgtggaatctgtggccgagagttcaccctgctggccaacatgaaacgacacgtcctgatacataccaacatcagagcctatcagtgccacctatgctacaagtccttcgtgcaaaaacagactctgaaagcacatatgattgtacattccgacgtcaaaccctttaaatgtaagctttgcggaaaggagttcaatagaatgcacaatctcatgggtcacatgcacctacattccgattccaagcccttcaagtgtctgtattgcccatctaagtttactctgaaaggcaacctgacgagacatatgaaggtaaaacacggcgttatggagcgtggactccatagtcagggcctgggacgcggacggatcgccctggcacaaactgccggagtgctccggagtctcgaacaagaagagcccttcgatctgagtcagaagagaagagcaaaagttcccgtgtttcagtctgatggcgaaagcgcccagggctcacactgccatgaagaagaagaagaggacaactgttacgaagtagagccctacagtcccggacttgctccccagtcacagcagctgtgtacccccgaggatttgagcaccaagtctgaacacgctcctgaagtcctcgaagaggcttgcaaagaggagaaggaagacgcctctaagggggagtgggagaaacgaagtaagggagacctgggcgctgagggaggccaggagcgagactgtgcgggaagggacgaatgtctctctctgagggccttccagtcaacaaggaggggcccaagcttttctgattacttgtacttcaagcaccgcgatgagagccttaaggagctcctggagcggaaaatggagaagcaggccgtgctgctagggatctag

SEQ ID NO: 244121 - DNA, 3830 bp, Artificial Sequence
  derived and/or modified sequence
ataccagaggctgcaggctcaggagagcctgcctgtctggaacaccgtttgtttggacaggacaggccactaaggcgtttcatctctttaaagctcccagggcagagaacatatttgaggaattccttttttcaaagattttttttttttgccccttccaacattttgtttaagagaaaatgagatgtctatcttctgtttccttattttttttcaggaaagcaaagggttgttgacttcctccctctcccctcccttccttccttcttcccgaaggtactcatctgagaaaaagagaacgaagtattgttcctgttctctttcttaagtcattcgaaacactgtccctgcgagttctttaagttccctgcaatctgtacacaagagaaagagggagagagagagggagagagacagagagagcagggatcaggtaaaggagtggggctgctgcagccattcagacctcaggagctggaaaattgccaaggatgcagaaggaaatgaagatgatcaaagacgaggatgtgcatttcgacttggctgtgaagaagaccccctcctttccccactgcctgcagccagtggcttctcggggaaaggctccccaaagacaccccttcccggaagctctccgagggccattttcccagtttcggtatgaacctcccccaggagacctagatgggttccccggggtcttcgaaggagcagggtctaggaaacggaagagcatgcccacaaagatgccctataaccaccctgcagaagaagtcaccctcgccctccactcagaggagaacaaaaaccacggccttcccaacctccctttgctgttcccgcagcccccgcgccccaagtatgactctcagatgatcgacctgtgcaacgtgggcttccaattctaccgcagcctggaacactttgggggcaagcccgtcaagcaggaacccattaagcccagcgccgtgtggccccagccaacgcccactccattcctgcccacgccctacccctactaccccaaagtccacccgggcctcatgttccccttcttcgtgccctcgtcctcgcccttccccttcagccggcacaccttcctgcccaagcagcccccggaacctctgctgccccggaaagccgagccccaggagagcgaggagaccaagcagaaggtggagagggtggacgtgaacgtgcagatcgatgacagctactacgtggacgtgggcggctcgcagaagcgctggcagtgccccacctgcgagaagtcctacacctccaagtacaacctggtcacccacatcctgggccacagtgggatcaagccgcacgcgtgcacgcactgcgggaagctcttcaagcagctcagccacctgcatacccacatgctgacccaccagggcacgcggccccacaagtgccaggtgtgccacaaggccttcacccagaccagccacctgaagcgccacatgatgcagcacagcgaggtgaagccgcacaactgccgcgtgtgcggccgcggctttgcctaccccagcgagctcaaggcccacgaagccaagcacgccagtgggcgcgagaacatctgtgtggagtgcggcctcgacttccccaccttggcccagctgaagagacacctcaccacgcaccggggccccatccagtacaactgctccgagtgcgacaagaccttccagtacccgagccagctgcagaaccacatgatgaagcacaaggacatccggccctacatctgctcagagtgtggcatggagtttgtgcagccgcaccacctcaagcagcactccctcacccacaagggtgtgaaggagcataagtgtgggatttgtgggcgggagttcaccctgctggccaacatgaagcgacacgtgctgatccacaccaacatccgcgcctaccagtgtcacctctgctacaagagcttcgtgcagaagcagaccctcaaggcacacatgatcgtccactctgacgtgaagcctttcaaatgcaagctttgtgggaaggaattcaaccggatgcacaacctgatgggccacatgcacctgcactcagacagcaaacccttcaagtgcctctattgcccaagcaaattcaccctgaaggggaacctgacacgccacatgaaagtcaagcatggagtcatggagcggggccttcattcccaaggtctgggaagggggagaatcgccctggcacagacagccggtgtcctgaggagtctggagcaggaggagccctttgacctctctcagaagcgccgggccaaggtgccggtgttccagtcagacggggagagtgcccagggcagccactgccacgaggaggaagaggaggataactgctacgaggtggagccctacagccctggcctggccccccagagccagcagctctgcacacccgaggatctgtccaccaagtcggagcacgcccccgaggtgctggaggaagcctgcaaggaggagaaggaggatgcatccaagggagaatgggagaagaggagcaagggtgaccttggggcagagggcggccaggagagagactgtgccggcagagatgagtgtctcagtctcagggcttttcagagtacccggcggggcccctctttttctgattacttatacttcaagcacagagatgagagtttgaaagaattactggagaggaaaatggaaaaacaagcagtgcttttaggtatctaagtggacagttttaaaattacatttggaaaatgagaaggaggcagttcaaatatagctttctgcatgaactgtcattttctggagactggcgaatagtaccaatctctacaaatggcttagactaaatgagcagggatgtaggtaatggaaagccttctcaggtcattcacggggcccttgatacccttcacacatgtgcagggtcttcatcagtggcgttttatgcattgccagtataataaactgtgagtattcttccagatatctaattgtaagctgatgctgaggtgcttttagaaattctactttcctttgattcatatgcaatacatggtaaatttctaattgcaaaaatatggtgcttgaggtgtcaccttattaataactatttaggtgaatttgtgaaggttataatattttccatatagatgaaaatattagtcgtcatatatataaaaatagcctttattctataaccaaaaatgtcagaaatggcacaggaggatgagctattgaagagaatgctctccagtagttgctgcagatataaggtaaaatttcaggagaagaataattttgactaagggaaactggtgacctagaatacttagattctcttgttctgtgtcggctgtcttcatcagattgagcatttggagcattatttttcagatgatatgatgatgtttggggccctggctcctcagacaaaccctcacttctcgagcacggctccctcctggagaccattgctgtcttgctctgaggcctcatgccccataagacagatgcaggggccgggcgcagaggctcacgcctgtaatcccagcactttgggaggccgaggcaggcagatcacttgaggtcaggagtttgagaccaacctggccaacgtggcaaaaccccttctctactaaaaatacaaaaattagccaggcatgatggcaggagcctgtagttccagctactcgggaggctgaagcaggagaatcgtttgaacccaggcagtggagattgcagtgagctgagctgagatcacgctactgcactacagcctgggtgacagagtgagactctgcctcaaaaaaaaaaaaaaaaaaaaaa

SEQ ID NO: 244122 - protein, 586 aa, Artificial Sequence
  derived and/or modified sequence
MGPLTFRDVKIEFSLEEWQCLDTAQRNLYRDVMLENYRNLVFLGIAVSKPDLITWLEQGKEPWNLKRHEMVDKTPVMCSHFAQDVWPEHSIKDSFQKVILRTYGKYGHENLQLRKDHKSVDACKVYKGGYNGLNQCLTTTDSKIFQCDKYVKVFHKFPNVNRNKIRHTGKKPFKCKNRGKSFCMLSQLTQHKKIHTREYSYKCEECGKAFNWSSTLTKHKIIHTGEKPYKCEECGKAFNRSSNLTKHKIIHTGEKPYKCEECGKAFNRSSTLTKHKRIHTEEKPYKCEECGKAFNQFSILNKHKRIHMEDKPYKCEECGKAFRVFSILKKHKIIHTGEKPYKCEECGKAFNQFSNLTKHKIIHTGEKPYKCDECGKAFNQSSTLTKHKRIHTGEKPYKCEECGKAFKQSSTLTEHKIIHTGEKPYKCEKCGKAFSWSSAFTKHKRNHMEDKPYKCEECGKAFSVFSTLTKHKIIHTREKPYKCEECGKAFNQSSIFTKHKIIHTEGKSYKCEKCGNAFNQSSNLTARKIIYTGEKPYKYEECDKAFNKFSTLITHQIIYTGEKPCKHECGRAFNKSSNYTKEKLQT

SEQ ID NO: 244123 - protein, 517 aa, Artificial Sequence
  derived and/or modified sequence
MVDKTPVMCSHFAQDVWPEHSIKDSFQKVILRTYGKYGHENLQLRKDHKSVDACKVYKGGYNGLNQCLTTTDSKIFQCDKYVKVFHKFPNVNRNKIRHTGKKPFKCKNRGKSFCMLSQLTQHKKIHTREYSYKCEECGKAFNWSSTLTKHKIIHTGEKPYKCEECGKAFNRSSNLTKHKIIHTGEKPYKCEECGKAFNRSSTLTKHKRIHTEEKPYKCEECGKAFNQFSILNKHKRIHMEDKPYKCEECGKAFRVFSILKKHKIIHTGEKPYKCEECGKAFNQFSNLTKHKIIHTGEKPYKCDECGKAFNQSSTLTKHKRIHTGEKPYKCEECGKAFKQSSTLTEHKIIHTGEKPYKCEKCGKAFSWSSAFTKHKRNHMEDKPYKCEECGKAFSVFSTLTKHKIIHTREKPYKCEECGKAFNQSSIFTKHKIIHTEGKSYKCEKCGNAFNQSSNLTARKIIYTGEKPYKYEECDKAFNKFSTLITHQIIYTGEKPCKHECGRAFNKSSNYTKEKLQT

SEQ ID NO: 244124 - DNA, 1761 bp, Artificial Sequence
  derived and/or modified sequence
atgggccccctgaccttcagagacgtgaagatcgagttcagcctggaggagtggcagtgcctggacaccgcccagagaaacctgtacagagacgtgatgctggagaactacagaaacctggtgttcctgggcatcgccgtgagcaagcccgacctgatcacctggctggagcagggcaaggagccctggaacctgaagagacacgagatggtggacaagacccccgtgatgtgcagccacttcgcccaggacgtgtggcccgagcacagcatcaaggacagcttccagaaggtgatcctgagaacctacggcaagtacggccacgagaacctgcagctgagaaaggaccacaagagcgtggacgcctgcaaggtgtacaagggcggctacaacggcctgaaccagtgcctgaccaccaccgacagcaagatcttccagtgcgacaagtacgtgaaggtgttccacaagttccccaacgtgaacagaaacaagatcagacacaccggcaagaagcccttcaagtgcaagaacagaggcaagagcttctgcatgctgagccagctgacccagcacaagaagatccacaccagagagtacagctacaagtgcgaggagtgcggcaaggccttcaactggagcagcaccctgaccaagcacaagatcatccacaccggcgagaagccctacaagtgcgaggagtgcggcaaggccttcaacagaagcagcaacctgaccaagcacaagatcatccacaccggcgagaagccctacaagtgcgaggagtgcggcaaggccttcaacagaagcagcaccctgaccaagcacaagagaatccacaccgaggagaagccctacaagtgcgaggagtgcggcaaggccttcaaccagttcagcatcctgaacaagcacaagagaatccacatggaggacaagccctacaagtgcgaggagtgcggcaaggccttcagagtgttcagcatcctgaagaagcacaagatcatccacaccggcgagaagccctacaagtgcgaggagtgcggcaaggccttcaaccagttcagcaacctgaccaagcacaagatcatccacaccggcgagaagccctacaagtgcgacgagtgcggcaaggccttcaaccagagcagcaccctgaccaagcacaagagaatccacaccggcgagaagccctacaagtgcgaggagtgcggcaaggccttcaagcagagcagcaccctgaccgagcacaagatcatccacaccggcgagaagccctacaagtgcgagaagtgcggcaaggccttcagctggagcagcgccttcaccaagcacaagagaaaccacatggaggacaagccctacaagtgcgaggagtgcggcaaggccttcagcgtgttcagcaccctgaccaagcacaagatcatccacaccagagagaagccctacaagtgcgaggagtgcggcaaggccttcaaccagagcagcatcttcaccaagcacaagatcatccacaccgagggcaagagctacaagtgcgagaagtgcggcaacgccttcaaccagagcagcaacctgaccgccagaaagatcatctacaccggcgagaagccctacaagtacgaggagtgcgacaaggccttcaacaagttcagcaccctgatcacccaccagatcatctacaccggcgagaagccctgcaagcacgagtgcggcagagccttcaacaagagcagcaactacaccaaggagaagctgcagacctag

SEQ ID NO: 244125 - DNA, 1761 bp, Artificial Sequence
  derived and/or modified sequence
atgggtcccctcacattccgtgacgtcaaaattgaatttagtctggaggaatggcaatgcctagatacagcacagcgtaatctttatcgggatgtaatgctagaaaattatcggaatttggttttccttggcatagctgtgtcaaaacccgacctgatcacctggcttgagcaaggaaaggaaccctggaacttaaaacgccacgagatggtggacaaaacgccggtcatgtgcagtcacttcgctcaggatgtgtggccggagcatagcattaaagattctttccagaaggtgattctgcggacctatggtaaatacggacacgaaaatctccagttacgcaaggatcacaaatccgtggacgcctgcaaggtgtacaagggaggctataatgggctaaaccagtgtctgacaactaccgattcaaagatcttccagtgtgacaagtacgttaaagtttttcacaagtttccaaatgtgaacagaaacaaaatccgacataccggcaagaagcctttcaaatgcaagaaccgaggaaaaagcttttgcatgttgagccagcttacgcaacacaagaaaatccacacccgcgaatacagctataagtgcgaggagtgcggcaaagccttcaattggagctctacgctgaccaagcacaaaatcatacacaccggggagaaaccatataagtgcgaggaatgcggaaaggccttcaatcggtccagtaacctgacaaaacacaaaattattcacacaggcgaaaagccttataaatgtgaagagtgcggcaaagcattcaaccgcagtagtaccctcaccaaacacaaaagaattcatactgaagagaaaccatacaaatgtgaggaatgtggcaaagcctttaatcagttttctatactgaataagcacaaaagaattcacatggaggataaaccctataagtgtgaagaatgtgggaaggctttcagggtgttctccatcctgaagaagcacaaaatcattcatactggggaaaaaccgtataagtgcgaggaatgtggcaaagcatttaaccaattcagcaatctgaccaaacataaaattattcatactggagaaaagccttacaaatgcgatgagtgtggcaaggcctttaatcagtcttccactcttaccaagcataagaggatccatacaggcgagaagccctataagtgcgaagaatgcgggaaagcttttaaacagtcttctactttaaccgagcacaaaataatacatacgggggaaaaaccttacaaatgcgaaaagtgtgggaaggcattctcctggagttctgcatttactaagcacaaacggaatcatatggaggataaaccatataagtgtgaagagtgcggtaaggcattctcagtattttctaccctcacaaagcataaaattattcatacccgagagaagccctataaatgtgaggagtgtggaaaggcattcaaccagagttctatattcacaaaacataaaattattcataccgagggtaagtcatacaaatgcgaaaagtgtggaaatgccttcaatcaaagctcaaatctcaccgcccgcaagattatctacaccggggaaaaaccctataagtatgaagagtgtgacaaggccttcaacaaattcagcactctaattactcatcagatcatctataccggagaaaagccctgtaagcacgagtgtgggagagctttcaacaagagctctaactacactaaggagaaactccagacttag

SEQ ID NO: 244126 - DNA, 1761 bp, Artificial Sequence
  derived and/or modified sequence
atgggccccctgaccttcagagatgtgaagattgagttcagcctggaggagtggcagtgcctggacacagcccagaggaacctgtacagagatgtgatgctggagaactacagaaacctggtgttcctgggcattgctgtgtccaagccagacctgatcacctggctggagcagggcaaggagccctggaacctgaagagacatgagatggtggacaagacccctgtgatgtgcagccactttgcccaggatgtgtggccagagcacagcatcaaggacagcttccagaaggtgatcctgcggacctacggcaagtatggccacgagaacctgcagctgaggaaggaccacaagtctgtggatgcctgcaaggtgtacaagggcggctacaacggcctgaaccagtgcctgaccaccacagacagcaagatcttccagtgtgacaagtatgtgaaggtgttccacaagttccccaacgtgaacagaaacaagatccgccacacaggcaagaagcccttcaagtgcaagaacagaggcaagagcttctgcatgctgagccagctgacccagcacaagaagatccacacccgggagtacagctacaagtgtgaagaatgtgggaaggccttcaactggagcagcaccctgaccaagcacaagatcatccacactggagagaagccctacaagtgtgaagaatgtgggaaggccttcaacagaagcagcaacctgaccaagcacaagatcatccacactggagagaagccctacaagtgtgaagaatgtgggaaggccttcaacagaagcagcaccctgaccaagcacaagaggatccacacagaggagaagccctacaagtgtgaagaatgtgggaaggccttcaaccagttcagcatcctgaacaagcacaagaggatccacatggaggacaagccctacaagtgtgaagaatgtgggaaggccttccgggtcttcagcatcctgaagaagcacaagatcatccacactggagagaagccctacaagtgtgaagaatgtgggaaggccttcaaccagttcagcaacctgaccaagcacaagatcatccacactggagagaagccctacaagtgtgatgaatgtgggaaggccttcaaccagagcagcaccctgaccaagcacaagaggatccacactggagagaagccctacaagtgtgaagaatgtgggaaggccttcaagcagagcagcaccctgacagagcacaagatcatccacactggagagaagccctacaagtgtgagaagtgtgggaaggccttctcctggagcagcgccttcaccaagcacaagaggaaccacatggaggacaagccctacaagtgtgaagaatgtgggaaggccttctctgtgttcagcaccctgaccaagcacaagatcatccacacccgggagaagccctacaagtgtgaagaatgtgggaaggccttcaaccagagcagcatcttcaccaagcacaagatcatccacacagagggcaagagctacaagtgtgagaagtgtggaaatgccttcaaccagagcagcaacctgacagccaggaagatcatctacaccggggagaagccctacaagtatgaagaatgtgacaaggccttcaacaagttcagcaccctcatcacccaccagatcatctacaccggggagaagccctgcaagcatgaatgtggccgggccttcaacaagagcagcaactacaccaaggagaagctgcagacctag

SEQ ID NO: 244127 - DNA, 1761 bp, Artificial Sequence
  derived and/or modified sequence
atgggccccctgaccttccgggacgtgaagatcgagttcagcctggaggaatggcaatgcctcgatactgctcaacgcaatctctacagggacgttatgctggagaattatcgaaacttagtgtttcttggaattgcggtgagtaaaccagatctgataacgtggctggagcaaggtaaggagccttggaacctcaaacggcacgagatggtcgataagactcctgtgatgtgctctcacttcgcccaggatgtgtggcccgaacattctatcaaagactcctttcagaaggtgatcctcaggacctatggaaaatacggccatgagaatttgcaactcagaaaagatcacaagagtgtcgacgcctgtaaagtgtacaagggcgggtacaatggcttgaaccagtgcctgactacaaccgactccaagatatttcaatgtgataaatacgtgaaggtgttccacaaattccctaacgtcaaccggaacaagatcaggcacacaggcaaaaagcccttcaaatgcaaaaatcgcggaaagtcattctgtatgttaagccaattgacccagcacaagaaaatccatacgagggagtactcctacaagtgcgaggagtgcgggaaggccttcaattggtcctcaacccttaccaagcacaaaatcatccacacgggtgaaaaaccatataagtgcgaagaatgcggtaaagcattcaaccgctccagtaatctgaccaaacacaagatcattcacactggggaaaagccgtacaagtgtgaggagtgcggtaaagctttcaatagaagctccactctaaccaaacataagcggatccacaccgaagaaaaaccttataagtgcgaggaatgtgggaaggcttttaaccaatttagtatactcaacaagcacaagaggatccacatggaggacaagccctacaaatgtgaggaatgtggaaaggcctttcgggtgtttagcatcttgaaaaagcataaaataatccatacaggcgagaagccgtacaagtgcgaagaatgcggcaaggcctttaaccagttttccaatttgaccaagcacaagatcatccacaccggcgagaaaccgtacaaatgtgatgagtgtggtaaagcgttcaaccagtcctctaccttgactaagcacaaaaggatccatacaggcgaaaagccctacaagtgtgaggagtgcggcaaagcatttaaacagagctctactctgacggaacataagatcatccacaccggcgaaaaaccgtacaaatgcgagaaatgcgggaaagcctttagctggtcttccgccttcacaaaacacaagcggaaccatatggaagataagccctataagtgcgaagagtgcgggaaggctttttctgtcttcagtactctgactaaacacaaaattatccacacaagagaaaaaccatacaaatgtgaggagtgtggcaaggcatttaaccagagttctatcttcacaaagcataagatcattcatacagaggggaaatcttataagtgtgaaaaatgcggcaacgcattcaatcaatcaagcaaccttacggctcgtaaaattatctacactggggaaaaaccatacaagtacgaggagtgtgataaagctttcaacaaattcagcactctgatcacacaccagatcatctataccggtgaaaaaccttgcaaacacgagtgcggaagagccttcaataaatcctccaactataccaaggagaagttgcaaacctag

SEQ ID NO: 244128 - DNA, 1761 bp, Artificial Sequence
  derived and/or modified sequence
atgggaccactcacattccgggacgttaaaattgagttctccctcgaagagtggcaatgcctggatactgcacagcgtaatttgtatagagacgttatgttggaaaactatcgtaacctagttttcctcgggattgccgtcagtaagcccgacctgattacctggctggagcagggaaaggagccttggaatctaaagagacacgaaatggtcgataagacccctgtgatgtgctctcactttgctcaggatgtttggcccgagcattcgatcaaggatagttttcagaaggttatcctgcggacatatggaaaatacggccatgagaacctgcaactgaggaaggatcataagtccgtcgatgcttgtaaggtgtacaaagggggttataatggtcttaatcagtgtctgactacaactgactctaaaatatttcagtgcgacaagtatgttaaggtctttcataagttcccaaatgtcaacaggaacaagatccggcatactggtaagaaacctttcaaatgtaagaaccggggtaaatcattttgcatgttgagtcagctgacacagcacaagaagatccatacaagagagtatagctataaatgcgaagaatgtggaaaggcatttaactggtcatccacccttaccaagcataagattattcataccggagagaagccttacaagtgcgaggagtgcggtaaagctttcaataggagctcaaatctcaccaagcataagatcatccacacaggggaaaagccatacaagtgcgaggaatgcggaaaggcatttaatcgatcttcaactctgacaaaacataagcgtattcataccgaggaaaaaccttataaatgcgaagagtgcggaaaagccttcaaccagttttctatcctgaacaagcacaaacggatccacatggaagacaaaccttataaatgcgaagagtgcggcaaggcattcagggtattttctatcctgaaaaagcacaagattatacacacaggggagaaaccatacaagtgtgaagagtgtggcaaggccttcaaccagtttagtaatctaaccaagcataagattatccatacaggagagaagccatataagtgtgatgagtgtggaaaagcttttaatcaatcgagcactctgacaaagcacaaaaggattcacactggagaaaagccttacaaatgtgaggagtgtggtaaagctttcaaacaaagttctaccttgactgaacataaaatcatccatacgggcgagaagccctataagtgcgagaagtgcggtaaagcattctcttggagctccgcgtttacgaagcacaagaggaaccatatggaagacaagccctacaagtgtgaagagtgcggcaaagccttttctgtgtttagcaccctcaccaagcataagatcatccacactcgcgaaaaaccctacaaatgcgaagagtgcggtaaggcgttcaaccaatcctccatttttaccaaacataaaatcatccataccgagggtaaatcgtacaagtgcgagaagtgcggcaacgccttcaatcagagctcgaatttgacagcacgcaagatcatctataccggggagaagccctataaatatgaggagtgcgataaagcatttaataagttctctactttgattacccaccaaattatttacacaggcgagaagccttgtaaacatgaatgcggcagagcctttaataaaagcagtaactacaccaaagagaagcttcagacttag

SEQ ID NO: 244129 - DNA, 3210 bp, Artificial Sequence
  derived and/or modified sequence
aatcaggcacgcaactggagcggacagcacagcttccgggatttggcggggcctttgtctctcgctgcagccggcgctccacgtctagtcttcactgctctgcgtcctgtgctgataaaggctcgccgctgtgaccctgttacctgcaagaacttggaggttcacagctaagacgccaggaccccctggaagcctagaaatgggaccactgacatttagggatgtgaaaatagaattctctctagaggaatggcaatgcctggacactgcgcagcggaatttatatagagatgtgatgttagagaactacagaaacctggtcttccttggtattgctgtctctaagccagacctgatcacctggctggagcaaggaaaagagccctggaatctgaagagacatgagatggtagacaaaaccccagttatgtgttctcattttgcccaagatgtttggccagagcacagcataaaagattctttccaaaaagtgatactgagaacatatggaaaatatggacatgagaatttacagctaagaaaagaccataaaagtgtggatgcatgtaaggtgtacaaaggaggttataatggacttaaccagtgtttgacaactactgacagcaagatatttcagtgtgataaatatgtgaaagtctttcataaatttccaaatgtaaatagaaataagataagacatactggaaagaaacctttcaaatgtaaaaaccgtggcaaatcattttgcatgctttcacaattaactcaacataagaaaattcatactagagagtattcttacaaatgtgaagaatgtggtaaagcctttaactggtcctcaacccttactaaacataagataattcatactggagaaaaaccctacaaatgtgaagaatgtggcaaagcttttaaccggtcctcaaatcttactaaacataaaataattcatactggagagaaaccctacaaatgtgaagaatgtggcaaagcttttaaccggtcctcaacccttactaaacataaaagaattcatacagaagagaaaccctacaaatgtgaagaatgtggcaaggcctttaaccagttctcgattcttaataaacataagagaattcatatggaagataaaccctacaaatgtgaagaatgtggcaaagcctttagagtattctcaattcttaaaaaacataagataatccatactggggaaaaaccatacaaatgtgaagaatgtggcaaagcctttaaccagttctcaaaccttactaaacataagataattcatactggagagaaaccctacaaatgtgatgaatgtggcaaagcctttaaccagtcctcaacccttactaaacataaaagaattcatacgggagaaaaaccctacaaatgtgaagaatgtggcaaagcttttaaacagtcctcaacccttactgaacataagataattcatactggagagaaaccctacaaatgtgaaaaatgtggcaaggcctttagctggtcctcagcttttactaaacataagagaaatcatatggaagataaaccctacaaatgtgaagaatgtggcaaagcctttagtgtattctcaacccttactaaacataaaataattcatactagagaaaaaccctacaaatgtgaagaatgtggcaaagcctttaaccagtcctcaatttttactaaacataagataattcacactgaagggaaatcctacaaatgtgaaaaatgtggcaatgcttttaaccagtcctcaaaccttactgcacgtaagataatttatactggagagaaaccctacaaatatgaagaatgtgacaaagcctttaacaagttctcaacccttattacacatcagataatttatactggagagaaaccctgcaaacatgaatgtggcagagcctttaacaaatcctcaaattatactaaagagaaactacaaacctgaaagatgtgacaatgattttcactacacctcaaacttttctaaacataaaccatattggtgccctagaaatgtgaggaatatgacaaggactttaaatggttgtcacgcttgattgtaggtaagataatttatattggagaaaaatcctccaagtatgaagaatgtggcaaacttttaaccaatcctcacaccttattgcacaggaaagcatttatacttgagaaaaattgtataaagaatatggaaaagccatttatatctgctcacatgtaaaaacatcagttcatacttaataaaatgcaattaccgtcaaatctttcagaaaatataagcctttaatacgaggaagagtattcttaagatgaacattacaaatagaaagagggttgtagtacctttagttttatgatagatcttattgtacacattttgtaccagaggaaaaccctaaagcattagttgctcaaactttgttcgacatcagggaatttgtattggagaaaaaccctgcaaatgtaataaatatggaaaaacattttttcaaaaactacagcttggaaaacatcagagagttcatactaaaatatatttttgcagatgcagtaaatatgaaaaatatttaatcccaaattaagtctatgtaaatatcagaattcacagtagaaatcataaggcataaggcactgatacttcagacattacactaaattagagtgttgagtataggagatccaaaactaaaattgttaggtaagttatttatatataactttaaaagaagtagaagattttttggagatttataattacattcaaagtatacttttttcttgaaaaaaattacagattttttgaaaagcaattgatgtaatttaactctcaaattcatgtttttcttcattcctattatattcacatgtgaaagcaagtgatctgttgttgctgaatcagagatatgagagattcttttttataggtgggcattatttatgcccctttctgtggaagagtaagaaaattaaaatacaagatgcatgaggaaaatgtagagatgctctttgtgattaacttagaatattaagtgctacttgaggtacatgttcagactaacattcttttgcagtatagtgagaaaaaaacattttaaaattaattatcattttgttgattgtgcttttatgtaataaaatgcagtactttaaaacatttagattgtgtgtgaacttaattttgtaattaaacattttttt

SEQ ID NO: 244130 - DNA, 2957 bp, Artificial Sequence
  derived and/or modified sequence
gtctagtcttcactgctctgcgtcctgtgctgataaaggctcgccgctgtgaccctgttacctgcaagaacttggaggttcacagctaagacgccaggaccccctggaagcctagaaatggtattgctgtctctaagccagacctgatcacctggctggagcaaggaaaagagccctggaatctgaagagacatgagatggtagacaaaaccccagttatgtgttctcattttgcccaagatgtttggccagagcacagcataaaagattctttccaaaaagtgatactgagaacatatggaaaatatggacatgagaatttacagctaagaaaagaccataaaagtgtggatgcatgtaaggtgtacaaaggaggttataatggacttaaccagtgtttgacaactactgacagcaagatatttcagtgtgataaatatgtgaaagtctttcataaatttccaaatgtaaatagaaataagataagacatactggaaagaaacctttcaaatgtaaaaaccgtggcaaatcattttgcatgctttcacaattaactcaacataagaaaattcatactagagagtattcttacaaatgtgaagaatgtggtaaagcctttaactggtcctcaacccttactaaacataagataattcatactggagaaaaaccctacaaatgtgaagaatgtggcaaagcttttaaccggtcctcaaatcttactaaacataaaataattcatactggagagaaaccctacaaatgtgaagaatgtggcaaagcttttaaccggtcctcaacccttactaaacataaaagaattcatacagaagagaaaccctacaaatgtgaagaatgtggcaaggcctttaaccagttctcgattcttaataaacataagagaattcatatggaagataaaccctacaaatgtgaagaatgtggcaaagcctttagagtattctcaattcttaaaaaacataagataatccatactggggaaaaaccatacaaatgtgaagaatgtggcaaagcctttaaccagttctcaaaccttactaaacataagataattcatactggagagaaaccctacaaatgtgatgaatgtggcaaagcctttaaccagtcctcaacccttactaaacataaaagaattcatacgggagaaaaaccctacaaatgtgaagaatgtggcaaagcttttaaacagtcctcaacccttactgaacataagataattcatactggagagaaaccctacaaatgtgaaaaatgtggcaaggcctttagctggtcctcagcttttactaaacataagagaaatcatatggaagataaaccctacaaatgtgaagaatgtggcaaagcctttagtgtattctcaacccttactaaacataaaataattcatactagagaaaaaccctacaaatgtgaagaatgtggcaaagcctttaaccagtcctcaatttttactaaacataagataattcacactgaagggaaatcctacaaatgtgaaaaatgtggcaatgcttttaaccagtcctcaaaccttactgcacgtaagataatttatactggagagaaaccctacaaatatgaagaatgtgacaaagcctttaacaagttctcaacccttattacacatcagataatttatactggagagaaaccctgcaaacatgaatgtggcagagcctttaacaaatcctcaaattatactaaagagaaactacaaacctgaaagatgtgacaatgattttcactacacctcaaacttttctaaacataaaccatattggtgccctagaaatgtgaggaatatgacaaggactttaaatggttgtcacgcttgattgtaggtaagataatttatattggagaaaaatcctccaagtatgaagaatgtggcaaacttttaaccaatcctcacaccttattgcacaggaaagcatttatacttgagaaaaattgtataaagaatatggaaaagccatttatatctgctcacatgtaaaaacatcagttcatacttaataaaatgcaattaccgtcaaatctttcagaaaatataagcctttaatacgaggaagagtattcttaagatgaacattacaaatagaaagagggttgtagtacctttagttttatgatagatcttattgtacacattttgtaccagaggaaaaccctaaagcattagttgctcaaactttgttcgacatcagggaatttgtattggagaaaaaccctgcaaatgtaataaatatggaaaaacattttttcaaaaactacagcttggaaaacatcagagagttcatactaaaatatatttttgcagatgcagtaaatatgaaaaatatttaatcccaaattaagtctatgtaaatatcagaattcacagtagaaatcataaggcataaggcactgatacttcagacattacactaaattagagtgttgagtataggagatccaaaactaaaattgttaggtaagttatttatatataactttaaaagaagtagaagattttttggagatttataattacattcaaagtatacttttttcttgaaaaaaattacagattttttgaaaagcaattgatgtaatttaactctcaaattcatgtttttcttcattcctattatattcacatgtgaaagcaagtgatctgttgttgctgaatcagagatatgagagattcttttttataggtgggcattatttatgcccctttctgtggaagagtaagaaaattaaaatacaagatgcatgaggaaaatgtagagatgctctttgtgattaacttagaatattaagtgctacttgaggtacatgttcagactaacattcttttgcagtatagtgagaaaaaaacattttaaaattaattatcattttgttgattgtgcttttatgtaataaaatgcagtactttaaaaca

SEQ ID NO: 244131 - protein, 389 aa, Artificial Sequence
  derived and/or modified sequence
MSEIRFTNLTWDQVITLDQVLDEVIPIHGKGNFPTMEVKPKDIIHVVKDQLIGQGIIVKDARLNGSVASYILASHNGISYKDLDVIFGVELPGNEEFQVVKDAVLDCLLDFLPKDVKKEKLSPDIMKDAYVQKLVKVCNGHDCWSLISLSNNTGKNLELKFVSSLRRQFEFSVDSFQIVLDPMLDFYSDKNAKLTKESYPVVVAESMYGDFQEAMTHLQHKLICTRKPEEIRGGGLLKYCSLLVHGFKPACMSEIKNLERYMCSRFFIDFPHIEEQQKKIESYLHNHFIGEGMTKYDYLMTLHGVVNESTVCLMSYERRQILHLITMMALKVLGELNILPNTQKVTCFYQPAPYFAAEARYPIYVIPEPPPVSFQPYHPLHFRGSNGMS

SEQ ID NO: 244132 - DNA, 1170 bp, Artificial Sequence
  derived and/or modified sequence
atgagcgagatcagattcaccaacctgacctgggaccaggtgatcaccctggaccaggtgctggacgaggtgatccccatccacggcaagggcaacttccccaccatggaggtgaagcccaaggacatcatccacgtggtgaaggaccagctgatcggccagggcatcatcgtgaaggacgccagactgaacggcagcgtggccagctacatcctggccagccacaacggcatcagctacaaggacctggacgtgatcttcggcgtggagctgcccggcaacgaggagttccaggtggtgaaggacgccgtgctggactgcctgctggacttcctgcccaaggacgtgaagaaggagaagctgagccccgacatcatgaaggacgcctacgtgcagaagctggtgaaggtgtgcaacggccacgactgctggagcctgatcagcctgagcaacaacaccggcaagaacctggagctgaagttcgtgagcagcctgagaagacagttcgagttcagcgtggacagcttccagatcgtgctggaccccatgctggacttctacagcgacaagaacgccaagctgaccaaggagagctaccccgtggtggtggccgagagcatgtacggcgacttccaggaggccatgacccacctgcagcacaagctgatctgcaccagaaagcccgaggagatcagaggcggcggcctgctgaagtactgcagcctgctggtgcacggcttcaagcccgcctgcatgagcgagatcaagaacctggagagatacatgtgcagcagattcttcatcgacttcccccacatcgaggagcagcagaagaagatcgagagctacctgcacaaccacttcatcggcgagggcatgaccaagtacgactacctgatgaccctgcacggcgtggtgaacgagagcaccgtgtgcctgatgagctacgagagaagacagatcctgcacctgatcaccatgatggccctgaaggtgctgggcgagctgaacatcctgcccaacacccagaaggtgacctgcttctaccagcccgccccctacttcgccgccgaggccagataccccatctacgtgatccccgagcccccccccgtgagcttccagccctaccaccccctgcacttcagaggcagcaacggcatgagctag

SEQ ID NO: 244133 - DNA, 1170 bp, Artificial Sequence
  derived and/or modified sequence
atgtccgagattagattcaccaacctgacctgggaccaggtcataacactggatcaggttctggacgaagtcatacctatccacggcaaagggaattttccaacaatggaagtcaaaccaaaagacataattcatgtagttaaagaccagcttatagggcaggggataatcgtgaaagacgctagactcaacggctcagtggcctcatacatactggctagccacaacggcatctcctacaaagatctcgacgtgatttttggcgtggagctgcccggaaacgaggagtttcaggtagtgaaggatgccgtgctggattgtctgcttgatttcctaccgaaggacgtgaaaaaagagaagctcagtccagatatcatgaaagatgcctatgtacagaagcttgtcaaagtttgtaatggtcacgactgttggagcctcatttcactgtcaaacaacacaggaaagaacctggagctgaagttcgtcagctccttgcgtaggcagtttgagttttccgttgattcattccaaatcgtcttagatccaatgcttgatttttacagcgataagaacgccaagctcactaaggagagttatcccgtggtggtggctgagagtatgtacggggacttccaggaggcaatgacccacctccagcacaagcttatttgtacgcgaaagccggaggagatacgaggaggagggctgctgaagtactgttcccttcttgtgcacggtttcaagcccgcgtgcatgagcgagatcaagaacctagaaaggtacatgtgctctcgcttcttcatcgatttcccccatatcgaggagcaacagaaaaagattgagagttaccttcataaccactttattggcgagggaatgactaaatacgactacttgatgactctccacggtgtggtgaatgaatctacggtctgtcttatgagttatgagcggaggcagatccttcaccttataacaatgatggcccttaaagtgttgggtgagctgaacattttaccgaatactcagaaagtgacgtgtttctaccaaccagccccctatttcgccgccgaagctagataccctatttacgtcatccccgagcctccacccgtgagcttccagccataccatccactgcatttccgaggcagcaacgggatgagctag

SEQ ID NO: 244134 - DNA, 1170 bp, Artificial Sequence
  derived and/or modified sequence
atgtctgagatcaggtttaccaatctgacctgggaccaggttattaccctggatcaggtccttgacgaggtgattccaatacacggcaagggaaacttccctaccatggaagtcaagccaaaggacataattcatgtagtaaaggatcagttgatcggacagggcatcatagtcaaagatgccaggctaaacggttccgtggccagttacatactggcgtcgcacaacggtatctcctacaaggacctggatgtgattttcggagtcgagctccccggcaacgaggagtttcaggtggtgaaggacgctgttctggactgcttgctggattttctgcccaaggatgtgaaaaaagagaaattatccccagacatcatgaaggatgcttacgtccagaagctggtgaaggtttgtaacggacacgactgttggtcacttatctcgctatcgaataacaccggtaagaacctggagttaaagtttgtaagctcactgcgtcgccagttcgagtttagcgtggacagttttcaaatcgttctggatcccatgcttgacttctatagtgataaaaacgctaaattgaccaaagagagttaccccgtggttgttgcggagtccatgtacggtgatttccaggaggcaatgacccatctacagcacaaactgatttgtactaggaagccagaagaaattcgcgggggtggactccttaagtattgtagcctgctggtgcatgggttcaagccggcatgcatgtctgaaataaaaaatctggagagatatatgtgctcaaggttttttattgacttccctcacattgaggaacaacaaaagaaaatcgagagctacctgcacaaccacttcatcggggaaggcatgactaaatacgactacctgatgaccctgcatggcgtggtgaacgaaagtactgtgtgtctgatgtcttacgaaaggcggcagatacttcatctgatcactatgatggcccttaaagttctcggagaacttaacattcttcctaatactcagaaagtgacctgcttctatcagcctgccccatatttcgccgccgaggctaggtatcctatctatgttatccctgaaccaccgcccgtctctttccagccataccatcctctacatttcagggggtccaacgggatgtcatag

SEQ ID NO: 244135 - DNA, 3011 bp, Artificial Sequence
  derived and/or modified sequence
gaatgtgtggagatcaggtgatgcagaactctggtaaaggatgttagtcttcagagtaagactgttaaattcagcaaagtctactatcagaagacacgtttttctggttggtgtattactttattcagtgataatatgaaaattactatcttcactgaaggatctactgaataatcattttaactcaactatattgcattcttgaaagcaatcctttcaattgatctactgacttcacaatgtctgaaatcagattcaccaatctcacttgggatcaagttataacactggatcaagtgttagatgaagtaattccaattcatggaaaggggaatttccccacaatggaggtaaaaccaaaagacatcattcatgttgtgaaagatcaactcatagggcaaggaattattgttaaagatgccagattgaatggttccgtagcaagttacatacttgcaagccacaatggaatcagctataaggatctggacgttatttttggtgttgagcttccaggtaacgaagaatttcaggttgttaaagatgcagttctagactgtctacttgactttttaccaaaagatgtaaagaaggaaaagctctccccagatatcatgaaagacgcttacgtacagaaattggtcaaggtttgcaatgggcatgattgttggagtcttatctccctttcaaataacactgggaagaatttagaactaaaatttgtgagttcactcagacggcagtttgaatttagtgtagattcctttcaaattgttttggatcccatgttagacttctacagtgacaaaaatgccaagctaaccaaagaatcctatcctgttgtggtagctgaaagcatgtatggagacttccaggaagcaatgacacatttgcaacacaagctcatatgtaccaggaaacctgaagagattagaggtggtggccttctgaagtactgcagcttgctggttcatggcttcaagccagcctgtatgtcagaaatcaaaaacctagaacgttatatgtgctctagattctttattgattttcctcatatagaagaacagcaaaagaaaattgaatcatacctccacaaccatttcataggtgaaggaatgaccaagtatgactaccttatgaccttgcatggagttgtgaatgaaagcactgtttgcctcatgagttatgaaagaagacagattctccacctgatcaccatgatggctttgaaagtacttggagaactaaatattctacccaatacacaaaaggtaacttgcttttatcagcctgctccgtactttgcagctgaggcaaggtaccctatttatgtaatacctgagccaccccccgttagcttccagccataccacccactgcactttcgtggatcaaatggtatgagttaaaaaatacacatgcaaccatagaaactttgatttaattaaacaccatttaaaagcaagtttccaaatgtaaaattcaagatctgtttttatttttgtacagttaccaattattttcaattacagttgatggaatagtagttaccaactatttttgatcaattaagccatcatagtaaatacaatatctataaaccaaccactttaaatgtttttcaaacgttattgactagctataataactttcaaatgttgtgttccccttgaagtgattttcaaatcttttgactacttgtgactttcaaatttactgtgacaaatatattagagatgcctgcatctttgactataacataaaaggacagattcatgttttaaaattaagatgtacagtgaagtatcaaattttttatattcagtcagttcctttgttacatttagttctttttttctattgaacaataccatcaataaatgttcagtacttaacagaaatgcctaatttcaaaagcaacagattcagaagacattaaaaccctggacttttcaagcatttttttttgacaattaaattgggttggatacaaaaatcctactatagtttaaaggaatactggaaaaaaatggttctggaaagccctggacattagtaatttgtcatctatataataaaacatttagttaatttgtggatttgaataacaataccatacagctgtgcaactactactgagatcagatacagggttttttgcccctcaaaataagttaaaacgaatgaaaatgaccagctctgaatgtgaaagctttctatcatcatctactacaaagagactctaaatggcaaacaggaaaaaaacaggcagaggtttatagccatagcatttaccattttatggcttatttgaaaaacatctttatgttgagaaacattccatttcagtaagttaaaatattttcattgtaactaaatgaagcaggtttttcattttgcctttaccaaagatcattttctaacatgccactcaagtgcctcttcgtgtgaatttttgcgtaacactataatttattcaacaactgtatacctttacagtatatctaaatatatacttactacatcgagtatactgctagaaaaatctaccagtgggattaaaaatgtattttcttcccataatgaaaataattcatgaccaatattacctgaagtgtcagaagaggagctgtcttaaattaatatggatcaggccattggaaaacttcagtatttccacttggttatgattttttgtgagtttccatttcagtttttattgaccatcacgttttctatcacaacatgacctgacagttgtatcccgataatttgccagttatagactgtgcttatcttcactgtattacaatattggacagaagtacaccaaatacggcattttcaaataaccaatatttctgagatgttttataccacagcacaagtggccatcagtatatttttaaagaattatatatcacagaaccctgaggctttaaaacactatggacttaccactttcttgacaaagaatttgtaattacaataaaatatttagaaatgaaagg

SEQ ID NO: 244136 - DNA, 3106 bp, Artificial Sequence
  derived and/or modified sequence
acgcgccccagctcccaccttgggtccttcgcctgcacccagtctaacctggcacctaaagatttcactctgtccttggcccctcaccattgtctcagagtttaagccttaacggatgaaggaaaaagattatttgtgaaaagaaattatctaacacttctcatctatctaactggagtttcactagctggagtttttctggttggtgtattactttattcagtgataatatgaaaattactatcttcactgaaggatctactgaataatcattttaactcaactatattgcattcttgaaagcaatcctttcaattgatctactgacttcacaatgtctgaaatcagattcaccaatctcacttgggatcaagttataacactggatcaagtgttagatgaagtaattccaattcatggaaaggggaatttccccacaatggaggtaaaaccaaaagacatcattcatgttgtgaaagatcaactcatagggcaaggaattattgttaaagatgccagattgaatggttccgtagcaagttacatacttgcaagccacaatggaatcagctataaggatctggacgttatttttggtgttgagcttccaggtaacgaagaatttcaggttgttaaagatgcagttctagactgtctacttgactttttaccaaaagatgtaaagaaggaaaagctctccccagatatcatgaaagacgcttacgtacagaaattggtcaaggtttgcaatgggcatgattgttggagtcttatctccctttcaaataacactgggaagaatttagaactaaaatttgtgagttcactcagacggcagtttgaatttagtgtagattcctttcaaattgttttggatcccatgttagacttctacagtgacaaaaatgccaagctaaccaaagaatcctatcctgttgtggtagctgaaagcatgtatggagacttccaggaagcaatgacacatttgcaacacaagctcatatgtaccaggaaacctgaagagattagaggtggtggccttctgaagtactgcagcttgctggttcatggcttcaagccagcctgtatgtcagaaatcaaaaacctagaacgttatatgtgctctagattctttattgattttcctcatatagaagaacagcaaaagaaaattgaatcatacctccacaaccatttcataggtgaaggaatgaccaagtatgactaccttatgaccttgcatggagttgtgaatgaaagcactgtttgcctcatgagttatgaaagaagacagattctccacctgatcaccatgatggctttgaaagtacttggagaactaaatattctacccaatacacaaaaggtaacttgcttttatcagcctgctccgtactttgcagctgaggcaaggtaccctatttatgtaatacctgagccaccccccgttagcttccagccataccacccactgcactttcgtggatcaaatggtatgagttaaaaaatacacatgcaaccatagaaactttgatttaattaaacaccatttaaaagcaagtttccaaatgtaaaattcaagatctgtttttatttttgtacagttaccaattattttcaattacagttgatggaatagtagttaccaactatttttgatcaattaagccatcatagtaaatacaatatctataaaccaaccactttaaatgtttttcaaacgttattgactagctataataactttcaaatgttgtgttccccttgaagtgattttcaaatcttttgactacttgtgactttcaaatttactgtgacaaatatattagagatgcctgcatctttgactataacataaaaggacagattcatgttttaaaattaagatgtacagtgaagtatcaaattttttatattcagtcagttcctttgttacatttagttctttttttctattgaacaataccatcaataaatgttcagtacttaacagaaatgcctaatttcaaaagcaacagattcagaagacattaaaaccctggacttttcaagcatttttttttgacaattaaattgggttggatacaaaaatcctactatagtttaaaggaatactggaaaaaaatggttctggaaagccctggacattagtaatttgtcatctatataataaaacatttagttaatttgtggatttgaataacaataccatacagctgtgcaactactactgagatcagatacagggttttttgcccctcaaaataagttaaaacgaatgaaaatgaccagctctgaatgtgaaagctttctatcatcatctactacaaagagactctaaatggcaaacaggaaaaaaacaggcagaggtttatagccatagcatttaccattttatggcttatttgaaaaacatctttatgttgagaaacattccatttcagtaagttaaaatattttcattgtaactaaatgaagcaggtttttcattttgcctttaccaaagatcattttctaacatgccactcaagtgcctcttcgtgtgaatttttgcgtaacactataatttattcaacaactgtatacctttacagtatatctaaatatatacttactacatcgagtatactgctagaaaaatctaccagtgggattaaaaatgtattttcttcccataatgaaaataattcatgaccaatattacctgaagtgtcagaagaggagctgtcttaaattaatatggatcaggccattggaaaacttcagtatttccacttggttatgattttttgtgagtttccatttcagtttttattgaccatcacgttttctatcacaacatgacctgacagttgtatcccgataatttgccagttatagactgtgcttatcttcactgtattacaatattggacagaagtacaccaaatacggcattttcaaataaccaatatttctgagatgttttataccacagcacaagtggccatcagtatatttttaaagaattatatatcacagaaccctgaggctttaaaacactatggacttaccactttcttgacaaagaatttgtaattacaataaaatatttagaaatgaaagg

SEQ ID NO: 244137 - DNA, 1170 bp, Artificial Sequence
  derived and/or modified sequence
atgtctgagatccgcttcaccaacctgacctgggaccaggtgatcaccctggaccaggtgctggatgaggtgatccccatccacggcaagggcaacttccccaccatggaggtgaagcccaaggacatcatccacgtggtgaaggaccagctgattggccagggcatcatcgtgaaggatgcccggctgaatggatctgtggccagctacatcctggccagccacaacggcatctcctacaaggacctggatgtgatctttggagtggagctgcctggaaatgaggagttccaggtggtgaaggatgctgtgctggactgcctgctggacttcctgcccaaggatgtgaagaaggagaagctgagcccagacatcatgaaggatgcctacgtgcagaagctggtgaaggtgtgcaatggacatgactgctggagcctcatcagcctgagcaacaacacaggcaagaacctggagctgaagtttgtgagcagcctgcggcggcagtttgagttctctgtggacagcttccagatcgtgctggaccccatgctggacttctacagcgacaagaatgccaagctgaccaaggagagctaccctgtggtggtggccgagagcatgtacggggacttccaggaggccatgacccacctgcagcacaagctgatctgcaccaggaagccagaggagatccggggcggcggcctgctgaagtactgcagcctgctggtgcacggcttcaagccagcctgcatgtctgagatcaagaacctggagcgctacatgtgcagccgcttcttcatcgacttcccccacatcgaggagcagcagaagaagattgagagctacctgcacaaccacttcatcggggagggcatgaccaagtatgactacctgatgaccctgcatggagtggtgaatgaaagcacagtgtgcctgatgtcctatgaaagacggcagatcctgcacctgatcaccatgatggccctgaaggtgctgggggagctgaacatcctgcccaacacccagaaggtgacctgcttctaccagcctgccccctactttgctgctgaggcccgctaccccatctacgtgattcctgagcccccacctgtgtccttccagccctaccaccccctgcacttccggggcagcaatggcatgtcctag

SEQ ID NO: 244138 - DNA, 1170 bp, Artificial Sequence
  derived and/or modified sequence
atgagcgagatccggttcaccaacctgacctgggaccaggtgatcacactcgatcaggttcttgacgaagtcattccaatccatggaaagggaaacttccctacgatggaggtgaagccaaaagatataattcatgtggtgaaggaccagttaattgggcagggcattattgtgaaggacgcaagacttaacgggagtgtggccagttacattctggcctcacacaatggaatttcctataaagatctcgacgtcatattcggtgtcgagcttcccggcaatgaggagttccaggtagtcaaagacgccgtcctggactgtctactcgattttctgcccaaagacgtgaagaaggaaaaactgtctcccgatatcatgaaggatgcatacgtgcagaagctggtgaaggtgtgcaatggacacgattgctggtccctgatcagtctgagtaataatactggcaagaacttagaattgaagttcgtgtcaagcctccgtcgtcagttcgagttcagcgttgatagcttccagatcgtgctcgaccccatgctcgacttctacagtgataaaaatgcaaagctgacaaaggagagctatccagttgttgtcgccgagtccatgtatggcgactttcaggaagccatgactcatcttcagcataaactgatctgtacccggaaacccgaagaaattagaggtggcggattgttaaagtattgcagtctcctggtgcacggatttaagccagcatgcatgtcggagatcaaaaacctggaacggtatatgtgttctaggttcttcatcgatttcccacacattgaggagcagcagaagaagattgaatcctacttgcataaccattttattggagaggggatgaccaagtatgattacctcatgacccttcatggcgtggttaacgaatcaacagtctgccttatgtcgtacgaaaggagacaaattctgcacctgatcactatgatggctctcaaggtgttgggagagctgaatatcctaccaaacacacagaaggtcacttgcttttatcaaccggcaccttattttgccgcagaagcaaggtacccaatatatgttattccagaacccccccccgtgtcatttcagccctaccatcctttacatttccgggggtccaatgggatgagctag

SEQ ID NO: 244139 - DNA, 1170 bp, Artificial Sequence
  derived and/or modified sequence
atgagcgagatccggttcaccaacctgacctgggaccaggtgatcactctcgatcaggtcctcgacgaagtgattccgattcacggtaaggggaacttcccaacaatggaagtgaaacccaaggacataatccacgtggttaaagaccagttgatcggccagggcattatcgtgaaggacgctaggctaaacggatcagttgcctcttatatcctggccagccataacgggattagctataaggatctggacgttattttcggtgtggagcttcccggaaacgaggagttccaggtggtcaaagatgccgtgctcgattgtcttctggactttctccccaaggatgtcaaaaaggaaaagctctccccggacatcatgaaagacgcgtatgtgcagaaactggtcaaggtgtgcaacggccatgattgttggagcctaatctctctgtctaataataccggtaaaaatctggagttgaagtttgtttcttcactgagacggcagttcgagttctccgtggattcctttcaaatagtgcttgacccaatgctggatttctattctgacaaaaacgcgaaattgacgaaagaaagctatcccgtagtcgtcgcagagtccatgtacggcgattttcaggaagctatgacacatctccagcacaaactgatttgcacaaggaaaccagaggaaatcaggggaggcgggctgctgaaatattgctctcttctagtgcatggctttaagcccgcatgtatgagtgaaatcaagaatcttgagcggtacatgtgctcccgcttttttattgactttccccacatcgaggaacagcaaaaaaagattgaatcctacctgcataatcatttcattggagagggtatgaccaagtatgattacctgatgacactgcacggcgtggtgaacgagagcacagtatgcttaatgagctatgaacgcagacagatactccacctgatcacaatgatggcgctgaaagtactcggagagctgaacatcctgcccaatacgcagaaggtaacatgtttttaccagcccgcgccctactttgcagccgaggctagatatcccatctatgtcatcccggagcccccccccgtatctttccagccttatcatcccctccacttcagaggctcaaatggaatgtcctag

SEQ ID NO: 244140 - DNA, 1170 bp, Artificial Sequence
  derived and/or modified sequence
atgagtgaaattcgttttaccaacctgacatgggatcaggtgattaccctcgaccaagtcctcgacgaagtcatccctatccatggaaagggtaatttcccaaccatggaagtgaagcctaaagacatcattcacgtggtaaaagaccagctgatcgggcaggggattatagtgaaagacgcacggctgaacggatccgtagccagttacattcttgcgagccacaacggcatctcctataaagacctggacgtgatcttcggagtagagcttccgggaaacgaagagttccaggtcgttaaagacgcagtgctggattgtttactggactttctgcctaaggatgtgaaaaaagaaaagctctcgcccgacattatgaaggacgcctatgtccaaaaactggtgaaggtttgcaacggccatgactgttggagtctcatttctctgtcgaataacaccggcaagaatctggaactgaagttcgtcagctccctccgtcggcagtttgagttcagcgtggactcattccagatcgtcctggatccaatgctcgacttctattctgataagaatgccaagctgactaaggaatcataccccgtcgtggtggctgaatctatgtatggggattttcaagaggcaatgactcacctgcaacacaaactgatctgcaccaggaaaccagaggaaatcagaggaggaggtctgcttaaatactgtagcctgctggtgcacggattcaaacccgcttgtatgtccgaaatcaaaaacctggagagatacatgtgttcccgattctttattgacttcccgcatattgaagagcagcagaagaaaatagagtcttatcttcataatcattttattggagaaggtatgacaaaatatgactatctcatgactctgcacggtgtggtaaatgagagcacagtctgcctgatgtcgtacgagcggagacagatcttgcatcttatcacaatgatggcactgaaggtgctaggggaactaaacattttacctaatacccaaaaggtgacatgtttttatcaacctgcaccttatttcgccgctgaggcccgatatcctatttacgtaatccctgaacctccacccgtgagcttccagccttaccaccccctgcacttcagaggaagtaatggtatgagctag

SEQ ID NO: 244141 - DNA, 1170 bp, Artificial Sequence
  derived and/or modified sequence
atgtccgaaattaggttcacaaacctgacttgggatcaagtcattacgcttgaccaggtcttggacgaagtgataccgattcacgggaaaggcaattttcctaccatggaggtcaaacccaaggacattatccatgtcgtaaaagatcagttgatcggacaggggatcatcgttaaagatgccaggctcaacggctccgtggcttcatatattttggcgtcccataacggtattagttacaaagacctcgatgtgatctttggggtggagctgcccggaaacgaggaatttcaggtggtgaaggatgcagtgctcgactgcctcctggactttttaccgaaggatgtgaagaaggaaaagctgagtcccgacatcatgaaagacgcctatgtgcagaaactggtcaaagtgtgcaatgggcacgattgctggagcctcatctcgctgagcaacaatacagggaagaatctggagcttaagttcgttagctctctgcgtcgacagttcgagtttagtgtagactccttccagatagtcctggaccccatgctggacttttactccgacaagaatgctaagttaactaaagagtcatacccagttgtcgttgctgagtccatgtatggcgacttccaggaagccatgacacatctccaacataaactcatctgcacccgtaagcctgaagagatacgcggtggaggcctcttgaagtattgctctctgttggtccacggattcaagccggcatgtatgtctgagatcaaaaatctcgaacgctatatgtgttcccggtttttcattgattttccacatattgaagaacagcagaagaagattgagagctatttgcataaccacttcattggtgagggcatgaccaagtacgattaccttatgactctgcacggtgtggtcaacgagtctacagtatgcctgatgagctatgagcgaagacaaatacttcacctgataaccatgatggccttaaaggttctaggggaactgaatatcttgcctaatacccagaaagtcacgtgtttctatcagccagccccatactttgcagcggaggctcggtatcccatttatgtcattccagagcccccacctgtaagtttccagccgtaccatcccttgcactttcgaggcagtaatggaatgtcttag

SEQ ID NO: 244142 - protein, 545 aa, Artificial Sequence
  derived and/or modified sequence
MPPFLLLTCLFITGTSVSPVALDPCSAYISLNEPWRNTDHQLDESQGPPLCDNHVNGEWYHFTGMAGDAMPTFCIPENHCGTHAPVWLNGSHPLEGDGIVQRQACASFNGNCCLWNTTVEVKACPGGYYVYRLTKPSVCFHVYCGHFYDICDEDCHGSCSDTSECTCAPGTVLGPDRQTCFDENECEQNNGGCSEICVNLKNSYRCECGVGRVLRSDGKTCEDVEGCHNNNGGCSHSCLGSEKGYQCECPRGLVLSEDNHTCQVPVLCKSNAIEVNIPRELVGGLELFLTNTSCRGVSNGTHVNILFSLKTCGTVVDVVNDKIVASNLVTGLPKQTPGSSGDFIIRTSKLLIPVTCEFPRLYTISEGYVPNLRNSPLEIMSRNHGIFPFTLEIFKDNEFEEPYREALPTLKLRDSLYFGIEPVVHVSGLESLVESCFATPTSKIDEVLKYYLIRDGCVSDDSVKQYTSRDHLAKHFQVPVFKFVGKDHKEVFLHCRVLVCGVLDERSRCAQGCHRRMRRGAGGEDSAGLQGQTLTGGPIRIDWED

SEQ ID NO: 244143 - protein, 321 aa, Artificial Sequence
  derived and/or modified sequence
MPPFLLLTCLFITGTSVSPVALDPCSAYISLNEPWRNTDHQLDESQGPPLCDNHVNGEWYHFTGMAGDAMPTFCIPENHCGTHAPVWLNGSHPLEGDGIVQRQACASFNGNCCLWNTTVEVKACPGGYYVYRLTKPSVCFHVYCGHFYDICDEDCHGSCSDTSECTCAPGTVLGPDRQTCFDENECEQNNGGCSEICVNLKNSYRCECGVGRVLRSDGKTCEDVEGCHNNNGGCSHSCLGSEKGYQCECPRGLVLSEDNHTCQVPVLCKSNAIEVNIPRELVGGLELFLTNTSCRGVSNGTHVNILFSLKTCGTVVDSCFQ

SEQ ID NO: 244144 - DNA, 1638 bp, Artificial Sequence
  derived and/or modified sequence
atgccaccgtttctgcttctcacctgcctattcatcaccggtacctctgtaagccccgtggcactggacccctgcagcgcctacatcagtttaaacgagccatggcgcaacactgaccaccagctagacgaaagccagggcccccctttgtgcgacaatcatgtaaatggagaatggtaccactttactggcatggccggcgatgccatgccaaccttttgtattccagaaaaccactgtgggactcacgctccagtctggctgaacgggagccaccctctggaaggggatggaattgtccaaaggcaggcttgcgctagtttcaacggcaactgctgcctttggaacactacagtggaagtaaaagcttgtcctggaggctactatgtataccggttgacgaaaccttcggtgtgctttcacgtttactgtggccacttttacgatatttgcgacgaggactgtcacggatcctgtagtgacactagcgaatgtacatgcgctccgggtaccgtactgggacccgaccgtcagacatgctttgacgaaaacgagtgtgaacaaaacaacggcggctgctctgaaatttgtgtgaacctgaagaatagttaccgctgcgaatgcggagtaggacgagttttgagaagcgatggtaagacttgcgaagacgtggaaggctgtcacaataataacggaggatgtagccacagctgcctgggcagtgagaaggggtaccagtgcgagtgccctagagggttggtcctgagtgaagataatcacacttgtcaggtacctgtgttatgcaaatctaacgctattgaggtgaacatcccaagagagctggtaggtggactggaactgtttctcactaacacaagctgccggggcgttagcaatggtacacacgtgaacatcctcttttccctgaaaacatgtgggactgttgttgatgtggtgaatgataagatagtggcatcaaacctggtgaccggcctgccaaagcagacccccgggtcatctggcgacttcattatcagaacatctaagttgcttattccggtcacctgtgaatttccccgcctgtatactatcagtgaggggtacgtgccaaacctaagaaactccccactggagataatgagccggaatcatggcatattccctttcaccctagagattttcaaggacaatgagttcgaagagccttatcgcgaggctctgccaacacttaagctcagagactccctgtatttcggaattgaaccggtcgtacatgtctcagggctagaaagcctggttgaaagttgtttcgccacccccacatccaaaatcgacgaggtcctaaagtattatctgatcagggacgggtgtgtgtccgacgactctgtcaagcagtatacatctcgcgaccatctagcaaagcattttcaggttccggttttcaagttcgtgggaaaggatcataaggaggtgttcttgcattgtagagtccttgtgtgcggtgtgttggacgaacgcagcaggtgcgcgcaggggtgtcaccggcgaatgcgacggggcgccggtggagaagatagcgcaggcctgcagggacagaccttgaccggcggccccattcggatagattgggaggattag

SEQ ID NO: 244145 - DNA, 966 bp, Artificial Sequence
  derived and/or modified sequence
atgcctcccttcttgcttctgacatgtttattcattaccggaacatctgtgagtcctgtggccctagatccctgctccgcatatatctctctcaatgagccatggcgaaacaccgaccaccagctagatgaaagtcagggcccacctctgtgtgataatcatgtaaatggggagtggtaccattttaccgggatggccggcgatgcaatgccaacgttttgcatccctgagaaccattgtggtacacacgctcctgtttggctaaatgggtctcatccactcgagggtgatgggattgtccagcgtcaggcctgcgctagttttaatggcaattgctgtctgtggaacaccacggtcgaagtaaaagcctgtccgggcggttattatgtttaccgcctcactaaaccctcagtgtgcttccacgtatattgtgggcatttttatgatatatgtgacgaagactgccacgggtcttgttccgatacttccgagtgcacttgcgcacctgggaccgtgctcgggcccgatcggcagacctgttttgatgaaaacgaatgcgaacagaataatggaggctgtagcgaaatatgtgtgaacctgaagaattcttaccgctgcgagtgcggagtgggtcgtgtcctgagaagcgacggcaagacatgtgaggacgtggagggatgccataacaacaatggcggttgcagtcactcctgtcttggaagcgagaagggttaccagtgtgagtgtccaagggggctagtgctgagtgaggataatcacacttgtcaggtgcctgttctttgcaaaagtaacgccattgaggtcaacataccaagggaacttgttgggggcctggagctgtttctcacgaacaccagctgccgaggagtctccaatggtacacacgtgaatattttgttctcccttaagacgtgtgggaccgtcgttgacagctgttttcagtag

SEQ ID NO: 244146 - DNA, 1638 bp, Artificial Sequence
  derived and/or modified sequence
atgccacccttcctgctgctgacctgcctcttcatcaccggcacctctgtgtcccctgtggccctggacccctgcagcgcctacatcagcctgaatgagccctggaggaacacagaccaccagctggatgagagccagggcccccccctgtgtgacaaccacgtgaatggagagtggtaccacttcaccggcatggctggagatgccatgcccaccttctgcatccctgagaaccactgcggcacccacgcccctgtgtggctgaatggcagccaccccctggagggagatggcatcgtgcagaggcaggcctgtgccagcttcaatggaaactgctgcctgtggaacaccaccgtggaggtgaaggcctgccctgggggctactacgtgtaccgcctgaccaagcccagcgtgtgcttccacgtgtactgcggccacttctatgacatctgtgatgaggactgccacggcagctgcagcgacaccagcgagtgcacctgtgcccctggcaccgtgctgggccctgaccggcagacctgctttgatgaaaatgaatgtgagcagaacaacggcggctgcagcgagatctgtgtgaacctgaagaacagctaccgctgtgaatgtggggtgggccgggtgctgcggagtgatggcaagacctgtgaagatgtggagggctgccacaacaacaatggaggctgcagccacagctgcctgggcagcgagaagggctaccagtgtgagtgcccccggggcctggtgctgtctgaggacaaccacacctgccaggtgcctgtgctgtgcaagagcaatgccatcgaggtgaacatcccccgggagctggtgggcggcctggagctgttcctgaccaacaccagctgccggggcgtgtccaatggcacccacgtgaacatcctcttcagcctgaagacctgtggcaccgtggtggatgtggtgaatgacaagatcgtggccagcaacctggtgacaggcctgcccaagcagaccccaggcagcagcggggacttcatcatccgcaccagcaagctgctgatccctgtgacctgtgagttcccccggctgtacaccatcagcgagggctacgtgcccaacctgaggaacagccccctggagatcatgagcaggaaccacggcatcttccccttcaccctggagatcttcaaggacaatgaatttgaggagccctaccgggaggccctgcccaccctgaagctgcgggacagcctgtacttcggcatcgagcctgtggtgcacgtgtctggcctggagagcctggtggagagctgctttgccacccccaccagcaagattgatgaggtgctgaagtactacctgatcagagatggctgtgtgtctgatgacagcgtgaagcagtacaccagccgggaccacctggccaagcacttccaggtgcctgtgttcaagtttgtgggcaaggaccacaaggaggtgttcctgcactgccgggtgctggtgtgtggggtgctggatgagaggagccgctgtgcccagggctgccacaggaggatgagaagaggagctggaggagaggacagcgctggcctgcagggccagaccctgactggaggccccatcagaattgactgggaggactag

SEQ ID NO: 244147 - DNA, 966 bp, Artificial Sequence
  derived and/or modified sequence
atgccacccttcctgctgctgacctgcctcttcatcaccggcacctctgtgtcccctgtggccctggacccctgcagcgcctacatcagcctgaatgagccctggaggaacacagaccaccagctggatgagagccagggcccccccctgtgtgacaaccacgtgaatggagagtggtaccacttcaccggcatggctggagatgccatgcccaccttctgcatccctgagaaccactgcggcacccacgcccctgtgtggctgaatggcagccaccccctggagggagatggcatcgtgcagaggcaggcctgtgccagcttcaatggaaactgctgcctgtggaacaccaccgtggaggtgaaggcctgccctgggggctactacgtgtaccgcctgaccaagcccagcgtgtgcttccacgtgtactgcggccacttctatgacatctgtgatgaggactgccacggcagctgcagcgacaccagcgagtgcacctgtgcccctggcaccgtgctgggccctgaccggcagacctgctttgatgaaaatgaatgtgagcagaacaacggcggctgcagcgagatctgtgtgaacctgaagaacagctaccgctgtgaatgtggggtgggccgggtgctgcggagtgatggcaagacctgtgaagatgtggagggctgccacaacaacaatggaggctgcagccacagctgcctgggcagcgagaagggctaccagtgtgagtgcccccggggcctggtgctgtctgaggacaaccacacctgccaggtgcctgtgctgtgcaagagcaatgccatcgaggtgaacatcccccgggagctggtgggcggcctggagctgttcctgaccaacaccagctgccggggcgtgtccaatggcacccacgtgaacatcctcttcagcctgaagacctgtggcaccgtggtggacagctgcttccagtag

SEQ ID NO: 244148 - DNA, 1638 bp, Artificial Sequence
  derived and/or modified sequence
atgccccccttcctgctgctgacctgcctgttcatcaccggcaccagtgtctcccctgtggccctggatccgtgctctgcttacataagcctcaatgagccctggcggaataccgaccaccagctggacgagtctcaggggccacccctgtgtgacaatcatgtcaacggggaatggtaccatttcactggaatggcaggcgacgccatgcccactttttgcattcctgagaaccactgtggcacccacgcccctgtatggcttaatggctcccatccgctcgaaggtgacgggattgtgcaaagacaagcttgtgcttcattcaacggtaactgctgcctgtggaacaccactgtggaggtgaaggcatgcccagggggatattatgtgtacagactcaccaagccctccgtatgcttccacgtctattgcgggcatttttatgatatctgtgacgaggactgtcacggctcttgttccgatacttccgagtgtacgtgtgccccaggcacagttctgggacctgaccgtcagacctgcttcgacgagaacgaatgtgaacagaacaatggtggatgttcagagatttgtgtcaacctaaaaaactcctacaggtgtgagtgtggcgtgggacgcgttctccgcagcgacggcaaaacgtgcgaagatgtggaggggtgccacaacaataatggcgggtgctctcactcttgtttgggttcagagaaagggtaccaatgcgaatgtccccgcgggctggttctttctgaagacaatcacacctgccaagtgccagtgctctgcaagtccaacgctatcgaagtgaacatccccagagagctcgtcggcggcctcgagctctttctaaccaacaccagttgtaggggcgtcagtaatgggacacacgtgaacattctgttcagtctgaagacgtgtggcacggtggtggacgtggtgaatgataagatagtggcctcaaacctggtcactggtcttccaaagcagaccccaggatcctctggagattttataatacggacaagcaaactgctaattcccgtgacgtgcgagtttcctcgcctatatacaatttccgaaggttacgtccctaacttaagaaactcccccctggagattatgtccaggaaccacgggattttccccttcaccctagaaatttttaaagacaacgagttcgaagagccctatcgcgaagccctgcccacccttaagctgcgcgattccctttacttcggtatcgagcctgtagtacatgttagtgggttagaatcattggttgaaagctgtttcgccacacctacatcaaagattgatgaggttctgaagtactatctcatcagagacggatgcgtttccgacgattccgtgaagcagtacaccagtagggatcacttggcaaagcattttcaggtcccggtatttaagtttgtgggcaaggatcacaaggaagtgtttcttcactgtagggtcctcgtatgcggtgtactcgatgagaggtccagatgcgcacagggctgccacaggaggatgaggcgcggcgcgggtggggaggattcagccgggctgcaggggcagactctcacaggaggccctataagaatcgattgggaagactag

SEQ ID NO: 244149 - DNA, 966 bp, Artificial Sequence
  derived and/or modified sequence
atgccccccttcctgctgctgacctgcctgttcatcaccggcacctctgtgtcaccagtggccctggatccatgtagcgcctatataagcctgaatgaaccatggcgaaatacagatcaccagttagatgagtctcagggaccccccttgtgtgacaatcatgtgaatggggaatggtatcactttactggaatggcaggggatgcaatgcctactttctgtatcccagagaatcactgcggcacacatgcccctgtgtggctgaacggtagccatcccctggaaggcgatgggatagtccagcggcaggcatgcgccagtttcaacgggaactgctgtttgtggaacactaccgtggaagttaaggcatgcccaggggggtattatgtgtatcgcctaacaaaaccgagcgtgtgcttccacgtttactgcggccatttctacgacatatgtgacgaagactgtcatggatcctgcagcgatacaagcgagtgtacatgtgccccaggcacagtactaggccccgaccgccagacctgcttcgacgaaaatgagtgcgagcagaacaacggcggctgttcagagatctgtgtgaatttaaaaaattcttacagatgtgagtgcggagtaggacgagtgctcagatccgacgggaagacgtgcgaagacgtggagggatgccataacaataacggtggttgtagccacagttgtctgggctctgagaaaggttatcagtgcgagtgcccaagaggcctagtcctgagcgaggacaaccacacgtgccaagtgcccgttctgtgcaagtccaatgcaatcgaagtaaatattccacgcgaactggtgggtggcctcgagctttttttgaccaatacttcttgccgcggcgtgagcaacggcacccacgttaatatcctcttttccttgaaaacttgcgggaccgtcgtggatagttgtttccagtag

SEQ ID NO: 244150 - DNA, 2365 bp, Artificial Sequence
  derived and/or modified sequence
aaagcagtgcttctctctggggccaaggccagagctgtggacaccttatcccactcatcctcatcctcttcctctgataaagcccctaccagtgctgataaagtctttctcgtgagagcctagaggccttaaaaaaaaaagtgcttgaaagagaaggggacaaaggaacaccagtattaagaggattttccagtgtttctggcagttggtccagaaggatgcctccattcctgcttctcacctgcctcttcatcacaggcacctccgtgtcacccgtggccctagatccttgttctgcttacatcagcctgaatgagccctggaggaacactgaccaccagttggatgagtctcaaggtcctcctctatgtgacaaccatgtgaatggggagtggtaccacttcacgggcatggcgggagatgccatgcctaccttctgcataccagaaaaccactgtggaacccacgcacctgtctggctcaatggcagccaccccctagaaggcgacggcattgtgcaacgccaggcttgtgccagcttcaatgggaactgctgtctctggaacaccacggtggaagtcaaggcttgccctggaggctactatgtgtatcgtctgaccaagcccagcgtctgcttccacgtctactgtggtcatttttatgacatctgcgacgaggactgccatggcagctgctcagataccagcgagtgcacatgcgctccaggaactgtgctaggccctgacaggcagacatgctttgatgaaaatgaatgtgagcaaaacaacggtggctgcagtgagatctgtgtgaacctcaaaaactcctaccgctgtgagtgtggggttggccgtgtgctaagaagtgatggcaagacttgtgaagacgttgaaggatgccacaataacaatggtggctgcagccactcttgccttggatctgagaaaggctaccagtgtgaatgtccccggggcctggtgctgtctgaggataaccacacttgccaagtccctgtgttgtgcaaatcaaatgccattgaagtgaacatccccagggagctggttggtggcctggagctcttcctgaccaacacctcctgccgaggagtgtccaacggcacccatgtcaacatcctcttctctctcaagacatgtggtacagtggtcgatgtggtgaatgacaagattgtggccagcaacctcgtgacaggtctacccaagcagaccccggggagcagcggggacttcatcatccgaaccagcaagctgctgatcccggtgacctgcgagtttccacgcctgtacaccatttctgaaggatacgttcccaaccttcgaaactccccactggaaatcatgagccgaaatcatgggatcttcccattcactctggagatcttcaaggacaatgagtttgaagagccttaccgggaagctctgcccaccctcaagcttcgtgactccctctactttggcattgagcccgtggtgcacgtgagcggcttggaaagcttggtggagagctgctttgccacccccacctccaagatcgacgaggtcctgaaatactacctcatccgggatggctgtgtttcagatgactcggtaaagcagtacacatcccgggatcacctagcaaagcacttccaggtccctgtcttcaagtttgtgggcaaagaccacaaggaagtgtttctgcactgccgggttcttgtctgtggagtgttggacgagcgttcccgctgtgcccagggttgccaccggcgaatgcgtcgtggggcaggaggagaggactcagccggtctacagggccagacgctaacaggcggcccgatccgcatcgactgggaggactagttcgtagccatacctcgagtccctgcattggacggctctgctctttggagcttctccccccaccgccctctaagaacatctgccaacagctgggttcagacttcacactgtgagttcagactcccagcaccaactcactctgattctggtccattcagtgggcacaggtcacagcactgctgaacaatgtggcctgggtggggtttcatctttctagggttgaaaactaaactgtccacccagaaagacactcaccccatttccctcatttctttcctacacttaaatacctcgtgtatggtgcaatcagaccacaaaatcagaagctgggtataatatttcaagttacaaaccctagaaaaattaaacagttactgaaattatgacttaaatacccaatgactccttaaatatgtaaattatagttataccttgaaatttcaattcaaatgcagactaattatagggaatttggaagtgtatcaataaaacagtatataattttaaaa

SEQ ID NO: 244151 - DNA, 1181 bp, Artificial Sequence
  derived and/or modified sequence
aaagcagtgcttctctctggggccaaggccagagctgtggacaccttatcccactcatcctcatcctcttcctctgataaagcccctaccagtgctgataaagtctttctcgtgagagcctagaggccttaaaaaaaaaagtgcttgaaagagaaggggacaaaggaacaccagtattaagaggattttccagtgtttctggcagttggtccagaaggatgcctccattcctgcttctcacctgcctcttcatcacaggcacctccgtgtcacccgtggccctagatccttgttctgcttacatcagcctgaatgagccctggaggaacactgaccaccagttggatgagtctcaaggtcctcctctatgtgacaaccatgtgaatggggagtggtaccacttcacgggcatggcgggagatgccatgcctaccttctgcataccagaaaaccactgtggaacccacgcacctgtctggctcaatggcagccaccccctagaaggcgacggcattgtgcaacgccaggcttgtgccagcttcaatgggaactgctgtctctggaacaccacggtggaagtcaaggcttgccctggaggctactatgtgtatcgtctgaccaagcccagcgtctgcttccacgtctactgtggtcatttttatgacatctgcgacgaggactgccatggcagctgctcagataccagcgagtgcacatgcgctccaggaactgtgctaggccctgacaggcagacatgctttgatgaaaatgaatgtgagcaaaacaacggtggctgcagtgagatctgtgtgaacctcaaaaactcctaccgctgtgagtgtggggttggccgtgtgctaagaagtgatggcaagacttgtgaagacgttgaaggatgccacaataacaatggtggctgcagccactcttgccttggatctgagaaaggctaccagtgtgaatgtccccggggcctggtgctgtctgaggataaccacacttgccaagtccctgtgttgtgcaaatcaaatgccattgaagtgaacatccccagggagctggttggtggcctggagctcttcctgaccaacacctcctgccgaggagtgtccaacggcacccatgtcaacatcctcttctctctcaagacatgtggtacagtggtcgattcctgttttcaa

SEQ ID NO: 244152 - DNA, 1638 bp, Artificial Sequence
  derived and/or modified sequence
atgcctcctttcctcttgcttacctgcctatttatcaccggcacatcagtgagtcctgttgcactagacccttgttccgcttacatcagccttaacgagccctggcgcaataccgatcaccaattagacgaatcccaagggccaccattgtgcgacaatcacgtgaacggtgagtggtaccactttactggcatggccggagatgccatgcccacattttgcattccagagaatcactgtggaacacacgcaccagtgtggcttaacggatcgcaccccctggagggagacggtatagtacagagacaggcgtgcgcttccttcaatgggaattgttgcctgtggaataccactgtggaagttaaggcttgtcccggaggatactatgtttatcggctgactaaacctagtgtttgcttccacgtgtactgtgggcacttttatgatatctgtgatgaagactgtcacggttcctgttctgatacgagcgaatgcacctgtgcccctgggactgtacttggcccagatagacagacctgtttcgacgaaaatgagtgcgagcaaaacaatggaggttgttcagaaatttgcgtaaatttgaaaaactcttacagatgcgaatgtggagtagggagggttctccgctcagacggcaagacttgtgaagatgtggaggggtgccacaacaacaacggcggttgctcccactcttgcctcggctccgagaaaggataccagtgcgagtgcccacgcggactggtactcagcgaagacaaccatacctgccaggtcccggtgctgtgcaaatccaatgccatagaggtcaacattcctagggagttagtgggaggattggagttgttcctgacaaatacctcctgtagaggggtgtcaaacggaacacacgtcaacatccttttctcgttgaaaacgtgtggaacggttgtcgacgtggtcaacgataaaattgtggccagcaacctggtgactggccttcccaagcaaacccccggttcaagcggggacttcatcatccgaaccagtaagctgttgatccccgtcacttgcgagtttccccgtttgtataccatatctgaggggtatgttcccaacctaaggaattcccccttggagatcatgtctcggaaccatggtatatttccgttcactctcgagatcttcaaagacaatgagtttgaggaaccttaccgggaagcccttcccactcttaaactccgcgatagcctttatttcggcatcgaacctgtcgttcacgtgtccggccttgagtcccttgtcgaatcttgcttcgccaccccgacgtctaaaattgatgaggtcctgaagtactacttaatcagagacggatgtgtttccgacgatagtgtcaagcagtacacctcaagggatcaccttgcaaaacatttccaggtgcctgtatttaaatttgtggggaaggatcacaaagaggtgttcctgcactgtagagtcctggtgtgcggcgtcctggatgagagatccagatgtgctcaaggatgtcatcgccgtatgcgcagaggcgctggcggagaagactctgctggacttcagggacagacgcttacggggggaccaatccgcatcgactgggaggactag

SEQ ID NO: 244153 - DNA, 966 bp, Artificial Sequence
  derived and/or modified sequence
atgccacctttcctacttctcacttgtctgttcatcacaggtacttcagtgagtcctgtggccctggatccttgctccgcctacatttccttaaatgaaccctggcgtaacacagatcaccagctagatgaaagccagggtccacccctatgtgataatcacgtgaatggcgaatggtaccatttcaccggcatggctggggatgcaatgcctacgttctgtatcccagagaaccattgtggtacccatgcccctgtctggttgaatggttctcatcccctggaaggcgacggaatagtccagcgccaggcgtgtgcttcatttaacgggaactgttgcctttggaacaccacggtggaggtcaaagcctgccctggtgggtactacgtataccgacttaccaagccgtccgtgtgcttccatgtctattgcggacatttttacgatatctgcgatgaagactgccacggatcctgctcagacactagcgaatgcacctgtgcgcctggaaccgtgcttgggccagacaggcaaacatgcttcgatgaaaatgaatgcgaacagaacaatggtggttgctcagaaatttgcgtcaatctcaagaactcttataggtgtgagtgtggtgtaggtagagttctccggagcgatggcaagacttgtgaagacgtggagggatgtcataataacaacgggggttgcagtcactcttgcctggggtccgaaaaggggtaccagtgcgagtgtcctagggggctggtgctgagcgaggacaatcatacttgccaggtacctgtgctgtgcaagagcaatgcaatagaggtgaatatccccagggagttggtcggagggcttgagctgtttttgaccaacaccagctgccgtggagtttccaatggcacccacgttaatatactgtttagtcttaaaacctgtggaacagtcgtggattcctgttttcagtag

SEQ ID NO: 244154 - DNA, 1638 bp, Artificial Sequence
  derived and/or modified sequence
atgccccccttcctgctgctgacctgcctgttcatcaccggcaccagcgtgagccccgtggccctggacccctgcagcgcctacatcagcctgaacgagccctggagaaacaccgaccaccagctggacgagagccagggcccccccctgtgcgacaaccacgtgaacggcgagtggtaccacttcaccggcatggccggcgacgccatgcccaccttctgcatccccgagaaccactgcggcacccacgcccccgtgtggctgaacggcagccaccccctggagggcgacggcatcgtgcagagacaggcctgcgccagcttcaacggcaactgctgcctgtggaacaccaccgtggaggtgaaggcctgccccggcggctactacgtgtacagactgaccaagcccagcgtgtgcttccacgtgtactgcggccacttctacgacatctgcgacgaggactgccacggcagctgcagcgacaccagcgagtgcacctgcgcccccggcaccgtgctgggccccgacagacagacctgcttcgacgagaacgagtgcgagcagaacaacggcggctgcagcgagatctgcgtgaacctgaagaacagctacagatgcgagtgcggcgtgggcagagtgctgagaagcgacggcaagacctgcgaggacgtggagggctgccacaacaacaacggcggctgcagccacagctgcctgggcagcgagaagggctaccagtgcgagtgccccagaggcctggtgctgagcgaggacaaccacacctgccaggtgcccgtgctgtgcaagagcaacgccatcgaggtgaacatccccagagagctggtgggcggcctggagctgttcctgaccaacaccagctgcagaggcgtgagcaacggcacccacgtgaacatcctgttcagcctgaagacctgcggcaccgtggtggacgtggtgaacgacaagatcgtggccagcaacctggtgaccggcctgcccaagcagacccccggcagcagcggcgacttcatcatcagaaccagcaagctgctgatccccgtgacctgcgagttccccagactgtacaccatcagcgagggctacgtgcccaacctgagaaacagccccctggagatcatgagcagaaaccacggcatcttccccttcaccctggagatcttcaaggacaacgagttcgaggagccctacagagaggccctgcccaccctgaagctgagagacagcctgtacttcggcatcgagcccgtggtgcacgtgagcggcctggagagcctggtggagagctgcttcgccacccccaccagcaagatcgacgaggtgctgaagtactacctgatcagagacggctgcgtgagcgacgacagcgtgaagcagtacaccagcagagaccacctggccaagcacttccaggtgcccgtgttcaagttcgtgggcaaggaccacaaggaggtgttcctgcactgcagagtgctggtgtgcggcgtgctggacgagagaagcagatgcgcccagggctgccacagaagaatgagaagaggcgccggcggcgaggacagcgccggcctgcagggccagaccctgaccggcggccccatcagaatcgactgggaggactag

SEQ ID NO: 244155 - DNA, 966 bp, Artificial Sequence
  derived and/or modified sequence
atgccccccttcctgctgctgacctgcctgttcatcaccggcaccagcgtgagccccgtggccctggacccctgcagcgcctacatcagcctgaacgagccctggagaaacaccgaccaccagctggacgagagccagggcccccccctgtgcgacaaccacgtgaacggcgagtggtaccacttcaccggcatggccggcgacgccatgcccaccttctgcatccccgagaaccactgcggcacccacgcccccgtgtggctgaacggcagccaccccctggagggcgacggcatcgtgcagagacaggcctgcgccagcttcaacggcaactgctgcctgtggaacaccaccgtggaggtgaaggcctgccccggcggctactacgtgtacagactgaccaagcccagcgtgtgcttccacgtgtactgcggccacttctacgacatctgcgacgaggactgccacggcagctgcagcgacaccagcgagtgcacctgcgcccccggcaccgtgctgggccccgacagacagacctgcttcgacgagaacgagtgcgagcagaacaacggcggctgcagcgagatctgcgtgaacctgaagaacagctacagatgcgagtgcggcgtgggcagagtgctgagaagcgacggcaagacctgcgaggacgtggagggctgccacaacaacaacggcggctgcagccacagctgcctgggcagcgagaagggctaccagtgcgagtgccccagaggcctggtgctgagcgaggacaaccacacctgccaggtgcccgtgctgtgcaagagcaacgccatcgaggtgaacatccccagagagctggtgggcggcctggagctgttcctgaccaacaccagctgcagaggcgtgagcaacggcacccacgtgaacatcctgttcagcctgaagacctgcggcaccgtggtggacagctgcttccagtag

SEQ ID NO: 244156 - protein, 617 aa, Artificial Sequence
  derived and/or modified sequence
MAAVAAGGLVGKGRDISLAALQRHDPYINRIVDVASQVALYTFGHRANEWEKTDVEGTLFVYTRSASPKHGFTIMNRLSMENRTEPITKDLDFQLQDPFLLYRNARLSIYGIWFYDKEECQRIAELMKNLTQYEQLKAHQGTGAGISPVILNSGEGKEVDILRMLIKAKDEYTKCKTCSEPKKITSSSAIYDNPNLIKPIPVKPSENQQQRIPQPNQTLDPEPQHLSLTALFGKQDKATCQETVEPPQTLHQQQQQQQQQQEKLPIRQGVVRSLSYEEPRRHSPPIEKQLCPAIQKLMVRSADLHPLSELPENRPCENGSTHSAGEFFTGPVQPGSPHNIGTSRGVQNASRTQNLFEKLQSTPGAANKCDPSTPAPASSAALNRSRAPTSVTPVAPGKGLAQPPQAYFNGSLPPQTVGHQAHGREQSTLPRQTLPISGSQTGSSGVISPQELLKKLQIVQQEQQLHASNRPALAAKFPVLAQSSGTGKPLESWINKTPNTEQQTPLFQVISPQRIPATAAPSLLMSPMVFAQPTSVPPKERESGLLPVGGQEPPAAATSLLLPIQSPEPSVITSSPLTKLQLQEALLYLIQNDDNFLNIIYEAYLFSMTQAAMKKTM

SEQ ID NO: 244157 - DNA, 1854 bp, Artificial Sequence
  derived and/or modified sequence
atggctgccgtggccgcaggcggcctggttggcaagggtcgggatattagtctcgctgcacttcagcggcatgatccttatattaacagaatcgtagatgtcgcaagtcaggtagctctctatacattcggccaccgagcaaatgaatgggaaaagacggacgtggagggtaccctgttcgtctacaccagaagcgcgagtcccaaacatggcttcaccataatgaacaggctctccatggaaaatcgcaccgagcctatcaccaaggatttggattttcagttgcaggacccatttctgctctatcggaatgcacgattatctatatacgggatttggttctatgataaagaagagtgccagcggatcgccgaacttatgaagaacttaactcagtacgaacaacttaaagcccatcaggggaccggggcgggaattagccccgttatcctgaattccggggaggggaaggaggtggatatcctgaggatgttaatcaaagcaaaggacgagtatacaaaatgtaaaacctgctcagaacccaagaagataacttcttcctctgcaatatacgataatccaaatctcatcaaacccatccccgttaagccctccgaaaaccaacagcaaagaatcccccaaccgaatcagaccctggatcctgagcctcagcacctttctttgactgcactgtttggaaaacaggataaggccacatgtcaggaaaccgtcgaacccccccagactctacatcagcaacagcaacagcagcagcagcaacaagagaagctgcccattcgccaaggtgttgtgcgatctctgtcctatgaggagcccaggcggcattccccacctattgagaaacaactctgccccgcgatccagaagctgatggtgcgaagcgccgaccttcaccctctgtccgaactgcctgaaaaccggccatgcgagaacgggtctacccatagcgctggagagttttttacgggccccgtgcagcctgggagccctcacaacattggaacctcccgtggggttcaaaatgctagccggacccagaacctatttgagaagctccagagcacacccggcgccgccaacaaatgtgacccctccaccccagcccccgcctcttcagcggcactgaatcgctcgcgcgcacctacctccgtaactcccgtcgctccaggcaaggggctagctcagcccccacaagcatacttcaatggttcgctaccgccacaaacagttggccaccaggctcacggcagagaacagtcgactttaccaaggcaaacgctaccaatctctggttcccagactgggtccagtggagtgatcagccctcaagagctgcttaaaaaactacaaattgtgcagcaggaacaacagttgcacgcctcgaaccgacctgcattagctgccaaattcccagtcctcgcacagagctccggaactggaaaaccattagagtcctggatcaataaaaccccaaatactgagcagcagaccccgctgtttcaggtcatttcacctcagcgcattcccgccaccgcggctccatccctgctgatgtcgcctatggtgtttgcccaacctacttccgtccctcccaaggagagagaaagtggactgttgcccgtcgggggccaggagcctcctgcagcggccactagtttattactgccgatccagtcacccgagccaagcgttattacttctagtccactcacaaagctccagctgcaggaagccttgctgtatctgatccagaatgacgataacttccttaacataatttacgaagcgtacctttttagcatgacgcaggccgcaatgaagaagactatgtag

SEQ ID NO: 244158 - DNA, 1854 bp, Artificial Sequence
  derived and/or modified sequence
atggctgctgtggccgccggcggcctggtgggcaagggccgggacatcagcctggccgccctgcagagacatgacccctacatcaacagaattgtggatgtggccagccaggtggccctgtacaccttcggccaccgggccaatgagtgggagaagacagatgtggagggcaccctgtttgtgtacaccaggtctgccagccccaagcacggcttcaccatcatgaaccggctgtccatggagaacagaacagagcccatcaccaaggacctggacttccagctgcaggaccccttcctgctgtacagaaatgcccggctgagcatctacggcatctggttctatgacaaggaggagtgccagagaattgctgagctgatgaagaacctgacccagtatgagcagctgaaggcccaccagggcaccggggccggcatcagccctgtgatcctgaacagcggggagggcaaggaggtggacatcctgaggatgctgatcaaggccaaggatgagtacaccaagtgcaagacctgcagcgagcccaagaagatcaccagcagcagcgccatctatgacaaccccaacctgatcaagcccatccctgtgaagcccagcgagaaccagcagcagaggatcccccagcccaaccagaccctggaccctgagccccagcacctgagcctgacagccctgtttgggaagcaggacaaggccacctgccaggagaccgtggagcccccccagaccctgcaccagcagcagcagcagcagcagcagcagcaggagaagctgcccatccggcagggcgtggtgcgcagcctgtcctatgaggagccccggcggcacagcccccccatcgagaagcagctgtgcccagccatccagaagctgatggtgcgctctgctgacctgcaccccctgtctgagctgcctgagaaccggccctgtgaaaatggcagcacccacagcgctggggagttcttcaccggccctgtgcagcccggcagcccccacaacatcggcaccagcagaggagtgcagaatgccagcaggacccagaacctgtttgagaagctgcagagcaccccaggagctgccaacaagtgtgaccccagcaccccagccccagccagcagcgctgccctgaacagaagccgggcccccacctctgtgacccctgtggcccctgggaagggcctggcccagcccccccaggcctacttcaacggcagcctgcccccccagacagtgggccaccaggcccacggccgggagcagagcaccctgccccggcagaccctgcccatcagcggcagccagacaggcagcagcggggtcatcagcccccaggagctgctgaagaagctgcagatcgtgcagcaggagcagcagctgcacgccagcaacagacctgccctggccgccaagtttcctgtgctggcccagagcagcggcaccgggaagcccctggagagctggatcaacaagacccccaacacagagcagcagacccccctcttccaggtgatcagcccccagaggatcccagccacagctgcccccagcctgctgatgagccccatggtgtttgcccagcccacctctgtgccccccaaggagcgggagagcggcctgctgcctgtgggcggccaggagcccccagctgctgccaccagcctgctgctgcccatccagagccctgagcccagcgtcatcaccagcagccccctgaccaagctgcagctgcaggaggccctgctgtacctgatccagaatgatgacaacttcctgaacatcatctatgaggcctacctgttctccatgacccaggccgccatgaagaagaccatgtag

SEQ ID NO: 244159 - DNA, 1854 bp, Artificial Sequence
  derived and/or modified sequence
atggccgccgtggccgccggcggcctggtgggcaagggccgggacatcagcctagcggctttgcagagacacgacccttacatcaacaggatcgtcgatgtcgccagccaggtcgctctttatacatttgggcatcgcgcaaatgagtgggaaaaaacagacgtggaggggaccctgtttgtgtacacacggagcgcgagccccaagcatggattcaccattatgaataggctgagcatggagaataggacagaacctattacgaaggacttggatttccagctccaggaccctttcctactgtatcgtaacgcaagactgtccatttacgggatctggttctacgacaaagaggagtgccaacgcatcgccgaactcatgaagaatctgactcaatacgagcagttgaaggcacaccagggcactggagcaggaatttcgcccgttatcctcaacagcggcgagggcaaggaggtggacattttgcgcatgctcattaaggcgaaagacgagtacactaagtgcaagacctgcagtgaaccgaagaaaattacaagttcctcagccatctatgacaacccaaatctgataaagccgatccctgtgaagcctagcgaaaatcagcagcagaggataccacaaccaaaccagactctggacccggagccacagcacctgagtctgaccgccctcttcggaaaacaggataaagccacctgtcaggagactgtggagcccccacaaaccttgcaccagcagcaacaacagcaacagcagcagcaggagaagctccctattagacagggagtcgtaaggtcactatcctatgaggaaccccggagacactcaccgcccatcgagaagcaactgtgccctgctattcagaaactgatggttcggtcggccgacttgcatcccctgtctgagctccctgaaaaccggccatgtgaaaatggcagcactcacagcgctggagagtttttcaccggacctgtgcagccagggtcccctcataatataggcacctcccgcggagtccaaaatgccagcagaacccagaatctgtttgaaaaattgcagtctactcccggtgctgcaaacaagtgtgatccatctacacctgctccggcctcttccgcagcactcaaccgatccagagctcccacatccgtgacaccagtcgcgcctggcaagggcctcgctcagcccccacaggcgtacttcaacggaagtctacctcctcagactgtggggcatcaggcccacggtcgcgaacagtccacacttcctcgccagacattacctatctccgggtctcagacaggcagcagcggcgtgattagtcctcaggagttgcttaagaagctgcagatcgtccaacaggagcagcagctccatgcgagtaatcggccggccctggctgccaaatttcccgtactcgctcagagctccggtacaggtaaacccctggagagttggatcaataagactcccaataccgaacaacagactcctctgttccaagtgatctcacctcaaagaatcccggccaccgctgctcccagcctactgatgagtcccatggtatttgcacaacctacttccgttccaccaaaggagagagaaagtggtctgctccccgttgggggccaggaaccaccagctgccgccacctccctgctgttaccaatccagagccctgagccaagcgtaatcacctcctctcctctcacaaagttgcagctccaagaggccttgctgtacctcatacagaatgacgataattttctcaacataatctatgaagcatatctcttcagtatgactcaggccgctatgaagaaaacaatgtag

SEQ ID NO: 244160 - DNA, 1854 bp, Artificial Sequence
  derived and/or modified sequence
atggctgctgttgcagctgggggactggtgggaaagggcagggacatcagcttggctgctctgcagcgacatgacccatatatcaatcgaatcgtagacgtggcttctcaggtcgctctgtacacctttggacatagggccaacgaatgggaaaagactgatgttgagggcacactttttgtgtacacaaggtctgcgtcaccaaagcacggcttcactattatgaaccgcctatccatggagaacaggacagagcccatcacaaaggatctcgatttccaattgcaggatcctttcctcctataccggaacgccaggctttctatttatggcatatggttttatgataaagaggaatgtcagcgcatcgctgagctgatgaagaatttgacacagtatgaacagctcaaagcccaccaggggacaggcgcaggcatttcccctgtcatccttaactctggcgagggaaaagaagtggacatcctacggatgttgattaaggccaaagacgaatacacaaagtgtaaaacatgttcagaaccaaagaagattacaagcagtagtgccatttatgataaccctaaccttattaagccaatccctgtcaaacctagtgagaatcagcagcaacggatcccccagcctaaccaaacattagatcctgagccccagcatttgtcgctgaccgcactgttcggcaagcaggataaggctacatgccaggaaaccgtagaaccccctcagacacttcatcaacagcagcagcagcaacagcagcaacaggagaagctgccaatacgccaaggagtcgtgaggtcgctgagctatgaagaacctcggagacacagtccccctattgagaaacagctttgccctgctatccagaagctcatggtgcggtcagccgatctgcaccccttgagcgaattacctgaaaatcgaccttgtgagaatggctcaacacacagtgctggagaattttttaccggtccagtgcagcctggctccccccacaatattggaacctcgcgtggggtgcaaaacgcgagtcgcacacaaaatctcttcgagaagctacagtcaacaccgggagctgctaacaaatgcgatccttctactcctgcccctgccagcagtgccgcacttaacaggagtcgggctcctacaagtgtgactcccgtagcccctggcaaaggccttgcgcagccaccccaggcatattttaatggatctctgccaccccagaccgttggtcaccaagctcatggtagggagcagtccactctccccagacaaacccttccgataagcggatcgcagactggctcttccggcgttatttccccacaagaactcctcaaaaaactacagatagtacagcaggagcagcaactgcacgcctccaaccgacccgctcttgctgccaagttcccggtgctagctcagagctccgggaccggcaaaccactcgagtcatggattaataaaacaccaaacacagaacagcaaacacctttattccaggtcatctcgccccagcgaatcccagctaccgcagccccatcactgctgatgtctcctatggtgtttgcacagcccacatccgtgccacccaaggaaagagaatccggtttgctcccagtgggcggacaagagcctcccgctgccgctacaagtctgttgctacccatccaatcgccggagcctagcgtgattacttccagccccctgaccaagttgcagctccaggaggccctcttgtatctcatacagaatgacgacaattttcttaatatcatttatgaagcgtacttgtttagcatgacacaggccgctatgaaaaagaccatgtag

SEQ ID NO: 244161 - DNA, 2086 bp, Artificial Sequence
  derived and/or modified sequence
tgcgaggcagctcgctcgttctgcgatctattgagagtggcttccaagagccccgtgcctatgtctgggagggagggaagatggcagccgtggcggcaggcggcctggtgggaaaggggcgcgacatcagcctagcggccctgcagcgccacgacccctatatcaaccgcatcgtggacgtggccagccaggtggctctgtacaccttcggccatcgggccaacgagtgggagaaaactgatgtggaaggaaccttatttgtttatacaaggtctgcttctccaaagcatggattcaccattatgaataggctgagcatggaaaataggacagaacctattactaaagacttggatttccaactccaggaccctttccttctctacagaaatgccagattgtccatctatggaatttggttttatgataaggaagaatgccaaagaattgcagagcttatgaaaaacctaactcagtatgaacagttgaaagcccatcagggaactggagcaggaatttccccagtgatcctcaattcaggagagggcaaagaagtagacattttacgaatgctcatcaaggccaaagacgaatacacaaagtgtaaaacctgttctgagccaaaaaagataaccagttcctctgccatctatgacaatccaaatctcatcaaaccaattccagtgaaacccagtgaaaaccagcaacagcgtatacctcagcccaaccagaccttagaccctgaaccccaacacttatccttgacagctctgtttgggaagcaggacaaagctacatgtcaggaaactgtggagcctccgcagactctccaccagcagcagcagcagcagcagcagcagcaagagaagcttccaattaggcagggggttgtacgctccctgtcctatgaggaacccagaagacactcaccccccattgagaagcagctctgtccagccattcagaaactcatggtcaggagcgcagacctccacccattgtcagagctgcctgaaaaccggccttgtgaaaatggcagtacccattctgcgggagaattttttacaggacctgtccagccagggtctcctcacaacattggaacttctcgtggtgtacaaaatgcttccagaactcagaacctgttcgagaaacttcagagtaccccaggggcagcaaacaagtgtgaccctagtacaccagcacctgccagctcagctgccctgaaccgcagcagagctcccacttctgtcacccctgtggctccaggaaagggtctggctcagccaccacaggcctatttcaatggctcccttccacctcagacagtaggacatcaggctcatggaagagaacagtccacactcccaagacaaacactccccatctctggtagtcagactggcagctctggagtgatctcccctcaagagttactgaagaagcttcagattgtacagcaggagcagcagctgcatgcctctaaccggccagccttggccgctaagtttcctgtgctcgctcagagctctggaacagggaaacccttggaatcctggatcaacaagacacccaacacagaacagcagactcctcttttccaggtcatctcacctcagcgcatccctgctacagcagctccgtctctgcttatgtcccccatggtgttcgcacaacccacctccgtcccgccaaaggaaagggagagcggcctcttgcctgtgggaggccaggagccacctgctgctgccaccagcctcctcctgcccatacagagcccggagccctccgtgatcaccagcagcccactcaccaagctccagctccaggaggcactgctgtacctcattcagaatgatgacaacttcttaaatataatctatgaagcctatctcttcagcatgactcaagcagccatgaaaaagactatgtgacagcaaggccttttaaaactgattttcaaggtccttctagaactccggcacaaggttctttcatgttgagtgttgtttccttcaatgtttctgccttttttaaaaaaaaagtatgtgtaatatgaagtaaaatgtttcagacttttttttat

SEQ ID NO: 244162 - DNA, 2073 bp, Artificial Sequence
  derived and/or modified sequence
ttccaagagccccgtgcctatgtctgggagggagggaagatggcagccgtggcggcaggcggcctggtgggaaaggggcgcgacatcagcctagcggccctgcagcgccacgacccctatatcaaccgcatcgtggacgtggccagccaggtggctctgtacaccttcggccatcgggccaacgagtgggagaaaactgatgtggaaggaaccttatttgtttatacaaggtctgcttctccaaagcatggattcaccattatgaataggctgagcatggaaaataggacagaacctattactaaagacttggatttccaactccaggaccctttccttctctacagaaatgccagatatgaggaaactgagactccagtgaggaggcagactgtgtaaaaacccacagattctgatttcacttccgttgctttttccacaccacctgtactgctctactattaaacatggatgcaaattaaagtgtccatctatggaatttggttttatgataaggaagaatgccaaagaattgcagagcttatgaaaaacctaactcagtatgaacagttgaaagcccatcagggaactggagcaggaatttccccagtgatcctcaattcaggagagggcaaagaagtagacattttacgaatgctcatcaaggccaaagacgaatacacaaagtgtaaaacctgttctgagccaaaaaagataaccagttcctctgccatctatgacaatccaaatctcatcaaaccaattccagtgaaacccagtgaaaaccagcaacagcgtatacctcagcccaaccagaccttagaccctgaaccccaacacttatccttgacagctctgtttgggaagcaggacaaagctacatgtcaggaaactgtggagcctccgcagactctccaccagcagcagcagcagcagcagcagcagcaagagaagcttccaattaggcagggggttgtacgctccctgtcctatgaggaacccagaagacactcaccccccattgagaagcagctctgtccagccattcagaaactcatggtcaggagcgcagacctccacccattgtcagagctgcctgaaaaccggccttgtgaaaatggcagtacccattctgcgggagaattttttacaggacctgtccagccagggtctcctcacaacattggaacttctcgtggtgtacaaaatgcttccagaactcagaacctgttcgagaaacttcagagtaccccaggggcagcaaacaagtgtgaccctagtacaccagcacctgccagctcagctgccctgaaccgcagcagagctcccacttctgtcacccctgtggctccaggaaagggtctggctcagccaccacaggcctatttcaatggctcccttccacctcagacagtaggacatcaggctcatggaagagaacagtccacactcccaagacaaacactccccatctctggtagtcagactggcagctctggagtgatctcccctcaagagttactgaagaagcttcagattgtacagcaggagcagcagctgcatgcctctaaccggccagccttggccgctaagtttcctgtgctcgctcagagctctggaacagggaaacccttggaatcctggatcaacaagacacccaacacagaacagcagactcctcttttccaggtcatctcacctcagcgcatccctgctacagcagctccgtctctgcttatgtcccccatggtgttcgcacaacccacctccgtcccgccaaaggaaagggagagcggcctcttgcctgtgggaggccaggagccacctgctgctgccaccagcctcctcctgcccatacagagcccggagccctccgtgatcaccagcagcccactcaccaagctccagctccaggaggcactgctgtacctcattcagaatgatgacaacttcttaaatataatctatgaagcctatctcttcagcatgactcaagcagccatgaaaaagactatgtgacagcaaggccttttaaaactgattttcaaggtccttctagaactccggcacaag

SEQ ID NO: 244163 - DNA, 1854 bp, Artificial Sequence
  derived and/or modified sequence
atggccgccgtggccgccggcggcctggtgggcaagggcagagacatcagcctggccgccctgcagagacacgacccctacatcaacagaatcgtggacgtggccagccaggtggccctgtacaccttcggccacagagccaacgagtgggagaagaccgacgtggagggcaccctgttcgtgtacaccagaagcgccagccccaagcacggcttcaccatcatgaacagactgagcatggagaacagaaccgagcccatcaccaaggacctggacttccagctgcaggaccccttcctgctgtacagaaacgccagactgagcatctacggcatctggttctacgacaaggaggagtgccagagaatcgccgagctgatgaagaacctgacccagtacgagcagctgaaggcccaccagggcaccggcgccggcatcagccccgtgatcctgaacagcggcgagggcaaggaggtggacatcctgagaatgctgatcaaggccaaggacgagtacaccaagtgcaagacctgcagcgagcccaagaagatcaccagcagcagcgccatctacgacaaccccaacctgatcaagcccatccccgtgaagcccagcgagaaccagcagcagagaatcccccagcccaaccagaccctggaccccgagccccagcacctgagcctgaccgccctgttcggcaagcaggacaaggccacctgccaggagaccgtggagcccccccagaccctgcaccagcagcagcagcagcagcagcagcagcaggagaagctgcccatcagacagggcgtggtgagaagcctgagctacgaggagcccagaagacacagcccccccatcgagaagcagctgtgccccgccatccagaagctgatggtgagaagcgccgacctgcaccccctgagcgagctgcccgagaacagaccctgcgagaacggcagcacccacagcgccggcgagttcttcaccggccccgtgcagcccggcagcccccacaacatcggcaccagcagaggcgtgcagaacgccagcagaacccagaacctgttcgagaagctgcagagcacccccggcgccgccaacaagtgcgaccccagcacccccgcccccgccagcagcgccgccctgaacagaagcagagcccccaccagcgtgacccccgtggcccccggcaagggcctggcccagcccccccaggcctacttcaacggcagcctgcccccccagaccgtgggccaccaggcccacggcagagagcagagcaccctgcccagacagaccctgcccatcagcggcagccagaccggcagcagcggcgtgatcagcccccaggagctgctgaagaagctgcagatcgtgcagcaggagcagcagctgcacgccagcaacagacccgccctggccgccaagttccccgtgctggcccagagcagcggcaccggcaagcccctggagagctggatcaacaagacccccaacaccgagcagcagacccccctgttccaggtgatcagcccccagagaatccccgccaccgccgcccccagcctgctgatgagccccatggtgttcgcccagcccaccagcgtgccccccaaggagagagagagcggcctgctgcccgtgggcggccaggagccccccgccgccgccaccagcctgctgctgcccatccagagccccgagcccagcgtgatcaccagcagccccctgaccaagctgcagctgcaggaggccctgctgtacctgatccagaacgacgacaacttcctgaacatcatctacgaggcctacctgttcagcatgacccaggccgccatgaagaagaccatgtag

SEQ ID NO: 244164 - protein, 1835 aa, Artificial Sequence
  derived and/or modified sequence
MANSTGKAPPDERRKGLAFLDELRQFHHSRGSPFKKIPAVGGKELDLHGLYTRVTTLGGFAKVSEKNQWGEIVEEFNFPRSCSNAAFALKQYYLRYLEKYEKVHHFGEDDDEVPPGNPKPQLPIGAIPSSYNYQQHSVSDYLRQSYGLSMDFNSPNDYNKLVLSLLSGLPNEVDFAINVCTLLSNESKHVMQLEKDPKIITLLLANAGVFDDTLGSFSTVFGEEWKEKTDRDFVKFWKDIVDDNEVRDLISDRNKSHEGTSGEWIWESLFHPPRKLGINDIEGQRVLQIAVILRNLSFEEGNVKLLAANRTCLRFLLLSAHSHFISLRQLGLDTLGNIAAELLLDPVDFKTTHLMFHTVTKCLMSRDRFLKMRGMEILGNLCKAEDNGVLICEYVDQDSYREIICHLTLPDVLLVISTLEVLYMLTEMGDVACTKIAKVEKSIDMLVCLVSMDIQMFGPDALAAVKLIEHPSSSHQMLSEIRPQAIEQVQTQTHVASAPASRAVVAQHVAPPPGIVEIDSEKFACQWLNAHFEVNPDCSVSRAEMYSEYLSTCSKLARGGILTSTGFYKCLRTVFPNHTVKRVEDSSSNGQAHIHVVGVKRRAIPLPIQMYYQQQPVSTSVVRVDSVPDVSPAPSPAGIPHGSQTIGNHFQRTPVANQSSNLTATQMSFPVQGVHTVAQTVSRIPQNPSPHTHQQQNAPVTVIQSKAPIPCEVVKATVIQNSIPQTGVPVSIAVGGGPPQSSVVQNHSTGPQPVTVVNSQTLLHHPSVIPQQSPLHTVVPGQIPSGTPVTVIQQAVPQSHMFGRVQNIPACTSTVSQGQQLITTSPQPVQTSSQQTSAGSQSQDTVIIAPPQYVTTSASNIVSATSVQNFQVATGQMVTIAGVPSPQASRVGFQNIAPKPLPSQQVSSTVVQQPIQQPQQPTQQSVVIVSQPAQQGQTYAPAIHQIVLANPAALPAGQTVQLTGQPNITPSSSPSPVPATNNQVPTAMSSSSTPQSQGPPPTVSQMLSVKRQQQQQHSPAPPPQQVQVQVQQPQQVQMQVQPQQSNAGVGQPASGESSLIKQLLLPKRGPSTPGGKLILPAPQIPPPNNARAPSPQVVYQVASNQAAGFGVQGQTPAQQLLVGQQNVQLVPSAMPPSGGVQTVPISNLQILPGPLISNSPATIFQGTSGNQVTITVVPNTSFAPATVSQGNATQLIAPAGITMSGTQTGVGLPVQTLPATQASPAGQSSCTTATPPFKGDKIICQKEEEAKEATGLHVHERKIEVMENPSCRRGATNTSNGDTKENEMHVGSLLNGRKYSDSSLPPSNSGKIQSETNQCSLISNGPSLELGENGASGKQNSEQIDMQDIKSDLRKPLVNGICDFDKGDGSHLSKNIPNHKTSNHVGNGEISPMEPQGTLDITQQDTAKGDQLERISNGPVLTLGGSSVSSIQEASNAATQQFSGTDLLNGPLASSLNSDVPQQRPSVVVSPHSTTSVIQGHQIIAVPDSGSKVSHSPALSSDVRSTNGTAECKTVKRPAEDTDRETVAGIPNKVGVRIVTISDPNNAGCSATMVAVPAGADPSTVAKVAIESAVQQKQQHPPTYVQNVVPQNTPMPPSPAVQVQGQPNSSQPSPFSGSSQPGDPMRKPGQNFMCLWQSCKKWFQTPSQVFYHAATEHGGKDVYPGQCLWEGCEPFQRQRFSFITHLQDKHCSKDALLAGLKQDEPGQAGSQKSSTKQPTVGGTSSTPRAQKAIVNHPSAALMALRRGSRNLVFRDFTDEKEGPITKHIRLTAALILKNIGKYSECGRRLLKRHENNLSVLAISNMEASSTLAKCLYELNFTVQSKEQEKDSEMLQ

SEQ ID NO: 244165 - protein, 1445 aa, Artificial Sequence
  derived and/or modified sequence
MRGMEILGNLCKAEDNGVLICEYVDQDSYREIICHLTLPDVLLVISTLEVLYMLTEMGDVACTKIAKVEKSIAAVKLIEHPSSSHQMLSEIRPQAIEQVQTQTHVASAPASRAVVAQHVAPPPGIVEIDSEKFACQWLNAHFEVNPDCSVSRAEMYSEYLSTCSKLARGGILTSTGFYKCLRTVFPNHTVKRVEDSSSNGQAHIHVVGVKRRAIPLPIQMYYQQQPVSTSVVRVDSVPDVSPAPSPAGIPHGSQTIGNHFQRTPVANQSSNLTATQMSFPVQGVHTVAQTVSRIPQNPSPHTHQQQNAPVTVIQSKAPIPCEVVKATVIQNSIPQTGVPVSIAVGGGPPQSSVVQNHSTGPQPVTVVNSQTLLHHPSVIPQQSPLHTVVPGQIPSGTPVTVIQQAVPQSHMFGRVQNIPACTSTVSQGQQLITTSPQPVQTSSQQTSAGSQSQDTVIIAPPQYVTTSASNIVSATSVQNFQVATGQMVTIAGVPSPQASRVGFQNIAPKPLPSQQVSSTVVQQPIQQPQQPTQQSVVIVSQPAQQGQTYAPAIHQIVLANPAALPAGQTVQLTGQPNITPSSSPSPVPATNNQVPTAMSSSSTPQSQGPPPTVSQMLSVKRQQQQQHSPAPPPQQVQVQVQQPQQVQMQVQPQQSNAGVGQPASGESSLIKQLLLPKRGPSTPGGKLILPAPQIPPPNNARAPSPQVVYQVASNQAAGFGVQGQTPAQQLLVGQQNVQLVPSAMPPSGGVQTVPISNLQILPGPLISNSPATIFQGTSGNQVTITVVPNTSFAPATVSQGNATQLIAPAGITMSGTQTGVGLPVQTLPATQASPAGQSSCTTATPPFKGDKIICQKEEEAKEATGLHVHERKIEVMENPSCRRGATNTSNGDTKENEMHVGSLLNGRKYSDSSLPPSNSGKIQSETNQCSLISNGPSLELGENGASGKQNSEQIDMQDIKSDLRKPLVNGICDFDKGDGSHLSKNIPNHKTSNHVGNGEISPMEPQGTLDITQQDTAKGDQLERISNGPVLTLGGSSVSSIQEASNAATQQFSGTDLLNGPLASSLNSDVPQQRPSVVVSPHSTTSVIQGHQIIAVPDSGSKVSHSPALSSDVRSTNGTAECKTVKRPAEDTDRETVAGIPNKVGVRIVTISDPNNAGCSATMVAVPAGADPSTVAKVAIESAVQQKQQHPPTYVQNVVPQNTPMPPSPAVQVQGQPNSSQPSPFSGSSQPGDPMRKPGQNFMCLWQSCKKWFQTPSQVFYHAATEHGGKDVYPGQCLWEGCEPFQRQRFSFITHLQDKHCSKDALLAGLKQDEPGQAGSQKSSTKQPTVGGTSSTPRAQKAIVNHPSAALMALRRGSRNLVFRDFTDEKEGPITKHIRLTAALILKNIGKYSECGRRLLKRHENNLSVLAISNMEASSTLAKCLYELNFTVQSKEQEKDSEMLQ

SEQ ID NO: 244166 - DNA, 5508 bp, Artificial Sequence
  derived and/or modified sequence
atggccaatagcaccgggaaagctccgcccgatgaaagacgcaaaggcctcgccttcctagacgaactgcgccagtttcaccattccaggggttccccattcaaaaagatccctgccgtcggagggaaagagttggatcttcatggcctatacactagggtcaccactctgggcggcttcgctaaagtgagtgagaaaaatcaatggggggagatcgtggaggagttcaattttcctcgatcctgctcaaacgctgcattcgccctcaagcagtactaccttcggtacctcgaaaaatatgagaaggtacaccatttcggggaagatgacgacgaagttccacctgggaatcccaagccccaactacccattggagccataccctcatcttacaattatcagcaacattcagtatcagattacctgcgtcagtcctatggactctccatggactttaactctcctaatgactacaataaactcgtgctctctctgctcagcggactgccaaacgaggtcgattttgccatcaacgtctgtaccctgctcagcaacgagtcgaaacacgtcatgcagctggaaaaggaccctaagatcatcaccctgctgttggcaaacgccggagtatttgacgataccctcggaagcttttctactgtgtttggggaggagtggaaagaaaaaacagatagagactttgtcaagttttggaaggatattgtggatgacaatgaggtcagagacctgattagtgacaggaataagagccatgaaggcacatccggggaatggatctgggaatctctgttccatcccccgcggaagctgggcattaatgacatagaaggtcagagagtgttgcagattgctgtgatcctaaggaatctgtcttttgaagagggcaacgtgaagctgctggcagctaacagaacttgtctcaggtttcttctgctatctgcccattcccattttatttcactgcgccagctcgggttggatacactcggcaacattgctgcggaattgcttctggaccctgtggatttcaaaacaactcacctgatgttccacactgtgacgaagtgcctgatgtcccgggatagatttttgaagatgcgagggatggaaatccttggaaacttgtgcaaggcggaggataacggcgtattaatctgtgaatatgtggaccaggactcataccgggagattatctgtcacctgaccctgccggatgtcttactggtgatatcgaccctcgaggtgttgtacatgttgactgaaatgggggacgtcgcttgcaccaagatcgccaaggtggagaagtctatcgatatgttagtctgtctcgtctcaatggacattcaaatgtttgggcctgacgcccttgcagctgtaaagctcattgaacacccatcaagtagccaccagatgttgtccgaaatccgtcctcaagcaatcgagcaggtgcagacacagacacacgtggcttctgcgcccgcttcgcgagcagtggtcgcccagcacgtggcgcccccacccgggatcgtggagatcgattcggaaaaattcgcatgtcaatggcttaacgcacatttcgaagttaacccagactgcagcgtctctcgggcagagatgtattcagagtatctgagtacctgttccaagctagcacgaggggggatcttaacgtcgaccggcttttacaaatgcttgagaactgtgttcccaaatcacactgtgaaacgggtggaagactcttcatctaacgggcaagctcatatccatgtggtaggggtcaagcggcgggcaattcctctgcccatccaaatgtattaccagcaacagccagtgtccactagcgtcgtcagggtggattccgtgcccgacgtgagtcccgccccgtcgcctgcaggaatcccccatggtagtcagaccatcgggaatcatttccaaagaactcctgttgcgaatcaaagctccaatctgacagcaacccagatgtcttttccagtgcagggggttcataccgttgcacaaacagtgagcagaattccccagaacccatccccacatacacaccagcagcagaacgcccctgtgaccgttattcagtctaaggctcccattccctgtgaagtggtgaaggccaccgtgatacagaatagtatcccacagaccggggtccctgtgagcattgcggtgggcggcggacctccccagtctagtgtagtgcagaaccactctacaggacctcagcctgtaactgtggtgaattctcagaccctactccaccacccatctgtgataccccagcagagccccctccatactgtggttccagggcaaatcccttcaggcacccctgtaacagtcatccagcaggcagtgccacagagccatatgtttgggcgcgtccagaatatacccgcctgcacgtccaccgtttctcaggggcagcaattgattaccaccagcccgcaaccagtgcagactagttcccagcagacctccgccggctctcagtcacaggatactgtgatcatcgcgcctcctcaatatgttacaacttccgctagtaatattgtttcggctactagtgtccagaacttccaggttgctaccggccagatggtgaccatcgctggagtcccgagcccacaggcaagcagagtaggtttccagaatatcgctccgaagcccttgcctagccagcaggtgtcctccacagtggtccagcagccgatccagcaaccgcagcagccaacacagcagagcgtggtaatcgtaagccaacccgcccaacaaggacagacatatgctcctgccatacaccagatcgtgctcgctaatcccgcagctctgcccgcaggtcagacagtgcaactgaccgggcagccaaatataaccccatcatcatcaccctccccggtaccagctacaaataaccaggtgcctacagctatgagttctagctccaccccccagtcacagggtcctcctcccactgtaagtcagatgttaagtgtgaagcgccaacagcagcagcagcattcgccagcaccccctccgcagcaggtccaggtccaggtgcagcagccacagcaagttcagatgcaagtccaaccccagcagagcaatgcgggcgtgggtcagccagccagcggtgagtctagcctgatcaaacagctcctgctaccgaagagggggccctcgacacctggaggtaaattgatcctgcccgctccccagattccacctcctaataacgctcgcgctcctagccctcaggttgtttatcaagtagctagcaatcaagccgcaggcttcggggttcagggacaaactccagcccagcagctgctggtggggcagcaaaacgtacaactcgtacccagcgccatgccaccatcaggcggcgtccagacggtcccaatctccaacttgcagatcctgccgggccccctgattagtaattctcccgccaccatcttccagggaacaagcgggaatcaggtcacgatcaccgtggtacccaatacaagttttgctccagccactgtgtcccaagggaacgcaactcaattaatcgcacccgcaggcataacaatgtctgggacgcagacaggtgtggggcttccagtccaaaccctgcctgctacccaggcctctcctgccgggcaatcatcatgcacaacagccacgccaccgttcaaaggggacaagattatctgccaaaaggaggaagaagccaaggaggccaccggacttcacgtccacgagcggaaaattgaggtgatggagaatcccagctgtaggcggggggccaccaacacgagcaatggcgacacaaaggagaatgagatgcacgtaggctctctcctgaatggcagaaagtattccgattctagcctgccgccgtcgaacagtggtaagattcagtcggagacaaaccagtgctctttgatctccaatgggcctagtctggagctgggtgaaaatggagctagtggcaagcagaattccgaacagattgatatgcaggatattaagagtgatctgcggaaaccccttgtgaatggcatttgtgactttgacaaaggcgacggttctcatttgtccaaaaatatcccgaaccataagacttctaaccacgtggggaacggggaaatctcgccaatggagccgcagggcactctcgatatcactcagcaggacaccgctaaaggagaccaactggaaagaatttctaatggacccgttcttaccttgggcgggagcagcgtcagcagcatccaagaagcgtctaacgcagccacccagcagttcagcggtaccgacctcctcaatggcccattggccagcagtctgaattccgatgtgccacagcagcgcccctcagtggtggtgtcccctcactccacgactagcgtaatccaaggccaccaaataattgcagttcccgacagcggctctaaagtttcccatagccccgccctgagttccgatgtgcgcagcacaaatggtaccgctgagtgtaaaaccgtaaaacggcctgctgaggacaccgacagagagaccgtggcagggatccctaacaaggtcggggtgcgtattgtcaccatttctgacccgaacaacgccggttgcagcgcaacaatggtggcagtccctgctggcgcagatccttccacggtggcaaaagttgctattgaaagcgccgtccagcagaagcagcaacacccccctacatacgtccaaaacgttgtgcctcaaaatacacccatgcccccgagtcccgcagttcaagtgcaggggcagccaaattcctcccagccctccccattcagcggttcgtcccagcctggcgatccgatgaggaaacctggacagaatttcatgtgtttatggcagtcttgtaagaagtggtttcagaccccttcccaggtcttttaccatgcagccactgaacacggcgggaaggacgtttatccagggcagtgcttgtgggaaggctgcgaaccctttcagcggcagcgctttagctttattactcacctgcaggacaagcattgctccaaggacgctctgctagccggactcaagcaagatgaaccaggacaggcagggtcgcagaagtcatcaactaagcagcccaccgtgggcgggacgtcctcaaccccgagagctcagaaggcgattgtgaaccatccttcagcagctctgatggccctgaggcggggatcccggaacctggtctttcgcgatttcaccgacgaaaaagaaggaccaattactaagcacatccgtctcactgcagctctgattctgaagaatattggtaagtactctgagtgtgggcggagactgctgaagaggcacgagaataatctgtcagtccttgccatatcaaatatggaggcttcctccaccctcgctaaatgtctgtacgagctgaacttcaccgtgcagtctaaagagcaggagaaggacagcgagatgctacagtag

SEQ ID NO: 244167 - DNA, 2859 bp, Artificial Sequence
  derived and/or modified sequence
atgatgatgcggtaccaccaggcaatacaatcccacagcttcctgctggtgcaatttcacctccctaccatcacctctaacacggtatgtcggatcatctgtgttaaggttatgggctgtccgtggacacttattcgccagatgatcattatcaactggtgcttccactgctatctagattcacaaatgaagtggactctgttgctcacatatgccttgtcctatcagatgaaagcgtctacaagctgtaacctcaagaagatactgaagtcttctccagtgccagcaaccaataatcaagtgccgaccgcaatgtctagcagctctacgccacagagtcaaggcccccctccgacagtaagtcagatgttgtccgtgaaacgccagcagcaacaacagcatagcccggcaccacccccccagcaggtccaagtgcaggtccaacaaccacagcaggtgcagatgcaggtccagccccagcagagcaacgccggtgttggacagcctgcttcaggtgaatcttcactcatcaaacagttgctcctcccaaagcgcggaccaagtacacctggcgggaaactcattctgccagccccacagatcccccctccgaataacgccagagccccttcaccacaggttgtgtaccaggtggcatcaaatcaagctgccgggttcggggtgcagggacagacacccgctcagcaactcctggtgggacagcagaatgtgcaacttgtgcccagtgctatgccaccatcagggggcgtgcaaaccgtgccgatcagtaatctacagattctgcccggacctctaattagcaattcaccggccacgatcttccaggggacctccggcaatcaagttaccatcaccgtcgtcccaaatacctcatttgctccagcaactgtcagccaaggtaatgccacccagctgatagcccctgctggcatcactatgtcaggcactcaaacaggggtgggtctgcccgtacagacgctgccagcaacacaggcatctcccgccggccagtcgtcttgcacaactgcgacacctccatttaaaggtgacaagatcatttgccagaaggaagaagaagctaaggaggccaccggcttgcacgtgcacgagcggaagattgaggtcatggaaaacccctcatgtcgacgtggggccaccaatacctctaatggtgacacaaaggaaaacgaaatgcacgtggggagcctactaaacggtcgcaagtattcagacagttcactcccgcctagtaatagtggtaagatccagtcagagactaatcaatgctccctgatttcaaacggccctagtctggaattgggtgagaatggcgcttccggcaaacagaatagtgagcaaattgatatgcaagacatcaagtccgatctgagaaaacccctggttaatggtatctgcgacttcgacaagggcgacggatcacacctttccaagaatatccctaaccacaagacctctaaccatgtcggcaacggtgaaataagtcctatggaaccacaaggtaccctggatataacacagcaggacaccgctaagggagaccagctggagcgcatctctaacgggccagtcctgacactggggggcagcagcgtgtctagcatccaggaagccagcaacgccgctactcagcagttctcgggaacagaccttctgaacggacccttggcgtcttccctgaacagcgatgtgcctcaacaacgcccctctgtggtagtcagtcctcatagtacaactagcgtgatacagggtcaccaaatcatcgccgtgcccgattcaggctccaaggtgtctcacagccctgcactgagctccgatgtcaggtcgacgaacggaacagcggaatgtaagaccgtgaaaagaccggctgaggacaccgatagggaaactgtcgccggtatcccaaacaaggtgggagtcagaatagtcactatctcagatcctaacaatgcaggatgcagcgccaccatggtggctgtacccgccggagcagaccccagcaccgttgcaaaagttgcgattgaatctgccgtccagcagaagcaacaacatcctccaacctacgtccagaacgtggtcccgcagaacacacctatgcctccaagccctgccgtgcaggtacaaggacagcccaactcttcccaacctagcccttttagcgggtcttcccaaccaggtgacccaatgaggaaacccggacagaatttcatgtgtctctggcaatcgtgcaagaagtggtttcagacacctagccaggtcttctatcatgctgctactgaacacggcggcaaggacgtgtatccgggccagtgcctgtgggagggatgcgaaccttttcaacgccagcggttctccttcatcacgcacctgcaggataaacattgctcaaaggatgctcttctggcgggattgaagcaggacgagcccggccaagcaggctcgcagaaatcttctactaagcaacctactgttggcggcactagtagtacccctagggcccaaaaggccatcgtgaaccacccaagcgcagccctgatggctctcagaagggggtcacgcaatctggtatttagagactttaccgatgaaaaagaagggccaataaccaaacatatcagactgaccgcagcactgattcttaaaaatatcggcaaatatagcgagtgcgggcgaagactgctaaaacgtcacgaaaacaacctctctgtcctggcaatcagcaacatggaagcctcttctactcttgctaagtgcctctacgaacttaatttcacggtccagagcaaggaacaggaaaaagactctgaaatgttacagtag

SEQ ID NO: 244168 - DNA, 4338 bp, Artificial Sequence
  derived and/or modified sequence
atgcgcggcatggaaatccttggcaacctatgtaaagctgaggacaatggagtgctcatctgcgagtatgtcgatcaagattcatatagagagatcatctgtcacctgaccctgcccgatgtgctacttgtgatctccactctggaagtcctctacatgctgacggagatgggtgacgtggcctgcacaaagattgccaaggtcgaaaagtccatagccgctgtcaagctgatcgagcacccaagctcatcacatcagatgctcagtgaaatcagacctcaggccattgaacaggttcaaacgcagacacacgtcgcttccgctcctgcatccagggcggtcgtggctcagcatgtggcgccaccgcctggtattgtggaaattgattcggaaaaatttgcctgtcagtggctgaatgcccacttcgaggtgaaccctgactgttctgtaagccgcgcagaaatgtacagtgaatatttatcaacttgctcaaagctagctcgtggaggcattttaacctcaaccgggttttacaagtgcctgcgcactgttttccctaaccacacagtgaaaagagtggaagactcttcgagtaacggtcaggcccacatccacgtagtgggggttaagcgccgtgctattcctctgccaattcagatgtactaccaacagcagccagtatcaacttctgttgtccgcgtcgattccgtgccagacgtatccccagcgccatcccccgccggaatccctcacggttcccagaccatcggcaatcacttccagagaactccagttgctaaccagtcatccaatctcaccgccacccagatgtcattccccgtccaaggggtgcacacggtggcccagaccgtctccaggattccccagaatccgtcacctcacacacaccagcagcagaacgcgcccgtgacagtgatccaatctaaagcccctatcccctgtgaagtggtcaaagctacagtgattcagaacagcattcctcagactggcgtgcccgtcagtatcgccgtgggcggcgggccaccccagtcaagtgtggtgcagaaccattccacgggcccccaaccggtgaccgtagtaaactcacagacactccttcaccatccctccgtcatcccacagcagtcgcccctgcacacagtcgtccccgggcagattccatctggaacaccagtcacagtgatccagcaggccgtgccccagtcacatatgttcggtcgcgtccagaatattccggcctgtacctctaccgtttcacaggggcaacagcttatcacgacgtcccctcaacccgtgcagacttctagccagcagacatcagccggcagtcagtcccaggacacggttattattgcccctccacagtacgttaccacgagtgcctccaatatcgtatcggccacgagtgtacaaaactttcaggttgccacaggccagatggtcaccatcgccggggtcccctctcctcaagccagtcgggttgggttccagaatattgctccaaaacctctccctagccagcaggtcagttccactgttgtacagcagccaatccagcagcctcagcagcccacccagcagtctgtggtcatcgtgtctcagccggctcaacagggacaaacatacgcgcctgccatccatcagattgtgttggccaaccccgctgcgctgcctgcggggcagactgtgcagctgaccggccagcctaacattaccccctcttctagcccaagccctgttccggcgaccaataatcaggtaccaaccgccatgtcttcttcatcaaccccccagagccagggaccgccccccacagtgagccagatgctgtctgtgaaacgtcaacagcagcagcaacactctcccgctcccccccctcagcaagtccaggtccaggttcagcagcctcagcaggtccagatgcaggttcagccgcagcagtctaatgcaggcgtgggacagcctgcatcgggcgagtcttcactcatcaaacagctgctcctcccaaagagaggcccatctacgcccggcggaaagctcattttgcccgctccccagattccccccccaaacaacgcccgcgctcccagtccccaggtggtgtatcaggtggctagcaaccaggctgcaggatttggggtgcagggtcagacacctgcccagcagctgttggttggacaacagaatgtccaactcgtcccgagcgcaatgcctcctagcggcggagttcagactgtgcccatctccaatctgcaaattctgccaggccccctgattagcaatagcccagccaccatcttccaaggaacaagtggaaaccaggtgaccatcactgttgttccaaacactagctttgctccagctacggtgtcacaaggcaatgccacccagctgatcgccccagctggcattacaatgtctgggactcagacaggagtgggcctcccggttcagacattacctgccacacaagcttccccagcaggccagagtagctgcacgacagctacccctcctttcaagggtgataagattatttgccagaaagaagaggaagccaaggaggcaactggtctgcacgtgcacgaacgcaagatagaggttatggaaaacccatcttgcaggaggggagcaacgaacacctctaacggtgatacgaaggagaatgaaatgcacgttggtagcctgcttaacggccgcaagtattcggattcatcgctcccaccctccaatagtggcaaaatccagagcgaaacgaatcagtgttcccttatcagcaatggaccgagcctcgagcttggtgagaatggggcctccggcaagcagaatagcgaacagatagatatgcaggacatcaagtccgatttacgcaagccacttgtcaacggcatctgtgatttcgataaaggggacggttcacatttgagcaaaaatatcccaaaccacaaaacgtcgaatcacgtgggcaacggcgagatcagccctatggaacctcagggaactttggacattactcaacaggacaccgctaaaggggatcaactggagaggatttccaacggaccagttttgacactcgggggaagttccgtcagtagcattcaggaagcatccaacgcggccacacagcagttctccgggacagacctgcttaacgggcccttagcaagcagcctaaacagcgatgtgccgcagcagcgaccgtccgtagtcgtcagtccacatagtactacgtctgtgatccagggccaccaaataatcgcagttcccgactcaggctccaaggtctcccacagtccagccctgtcatccgacgtgcgctctacgaacggcacagccgagtgcaagaccgtaaagcgaccagccgaggataccgaccgtgaaacggtcgcagggatacctaataaagtgggagtcaggatcgtcaccatcagtgaccccaacaatgctggctgtagcgcaacaatggtcgccgttcccgcgggagccgacccatcaacggtcgcgaaagtggccattgagtccgcagtgcagcagaaacagcaacacccgcctacctatgtgcagaacgtcgttcctcaaaatacccctatgccgccctcccctgcagtccaggtccaagggcagcctaatagttctcagcccagccctttctcaggctcatcacaacccggggacccaatgcgcaagccaggtcaaaatttcatgtgtctttggcagagctgcaaaaaatggtttcaaaccccgagccaggtgttttatcatgccgcaaccgagcacggcggaaaggatgtctacccggggcagtgtctctgggagggctgtgagccatttcagcgacagcgcttttcattcatcacccacctacaagacaaacactgctctaaggatgctcttctggccggcctgaaacaggatgaaccgggtcaagctgggtcacagaaaagttccacaaagcagcccacggtcggaggcaccagctcaacaccgcgggcacagaaggcaatagttaaccaccccagcgctgcgttaatggcactgaggcggggctccagaaatttggtgtttcgcgacttcaccgacgaaaaggaggggccaatcaccaaacacattagactgaccgcagccctgattttaaagaatattgggaagtatagtgagtgcggacgtagattactgaagcgacacgaaaataatctgtctgtgctcgccatatccaatatggaggcatcatcaaccctcgcgaaatgtctttatgagttgaattttaccgtccagagcaaagagcaggagaaagacagtgagatgctccagtag

SEQ ID NO: 244169 - DNA, 2859 bp, Artificial Sequence
  derived and/or modified sequence
atgatgatgaggtaccaccaggcgatccagtcccattctttccttctcgtacagtttcatctccctactatcacctccaacactgtgtgtcgtataatctgcgtcaaggtcatgggctgcccatggaccctgattcgtcagatgattattattaactggtgtttccattgttacctagatagtcagatgaagtggacactgctgctgacatatgcattaagctatcagatgaaggccagtacatcctgcaatttgaagaaaattctcaaatcatcacctgtcccagccaccaataaccaggtgccaaccgcgatgtcctcctctagtaccccgcagtctcagggaccacctcctactgtatcacaaatgctgtcggttaaacgacaacagcaacagcaacattctccagcaccaccaccgcagcaggtccaggtgcaagtccagcaaccacagcaggtgcagatgcaagtgcagcctcagcagtctaatgcaggtgttggccagcccgccagcggcgagtcttctctgatcaaacagttactgttgcctaaacgcggacctagcactccaggcgggaaactgattctccccgcacctcaaataccgccccctaataacgccagggccccgagcccacaggtggtgtatcaggttgcgtcaaaccaggccgccggattcggagtgcagggacagacccccgcgcagcagcttttggtggggcagcagaacgtccaactagtaccatcagcaatgcctccgagcggcggggtccagactgtgccgatcagcaatcttcagattttaccaggtcctcttatctcaaattccccggctaccatttttcagggtacttcaggcaatcaggtaaccattaccgtcgtgcccaatacgtcattcgcacctgccaccgtgtcccagggaaatgccactcagttaatcgccccagctgggatcaccatgtctgggactcagaccggggtggggctgcccgtgcaaaccctgcctgcaactcaagcttcccctgcagggcagtcttcatgcacgactgcgacgcccccattcaagggggacaagataatttgtcagaaggaagaggaagccaaagaggccactggtttacacgtgcacgagcggaaaatcgaggtgatggaaaacccgtcttgcagaaggggagccacgaatacttcaaacggagatacaaaggaaaatgagatgcacgtggggtcactcttaaatgggcgtaaatactctgattcctctctcccgccatccaattccggaaagatccaatctgagactaaccagtgttccctgatttctaatggacctagcctcgaactcggagagaacggcgcctcaggaaagcaaaatagtgagcagatcgatatgcaggatattaaaagcgatctgaggaagcccctcgtcaatggcatttgtgacttcgataagggtgacgggtctcacctgtctaagaatattccgaatcacaagacctccaatcatgtcggtaacggagaaatatcaccaatggagccccagggcacacttgatatcactcagcaggatacagccaagggcgatcagctggagagaatctccaatggacctgtccttactttaggtggaagctccgtctcatcaatccaggaggccagcaatgctgccacacagcaattttcagggaccgatctcctgaacggaccacttgcatctagcctcaatagcgatgtcccgcaacagagacccagcgttgtcgtgagcccacattccaccacttctgtcatccagggccaccagattatcgcagtgccggactcaggatcaaaagtgtcccatagccccgccctctcatctgacgtgaggagtactaatggaactgcagagtgtaagaccgtcaaaagacctgcagaagacacggaccgggagaccgtggcgggcatcccaaacaaggtcggagtgaggatagtgacaatctccgatcccaacaacgctgggtgtagtgcaaccatggtcgccgtgccggccggcgccgacccttccacagtcgctaaggtcgctatcgaatccgctgtgcaacagaaacagcaacatccccccacatacgtgcagaacgtggtcccacaaaacacccccatgccaccgtctcccgccgtgcaggtccagggccaacccaattcgtctcagccttcccctttttccggttccagtcagcctggagaccccatgaggaagccgggccagaactttatgtgcctttggcagtcttgcaaaaagtggttccagaccccctctcaagtgttttatcacgccgctactgaacacggcggaaaagacgtgtaccccgggcagtgcctatgggagggctgtgagccctttcagaggcagcgattcagttttattacccacctgcaggataagcactgtagtaaagacgcgcttttagcaggcttgaagcaagatgagcctgggcaggccggctcccagaagtcttctacgaaacagcccaccgtgggaggcacatctagtaccccaagggctcaaaaggcaattgtgaatcatccgtctgcggccctgatggcactgcgtcgcggctcccggaatctagttttccgcgattttaccgatgagaaagaaggcccaatcactaagcacatacgccttacagccgcgttgatcctgaaaaatatcgggaaatactctgagtgcggccgaagactgcttaagcgacatgagaacaacctgtccgtacttgctatctcgaacatggaggcgagcagtacactggcgaagtgcttgtacgagctgaattttaccgtgcaatctaaggagcaggaaaaggattccgaaatgctccagtag

SEQ ID NO: 244170 - DNA, 5508 bp, Artificial Sequence
  derived and/or modified sequence
atggccaacagcacaggcaaggcccccccagatgaaagaaggaagggcctggccttcctggatgagctgcggcagttccaccacagccggggcagccccttcaagaagatcccagctgtgggcggcaaggagctggacctgcacggcctgtacaccagggtgaccaccctgggcggctttgccaaggtgtctgagaagaaccagtggggcgagatcgtggaggagttcaacttccccaggagctgcagcaatgctgcctttgccctgaagcagtactacctgcgctacctggagaagtatgagaaggtgcaccactttggagaagatgatgatgaggtgcccccaggcaaccccaagccccagctgcccatcggggccatccccagcagctacaactaccagcagcacagcgtgtctgactacctgcggcagagctatggcctgtccatggacttcaacagccccaatgactacaacaagctggtgctgagcctgctgagcggcctgcccaatgaggtggactttgccatcaacgtgtgcaccctgctgagcaatgaaagcaagcacgtgatgcagctggagaaggaccccaagatcatcaccctgctgctggccaatgctggggtgtttgatgacaccctgggcagcttcagcacagtgtttggagaggagtggaaggagaagacagaccgggactttgtgaagttctggaaggacatcgtggatgacaatgaggtgcgggacctgatcagtgacaggaacaagagccatgagggcaccagcggggagtggatctgggagagcctcttccacccccccaggaagctgggcatcaatgacatcgagggccagagggtgctgcagattgctgtgatcctgaggaacctgagctttgaggagggcaatgtgaagctgctggccgccaacagaacctgcctgcgcttcctgctgctgagcgcccacagccacttcatcagcctgcggcagctgggcctggacaccctgggcaacattgctgctgagctgctgctggaccctgtggacttcaagaccacccacctgatgttccacacagtgaccaagtgcctgatgagccgggaccgcttcctgaagatgaggggcatggagatcctgggcaacctgtgcaaggcagaagataatggagtgctgatctgtgaatatgtggaccaggacagctaccgggagatcatctgccacctgaccctgcctgatgtgctgctggtgatcagcaccctggaggtgctgtacatgctgacagagatgggagatgtggcctgcaccaagatcgccaaggtggagaagagcattgacatgctggtgtgcctggtgtccatggacatccagatgtttggaccagatgccctggccgctgtgaagctgattgagcaccccagcagcagccaccagatgctgtctgagatccggccccaggccatcgagcaggtgcagacccagacccacgtggccagcgccccagccagcagagctgtggtggcccagcacgtggcccctcctcctggcatcgtggagattgacagcgagaagtttgcctgccagtggctgaatgcccactttgaggtgaacccagactgcagcgtgtccagagctgagatgtacagcgagtacctgagcacctgcagcaagctggcccggggcggcatcctgaccagcacaggcttctacaagtgcctgaggacagtgttccccaaccacacagtgaagagggtggaggacagcagcagcaatggccaggcccacatccacgtggtgggcgtgaagagaagagccatccccctgcccatccagatgtactaccagcagcagcctgtgtccacctctgtggtgcgggtggacagcgtgcctgatgtgtccccagcccccagccctgctggcatcccccacggcagccagaccatcggcaaccacttccagaggacccctgtggccaaccagagcagcaacctgacagccacccagatgtccttccctgtgcagggcgtgcacacagtggcccagacagtgagccgcatcccccagaaccccagcccccacacccaccagcagcagaatgcccctgtgaccgtcatccagagcaaggcccccatcccctgtgaggtggtgaaggccaccgtcatccagaacagcatcccccagacaggagtgcctgtgtccattgctgtgggcggcggccccccccagagctctgtggtgcagaaccacagcacaggcccccagcctgtgacagtggtgaacagccagaccctgctgcaccaccccagcgtcatcccccagcagagccccctgcacacagtggtgcccggccagatccccagcggcacccctgtgaccgtcatccagcaggccgtgccccagagccacatgtttggccgggtgcagaacatcccagcctgcaccagcacagtgtcccagggccagcagctgatcaccaccagcccccagcctgtgcagaccagcagccagcagaccagcgctggcagccagagccaggacaccgtcatcatcgccccaccccagtatgtgaccaccagcgccagcaacatcgtgtctgccacctctgtgcagaacttccaggtggccaccggccagatggtgaccatcgccggcgtgcccagcccccaggccagccgggtgggcttccagaacatcgcccccaagcccctgcccagccagcaggtgagcagcacagtggtgcagcagcccatccagcagccccagcagcccacccagcagagcgtggtgattgtgtcccagcctgcccagcagggccagacctacgccccagccatccaccagatcgtgctggccaacccagctgccctgcctgctggccagacagtgcagctgaccggccagcccaacatcacccccagcagcagccccagccctgtgcctgccaccaacaaccaggtgcccacagccatgagcagcagcagcaccccccagagccagggccccccacccaccgtgtcccagatgctgtctgtgaagaggcagcagcagcagcagcacagccctgcccccccaccccagcaggtgcaggtgcaggtgcagcagccccagcaggtgcagatgcaggtgcagccccagcagagcaatgccggcgtgggccagcctgccagcggggagagcagcctcatcaagcagctgctgctgcccaagaggggccccagcaccccaggcggcaagctgatcctgcctgccccccagatccccccacccaacaatgcccgggcccccagcccccaggtggtgtaccaggtggccagcaaccaggccgccggctttggagtgcagggccagaccccagcccagcagctgctggtgggccagcagaatgtgcagctggtgcccagcgccatgcctccttctggaggagtgcagacagtgcccatcagcaacctgcagatcctgcccggccccctcatcagcaacagccctgccaccatcttccagggcaccagcggcaaccaggtgaccatcaccgtggtgcccaacaccagctttgccccagccaccgtgtcccagggcaatgccacccagctgattgccccagctggcatcaccatgagcggcacccagacaggagtgggcctgcctgtgcagaccctgcctgccacccaggccagccctgctggccagagcagctgcaccacagccaccccacccttcaagggggacaagatcatctgccagaaggaggaggaggccaaggaggccaccggcctgcacgtgcatgagaggaagattgaggtgatggagaaccccagctgccggcggggggccaccaacaccagcaatggagacaccaaggaaaatgagatgcacgtgggcagcctgctgaatggaaggaagtacagcgacagcagcctgccccccagcaacagcggcaagatccagagcgagaccaaccagtgcagcctcatcagcaatggccccagcctggagctgggggagaatggagccagcggcaagcagaacagcgagcagattgacatgcaggacatcaagagtgacctgaggaagcccctggtgaatggcatctgtgactttgacaagggagatggcagccacctgagcaagaacatccccaaccacaagaccagcaaccacgtgggcaatggagagatcagccccatggagccccagggcaccctggacatcacccagcaggacacagccaagggggaccagctggagcgcatcagcaatggacctgtgctgaccctgggcggcagctctgtgagcagcatccaggaggccagcaatgctgccacccagcagttctctggaacagacctgctgaatggccccctggccagcagcctgaacagtgatgtgccccagcagaggcccagcgtggtggtgagcccccacagcaccaccagcgtcatccagggccaccagatcatcgctgtgcctgattctggcagcaaggtgagccacagccctgccctgagcagtgatgtgcgcagcaccaatggaacagctgagtgcaagacagtgaagaggcctgctgaggacacagaccgggagaccgtggccggcatccccaacaaggtgggcgtgcgcatcgtgaccatcagtgaccccaacaatgccggctgcagcgccaccatggtggccgtgcctgctggagctgaccccagcacagtggccaaggtggccatcgagagcgctgtgcagcagaagcagcagcacccccccacctacgtgcagaatgtggtgccccagaacacccccatgccacccagccctgctgtgcaggtgcagggccagcccaacagcagccagcccagccccttcagcggcagcagccagcccggggaccccatgaggaagccaggccagaacttcatgtgcctgtggcagagctgcaagaagtggttccagacccccagccaggtgttctaccacgccgccacagaacatggaggcaaggatgtgtacccaggccagtgcctgtgggagggctgtgagcccttccagaggcagcgcttctccttcatcacccacctgcaggacaagcactgcagcaaggatgccctgctggccggcctgaagcaggatgagcccggccaggccggcagccagaagagcagcaccaagcagcccaccgtgggcggcaccagcagcaccccccgggcccagaaggccatcgtgaaccaccccagcgctgccctgatggccctgcggcggggcagcaggaacctggtgttccgggacttcacagatgagaaggagggccccatcaccaagcacatccggctgacagctgccctgatcctgaagaacatcggcaagtacagtgaatgtggccgccgcctgctgaagagacatgagaacaacctgtctgtgctggccatcagcaacatggaggccagcagcaccctggccaagtgcctgtatgagctgaacttcaccgtgcagagcaaggagcaggagaaggacagcgagatgctgcagtag

SEQ ID NO: 244171 - DNA, 2859 bp, Artificial Sequence
  derived and/or modified sequence
atgatgatgagataccaccaggccatccagagccacagcttcctgctggtgcagttccacctgcccaccatcaccagcaacacagtgtgccgcatcatctgtgtgaaggtgatgggctgcccctggaccctcatccggcagatgatcatcatcaactggtgcttccactgctacctggacagccagatgaagtggaccctgctgctgacctacgccctgagctaccagatgaaggccagcaccagctgcaacctgaagaagatcctgaagagcagccctgtgcctgccaccaacaaccaggtgcccacagccatgagcagcagcagcaccccccagagccagggccccccacccaccgtgtcccagatgctgtctgtgaagaggcagcagcagcagcagcacagccctgcccccccaccccagcaggtgcaggtgcaggtgcagcagccccagcaggtgcagatgcaggtgcagccccagcagagcaatgctggggtgggccagcctgccagcggggagagcagcctcatcaagcagctgctgctgcccaagaggggccccagcacccctgggggcaagctgatcctgcctgccccccagatccccccacccaacaatgcccgggcccccagcccccaggtggtgtaccaggtggccagcaaccaggccgccggcttcggcgtgcagggccagaccccagcccagcagctgctggtgggccagcagaatgtgcagctggtgcccagcgccatgccacccagcggcggcgtgcagacagtgcccatcagcaacctgcagatcctgcccggccccctcatcagcaacagccctgccaccatcttccagggcaccagcggcaaccaggtgaccatcaccgtggtgcccaacaccagctttgccccagccaccgtgtcccagggcaatgccacccagctgattgccccagctggcatcaccatgagcggcacccagacaggagtgggcctgcctgtgcagaccctgcctgccacccaggccagccctgctggccagagcagctgcaccacagccaccccacccttcaagggggacaagatcatctgccagaaggaggaggaggccaaggaggccaccggcctgcacgtgcatgagaggaagattgaggtgatggagaaccccagctgcagaagaggagccaccaacaccagcaatggagacaccaaggaaaatgagatgcacgtgggcagcctgctgaatggaaggaagtacagcgacagcagcctgccccccagcaacagcggcaagatccagagcgagaccaaccagtgcagcctcatcagcaatggccccagcctggagctgggagaaaatggagccagcggcaagcagaacagcgagcagattgacatgcaggacatcaagagtgacctgaggaagcccctggtgaatggcatctgtgactttgataaaggagatggcagccacctgagcaagaacatccccaaccacaagaccagcaaccacgtgggcaatggagagatcagccccatggagccccagggcaccctggacatcacccagcaggacacagccaagggggaccagctggagcgcatcagcaatggacctgtgctgaccctgggcggcagctctgtgagcagcatccaggaggccagcaatgctgccacccagcagttcagcggcacagacctgctgaatggccccctggccagcagcctgaacagtgatgtgccccagcagaggccttctgtggtggtgagcccccacagcaccaccagcgtcatccagggccaccagatcatcgctgtgcctgacagcggcagcaaggtgagccacagccctgccctgagcagtgatgtgcgcagcaccaacggcacagctgagtgcaagacagtgaagaggcctgctgaggacacagaccgggagaccgtggccggcatccccaacaaggtgggcgtgagaattgtgaccatcagtgaccccaacaatgccggctgcagcgccaccatggtggccgtgcctgctggagctgaccccagcacagtggccaaggtggccattgaatctgctgtgcagcagaagcagcagcacccccccacctacgtgcagaatgtggtgccccagaacacccccatgccacccagccctgctgtgcaggtgcagggccagcccaacagcagccagcccagccccttcagcggcagcagccagcccggggaccccatgaggaagccaggccagaacttcatgtgcctgtggcagagctgcaagaagtggttccagacccccagccaggtgttctaccacgccgccacagagcacggcggcaaggatgtgtacccaggccagtgcctgtgggagggctgtgagcccttccagaggcagcgcttctccttcatcacccacctgcaggacaagcactgcagcaaggatgccctgctggccggcctgaagcaggatgagcccggccaggccggcagccagaagagcagcaccaagcagcccaccgtgggcggcaccagcagcaccccccgggcccagaaggccatcgtgaaccaccccagcgctgccctgatggccctgcggcggggcagcaggaacctggtgttccgggacttcacagatgagaaggagggccccatcaccaagcacatccggctgacagctgccctgatcctgaagaacatcggcaagtacagtgaatgtggccggcggctgctgaagagacatgagaacaacctgtctgtgctggccatcagcaacatggaggccagcagcaccctggccaagtgcctgtatgagctgaacttcaccgtgcagagcaaggagcaggagaaggacagcgagatgctgcagtag

SEQ ID NO: 244172 - DNA, 4338 bp, Artificial Sequence
  derived and/or modified sequence
atgaggggcatggagatcctgggcaacctgtgcaaggccgaggacaacggggtgctgatctgtgaatatgtggaccaggacagctaccgggagatcatctgccacctgaccctgcctgatgtgctgctggtgatcagcaccctggaggtgctgtacatgctgacagagatgggagatgtggcctgcaccaagatcgccaaggtggagaagagcattgctgctgtgaagctgattgagcaccccagcagcagccaccagatgctgtctgagatccggccccaggccatcgagcaggtgcagacccagacccacgtggccagcgccccagccagcagagctgtggtggcccagcacgtggcccctcctcctggcatcgtggagattgacagcgagaagtttgcctgccagtggctgaatgcccactttgaggtgaacccagactgcagcgtgtccagagctgagatgtacagcgagtacctgagcacctgcagcaagctggcccggggcggcatcctgaccagcacaggcttctacaagtgcctgaggacagtgttccccaaccacacagtgaagagggtggaggacagcagcagcaatggccaggcccacatccacgtggtgggcgtgaagagaagagccatccccctgcccatccagatgtactaccagcagcagcctgtgtccacctctgtggtgcgggtggacagcgtgcctgatgtgtccccagcccccagccctgctggcatcccccacggcagccagaccatcggcaaccacttccagaggacccctgtggccaaccagagcagcaacctgacagccacccagatgtccttccctgtgcagggcgtgcacacagtggcccagacagtgagccgcatcccccagaaccccagcccccacacccaccagcagcagaatgcccctgtgaccgtcatccagagcaaggcccccatcccctgtgaggtggtgaaggccaccgtcatccagaacagcatcccccagacaggagtgcctgtgtccattgctgtgggcggcggccccccccagagctctgtggtgcagaaccacagcacaggcccccagcctgtgacagtggtgaacagccagaccctgctgcaccaccccagcgtcatcccccagcagagccccctgcacacagtggtgcccggccagatccccagcggcacccctgtgaccgtcatccagcaggccgtgccccagagccacatgtttggccgggtgcagaacatcccagcctgcaccagcacagtgtcccagggccagcagctgatcaccaccagcccccagcctgtgcagaccagcagccagcagaccagcgctggcagccagagccaggacaccgtcatcatcgccccaccccagtatgtgaccaccagcgccagcaacatcgtgtctgccacctctgtgcagaacttccaggtggccaccggccagatggtgaccatcgccggcgtgcccagcccccaggccagccgggtgggcttccagaacatcgcccccaagcccctgcccagccagcaggtgagcagcacagtggtgcagcagcccatccagcagccccagcagcccacccagcagagcgtggtgattgtgtcccagcctgcccagcagggccagacctacgccccagccatccaccagatcgtgctggccaacccagctgccctgcctgctggccagacagtgcagctgaccggccagcccaacatcacccccagcagcagccccagccctgtgcctgccaccaacaaccaggtgcccacagccatgagcagcagcagcaccccccagagccagggccccccacccaccgtgtcccagatgctgtctgtgaagaggcagcagcagcagcagcacagccctgcccccccaccccagcaggtgcaggtgcaggtgcagcagccccagcaggtgcagatgcaggtgcagccccagcagagcaatgccggcgtgggccagcctgccagcggggagagcagcctcatcaagcagctgctgctgcccaagaggggccccagcaccccaggcggcaagctgatcctgcctgccccccagatccccccacccaacaatgcccgggcccccagcccccaggtggtgtaccaggtggccagcaaccaggccgccggctttggagtgcagggccagaccccagcccagcagctgctggtgggccagcagaatgtgcagctggtgcccagcgccatgcctccttctggaggagtgcagacagtgcccatcagcaacctgcagatcctgcccggccccctcatcagcaacagccctgccaccatcttccagggcaccagcggcaaccaggtgaccatcaccgtggtgcccaacaccagctttgccccagccaccgtgtcccagggcaatgccacccagctgattgccccagctggcatcaccatgagcggcacccagacaggagtgggcctgcctgtgcagaccctgcctgccacccaggccagccctgctggccagagcagctgcaccacagccaccccacccttcaagggggacaagatcatctgccagaaggaggaggaggccaaggaggccaccggcctgcacgtgcatgagaggaagattgaggtgatggagaaccccagctgccggcggggggccaccaacaccagcaatggagacaccaaggaaaatgagatgcacgtgggcagcctgctgaatggaaggaagtacagcgacagcagcctgccccccagcaacagcggcaagatccagagcgagaccaaccagtgcagcctcatcagcaatggccccagcctggagctgggggagaatggagccagcggcaagcagaacagcgagcagattgacatgcaggacatcaagagtgacctgaggaagcccctggtgaatggcatctgtgactttgacaagggagatggcagccacctgagcaagaacatccccaaccacaagaccagcaaccacgtgggcaatggagagatcagccccatggagccccagggcaccctggacatcacccagcaggacacagccaagggggaccagctggagcgcatcagcaatggacctgtgctgaccctgggcggcagctctgtgagcagcatccaggaggccagcaatgctgccacccagcagttctctggaacagacctgctgaatggccccctggccagcagcctgaacagtgatgtgccccagcagaggcccagcgtggtggtgagcccccacagcaccaccagcgtcatccagggccaccagatcatcgctgtgcctgattctggcagcaaggtgagccacagccctgccctgagcagtgatgtgcgcagcaccaatggaacagctgagtgcaagacagtgaagaggcctgctgaggacacagaccgggagaccgtggccggcatccccaacaaggtgggcgtgcgcatcgtgaccatcagtgaccccaacaatgccggctgcagcgccaccatggtggccgtgcctgctggagctgaccccagcacagtggccaaggtggccatcgagagcgctgtgcagcagaagcagcagcacccccccacctacgtgcagaatgtggtgccccagaacacccccatgccacccagccctgctgtgcaggtgcagggccagcccaacagcagccagcccagccccttcagcggcagcagccagcccggggaccccatgaggaagccaggccagaacttcatgtgcctgtggcagagctgcaagaagtggttccagacccccagccaggtgttctaccacgccgccacagaacatggaggcaaggatgtgtacccaggccagtgcctgtgggagggctgtgagcccttccagaggcagcgcttctccttcatcacccacctgcaggacaagcactgcagcaaggatgccctgctggccggcctgaagcaggatgagcccggccaggccggcagccagaagagcagcaccaagcagcccaccgtgggcggcaccagcagcaccccccgggcccagaaggccatcgtgaaccaccccagcgctgccctgatggccctgcggcggggcagcaggaacctggtgttccgggacttcacagatgagaaggagggccccatcaccaagcacatccggctgacagctgccctgatcctgaagaacatcggcaagtacagtgaatgtggccgccgcctgctgaagagacatgagaacaacctgtctgtgctggccatcagcaacatggaggccagcagcaccctggccaagtgcctgtatgagctgaacttcaccgtgcagagcaaggagcaggagaaggacagcgagatgctgcagtag

SEQ ID NO: 244173 - DNA, 5508 bp, Artificial Sequence
  derived and/or modified sequence
atggccaacagcaccggcaaggccccccccgacgagcggcggaagggactggcctttctggatgaactgcgccagttccaccacagtcgcggatcgccatttaagaagatcccagctgttggcggtaaggagttggacctgcacggactctatactcgcgttaccaccctgggaggatttgctaaggtgagtgagaagaatcaatggggagagatcgtggaggagttcaacttccccaggagctgctctaatgcagcttttgcactcaagcagtactatcttagatatttggaaaagtacgagaaagtgcaccatttcggagaggatgacgacgaggttccccccggtaaccctaagcctcagttgcctatcggggctataccatctagctataattatcaacagcacagcgtgagcgactacctgcgccagagttatgggctttctatggacttcaactccccaaacgattataataaactcgtgctgtccctcttgtcaggtttgcccaacgaagtagattttgccatcaatgtgtgcacccttctttccaacgagagtaagcacgtcatgcagcttgagaaggatccgaaaataatcactctgctgctggccaacgcgggcgtgttcgatgatactttagggagcttctccactgtattcggcgaagagtggaaggaaaaaacagatagggattttgttaagttctggaaagacatagtggacgacaacgaggtgagagacctgattagcgacaggaacaagtcccacgaaggcaccagcggcgaatggatctgggagtctttgtttcatcccccaagaaagctgggaattaatgacattgagggccaacgcgtgctccagattgccgtgatcctgaggaacctgtccttcgaagagggtaatgtaaagttgctggccgccaatcgcacctgcttaagattcttactgctctcagctcactcgcacttcatcagcctcaggcagctaggcttagatacccttgggaacatcgctgctgaactgttgctcgatcctgtagactttaaaaccactcaccttatgttccataccgtcaccaaatgcttgatgtcccgtgacaggttcctgaagatgcgcggcatggagatacttgggaatctgtgcaaggcagaggacaatggcgtattaatatgcgagtacgtcgaccaagattcttaccgggagatcatctgtcacttgacgctgcccgacgtactactggtaatctcgacattggaagttctgtatatgctgacggagatgggagacgtggcgtgtacaaaaattgctaaggttgaaaaatcaatagatatgctggtgtgtcttgtgtctatggacatacagatgttcggcccagatgccctggctgccgtgaaactgatcgagcacccgtcatcctcgcaccagatgctgtccgaaattcggccgcaggctatcgagcaggtgcagacccaaacacacgtggcctccgcgcccgcatcaagagccgtggtagcacaacatgtggcgccccctccagggattgtggagattgattctgaaaaattcgcgtgccaatggctgaatgcccatttcgaagtgaaccccgactgctcagtgagcagggctgagatgtattcagagtatttgtccacttgcagtaagctggcaagaggcggcattctgacaagcactggattttataagtgtctcagaaccgtgttccctaatcacacagtcaaaagggttgaggacagttcctccaatggccaggctcacattcacgtggtgggcgtgaaaaggcgggcaattcctctgcctatccaaatgtactaccaacaacaacccgtatccacctcagtggtcagagtagatagcgtacctgacgttagccccgcgcctagccctgctggtatcccacacggaagccagacaatcgggaaccattttcagaggactcccgtggcaaatcaatcttcaaatctgactgctacccagatgtcatttcccgttcaaggggttcacactgttgcacaaaccgtgtcccgtatcccccagaatcccagtccacacacgcatcaacagcagaatgctccagttacagtgattcaatccaaggctccgattccgtgtgaggttgttaaggcaactgtcattcagaactcgattccccagacaggcgtacctgtttctattgccgtgggcggcgggccgcctcaatcttctgtagttcagaatcattccacaggacctcaacccgttacagtcgtgaattctcagactcttttgcaccatcccagtgtcattccccagcagagcccgctgcacactgtggtgccagggcaaatcccaagcggcacacccgtcaccgtcatccagcaggccgtgcctcagtcccatatgttcgggcgagtgcagaatattcctgcctgtacctctaccgtcagccaaggacagcagctgatcacgacatcccctcagcccgtgcaaacatcgtcacagcagacctccgccggttcacagtcccaggatacagttataatagcacctccccagtacgtcacaacttccgcctcaaacattgtgtcagctactagcgtccagaactttcaagtcgccaccggccagatggtcacgattgccggagtcccttctccacaggcctcccgcgttggctttcagaacattgctccaaaaccacttcctagtcagcaggtaagcagtactgttgtgcagcagccgatccagcaacctcagcagcctacacagcagtctgttgttatcgtgagccagccggcccaacagggacagacttatgcgccagctatacaccagatcgtgctcgctaaccccgccgctttgcccgcggggcagacagtacagctcaccggccagccgaacattactccatcttcgagtcctagccccgtgccggcaaccaataaccaggttcccaccgcaatgtctagcagtagtactccacagtcccaaggaccacctcccaccgtgtctcagatgttatctgtgaaacgccagcagcagcaacagcattcccctgccccccccccccaacaggttcaggtgcaggttcaacagccacagcaggttcagatgcaggtgcagccacagcagtccaacgctggggtggggcaaccggcctctggtgagtcgagcttgattaagcaattgcttctcccaaaacgcggaccaagcactcctggcgggaagcttattctgccagccccacagattccacctcccaacaatgccagagcaccttcccctcaggtggtctaccaagttgcaagtaatcaagcagctggctttggcgtccagggacagacacccgcacaacagcttctcgtgggacagcaaaacgtccagctggtgcccagtgcaatgccgcccagcgggggcgtccagaccgtccccatcagcaatctacagatcctgcccggcccgctgatttccaattcgccagccaccatttttcaaggaacttcagggaaccaggtgactatcactgtagtgccaaacacctcgttcgctcctgccacagtcagccagggtaatgcgacacagttaattgcacccgccgggatcacaatgtccgggactcagaccggggtgggtctgcctgtgcagaccttgccagcaacacaggctagtcccgctgggcagtcatcctgtacaactgctacaccaccctttaaaggtgacaaaattatatgccagaaggaggaagaggccaaagaagccactggcttacacgtgcacgaacgaaaaattgaggtgatggagaaccccagttgcaggcgaggcgcaaccaacacttccaatggtgatacgaaggaaaatgaaatgcatgttggatcattgttaaacggcagaaagtacagcgactcatcccttccacccagcaattccggaaagatacaatctgagactaaccaatgttctctgatcagtaacggccctagcctggagcttggggagaacggggcgtcggggaaacagaattctgaacaaattgacatgcaggatatcaagagtgatctccgcaaacccctggtgaacgggatctgtgactttgacaagggggacggttcccatcttagtaaaaacatccccaaccataaaaccagcaatcacgtgggaaatggggaaatttcccctatggagccgcagggaaccctcgacatcacacagcaggataccgcaaaaggagaccaactcgagcggatctccaatgggcccgtcctcacacttggtggctcctccgtgtcatccatccaggaagcttccaacgcggccacccaacagttctctgggaccgatctgttgaatggtccgttagccagcagcctcaactccgatgtgcctcaacagcggccatctgtggtagtgtccccgcattcaacgactagtgttattcaggggcaccaaataatcgcagtacccgattcaggtagtaaagtgagtcattcacctgctctatcaagcgacgtgcgctctaccaatgggactgccgagtgtaaaactgttaagcgcccagctgaagacacagacagggagacagtggctggcattcctaacaaggttggggtgcgcattgtgaccatcagtgatccaaacaacgccgggtgctccgcgacaatggttgctgtccccgcgggggccgatccttccaccgtggccaaggtcgctattgaaagtgcagtccagcaaaagcagcagcatccacctacctacgtccagaatgttgtgccccaaaatactccgatgccaccatcacctgctgtacaagtgcagggacagccaaacagcagccagccaagcccttttagcggctcgagccaacccggggatcctatgagaaaacccggccaaaatttcatgtgtctctggcagagctgcaagaaatggtttcagaccccatcgcaggtgttctaccatgcagccacggagcacggtggaaaggacgtgtacccaggtcaatgcctgtgggaaggctgtgaacctttccaacgacagcggttttcatttattacacaccttcaggacaagcattgttcaaaagacgcacttctagcaggtctgaaacaagacgagcctgggcaggctggaagccagaaaagctctacaaaacaaccgactgtgggcgggacaagttcgacgccgagggcacagaaagccatcgtgaatcacccgtccgcagccctcatggccctgcgccggggcagccgaaatctggtattccgggattttacagacgaaaaggagggaccaatcaccaagcatattagactgactgctgctctgatcttgaagaatattggaaagtactcagaatgcggaaggaggctgctcaaacggcatgagaacaatctgagcgtgctcgcgatttctaacatggaggcaagctccaccctggccaagtgcctctatgagcttaattttacggttcagagtaaagagcaggaaaaagactctgagatgctgcaatag

SEQ ID NO: 244174 - DNA, 2859 bp, Artificial Sequence
  derived and/or modified sequence
atgatgatgcggtaccaccaggccatccagagccacagcttcctgctggtgcagttccacctgcctacaataacaagcaataccgtttgtcggatcatctgcgtgaaagtgatgggatgtccatggacactgatccggcaaatgatcattattaattggtgttttcattgctacttggattcccagatgaaatggaccctcctgctaacatacgccctgagttatcagatgaaagctagcacctcatgcaatctaaagaaaatcttgaagagcagcccggtgccagctactaacaaccaagttccaacagccatgtcaagttcgagtactccccagtcccagggacctcccccgaccgtgtcgcagatgctgtcagtgaagcgacagcagcagcagcagcacagtccggccccccctccacaacaagttcaggtgcaggtgcagcagccacaacaggtgcagatgcaggtgcagcctcagcagtctaatgctggagtaggccaacccgcttcaggagagtcctccctgataaagcagctgctgctcccaaagcgcggcccatcaactcccggtgggaagctgattctgcccgcccctcaaatccccccccccaacaacgcacgcgctccatcccctcaggtggtctaccaggtcgcctccaaccaggccgccggcttcggcgttcagggccagactcctgctcaacagcttctggtcggccagcagaatgtacagctcgtgccttctgccatgccgccctccggaggggtccagactgtcccaattagcaatctgcagattcttcctggccctctgatctctaacagtcccgcaaccattttccagggaacaagtggtaaccaggtgaccatcacggttgtcccaaacacctccttcgctccagccacggtttcgcagggcaatgccactcagctaatcgccccagcaggaatcaccatgagcgggacacagaccggagtcggactgccagtccaaacactgcccgccacccaggcctcccctgctggtcagtcgtcctgcactaccgcaacgcccccattcaaaggtgataagatcatatgccaaaaggaggaagaagcaaaggaggctacaggtcttcatgttcacgagaggaagattgaggtcatggagaacccaagttgtcgacgcggtgcaacaaacacgtctaatggcgacactaaagagaacgagatgcatgtggggtctcttctgaacgggagaaagtacagcgactcttccttacctccttccaatagcggaaagattcagtctgaaaccaaccaatgcagcctgatcagcaacggcccttcacttgagctaggcgaaaatggggcgagtggtaagcagaactctgaacagatcgacatgcaagatattaagtcggatctgcgcaagcctctcgtgaacggcatttgcgatttcgacaagggagatgggtcccacctgagcaagaatatcccgaaccataagacatctaaccatgtggggaatggagagatatccccaatggagccccaaggcaccctggatatcacccagcaagacaccgccaagggtgatcagctggagcgaatttccaatggcccagtcctgaccctcggtggcagtagcgtgtcctccattcaggaagcttcgaacgcagctacacaacagtttagcggtacagacctcctgaacgggcctctggcatccagtcttaatagcgatgtgccacagcaaagaccttccgtggttgtgagtccacactccacgacatccgtaattcaagggcaccagatcatcgctgtgccggacagcggaagcaaggtttctcacagtccagctctgagctccgatgtccggtcgaccaacgggacggccgagtgtaaaactgtcaaacgtccagctgaagatacagacagagaaactgttgccggcattcctaataaagttggtgttcgtattgtgaccatttcagatcctaataacgctgggtgtagcgccactatggtcgccgtccctgcaggcgccgaccccagtaccgtggccaaagtagcaatcgaaagcgctgtgcaacagaagcagcagcatccacctacatacgtgcaaaatgtggtgccacagaacaccccgatgcccccttcaccagctgtgcaagttcaaggccagcccaattcctcccagccttcaccattttcaggcagttcacagcctggtgaccctatgcggaagccaggacaaaactttatgtgtctttggcagtcatgtaagaaatggtttcagactccatctcaagtgttctaccacgcggccacagaacatggggggaaagacgtataccccgggcaatgtttatgggaagggtgcgaaccattccaaagacagcgttttagcttcatcacgcatttacaggacaaacactgctccaaggacgccttgctggcgggcctgaagcaggacgaacctggacaggcaggatcccagaagtcgtcaactaaacaacccaccgtgggcggcacaagttcaactcctcgtgcccaaaaggcaatcgttaatcacccttctgccgctctgatggctctaagaagggggtctcgaaacctggtgtttagagattttaccgacgagaaagaaggccctatcaccaagcatattagactcacagcagcactgatattaaagaatattggaaaatactccgagtgcggtaggagactgctgaagcggcatgaaaataacctttccgtgctagccatcagtaatatggaggcaagctccacactagcaaaatgcctgtacgaacttaatttcaccgtgcagagcaaagagcaagagaaagacagtgagatgctgcagtag

SEQ ID NO: 244175 - DNA, 4338 bp, Artificial Sequence
  derived and/or modified sequence
atgcggggcatggagatcctgggcaacctgtgcaaggccgaggacaacggagtgctaatctgcgaatacgtggaccaggactcatatcgcgagattatttgccacctgacccttcctgatgttttactggttatttcaacgctcgaggtcctatacatgctgactgagatgggtgatgtggcatgtaccaagatagccaaagtcgaaaaatcgatcgccgccgtaaagctgatcgagcatcctagctcttcccaccagatgctttccgagattcggccgcaggccatcgaacaagtgcagactcagacccatgtggcctccgcccctgcctctcgggcagttgtggcacaacatgtggctcctcctcctggaattgtagagatagactcagaaaagtttgcttgtcaatggttaaatgcacactttgaggtgaacccagactgttcggtttctagagctgagatgtactctgaatatctgtcaacatgttccaagttagcacgtggcggcatactgactagtaccggtttttacaaatgtttgaggaccgtgttccccaatcacactgtgaagcgggtagaagactcttctagtaatggccaggcccatattcacgtggttggggtgaagcgaagagcaatccccttacctatccaaatgtactatcaacaacagcccgtgagtacctccgtggtgcgggtggactctgtccccgatgtctcgcctgcacctagccctgcaggaattccccacggcagtcagacaattgggaatcatttccagcgaacccccgtggctaaccaatccagtaaccttaccgcaacccaaatgagtttcccggtacagggagtgcacacagtagcccagaccgtcagccgcataccccagaatcccagtcctcacacgcatcagcagcagaacgcacctgttactgtcatacaaagcaaggcaccaattccctgcgaggtggtaaaggccaccgtgatccagaattccatccctcagacaggagtccccgtgtcaatcgctgtcgggggcggtccaccacaaagctccgtggtgcagaatcatagtactggtccacagcccgtcaccgtagtgaattctcagacgctgttgcaccacccctctgtgatccctcagcaaagccctctccacaccgtcgtccccggccagatcccgagcgggacaccagttacagtcattcagcaagcggtgccccagtctcacatgttcggacgggtccaaaacatccctgcctgcacctcaacagtgagtcaaggacagcagctaataacaacctctcctcagccagtgcagacctctagtcagcaaaccagcgcaggcagccagtcgcaggacactgtgatcatagccccaccacagtacgttactacaagtgcttccaatatcgttagtgctaccagcgtacagaatttccaggtggcaaccggccagatggtgacaatagccggggtgccatccccgcaggcctctcgtgtcgggtttcagaacatcgccccaaagccactgccgtctcaacaggtgtcaagcacggtggtccagcagccaatacagcagccgcagcagccgactcagcagtcagtggtgatcgtcagccagccagcacagcaggggcaaacgtatgccccagcaatccaccagattgtcctggcgaaccccgccgcactaccagcaggtcaaacggtgcagctaacaggccagcctaatataaccccctcaagctcccctagccccgtgcctgcaacgaacaatcaggtgcccaccgctatgtctagtagctctacgccacagtcacaagggccaccacccactgtctctcagatgctgtctgtcaagcgccagcaacagcaacagcacagtccagccccaccccctcagcaggtgcaggtgcaggttcagcaaccacaacaagttcagatgcaggtccagcctcagcagtcgaatgccggagttggccagcccgctagcggtgagtcctcactaattaagcaactgttgctccccaagcggggaccttccactcctggcggcaagttaatcttacctgctccccaaattccccctcccaataacgcacgggctcccagtccacaggttgtataccaagtggcaagtaaccaggccgcggggtttggcgtacaaggccagactcctgcccagcagctcctggtgggtcaacagaacgttcagctggttcccagcgcaatgcctcctagtggtggcgtgcaaacagtgcctatcagcaatctgcagatcctccccgggccactcatcagcaactcccccgctacaattttccaagggacaagtggcaatcaggtgaccatcaccgttgtcccgaatacgtcctttgcacctgctaccgttagtcagggaaacgccacccagctaatcgcacccgccggcatcaccatgagcgggacccaaacgggcgtcggactgccagtccagacactccccgcgacccaggccagccccgccgggcagagtagttgcaccacagctacccctcctttcaagggagataaaatcatttgccagaaagaagaagaagccaaagaggctacaggcctccacgtgcacgaaaggaagatcgaggtgatggaaaacccctcatgcagaagaggcgctactaatacctcgaacggagatacaaaagagaacgagatgcatgtgggaagcctcttaaacgggcgcaagtatagcgactctagtctcccaccatctaactcaggcaagatccagtctgaaaccaaccagtgctccctgatttccaatggtccctctctagaacttggagagaacggcgcatcagggaaacagaactccgagcaaatcgacatgcaagacatcaagtccgatttgcggaaaccattggtcaatggcatctgcgacttcgataagggcgatggaagccatctgtccaagaacattccaaaccataaaacctcaaatcatgtgggtaatggcgagatcagtccaatggaaccccagggcaccttagacatcacacagcaggacactgctaagggtgatcaactggagcgtataagcaatggacccgttctgaccctgggtggatccagcgtgtcttccatccaggaggcctcaaatgctgctacacagcagttctctggcacagacctactgaacggcccactcgcatccagccttaatagcgacgtgccgcagcagcggccatccgttgtggttagcccacattctaccaccagtgtgatccaaggacatcagattattgcagtgccagactccgggtccaaggtcagtcactctccagcccttagcagcgatgtaaggtcgactaatggaaccgctgagtgtaagactgtcaaaaggccagctgaagatacagatagggagaccgtagccggcatccccaataaggtcggagtgcgcatcgtcaccatctctgaccctaacaacgccggctgcagcgcaactatggtcgctgtacccgccggcgctgatcctagtaccgtggctaaggtggccatagaatcagctgtgcaacagaagcagcagcacccccctacatatgtccagaatgtggttccacagaacacccccatgccacctagtcccgccgtacaggtgcaagggcagcctaattccagtcagccatcccccttcagcggatccagtcagcctggcgaccccatgcgtaagcccggccaaaatttcatgtgcctgtggcagtcttgtaaaaagtggtttcagacaccttctcaagtcttctaccacgctgctaccgagcacggcgggaaggatgtgtacccgggccaatgcctctgggaaggttgcgagccttttcagcgccaacgattcagtttcatcacgcatctgcaggataagcactgcagtaaagacgctctgcttgccggtctgaagcaggatgagccaggccaggccggaagtcagaagtcttccactaaacagcccaccgtggggggcacatcgagcacccctcgggctcagaaagccattgtaaatcatccctcggcggccctcatggcactccggagggggtcgaggaatcttgtctttagagatttcaccgatgagaaggaaggcccaattaccaaacacatccggttgaccgctgccttgattcttaagaacatcggtaaatatagcgagtgcggaagaaggcttctgaagcgccacgagaacaaccttagtgtgttagcaatcagtaatatggaggcaagtagtacactagctaaatgcctctacgagttgaattttacagttcagagtaaggagcaggagaaagactcggaaatgctgcagtag

SEQ ID NO: 244176 - DNA, 2859 bp, Artificial Sequence
  derived and/or modified sequence
atgatgatgcggtaccaccaggccatccagagccacagcttcctgctggttcaatttcacctgcccaccataacctctaacaccgtgtgccgcataatctgcgttaaagtaatgggatgtccctggaccctaatacgacagatgatcattattaactggtgcttccattgttatctagactctcaaatgaagtggacactactcctgacctatgcactgtcctatcagatgaaggcctctacctcttgtaacctgaagaagatactaaaaagtagccccgttccagcgactaataatcaagtgccgactgctatgtcttccagcagcaccccgcagtcccaggggccccctccaacagtttcacaaatgttgtcagtgaaaagacaacagcaacaacaacattctccagccccacctcctcaacaggtccaggtccaggtccagcagccacaacaggtgcagatgcaggtgcagcctcagcagagtaacgctggggttggccagcctgcctccggtgaaagctcgctgataaaacagttactcctaccaaaacggggaccgtctacccctggcggaaaactgattctgcccgctccacagattccccctcccaacaacgcacgcgcccctagccctcaggtcgtatatcaggtggcatcaaatcaggctgccggtttcggcgtccagggccagactcccgcccaacagttgctcgttgggcagcagaatgtgcagctcgtcccaagtgccatgcccccttccggcggcgttcagacagtccctatctctaacctgcagatccttcccggaccgctcatcagcaactcccccgccacaatttttcaggggacaagcggtaaccaggttaccattacagtagttcctaacacatcatttgcccccgcgacagtatcccaaggtaatgcaactcagctgattgctcctgccggaattactatgtccggcacccaaaccggtgtagggctaccggtgcagaccttgccggcgacacaagcttcacccgctggccagtccagctgtacgacagcaacccccccctttaagggggacaagattatctgtcagaaggaagaggaggcaaaggaagcgacgggactgcacgtgcacgagagaaagattgaggtaatggagaatccttcttgccgccgcggagctacaaacacctccaacggggacaccaaagagaatgagatgcacgttggtagccttctcaatggtcggaagtatagcgatagtagcttgcccccgagtaactccggaaagatccagagcgagacgaatcagtgctccctcataagcaacggcccctccctagaactgggcgaaaacggcgccagcgggaaacagaatagcgagcagatcgatatgcaggacataaagtctgatttacggaaaccccttgtgaatggcatctgtgattttgacaagggggatggcagccatctcagcaagaatatcccaaaccacaagaccagtaatcacgtaggcaatggggagatttcccccatggagccccagggcacccttgatatcacgcagcaggacactgctaaaggagaccaactggaacggatctctaatggaccagttctaaccttaggcggttcctctgtgtcatctatccaggaggcgagcaacgccgccactcagcagttctccgggacagatctccttaacggccctttggcttcctccctgaactccgacgtcccccagcagagaccctctgttgtggtttcccctcacagcactaccagcgtgatacagggccaccagatcatcgcggtccctgacagcgggtctaaggtgagccacagcccggctctatccagtgatgtgcggagcactaatggaaccgccgagtgcaaaactgttaaacggcctgctgaagatacagaccgtgagaccgtggccggcatcccaaacaaggtgggggtgcggatcgtaacaatctctgatcccaacaatgcaggatgctcagctaccatggttgcagtgccagccggggcagaccctagcactgtcgccaaggttgcaattgagtcggctgtccagcagaagcagcagcatccccctacttacgtccagaatgtggtaccgcagaacacgccaatgcctccttcgcctgcggtccaggtacaggggcagccgaacagttcacagccgtcacctttttctggttcatcccagcccggggatcctatgaggaaaccggggcagaactttatgtgcctatggcagtcttgtaagaagtggttccagacccctagccaggtgttttaccacgcagcaacagagcacggcggaaaagatgtctatccaggtcagtgcctctgggaagggtgtgagcccttccagcgacagcggttctcttttatcacacatctgcaggataaacattgttcaaaggacgcacttctggcaggtctgaagcaggatgaaccaggtcaggccggttctcagaagtcctctacgaagcagccaactgtggggggcacctcgtcaacacctcgcgcccagaaagccatcgtgaaccatccgtcagcagccctaatggcactcaggcgggggagtcgtaaccttgtgttccgtgacttcaccgacgaaaaggagggcccgatcaccaaacatataagactcacggctgccctgatcctgaagaatattggcaagtacagtgagtgcgggcgccgcttactcaaacgacatgaaaataatttgtcagtactggcaatctccaacatggaagcgagcagcaccctggcaaaatgcctgtatgaactcaacttcacagtgcaatcaaaggagcaagagaaagactccgagatgctccagtag

SEQ ID NO: 244177 - DNA, 8642 bp, Artificial Sequence
  derived and/or modified sequence
gcgccgccgccgccgccgccgccgccgccgccgccgccaccgccggcccatgactgagccccgccgccgccggccgaggaatgggctccgggctctggtaggaagcgctgggagcggggggcgcttttaaaacaccgatctgggttttttaaaaacctcctttgaaaaaataatggcaaactcgacggggaaggcgcctccggacgagcggagaaagggactcgctttcctggacgagctgcggcagttccaccacagcagagggtcgccttttaaaaaaatccctgcggtgggtgggaaggagctggatcttcacggtctctacaccagagtcactactttaggcggattcgcgaaggtttctgagaagaatcagtggggagaaattgttgaagagttcaactttcccagaagttgttctaacgctgcctttgctttaaaacagtattacttgcgttacctagaaaagtacgagaaagttcatcattttggggaggatgatgatgaggtaccaccaggcaatccaaagccacagcttcctattggtgcaattccatcttcctacaattaccagcaacacagtgtgtcggattatctgcgtcaaagttatgggctgtccatggactttaattcgccaaatgattataataaattggtgctttcactgttatctggactcccaaatgaagtggactttgctattaacgtatgcactctcctatcaaatgaaagcaagcacgtcatgcaacttgaaaaagatcctaaaatcatcactttactacttgctaatgccggggtgtttgacgacactttaggatccttttccactgtatttggagaagaatggaaagagaagactgatagagacttcgttaagttttggaaagacatcgttgatgataatgaagttcgtgacctcatttctgacagaaacaagtctcatgaaggtacatcaggagaatggatttgggagtctttatttcatccacctcgaaagctgggcattaacgatattgaaggacagcgggtacttcagattgcagtgattttgagaaatctttcctttgaggagggcaatgttaagctcttggcagctaatcgtacctgtcttcgtttcctattactttctgcacatagtcattttatttctttaaggcaattaggccttgacacattaggaaatattgcagctgagcttttactggaccctgttgatttcaaaactactcatctgatgtttcatactgttacaaaatgtctaatgtcaagggatagatttttaaagatgagaggcatggaaattttgggaaatctttgcaaagcagaagataatggtgttttaatttgtgaatatgtggatcaggattcctacagagagatcatttgtcatctcactttacctgatgtgctgcttgtaatctcaacactcgaggtgctatacatgctcacggaaatgggagatgttgcttgcacaaaaattgcaaaagtagaaaagagcatagacatgttagtgtgtctggtttctatggatattcagatgtttggccctgatgcactagctgcggtaaaactcattgaacacccaagttccagtcatcaaatgttatctgaaattaggccacaagctatagagcaagtccaaacccagactcatgtagcatctgccccagcttccagagcagttgtagcgcagcatgttgctccacctccaggaatagtggaaatagatagtgagaagtttgcttgtcagtggctaaatgctcattttgaagtaaatccagattgttctgtttctcgagcagaaatgtattctgaatacctctcgacttgcagtaaattagctcgtggtggaatcctaacatcaactggattttataaatgtcttagaacggtctttccaaatcatacagtgaagagagtggaggattccagtagcaatgggcaggcacatattcatgtggtaggagtaaaacggagggctataccacttcccattcagatgtactatcagcagcaaccagtttctacttctgttgttcgtgttgattctgttcctgatgtatctcctgctccttcacctgcaggaatccctcatggatcacaaaccataggaaaccattttcagaggactcctgttgccaaccaatcttcaaatctgactgcaacacaaatgtcttttcctgtacaaggtgttcatactgtggcacaaactgtttcaagaattccacaaaatccttcacctcatacccaccagcaacaaaatgctccagtgactgtcattcaaagtaaagctccaattccttgtgaagttgttaaggctacagttatccagaattccataccccagacaggagttcctgttagtattgctgttggaggaggacctccacagagttctgttgttcagaatcatagtacagggccacaacctgttacagttgtgaattctcagacattgcttcaccatccatctgtaattccacagcagtctccattacacacagtggtaccaggacagatcccttcaggcactcctgttacagtaattcaacaagctgtcccacagagtcatatgtttggcagagtacagaacataccagcatgtacttctacagtttcacagggtcaacagttaatcaccacatcaccccaacctgtgcaaacttcatctcaacagacatcagctggtagccagtcacaagatactgttatcatagcacccccacagtatgtaacaacttctgcatccaatattgtctcagcaacttcagtacagaattttcaggtagctacaggacaaatggttactattgctggtgtcccaagtccacaagcctcaagggtagggtttcagaacattgcaccaaaacctctcccttctcagcaagtttcatctacagtggtacagcagcctattcaacaaccacagcagccaacccaacaaagcgtagtgattgtaagccagccagctcaacaaggtcaaacttatgcaccagccattcaccaaattgttcttgctaatccagcagctcttccagctggtcagacagttcagctaactggacaacctaacataactccatcttcttcaccatcacctgtcccagctactaataaccaagtccctactgccatgtcgtcgtcctctacccctcaatcacagggaccacctcctactgtcagtcaaatgttatctgtgaaaaggcagcaacagcagcaacattcaccagcacccccaccacagcaggtacaagtacaagttcagcagccccaacaagtacagatgcaagttcaacctcaacagtcgaatgcaggagttggtcagcctgcctctggtgagtcgagtctgattaaacagcttctgcttccgaaacgtggtccttcaacaccaggtggtaagcttattctcccagctccacagattcctccccctaataatgcaagagctcctagccctcaggtggtctatcaggtggccagtaaccaagccgcaggttttggagtgcaggggcaaactccagctcagcagctattggttgggcagcaaaatgttcagttggtcccaagtgcaatgccaccctcagggggagtacaaactgtgcccatttcgaacttacaaatattgccaggtccactgatctcaaatagcccagcaaccattttccaagggacttctggcaaccaggtaaccataacagttgtgccaaatacgagttttgcacctgcaactgtgagtcagggaaatgcaactcagctcattgctccagcaggaattaccatgagcggaacgcagacaggagttggacttccagtacaaacgcttccagccactcaagcatctcctgctggacaatcatcatgtactactgctactcccccattcaaaggtgataaaataatttgccaaaaggaggaggaagcaaaggaagcaacaggtttacatgttcatgaacgtaaaattgaagtcatggagaacccgtcctgccgacgaggagccacaaacaccagcaatggggatacaaaggaaaatgaaatgcatgtgggaagtcttttaaatgggagaaagtacagtgactcaagtctacctccttcaaactcagggaaaattcaaagtgagactaatcagtgctcactaatcagtaatgggccatcattggaattaggtgagaatggagcatctgggaaacagaactcagaacaaatagacatgcaagatatcaaaagtgatttgagaaaaccgctagttaatggaatctgtgattttgataaaggagatggttctcatttaagcaaaaacattccaaatcataaaacttccaatcatgtaggaaatggtgagatatctccaatggaaccacaagggactttagatatcactcagcaagatactgccaaaggtgatcaactagaaagaatttctaatggacctgtattaactttgggtggttcatctgtgagcagtatacaggaggcttcaaatgcggcaacacagcaatttagtggtactgatttgcttaatggacctctagcttcaagtttgaattcagatgtgcctcagcaacgcccaagtgtagttgtctcaccacattctacaacctctgttatacagggacatcaaatcatagcagttcccgactcaggatcaaaagtatcccattctcctgccctatcatctgacgttcggtctacaaatggcacagcagaatgcaaaactgtaaagaggccagcagaggatactgatagggaaacagtcgcaggaattccaaataaagtaggagttagaattgttacaatcagtgaccccaacaatgctggctgcagcgcaacaatggttgctgtgccagcaggagcagatccaagcactgtagctaaagtagcaatagaaagtgctgttcagcaaaagcaacagcatccaccaacatatgtacagaatgtggtcccgcagaacactcctatgccaccttcaccagctgtacaagtgcagggccagcctaacagttctcagccttctccattcagtggatccagtcagcctggagatccaatgagaaaacctggacagaacttcatgtgtctgtggcagtcttgtaaaaagtggtttcagacaccctcacaggttttctaccatgcagcaactgaacatggaggaaaagatgtatatccagggcagtgtctttgggaaggttgtgagccttttcagcgacagcggttttcttttattacccacttgcaggataagcactgttcaaaggatgccctacttgcaggattaaaacaagatgaaccaggacaagcaggaagtcagaagtcttctaccaagcagccaactgtagggggcacaagctcaactcctagagcacaaaaggccattgtgaatcatcccagtgctgcacttatggctctgaggagaggatcaagaaaccttgtctttcgagattttacagatgaaaaagagggaccaataactaaacacatccgactaacagctgccttaatattaaaaaatattggtaaatattcagaatgtggtcgcagattgttaaagagacatgaaaataacttatcagtgctagccattagtaacatggaagcttcctccacccttgccaaatgcctttatgaacttaattttacagttcagagtaaggaacaagaaaaagactcagaaatgctgcagtgaaaaataattccacttacacagtgggggactcaaagtcagccacatttcacatactgttactgaagaaagcaccaagtcttaatggaacaaagaccatagaatgaattattttatctcctcccatgatgctgagaggaagcttcgtattctgatctctgagtgaatccctttgttctctgtttaaaaaaatctaaaaagaaaaaggaaaaaaaaaaaagaactgctgtgggattgtcaaccagcttatctgcaggatgtttcagatctgataaatcctgatggaaactggtatgatcagaattcagtaccatccacattggaatatacatggaatattgtaaaacctacatgagcagatgaaatagaagcattaaatatttttatctatatccaaaaaggagcacatttttatatttacaaaaccgtttaagctggtttgaataatttaaaaaagtttcagcacacctatacccccgatctcagagggggccaccaatatctagctatggatcgtgtgttttgtttagaaatcagtagcttggttttcttacttgagccaatatattttcacttatttattatcataaaaatttaccagtctgaatagatcttgtaaatatttgtgaatagaatgaatacctttcatgccactgcagccactggaaatacattctgtggtgtcctagaagcattattggtaggttctaaagttttctagactttcctgtcaattgtaagtaattgtgatatattctatgcagtggatgaatgttctttaaatttgtgtaaatacttctgcaaaggtactgatgctgtaaagtcaaaacagttttgtggaactgtgatttttttttcttttttctttttttttttctttttttttttgtattatacaccttgtagaactcattttgctggctgaaagagtatggaataatatatctcatgtcattttttagaagaaaaactatttgaaggtattttttggttttccttaacatgtatccactgtaaacgtttgtcgtgtacaagctcagagcttggacagaattttttgtatttgtaaattggtttaaatacatggaattttatacaggttttctcctgtgttatatatgcattatgtgcaggtatgatattttcttcactactttttctatcttaatatagtgtggaattttattgtattattcttccattcttaatactgtaccacattcctgctcagaaactgctcacttccttaaattgtcttttttcccccagcgtgaaatgtatccatttataactgcctattgcctgttctattagcatccaaaaatgtggaaggcctcccaaccaccatttctgctgtgtccttaggatgtgcagtaaaaaatatagacctaacagtttatgttatagaatggctttatttactttggtgactgtttatagtttttaaataaaagactgaacattttcttgagtccttcatttctgagtatgcttaagacatcttaaaaatatagagagaattctaaattcagctgaaggcaaggtataacggtcacctacctatttgattatatgttgattgataacatattaaatagagaacaaataagagaggtcctttacatgacaaatttgcatgaaataagcagattaaccaagtatttatttttcatcttgttataatgcagagcaaatgtagagaacagcaaatgattgatgcagttaaagctcaatatgcctttttttactggatactgtacatttggctaaaagcttttattgtttgatgttgtgtttcttgactgtttattcagaatcacagtgtatccaaatcttcagcttgaatttggaggcagattcttagagtgaaaaagcctcagtttccatattaaaaatgttttaaatattttgattgaattagtaccaatgtaaaatctagtttcttcctgaaggaggatccctggcgctgtcctgccatgtctcaaaggaatgtttgagaaacttcatctaatattagttataaggttgtggaatttatgcttggcccaccttccaagactggcactgcccaacagacaccgctgaaatcatgtgggtatccctaggatggccttcagagccctcaaacttacaagcacctggtagttgacatcatatggggaattttctattcaccgtacttatccaaaaatctcttttaaaaagtaaatttgtgcaacaacgtttatttgaaagataatgtcttctcaaaatcagaaactgcagtggtaattaaattaatagaaaagagaacaaactgcaggtttagaaaaatggttttcatattcaccattcttccacctcattgaattgcatgctgtagttctagcttttctgctataatatgtaaatatgactgtagccttttaagcttcagtctcagcagagaatttcctaaatgcgtttgacctaatgaaactgatcatggcttcccacttaggtttttcttcttatagctttatagaactatataataatatggacttgctgtgtaatggaattaaagtgcttttgcacaataagttctgcaaaaccctctcattcatgaaaaggtgctccttgctagacagaaacttgctgatttacagtattgttatttttgtctaaagttctgtaaatacatgctttaatgttatctttgagaaatctatgtaaataatatagtctacaacatagagactgtataattctgtgttatatatgtgcctagtgctctgttggcactcaataaattttaagtaacaaaattgataatcatatagcgaaggcatatttttcttccaagctcaagtcaggattgtgactatatattaatgagactcagtaatccaacccacacctgagaactcgtctcattactttatagtcatgtcatgtatgtttttttaaccatgaaatgacaataaaatgatttttaaaatgagaa

SEQ ID NO: 244178 - DNA, 6142 bp, Artificial Sequence
  derived and/or modified sequence
atggcaaactcgacggggaaggcgcctccggacgagcggagaaagggactcgctttcctggacgagctgcggcagttccaccacagcagagggtcgccttttaaaaaaatccctgcggtgggtgggaaggagctggatcttcacggtctctacaccagagtcactactttaggcggattcgcgaaggtttctgagaagaatcagtggggagaaattgttgaagagttcaactttcccagaagttgttctaacgctgcctttgctttaaaacagtattacttgcgttacctagaaaagtacgagaaagttcatcattttggggaggatgatgatgaggtaccaccaggcaatccaaagccacagcttcctattggtgcaattccatcttcctacaattaccagcaacacagtgtgtcggattatctgcgtcaaagttatgggctgtccatggactttaattcgccaaatgattataataaattggtgctttcactgttatctggactcccaaatgaagtggactttgctattaacgtatgcactctcctatcaaatgaaagcaagcacgtcatgcaacttgaaaaagatcctaaaatcatcacctgtcccagctactaataaccaagtccctactgccatgtcgtcgtcctctacccctcaatcacagggaccacctcctactgtcagtcaaatgttatctgtgaaaaggcagcaacagcagcaacattcaccagcacccccaccacagcaggtacaagtacaagttcagcagccccaacaagtacagatgcaagttcaacctcaacagtcgaatgcaggagttggtcagcctgcctctggtgagtcgagtctgattaaacagcttctgcttccgaaacgtggtccttcaacaccaggtggtaagcttattctcccagctccacagattcctccccctaataatgcaagagctcctagccctcaggtggtctatcaggtggccagtaaccaagccgcaggttttggagtgcaggggcaaactccagctcagcagctattggttgggcagcaaaatgttcagttggtcccaagtgcaatgccaccctcagggggagtacaaactgtgcccatttcgaacttacaaatattgccaggtccactgatctcaaatagcccagcaaccattttccaagggacttctggcaaccaggtaaccataacagttgtgccaaatacgagttttgcacctgcaactgtgagtcagggaaatgcaactcagctcattgctccagcaggaattaccatgagcggaacgcagacaggagttggacttccagtacaaacgcttccagccactcaagcatctcctgctggacaatcatcatgtactactgctactcccccattcaaaggtgataaaataatttgccaaaaggaggaggaagcaaaggaagcaacaggtttacatgttcatgaacgtaaaattgaagtcatggagaacccgtcctgccgacgaggagccacaaacaccagcaatggggatacaaaggaaaatgaaatgcatgtgggaagtcttttaaatgggagaaagtacagtgactcaagtctacctccttcaaactcagggaaaattcaaagtgagactaatcagtgctcactaatcagtaatgggccatcattggaattaggtgagaatggagcatctgggaaacagaactcagaacaaatagacatgcaagatatcaaaagtgatttgagaaaaccgctagttaatggaatctgtgattttgataaaggagatggttctcatttaagcaaaaacattccaaatcataaaacttccaatcatgtaggaaatggtgagatatctccaatggaaccacaagggactttagatatcactcagcaagatactgccaaaggtgatcaactagaaagaatttctaatggacctgtattaactttgggtggttcatctgtgagcagtatacaggaggcttcaaatgcggcaacacagcaatttagtggtactgatttgcttaatggacctctagcttcaagtttgaattcagatgtgcctcagcaacgcccaagtgtagttgtctcaccacattctacaacctctgttatacagggacatcaaatcatagcagttcccgactcaggatcaaaagtatcccattctcctgccctatcatctgacgttcggtctacaaatggcacagcagaatgcaaaactgtaaagaggccagcagaggatactgatagggaaacagtcgcaggaattccaaataaagtaggagttagaattgttacaatcagtgaccccaacaatgctggctgcagcgcaacaatggttgctgtgccagcaggagcagatccaagcactgtagctaaagtagcaatagaaagtgctgttcagcaaaagcaacagcatccaccaacatatgtacagaatgtggtcccgcagaacactcctatgccaccttcaccagctgtacaagtgcagggccagcctaacagttctcagccttctccattcagtggatccagtcagcctggagatccaatgagaaaacctggacagaacttcatgtgtctgtggcagtcttgtaaaaagtggtttcagacaccctcacaggttttctaccatgcagcaactgaacatggaggaaaagatgtatatccagggcagtgtctttgggaaggttgtgagccttttcagcgacagcggttttcttttattacccacttgcaggataagcactgttcaaaggatgccctacttgcaggattaaaacaagatgaaccaggacaagcaggaagtcagaagtcttctaccaagcagccaactgtagggggcacaagctcaactcctagagcacaaaaggccattgtgaatcatcccagtgctgcacttatggctctgaggagaggatcaagaaaccttgtctttcgagattttacagatgaaaaagagggaccaataactaaacacatccgactaacagctgccttaatattaaaaaatattggtaaatattcagaatgtggtcgcagattgttaaagagacatgaaaataacttatcagtgctagccattagtaacatggaagcttcctccacccttgccaaatgcctttatgaacttaattttacagttcagagtaaggaacaagaaaaagactcagaaatgctgcagtgaaaaataattccacttacacagtgggggactcaaagtcagccacatttcacatactgttactgaagaaagcaccaagtcttaatggaacaaagaccatagaatgaattattttatctcctcccatgatgctgagaggaagcttcgtattctgatctctgagtgaatccctttgttctctgtttaaaaaaatctaaaaagaaaaaggaaaaaaaaaaaagaactgctgtgggattgtcaaccagcttatctgcaggatgtttcagatctgataaatcctgatggaaactggtatgatcagaattcagtaccatccacattggaatatacatggaatattgtaaaacctacatgagcagatgaaatagaagcattaaatatttttatctatatccaaaaaggagcacatttttatatttacaaaaccgtttaagctggtttgaataatttaaaaaagtttcagcacacctatacccccgatctcagagggggccaccaatatctagctatggatcgtgtgttttgtttagaaatcagtagcttggttttcttacttgagccaatatattttcacttatttattatcataaaaatttaccagtctgaatagatcttgtaaatatttgtgaatagaatgaatacctttcatgccactgcagccactggaaatacattctgtggtgtcctagaagcattattggtaggttctaaagttttctagactttcctgtcaattgtaagtaattgtgatatattctatgcagtggatgaatgttctttaaatttgtgtaaatacttctgcaaaggtactgatgctgtaaagtcaaaacagttttgtggaactgtgatttttttttcttttttctttttttttttctttttttttttgtattatacaccttgtagaactcattttgctggctgaaagagtatggaataatatatctcatgtcattttttagaagaaaaactatttgaaggtattttttggttttccttaacatgtatccactgtaaacgtttgtcgtgtacaagctcagagcttggacagaattttttgtatttgtaaattggtttaaatacatggaattttatacaggttttctcctgtgttatatatgcattatgtgcaggtatgatattttcttcactactttttctatcttaatatagtgtggaattttattgtattattcttccattcttaatactgtaccacattcctgctcagaaactgctcacttccttaaattgtcttttttcccccagcgtgaaatgtatccatttataactgcctattgcctgttctattagcatccaaaaatgtggaaggcctcccaaccaccatttctgctgtgtccttaggatgtgcagtaaaaaatatagacctaacagtttatgttatagaatggctttatttactttggtgactgtttatagtttttaaataaaagactgaacattttcttgagtccttcatttctgagtatgcttaagacatcttaaaaatatagagagaattctaaattcagctgaaggcaaggtataacggtcacctacctatttgattatatgttgattgataacatattaaatagagaacaaataagagaggtcctttacatgacaaatttgcatgaaataagcagattaaccaagtatttatttttcatcttgttataatgcagagcaaatgtagagaacagcaaatgattgatgcagttaaagctcaatatgcctttttttactggatactgtacatttggctaaaagcttttattgtttgatgttgtgtttcttgactgtttattcagaatcacagtgtatccaaatcttcagcttgaatttggaggcagattcttagagtgaaaaagcctcagtttccatattaaaaatgttttaaatattttgattgaattagtaccaatgtaaaatctagtttcttcctgaaggaggatccctggcgctgtcctgccatgtctcaaaggaatgtttgagaaacttcatctaatattagttataaggttgtggaatttatgcttggcccaccttccaagactggcactgcccaacagacaccgctgaaatcatgtgggtatccctaggatggccttcagagccctcaaacttacaagcacctggtagttgacatcatatggggaattttctattcaccgtacttatccaaaaatctcttttaaaaagtaaatttgtgcaacaacgtttatttgaaagataatgtcttctcaaaatcagaaactgcagtggtaattaaattaatagaaaagagaacaaactgcaggtttagaaaaatggttttcatattcaccattcttccacctcattgaattgcatgctgtagttctagcttttctgctataatatgtaaatatgactgtagccttttaagcttcagtctcagcagagaatttcctaaatgcgtttgacctaatgaaactgatcatggcttcccacttaggtttttcttcttatagctttatagaactatataataatatggacttgctgtgtaatggaattaaagtgcttttgcacaataagttctgcaaaaccctctcattcatgaaaaggtgctccttgctagacagaaacttgctgatttacagtattgttatttttgtctaaagttctgtaaatacatgctttaatgttatctttgagaaatctatgtaaataatatagtctacaacatagagactgtataattctgtgttatatatgtgcctagtgctctgttggcactcaataaattttaagtaacaaaattgataatcatatagcgaaggcatatttttcttccaagctcaagtcaggattgtgactatatattaatgagactcagtaatccaacccacacctgagaactcgtctcattactttatagtcatgtcatgtatgtttttttaaccatgaaatgacaataaaatgatttttaaaatg

SEQ ID NO: 244179 - DNA, 7316 bp, Artificial Sequence
  derived and/or modified sequence
ggatagatttttaaagatgagaggcatggaaattttgggaaatctttgcaaagcagaagataatggtgttttaatttgtgaatatgtggatcaggattcctacagagagatcatttgtcatctcactttacctgatgtgctgcttgtaatctcaacactcgaggtgctatacatgctcacggaaatgggagatgttgcttgcacaaaaattgcaaaagtagaaaagagcatagctgcggtaaaactcattgaacacccaagttccagtcatcaaatgttatctgaaattaggccacaagctatagagcaagtccaaacccagactcatgtagcatctgccccagcttccagagcagttgtagcgcagcatgttgctccacctccaggaatagtggaaatagatagtgagaagtttgcttgtcagtggctaaatgctcattttgaagtaaatccagattgttctgtttctcgagcagaaatgtattctgaatacctctcgacttgcagtaaattagctcgtggtggaatcctaacatcaactggattttataaatgtcttagaacggtctttccaaatcatacagtgaagagagtggaggattccagtagcaatgggcaggcacatattcatgtggtaggagtaaaacggagggctataccacttcccattcagatgtactatcagcagcaaccagtttctacttctgttgttcgtgttgattctgttcctgatgtatctcctgctccttcacctgcaggaatccctcatggatcacaaaccataggaaaccattttcagaggactcctgttgccaaccaatcttcaaatctgactgcaacacaaatgtcttttcctgtacaaggtgttcatactgtggcacaaactgtttcaagaattccacaaaatccttcacctcatacccaccagcaacaaaatgctccagtgactgtcattcaaagtaaagctccaattccttgtgaagttgttaaggctacagttatccagaattccataccccagacaggagttcctgttagtattgctgttggaggaggacctccacagagttctgttgttcagaatcatagtacagggccacaacctgttacagttgtgaattctcagacattgcttcaccatccatctgtaattccacagcagtctccattacacacagtggtaccaggacagatcccttcaggcactcctgttacagtaattcaacaagctgtcccacagagtcatatgtttggcagagtacagaacataccagcatgtacttctacagtttcacagggtcaacagttaatcaccacatcaccccaacctgtgcaaacttcatctcaacagacatcagctggtagccagtcacaagatactgttatcatagcacccccacagtatgtaacaacttctgcatccaatattgtctcagcaacttcagtacagaattttcaggtagctacaggacaaatggttactattgctggtgtcccaagtccacaagcctcaagggtagggtttcagaacattgcaccaaaacctctcccttctcagcaagtttcatctacagtggtacagcagcctattcaacaaccacagcagccaacccaacaaagcgtagtgattgtaagccagccagctcaacaaggtcaaacttatgcaccagccattcaccaaattgttcttgctaatccagcagctcttccagctggtcagacagttcagctaactggacaacctaacataactccatcttcttcaccatcacctgtcccagctactaataaccaagtccctactgccatgtcgtcgtcctctacccctcaatcacagggaccacctcctactgtcagtcaaatgttatctgtgaaaaggcagcaacagcagcaacattcaccagcacccccaccacagcaggtacaagtacaagttcagcagccccaacaagtacagatgcaagttcaacctcaacagtcgaatgcaggagttggtcagcctgcctctggtgagtcgagtctgattaaacagcttctgcttccgaaacgtggtccttcaacaccaggtggtaagcttattctcccagctccacagattcctccccctaataatgcaagagctcctagccctcaggtggtctatcaggtggccagtaaccaagccgcaggttttggagtgcaggggcaaactccagctcagcagctattggttgggcagcaaaatgttcagttggtcccaagtgcaatgccaccctcagggggagtacaaactgtgcccatttcgaacttacaaatattgccaggtccactgatctcaaatagcccagcaaccattttccaagggacttctggcaaccaggtaaccataacagttgtgccaaatacgagttttgcacctgcaactgtgagtcagggaaatgcaactcagctcattgctccagcaggaattaccatgagcggaacgcagacaggagttggacttccagtacaaacgcttccagccactcaagcatctcctgctggacaatcatcatgtactactgctactcccccattcaaaggtgataaaataatttgccaaaaggaggaggaagcaaaggaagcaacaggtttacatgttcatgaacgtaaaattgaagtcatggagaacccgtcctgccgacgaggagccacaaacaccagcaatggggatacaaaggaaaatgaaatgcatgtgggaagtcttttaaatgggagaaagtacagtgactcaagtctacctccttcaaactcagggaaaattcaaagtgagactaatcagtgctcactaatcagtaatgggccatcattggaattaggtgagaatggagcatctgggaaacagaactcagaacaaatagacatgcaagatatcaaaagtgatttgagaaaaccgctagttaatggaatctgtgattttgataaaggagatggttctcatttaagcaaaaacattccaaatcataaaacttccaatcatgtaggaaatggtgagatatctccaatggaaccacaagggactttagatatcactcagcaagatactgccaaaggtgatcaactagaaagaatttctaatggacctgtattaactttgggtggttcatctgtgagcagtatacaggaggcttcaaatgcggcaacacagcaatttagtggtactgatttgcttaatggacctctagcttcaagtttgaattcagatgtgcctcagcaacgcccaagtgtagttgtctcaccacattctacaacctctgttatacagggacatcaaatcatagcagttcccgactcaggatcaaaagtatcccattctcctgccctatcatctgacgttcggtctacaaatggcacagcagaatgcaaaactgtaaagaggccagcagaggatactgatagggaaacagtcgcaggaattccaaataaagtaggagttagaattgttacaatcagtgaccccaacaatgctggctgcagcgcaacaatggttgctgtgccagcaggagcagatccaagcactgtagctaaagtagcaatagaaagtgctgttcagcaaaagcaacagcatccaccaacatatgtacagaatgtggtcccgcagaacactcctatgccaccttcaccagctgtacaagtgcagggccagcctaacagttctcagccttctccattcagtggatccagtcagcctggagatccaatgagaaaacctggacagaacttcatgtgtctgtggcagtcttgtaaaaagtggtttcagacaccctcacaggttttctaccatgcagcaactgaacatggaggaaaagatgtatatccagggcagtgtctttgggaaggttgtgagccttttcagcgacagcggttttcttttattacccacttgcaggataagcactgttcaaaggatgccctacttgcaggattaaaacaagatgaaccaggacaagcaggaagtcagaagtcttctaccaagcagccaactgtagggggcacaagctcaactcctagagcacaaaaggccattgtgaatcatcccagtgctgcacttatggctctgaggagaggatcaagaaaccttgtctttcgagattttacagatgaaaaagagggaccaataactaaacacatccgactaacagctgccttaatattaaaaaatattggtaaatattcagaatgtggtcgcagattgttaaagagacatgaaaataacttatcagtgctagccattagtaacatggaagcttcctccacccttgccaaatgcctttatgaacttaattttacagttcagagtaaggaacaagaaaaagactcagaaatgctgcagtgaaaaataattccacttacacagtgggggactcaaagtcagccacatttcacatactgttactgaagaaagcaccaagtcttaatggaacaaagaccatagaatgaattattttatctcctcccatgatgctgagaggaagcttcgtattctgatctctgagtgaatccctttgttctctgtttaaaaaaatctaaaaagaaaaaggaaaaaaaaaaaagaactgctgtgggattgtcaaccagcttatctgcaggatgtttcagatctgataaatcctgatggaaactggtatgatcagaattcagtaccatccacattggaatatacatggaatattgtaaaacctacatgagcagatgaaatagaagcattaaatatttttatctatatccaaaaaggagcacatttttatatttacaaaaccgtttaagctggtttgaataatttaaaaaagtttcagcacacctatacccccgatctcagagggggccaccaatatctagctatggatcgtgtgttttgtttagaaatcagtagcttggttttcttacttgagccaatatattttcacttatttattatcataaaaatttaccagtctgaatagatcttgtaaatatttgtgaatagaatgaatacctttcatgccactgcagccactggaaatacattctgtggtgtcctagaagcattattggtaggttctaaagttttctagactttcctgtcaattgtaagtaattgtgatatattctatgcagtggatgaatgttctttaaatttgtgtaaatacttctgcaaaggtactgatgctgtaaagtcaaaacagttttgtggaactgtgatttttttttcttttttctttttttttttctttttttttttgtattatacaccttgtagaactcattttgctggctgaaagagtatggaataatatatctcatgtcattttttagaagaaaaactatttgaaggtattttttggttttccttaacatgtatccactgtaaacgtttgtcgtgtacaagctcagagcttggacagaattttttgtatttgtaaattggtttaaatacatggaattttatacaggttttctcctgtgttatatatgcattatgtgcaggtatgatattttcttcactactttttctatcttaatatagtgtggaattttattgtattattcttccattcttaatactgtaccacattcctgctcagaaactgctcacttccttaaattgtcttttttcccccagcgtgaaatgtatccatttataactgcctattgcctgttctattagcatccaaaaatgtggaaggcctcccaaccaccatttctgctgtgtccttaggatgtgcagtaaaaaatatagacctaacagtttatgttatagaatggctttatttactttggtgactgtttatagtttttaaataaaagactgaacattttcttgagtccttcatttctgagtatgcttaagacatcttaaaaatatagagagaattctaaattcagctgaaggcaaggtataacggtcacctacctatttgattatatgttgattgataacatattaaatagagaacaaataagagaggtcctttacatgacaaatttgcatgaaataagcagattaaccaagtatttatttttcatcttgttataatgcagagcaaatgtagagaacagcaaatgattgatgcagttaaagctcaatatgcctttttttactggatactgtacatttggctaaaagcttttattgtttgatgttgtgtttcttgactgtttattcagaatcacagtgtatccaaatcttcagcttgaatttggaggcagattcttagagtgaaaaagcctcagtttccatattaaaaatgttttaaatattttgattgaattagtaccaatgtaaaatctagtttcttcctgaaggaggatccctggcgctgtcctgccatgtctcaaaggaatgtttgagaaacttcatctaatattagttataaggttgtggaatttatgcttggcccaccttccaagactggcactgcccaacagacaccgctgaaatcatgtgggtatccctaggatggccttcagagccctcaaacttacaagcacctggtagttgacatcatatggggaattttctattcaccgtacttatccaaaaatctcttttaaaaagtaaatttgtgcaacaacgtttatttgaaagataatgtcttctcaaaatcagaaactgcagtggtaattaaattaatagaaaagagaacaaactgcaggtttagaaaaatggttttcatattcaccattcttccacctcattgaattgcatgctgtagttctagcttttctgctataatatgtaaatatgactgtagccttttaagcttcagtctcagcagagaatttcctaaatgcgtttgacctaatgaaactgatcatggcttcccacttaggtttttcttcttatagctttatagaactatataataatatggacttgctgtgtaatggaattaaagtgcttttgcacaataagttctgcaaaaccctctcattcatgaaaaggtgctccttgctagacagaaacttgctgatttacagtattgttatttttgtctaaagttctgtaaatacatgctttaatgttatctttgagaaatctatgtaaataatatagtctacaacatagagactgtataattctgtgttatatatgtgcctagtgctctgttggcactcaataaattttaagtaacaaaattgataatcatatagcgaaggcatatttttcttccaagctcaagtcaggattgtgactatatattaatgagactcagtaatccaacccacacctgagaactcgtctcattactttatagtcatgtcatgtatgtttttttaaccatgaaatgacaataaaatgatttttaaaatgagaa

SEQ ID NO: 244180 - DNA, 3494 bp, Artificial Sequence
  derived and/or modified sequence
ggcccatgactgagccccgccgccgccggccgaggaatgggctccgggctctggtaggaagcgctgggagcggggggcgcttttaaaacaccgatctgggttttttaaaaacctcctttgaaaaaataatggcaaactcgacggggaaggcgcctccggacgagcggagaaagggactcgctttcctggacgagctgcggcagttccaccacagcagagggtcgccttttaaaaaaatccctgcggtgggtgggaaggagctggatcttcacggtctctacaccagagtcactactttaggcggattcgcgaaggtttctgagaagaatcagtggggagaaattgttgaagagttcaactttcccagaagttgttctaacgctgcctttgctttaaaacagtattacttgcgttacctagaaaagtacgagaaagttcatcattttggggaggatgatgatgaggtaccaccaggcaatccaaagccacagcttcctattggtgcaattccatcttcctacaattaccagcaacacagtgtgtcggattatctgcgtcaaagttatgggctgtccatggactttaattcgccaaatgattataataaattggtgctttcactgttatctggactcccaaatgaagtggactttgctattaacgtatgcactctcctatcaaatgaaagcaagcacgtcatgcaacttgaaaaagatcctaaaatcatcacctgtcccagctactaataaccaagtccctactgccatgtcgtcgtcctctacccctcaatcacagggaccacctcctactgtcagtcaaatgttatctgtgaaaaggcagcaacagcagcaacattcaccagcacccccaccacagcaggtacaagtacaagttcagcagccccaacaagtacagatgcaagttcaacctcaacagtcgaatgcaggagttggtcagcctgcctctggtgagtcgagtctgattaaacagcttctgcttccgaaacgtggtccttcaacaccaggtggtaagcttattctcccagctccacagattcctccccctaataatgcaagagctcctagccctcaggtggtctatcaggtggccagtaaccaagccgcaggttttggagtgcaggggcaaactccagctcagcagctattggttgggcagcaaaatgttcagttggtcccaagtgcaatgccaccctcagggggagtacaaactgtgcccatttcgaacttacaaatattgccaggtccactgatctcaaatagcccagcaaccattttccaagggacttctggcaaccaggtaaccataacagttgtgccaaatacgagttttgcacctgcaactgtgagtcagggaaatgcaactcagctcattgctccagcaggaattaccatgagcggaacgcagacaggagttggacttccagtacaaacgcttccagccactcaagcatctcctgctggacaatcatcatgtactactgctactcccccattcaaaggtgataaaataatttgccaaaaggaggaggaagcaaaggaagcaacaggtttacatgttcatgaacgtaaaattgaagtcatggagaacccgtcctgccgacgaggagccacaaacaccagcaatggggatacaaaggaaaatgaaatgcatgtgggaagtcttttaaatgggagaaagtacagtgactcaagtctacctccttcaaactcagggaaaattcaaagtgagactaatcagtgctcactaatcagtaatgggccatcattggaattaggtgagaatggagcatctgggaaacagaactcagaacaaatagacatgcaagatatcaaaagtgatttgagaaaaccgctagttaatggaatctgtgattttgataaaggagatggttctcatttaagcaaaaacattccaaatcataaaacttccaatcatgtaggaaatggtgagatatctccaatggaaccacaagggactttagatatcactcagcaagatactgccaaaggtgatcaactagaaagaatttctaatggacctgtattaactttgggtggttcatctgtgagcagtatacaggaggcttcaaatgcggcaacacagcaatttagtggtactgatttgcttaatggacctctagcttcaagtttgaattcagatgtgcctcagcaacgcccaagtgtagttgtctcaccacattctacaacctctgttatacagggacatcaaatcatagcagttcccgactcaggatcaaaagtatcccattctcctgccctatcatctgacgttcggtctacaaatggcacagcagaatgcaaaactgtaaagaggccagcagaggatactgatagggaaacagtcgcaggaattccaaataaagtaggagttagaattgttacaatcagtgaccccaacaatgctggctgcagcgcaacaatggttgctgtgccagcaggagcagatccaagcactgtagctaaagtagcaatagaaagtgctgttcagcaaaagcaacagcatccaccaacatatgtacagaatgtggtcccgcagaacactcctatgccaccttcaccagctgtacaagtgcagggccagcctaacagttctcagccttctccattcagtggatccagtcagcctggagatccaatgagaaaacctggacagaacttcatgtgtctgtggcagtcttgtaaaaagtggtttcagacaccctcacaggttttctaccatgcagcaactgaacatggaggaaaagatgtatatccagggcagtgtctttgggaaggttgtgagccttttcagcgacagcggttttcttttattacccacttgcaggataagcactgttcaaaggatgccctacttgcaggattaaaacaagatgaaccaggacaagcaggaagtcagaagtcttctaccaagcagccaactgtagggggcacaagctcaactcctagagcacaaaaggccattgtgaatcatcccagtgctgcacttatggctctgaggagaggatcaagaaaccttgtctttcgagattttacagatgaaaaagagggaccaataactaaacacatccgactaacagctgccttaatattaaaaaatattggtaaatattcagaatgtggtcgcagattgttaaagagacatgaaaataacttatcagtgctagccattagtaacatggaagcttcctccacccttgccaaatgcctttatgaacttaattttacagttcagagtaaggaacaagaaaaagactcagaaatgctgcagtgaaaaataattccacttacacagtgggggactcaaagtcagccacatttcacatactgttactgaagaaagcaccaagtcttaatggaacaaagaccatagaatgaattattttatctcctcccatgatgctgagaggaagcttcgtattctgatctctgagtgaatccctttgttctctgttt

SEQ ID NO: 244181 - DNA, 5507 bp, Artificial Sequence
  derived and/or modified sequence
atggccaattctacaggcaaggctccccctgacgagaggaggaaaggattggcgttcctggatgagttacgccagtttcaccattcacgcggatcgccattcaaaaagatacctgctgtggggggtaaggagctggacctacatggattgtatacccgagttactacactcggcggattcgcaaaggtctctgagaagaatcagtggggcgaaattgttgaggaattcaatttccctcgctcctgctctaacgccgcatttgcgctcaaacagtactacctccggtatttagaaaaatatgagaaagttcaccatttcggcgaagacgacgatgaggtgccacctggcaaccctaagcctcagttgcctattggcgcaatcccaagttcctataactaccaacagcatagtgtgtctgactacttgcggcaaagttacggtttgtccatggactttaacagtccgaacgattacaacaagcttgttctatcattactctccggcctgccgaacgaggtagactttgcaatcaatgtgtgtacattgctcagcaacgaaagcaaacacgttatgcaactcgaaaaagaccccaagattattaccctcctgctggcaaacgccggagtcttcgacgacacgttaggatccttttcaacagtgtttggggaggaatggaaagaaaaaaccgatcgagatttcgtgaagttttggaaagatattgtcgacgacaacgaagttcgcgacctaattagcgatcggaacaagtctcacgaaggcacgtccggggaatggatttgggagtctttattccatccgccaaggaagcttgggattaacgatatagagggccagagggtgttacagatcgccgtgattctcaggaatctgtcattcgaagagggcaacgtaaaactgctcgccgcaaacaggacttgcctgcggtttctactgctcagtgcacacagccacttcatcagccttcgtcagttaggcctggacacccttggtaatatagcggctgagcttctgcttgatccagtggattttaagacaacacacctgatgttccacaccgtcaccaagtgcttgatgtcgcgagatcgtttcctgaaaatgagaggtatggaaatcctgggcaatctgtgcaaagccgaagacaacggagtgctgatctgtgaatacgttgaccaggactcttatagagagattatctgccacctgacgctgcctgatgtcctgctggtgatcagtactttggaggtgctctacatgcttacagaaatgggcgatgtcgcctgtaccaagatcgccaaagtggagaaatccatcgacatgttggtatgtctggtgtccatggatatccagatgtttggtccagacgcccttgctgctgtgaagctaatcgagcacccctctagctcccaccagatgctgagcgaaatacgaccccaagcaattgagcaggtgcagacacagactcatgtagctagcgctccagcttctcgtgcagtggtcgcccaacatgtggctccaccacccggtatcgttgagattgatagtgagaagtttgcctgtcagtggctcaacgcccattttgaggtcaaccccgactgtagtgtgtctagggccgaaatgtattccgagtacctttcaacttgctccaagctggcacgtggcggtatcctcacatccacgggattttacaagtgtctccggactgtgtttcccaaccacaccgtgaaaagagtcgaggattcaagctccaacggacaggcacacatccacgtcgtgggagtgaaacgcagggccatccccctgcccattcagatgtactatcaacagcagcccgtgagtacctccgtggtgcgggtggattcagtgcccgatgtctccccagcgcctagccctgctggcatcccgcatggatcacagaccataggaaatcacttccagcgtacaccagtggccaaccagagctcaaatctgactgcaacccagatgtcattcccagtgcaaggggtccatacggtggcccagacagtatctaggatccctcaaaatccctctccccatactcaccagcagcagaatgcaccagtgaccgtcatacagtccaaggcccctatcccatgtgaggtggtaaaggctacagtgatacagaactctatcccgcaaactggagtacctgtcagtattgctgtcggcggaggacctccccagtccagtgtcgttcagaatcactccacgggccctcagccagtcactgtagttaatagtcagacattgttgcatcatccttccgtgatcccacaacagagcccactgcacaccgtcgtgcccggtcagattcccagcggtactcccgtgaccgtaatccagcaggctgtgccccagtcccacatgttcggaagagtgcaaaatatccctgcttgtacatcgactgtgtcgcagggccagcagctgattaccacctccccccagcccgtgcagacgagcagccagcagacgtccgccggatcgcagagccaggatacagtgattattgcgcctcctcagtacgtaacaactagcgcaagcaatattgtgtcagctacatccgtccagaacttccaggtggcaaccggtcagatggtcacaattgctggggtgccctctcctcaggctagccgcgtcggatttcagaatatagccccaaagcctctgccatcccaacaggtgagctcgaccgtcgtgcagcagcctattcagcagcctcagcaacccacacagcaaagcgtggtgatcgtcagtcaacctgcgcagcaggggcagacatatgcgcctgcaattcaccagatagtgctcgctaatcccgcagctctcccggctgggcagacagtgcagctgaccgggcagcctaatatcactccgtcctccagtccttcacctgtaccggcaaccaataaccaggtgcctaccgcgatgtcctcatctagcaccccacaaagccagggcccaccaccaacagtaagccagatgctaagtgtcaagcgccagcagcaacaacagcactcacccgctccgcctccgcaacaagtacaggtacaggtacaacaaccacaacaagtgcaaatgcaagttcagcctcagcagtcgaacgctggcgttggacagccggcatccggcgagtccagtcttatcaaacaattactgctgcccaagcgcggaccgtccacaccaggaggaaaactaatactgcccgctcctcaaattcctccaccaaacaatgcacgagccccttcccctcaggtggtttatcaggtggccagtaatcaggctgccggattcggagtccagggccagacacccgctcagcagctgttagtcggtcagcagaacgttcaactggtaccgagcgcaatgcccccatccgggggagtacagacggttccgatttcaaacttgcagattctgcccggtcctctcatctctaactcacccgctacaatcttccagggaacatccggcaatcaggttactattactgtagtaccaaacacgtccttcgcaccagccacggtctctcagggaaacgcaacacaactcatcgcgccagcaggtataacaatgtcaggtacgcagacgggagttggcctgccagtgcagaccttacccgctacccaggcttccccagccggacagagttcgtgcactacagccacgcctccttttaaaggcgacaagataatttgccagaaagaagaagaggcaaaggaagccacagggttgcacgtacatgaaaggaagatagaagtgatggagaatccatcctgcaggagaggtgcaaccaacacctcaaacggtgatacaaaagagaatgaaatgcacgtcggcagcctgctgaatgggagaaagtactctgacagtagcctgcctccatcaaattcaggaaagattcaaagtgaaacgaatcagtgtagcctgatcagcaatggtcctagcctcgagctcggggagaacggagcatctggcaagcagaatagcgaacagattgatatgcaggatatcaagagtgacctgcggaagcccctggtgaatggcatttgcgatttcgacaagggtgacggctcacacctctccaagaatatcccaaaccataagacaagcaaccatgtggggaatggtgaaatttcacccatggagccacaggggaccctggatattacacagcaggacactgctaagggtgatcagcttgagcggattagcaatggaccggtgttgacactcgggggttcatcagtcagctcaatccaggaggccagcaatgccgcaacacagcagttttctggcactgatctgctgaatgggccactagccagtagcttgaacagcgacgtgcctcagcaacgaccgagtgtcgtggtgagccctcattcgactactagcgtgatccaagggcaccagatcattgccgtgccagactccggctccaaagtttcacacagccctgccctgtccagcgatgtgagatcgacgaatgggaccgctgaatgtaaaacggttaaaagaccagcggaggatacagatcgagagacggtcgctgggatccccaataaggtgggagtgagaatagtgacgatctccgatcccaacaatgcaggttgcagtgcgacgatggtcgccgtgcctgctggggctgatcccagtaccgtggcaaaggtggccattgaaagcgcggtgcaacaaaagcagcagcacccgccaacctacgtccagaatgtggtcccccaaaatacacctatgcctccctcgccagcagtgcaggtgcaggggcaacccaactcttctcagccaagcccctttagcggctcatcacagcccggagaccccatgcgcaagccaggccagaactttatgtgtctctggcaaagttgtaaaaagtggttccagacaccctcccaggttttctaccatgccgcaactgagcacggcggtaaggatgtgtacccgggacagtgtctatgggaaggctgcgaaccttttcagaggcaacggttcagttttatcacgcacctgcaggataagcactgtagtaaagatgcccttctggcagggctcaaacaggatgaacctggccaggctgggtctcaaaaatccagcactaaacagccaaccgtcggaggaacatcctccacgcctagagcgcagaaggccatcgtcaatcacccgagcgcagcccttatggcacttaggcgtggtagtcgtaatctcgtgttccgggactttacagacgagaaagagggcccaattaccaagcacataagactaacggcggcactcatcctgaaaaacataggaaagtattctgagtgcggcagacggctcctgaagcggcacgagaacaatctgtcggtccttgccataagtaatatggaggcttcttccacattggcaaaatgcctatacgaacttaactttacagttcagtctaaggagcaggagaaggactccgaaatgttacaata

SEQ ID NO: 244182 - DNA, 2859 bp, Artificial Sequence
  derived and/or modified sequence
atgatgatgcgctaccaccaagctattcagagtcactcattcctgctcgtgcagttccaccttccgaccatcacatcgaacaccgtttgcagaatcatctgtgtcaaggtcatgggctgcccgtggacattaatcagacaaatgatcataattaattggtgttttcattgttatttggattcgcagatgaagtggacccttttgctcacttacgctctcagctaccagatgaaggcctctacctcttgcaatctgaaaaagatacttaagagcagtccagtgcctgccaccaacaatcaggttcctacagctatgtcctcaagttctaccccccaatctcagggtcctcccccaaccgtttctcagatgttatccgttaagcgacaacagcagcaacagcattcccctgcccctccgccacagcaggtgcaggtgcaagtgcaacaaccgcagcaggtgcagatgcaggtccagccccagcagtcaaacgccggagtaggtcagcccgcttcgggagaatcgtcactcatcaagcaacttctactgcctaagcgcggaccctcaacccctggcggaaagctcattcttccagctccgcagatccctcccccaaataatgcacgagctcccagcccgcaggtcgtgtaccaagttgcttccaaccaagcggcagggtttggcgtccagggccaaacgcccgctcagcaattgctcgtaggccagcagaatgttcagctggtcccatccgctatgcccccttctggcggtgtgcagaccgtgcccatttctaatctacaaatactcccgggtcctttgataagcaattcccccgctaccattttccaggggacctcaggcaatcaagtcactattacagtcgtccccaacacctcctttgcgcctgccacggtctcacagggaaacgctactcagctgatagccccagccggaattacaatgtctggcacccagaccggcgtcggactgcccgttcagactcttccagccacccaggcgtcccctgctggtcaaagctcttgcaccacagctaccccaccatttaaaggtgacaaaattatttgtcaaaaagaagaagaggccaaggaggcgacaggacttcatgttcacgaaaggaagattgaggttatggaaaatccttcctgccggagaggggctactaataccagtaatggggacacaaaggaaaacgagatgcatgttggttctctgctcaatggtcgcaagtattctgattcttctcttcccccaagcaactccggcaagatccagagcgagaccaatcaatgctctctgattagcaatggtccgagcctggaactgggggaaaacggagcctctggaaaacagaactctgagcagattgatatgcaggatattaagagtgatctaagaaaaccgctggtgaacggtatttgcgattttgataaaggtgacggcagtcatctgagtaaaaacatacctaaccacaaaacttctaaccacgtgggaaacggtgagatcagtcctatggaaccgcaaggaactctggacatcacacaacaagacacggccaagggcgaccagctcgaaagaatcagtaatggccctgtgttgacattggggggatcctctgtatccagcatacaggaagcctccaatgccgctacacagcagttctccggcaccgacctcctcaacggtccactggcatcatccctgaatagcgatgtgccacagcagcgccctagcgtagtcgtttcgccgcacagcaccacatcagtgatccagggccatcagatcatcgcggtgcctgatagcggaagcaaggtcagccattcccccgctctgtcatcggatgtgagatctacaaatggcaccgccgagtgcaagacagtgaaacggcctgccgaggacaccgatcgggaaactgtggccggaatcccaaacaaggtgggggtgaggatcgtgactatttctgacccaaataatgcaggctgtagcgccaccatggtcgccgtccctgctggagccgaccctagtacagtcgcaaaggtggccatcgaatcagccgtccagcagaagcagcagcatccaccgacatacgtgcaaaacgtggtgccccagaacacgcctatgcccccatcaccagctgtgcaggtgcaaggccagcccaactcctcacagccttctccgttctctgggtcctcgcagcctggtgatcccatgaggaagccagggcaaaacttcatgtgcctgtggcaatcatgcaaaaagtggttccagacgccatcgcaagtgttttaccacgccgctaccgagcacggcggaaaggatgtgtaccccggacagtgtctgtgggaagggtgcgagccgtttcaacggcagaggttttcctttatcacccacctacaagacaaacattgtagcaaagatgccttattagctggcctgaagcaagatgagcccggtcaggctgggagccagaagagcagcactaagcagccaacggtaggcggaacaagcagtaccccaagagcccagaaggccatagtgaaccatccctctgctgctctgatggcactgagaaggggaagtcgcaatctcgtgttccgagattttacggacgaaaaggaaggtcccatcactaagcacattcgattgacagctgctcttattctgaaaaacatcggcaaatactctgagtgtgggaggaggctcttgaagaggcatgagaacaatctctccgtcctagccataagcaatatggaggccagtagcaccttagccaagtgcctgtacgaacttaactttaccgtgcagtccaaggaacaagagaaggactctgaaatgctacagtag

SEQ ID NO: 244183 - DNA, 4338 bp, Artificial Sequence
  derived and/or modified sequence
atgagggggatggaaatcctcgggaatctctgtaaggcggaggacaatggagtgttgatctgcgagtatgtggaccaggacagttacagagagataatatgtcacctgacgctgccggatgtgctgttggtgataagcacactagaggtgctgtacatgctcacagagatgggtgacgtggcatgtaccaaaattgcgaaggtggagaagtcaatcgccgctgttaagttaatcgaacatccgtcctccagtcaccagatgctgagtgagattcggccacaggcaattgagcaggtccagacacaaacccacgtcgccagcgcaccagcctccagggctgtcgtggcccagcacgtagccccaccgcctgggatcgtggaaatcgatagcgagaaatttgcatgccagtggttaaatgcccatttcgaagtcaaccctgactgtagcgtttcaagggcagagatgtatagtgagtatctctcaacttgtagtaagctggccaggggcggaattcttacatccacggggttttacaaatgcctgcggactgtgtttccaaaccacaccgtcaagcgcgtggaggactcgagctcaaatggtcaggcccatattcacgtcgtcggagttaaacggagagccattcccctgcccattcagatgtactaccagcagcaaccagtgagtaccagtgtggtgcgtgtagattctgttcccgatgtgtcgccagccccatctccagccggtatcccacacggttcccagaccataggaaaccacttccagaggacaccagtggcaaatcagagcagtaacctgacagcaacacagatgtccttccctgtgcagggggtgcacaccgtcgcacagaccgtgagccgcatacctcagaatccttcacctcacactcaccagcaacaaaatgcgccagttacagtcatccagtctaaggccccaattccttgtgaagtggtcaaggcaaccgtgattcagaattctatccctcaaaccggagtccccgtctcaatagcagtcggcggtggccctcctcagtcgtcggtggtgcaaaatcactccacaggccctcaacccgtgactgtggtcaatagtcaaaccttgctgcaccacccctctgtgatcccccaacaatctccactgcatacagtggtcccgggacagatcccctctgggacccctgtgactgtaatccaacaggcggtccctcaatcacatatgtttggcagagtgcagaacataccagcctgcaccagtacggtttcgcagggacagcagctgataaccacatcacctcaacccgttcaaacctcttcccagcagacgtctgccggttcccagtcccaggatacagttatcatagctcctccgcagtatgtgacaacatcagcaagtaatatcgtaagcgccactagcgtacagaactttcaggtggcaacagggcaaatggtgaccattgcgggtgtgccaagcccacaagcttcgagagtgggattccagaacattgctccaaaacccctgcccagccagcaggttagtagcaccgtggttcagcagcctatccaacagccccagcagccgacacagcagtccgttgtgattgtgtcccaacctgcccagcaaggccagacctacgcaccggctatccaccagatcgtgctggctaatcccgctgccctccctgcaggacagaccgttcagctcactgggcagcctaacatcacccctagttcctctccatcccccgtgccagccacaaataaccaggtgcctactgcaatgtctagttccagtacaccccagtcgcagggccctccacccacagtgagtcagatgctgtctgtcaagaggcagcagcaacagcagcactctccagctcctcctcctcagcaggtccaggttcaagtacagcagcctcagcaggtccagatgcaggtgcagcctcagcaatccaacgcgggagtgggccaacccgcaagtggggagtcctcattaattaagcaactcttgttgccaaagagaggcccttctactcccggaggcaaactgatattgcccgcaccccaaattccacctccaaacaacgcccgagcaccctcaccccaggtagtatatcaagtggcgagcaaccaagctgcaggttttggggtgcaagggcagactcccgcacaacagctgttggtcggacaacaaaacgttcagttagtgccttctgctatgccaccttcaggaggagtgcagactgtacccatcagcaacttgcaaattttgcccggacccctaatttccaatagccccgcaacgattttccagggtaccagcggaaatcaggttaccattacagtcgtgcccaacacaagcttcgcccctgccaccgtgtctcagggaaacgcaacacaactaatcgcaccggctggcattaccatgtccggaacccagacgggggtcggtttacccgtacagaccctgcccgctacccaagccagtcccgcagggcagtcatcttgtaccacagcaacaccccctttcaagggggataaaatcatatgccaaaaagaggaggaagccaaagaagcaactggtctgcacgttcacgaaagaaagatcgaggtcatggaaaacccttcatgtcggcgtggtgccacaaacacgagcaatggggacaccaaggagaacgagatgcacgtgggaagccttcttaatggaaggaagtactcagactccagtctgcctccttctaactctggaaagatccagagtgagacaaaccagtgttcgctcattagcaatggtccatctttggaactgggtgaaaatggggctagtggaaagcagaatagcgaacagatagatatgcaagatattaagtctgatttaagaaagccactcgtgaatggaatctgtgacttcgacaaaggcgacggctctcacttgagcaaaaacatcccgaaccataagacgagcaaccatgtcggcaatggcgagatctcccccatggagccccagggaacattggacattacccagcaggataccgctaaaggagatcagctcgaacgcatcagcaatggccctgttctgacactgggagggagttctgtgtcatccatccaggaggcaagcaacgccgcaacacagcaattttctgggactgacttgttaaatggtccactggcatcaagtctgaactccgacgtgccccagcagcgcccttccgtcgtagtaagtcctcacagcactacttccgttatccaaggacatcagatcattgcggtgccagactccggttcaaaggtatcacattctcccgcattgtcatccgacgtgaggagtactaacggtacagctgaatgcaaaacagttaaacgacctgccgaggacaccgaccgcgaaactgttgccggaatcccaaataaagtgggcgtgcggatcgtcacaatctccgatcctaataatgcaggctgctcagccaccatggttgcggtgcccgcaggggctgatccgtccaccgttgctaaggtggcaatcgagtcggccgtccaacagaaacagcagcaccctcccacttacgtccagaatgtcgttccccaaaatacgcccatgcctccatccccagccgtccaggtacagggccagcctaatagttctcagccgagccctttttccgggtctagccagcctggggatccaatgcggaagcctgggcagaactttatgtgtctgtggcagtcatgcaagaagtggttccaaacgccatcccaggtgttttaccatgcggctaccgaacacggcggaaaggacgtttatcccggacagtgcttgtgggaaggctgtgaaccattccagagacagcggttctcctttatcacacaccttcaggacaagcattgctcgaaggatgctctgctggcaggactcaagcaggacgagcctggccaggctggtagtcagaagtcatctactaagcagcctacagtcggaggaacctcttccactccgagggcccagaaggcgatcgtgaatcacccctccgctgccctgatggcattgcgccgtggctcacgaaatctcgtattccgcgactttaccgatgagaaagaggggcctatcaccaagcacattcgccttacagccgcattgatcctgaagaacatcggaaagtactctgagtgcggaagaagactcttaaagcgacacgaaaataacctgtctgttctggcaatctctaacatggaggcctcctctacccttgcaaagtgtttgtacgagttgaacttcactgtgcagtctaaggagcaggagaaggactctgagatgctacagtag

SEQ ID NO: 244184 - DNA, 2859 bp, Artificial Sequence
  derived and/or modified sequence
atgatgatgcggtatcatcaggccatccagagtcactctttcttgcttgtgcagtttcatctgcctaccatcacctcaaacacagtgtgccgaatcatctgcgttaaggtgatggggtgcccgtggaccttaattaggcagatgatcatcatcaactggtgctttcactgctatctggattcacagatgaagtggacactgctactgacgtacgcgctgtcctaccagatgaaggcctcaacaagctgcaacttgaaaaagattctaaaatcttctcctgtcccagcaactaacaaccaagtgcccaccgccatgtcctcttcatccaccccacaatcacaggggccacctcctactgtgagccagatgctgtctgtgaagcgtcagcagcaacaacagcacagtcccgctccccctccccagcaggtgcaagtccaggtgcaacagccccagcaagtgcagatgcaggtgcagcctcagcagtcaaatgctggcgtagggcagcccgcatcaggagaatcaagcctgattaaacagcttctgttaccaaagagaggaccaagcactcctggtgggaagctgattctccccgcacctcagattcccccacctaataacgcccgagcaccctcccctcaggtggtttatcaggtagcatctaaccaggcagctgggtttggtgtgcaggggcagacaccagctcagcaactgttggtcggccagcagaacgtccagctggtcccgagcgcaatgcccccttcgggcggtgtacagacagtgccaatttccaatttgcagattttgcccggacctttgataagcaattctccagctaccatcttccaggggacctcaggtaaccaggtcacgattaccgtcgtgccaaacaccagtttcgcgcctgcgactgtgtcacaggggaacgccacccagcttatcgctcccgcaggcatcaccatgtctggcacccagaccggagttgggctacctgtccagaccttgccagccactcaggcttctccggcaggacagtcttcttgtaccactgcaaccccaccatttaaaggcgacaagattatttgccaaaaggaggaagaagccaaggaagccactgggctccatgtccacgagagaaagatcgaggtgatggagaaccctagttgccggaggggcgcaaccaatacttccaatggtgacacaaaagaaaatgaaatgcacgtgggctccctgttgaatggacgtaagtattccgacagcagtttaccaccatctaactccggaaaaattcagagcgagacaaaccagtgctctttgatcagtaacgggccatctcttgaattaggggaaaacggcgcaagtggaaagcaaaacagtgagcaaattgacatgcaggatatcaagtccgacttgcgcaagccccttgtcaacggtatttgcgatttcgacaagggagacggtagtcatctgtccaagaatattcccaatcacaagacaagtaatcacgtgggcaatggcgagatcagcccaatggaaccccaggggacactagatatcacgcagcaagacaccgccaagggcgatcagctggaaagaataagcaatggccctgtgttgaccctcggtggcagtagtgtctccagcatccaggaggcttccaacgcagctacacagcaattctcaggcaccgatttactgaacggacccctcgcatcttcactcaactcagatgtgccgcagcaacgcccttcagtggtagtcagtccacatagcaccacctccgtcatacaggggcaccagatcatcgcagtcccggatagcgggtccaaagtctcccatagtcccgcactcagttctgatgtcagaagcactaatgggaccgcagaatgtaagacagtgaagaggcctgccgaagacacagatagagaaactgtagcaggaatccctaataaggtgggggtgcggatcgttacaatctcagatcctaataacgctgggtgttctgccaccatggtcgctgtgcctgcaggcgctgatcctagcactgtagctaaggttgccattgagtctgctgttcagcagaagcagcagcacccccctacttacgtccaaaacgtagttccacagaatacacctatgccaccttcacctgccgtgcaggtccaaggccagcctaactcttcccagcctagtccctttagcggctcctcacagcccggagaccccatgaggaaacccggacaaaactttatgtgcttatggcagagttgtaaaaagtggtttcaaaccccatcccaggtgttttatcatgcagcaaccgagcatggagggaaagatgtgtatcccggtcaatgtctgtgggagggctgtgagccctttcaaaggcagagattcagctttattactcatctgcaggacaagcactgtagtaaggatgccctgcttgccggtttgaagcaagacgagccgggacaggcagggagccagaagagctctactaagcagccaacagtggggggaacctcgagcactcctagggcacaaaaagcaatcgtaaatcacccttccgcggcactcatggcattgcgacgcggttccaggaatcttgtgttccgcgactttaccgacgagaaggagggaccaataacgaagcatattcggctcactgctgccctgattctgaaaaatataggcaagtattccgaatgtgggagacggctattgaagcggcacgagaacaatctctctgtgttggcgatatccaacatggaagcctcctccaccctggccaagtgcctatacgagctgaacttcaccgtgcagtctaaggagcaagagaaggatagcgaaatgctgcagtag

SEQ ID NO: 244185 - DNA, 5508 bp, Artificial Sequence
  derived and/or modified sequence
atggccaacagcaccggcaaggccccccccgacgagagaagaaagggcctggccttcctggacgagctgagacagttccaccacagcagaggcagccccttcaagaagatccccgccgtgggcggcaaggagctggacctgcacggcctgtacaccagagtgaccaccctgggcggcttcgccaaggtgagcgagaagaaccagtggggcgagatcgtggaggagttcaacttccccagaagctgcagcaacgccgccttcgccctgaagcagtactacctgagatacctggagaagtacgagaaggtgcaccacttcggcgaggacgacgacgaggtgccccccggcaaccccaagccccagctgcccatcggcgccatccccagcagctacaactaccagcagcacagcgtgagcgactacctgagacagagctacggcctgagcatggacttcaacagccccaacgactacaacaagctggtgctgagcctgctgagcggcctgcccaacgaggtggacttcgccatcaacgtgtgcaccctgctgagcaacgagagcaagcacgtgatgcagctggagaaggaccccaagatcatcaccctgctgctggccaacgccggcgtgttcgacgacaccctgggcagcttcagcaccgtgttcggcgaggagtggaaggagaagaccgacagagacttcgtgaagttctggaaggacatcgtggacgacaacgaggtgagagacctgatcagcgacagaaacaagagccacgagggcaccagcggcgagtggatctgggagagcctgttccacccccccagaaagctgggcatcaacgacatcgagggccagagagtgctgcagatcgccgtgatcctgagaaacctgagcttcgaggagggcaacgtgaagctgctggccgccaacagaacctgcctgagattcctgctgctgagcgcccacagccacttcatcagcctgagacagctgggcctggacaccctgggcaacatcgccgccgagctgctgctggaccccgtggacttcaagaccacccacctgatgttccacaccgtgaccaagtgcctgatgagcagagacagattcctgaagatgagaggcatggagatcctgggcaacctgtgcaaggccgaggacaacggcgtgctgatctgcgagtacgtggaccaggacagctacagagagatcatctgccacctgaccctgcccgacgtgctgctggtgatcagcaccctggaggtgctgtacatgctgaccgagatgggcgacgtggcctgcaccaagatcgccaaggtggagaagagcatcgacatgctggtgtgcctggtgagcatggacatccagatgttcggccccgacgccctggccgccgtgaagctgatcgagcaccccagcagcagccaccagatgctgagcgagatcagaccccaggccatcgagcaggtgcagacccagacccacgtggccagcgcccccgccagcagagccgtggtggcccagcacgtggcccccccccccggcatcgtggagatcgacagcgagaagttcgcctgccagtggctgaacgcccacttcgaggtgaaccccgactgcagcgtgagcagagccgagatgtacagcgagtacctgagcacctgcagcaagctggccagaggcggcatcctgaccagcaccggcttctacaagtgcctgagaaccgtgttccccaaccacaccgtgaagagagtggaggacagcagcagcaacggccaggcccacatccacgtggtgggcgtgaagagaagagccatccccctgcccatccagatgtactaccagcagcagcccgtgagcaccagcgtggtgagagtggacagcgtgcccgacgtgagccccgcccccagccccgccggcatcccccacggcagccagaccatcggcaaccacttccagagaacccccgtggccaaccagagcagcaacctgaccgccacccagatgagcttccccgtgcagggcgtgcacaccgtggcccagaccgtgagcagaatcccccagaaccccagcccccacacccaccagcagcagaacgcccccgtgaccgtgatccagagcaaggcccccatcccctgcgaggtggtgaaggccaccgtgatccagaacagcatcccccagaccggcgtgcccgtgagcatcgccgtgggcggcggccccccccagagcagcgtggtgcagaaccacagcaccggcccccagcccgtgaccgtggtgaacagccagaccctgctgcaccaccccagcgtgatcccccagcagagccccctgcacaccgtggtgcccggccagatccccagcggcacccccgtgaccgtgatccagcaggccgtgccccagagccacatgttcggcagagtgcagaacatccccgcctgcaccagcaccgtgagccagggccagcagctgatcaccaccagcccccagcccgtgcagaccagcagccagcagaccagcgccggcagccagagccaggacaccgtgatcatcgcccccccccagtacgtgaccaccagcgccagcaacatcgtgagcgccaccagcgtgcagaacttccaggtggccaccggccagatggtgaccatcgccggcgtgcccagcccccaggccagcagagtgggcttccagaacatcgcccccaagcccctgcccagccagcaggtgagcagcaccgtggtgcagcagcccatccagcagccccagcagcccacccagcagagcgtggtgatcgtgagccagcccgcccagcagggccagacctacgcccccgccatccaccagatcgtgctggccaaccccgccgccctgcccgccggccagaccgtgcagctgaccggccagcccaacatcacccccagcagcagccccagccccgtgcccgccaccaacaaccaggtgcccaccgccatgagcagcagcagcaccccccagagccagggccccccccccaccgtgagccagatgctgagcgtgaagagacagcagcagcagcagcacagccccgccccccccccccagcaggtgcaggtgcaggtgcagcagccccagcaggtgcagatgcaggtgcagccccagcagagcaacgccggcgtgggccagcccgccagcggcgagagcagcctgatcaagcagctgctgctgcccaagagaggccccagcacccccggcggcaagctgatcctgcccgccccccagatccccccccccaacaacgccagagcccccagcccccaggtggtgtaccaggtggccagcaaccaggccgccggcttcggcgtgcagggccagacccccgcccagcagctgctggtgggccagcagaacgtgcagctggtgcccagcgccatgccccccagcggcggcgtgcagaccgtgcccatcagcaacctgcagatcctgcccggccccctgatcagcaacagccccgccaccatcttccagggcaccagcggcaaccaggtgaccatcaccgtggtgcccaacaccagcttcgcccccgccaccgtgagccagggcaacgccacccagctgatcgcccccgccggcatcaccatgagcggcacccagaccggcgtgggcctgcccgtgcagaccctgcccgccacccaggccagccccgccggccagagcagctgcaccaccgccaccccccccttcaagggcgacaagatcatctgccagaaggaggaggaggccaaggaggccaccggcctgcacgtgcacgagagaaagatcgaggtgatggagaaccccagctgcagaagaggcgccaccaacaccagcaacggcgacaccaaggagaacgagatgcacgtgggcagcctgctgaacggcagaaagtacagcgacagcagcctgccccccagcaacagcggcaagatccagagcgagaccaaccagtgcagcctgatcagcaacggccccagcctggagctgggcgagaacggcgccagcggcaagcagaacagcgagcagatcgacatgcaggacatcaagagcgacctgagaaagcccctggtgaacggcatctgcgacttcgacaagggcgacggcagccacctgagcaagaacatccccaaccacaagaccagcaaccacgtgggcaacggcgagatcagccccatggagccccagggcaccctggacatcacccagcaggacaccgccaagggcgaccagctggagagaatcagcaacggccccgtgctgaccctgggcggcagcagcgtgagcagcatccaggaggccagcaacgccgccacccagcagttcagcggcaccgacctgctgaacggccccctggccagcagcctgaacagcgacgtgccccagcagagacccagcgtggtggtgagcccccacagcaccaccagcgtgatccagggccaccagatcatcgccgtgcccgacagcggcagcaaggtgagccacagccccgccctgagcagcgacgtgagaagcaccaacggcaccgccgagtgcaagaccgtgaagagacccgccgaggacaccgacagagagaccgtggccggcatccccaacaaggtgggcgtgagaatcgtgaccatcagcgaccccaacaacgccggctgcagcgccaccatggtggccgtgcccgccggcgccgaccccagcaccgtggccaaggtggccatcgagagcgccgtgcagcagaagcagcagcacccccccacctacgtgcagaacgtggtgccccagaacacccccatgccccccagccccgccgtgcaggtgcagggccagcccaacagcagccagcccagccccttcagcggcagcagccagcccggcgaccccatgagaaagcccggccagaacttcatgtgcctgtggcagagctgcaagaagtggttccagacccccagccaggtgttctaccacgccgccaccgagcacggcggcaaggacgtgtaccccggccagtgcctgtgggagggctgcgagcccttccagagacagagattcagcttcatcacccacctgcaggacaagcactgcagcaaggacgccctgctggccggcctgaagcaggacgagcccggccaggccggcagccagaagagcagcaccaagcagcccaccgtgggcggcaccagcagcacccccagagcccagaaggccatcgtgaaccaccccagcgccgccctgatggccctgagaagaggcagcagaaacctggtgttcagagacttcaccgacgagaaggagggccccatcaccaagcacatcagactgaccgccgccctgatcctgaagaacatcggcaagtacagcgagtgcggcagaagactgctgaagagacacgagaacaacctgagcgtgctggccatcagcaacatggaggccagcagcaccctggccaagtgcctgtacgagctgaacttcaccgtgcagagcaaggagcaggagaaggacagcgagatgctgcagtag

SEQ ID NO: 244186 - DNA, 2859 bp, Artificial Sequence
  derived and/or modified sequence
atgatgatgagataccaccaggccatccagagccacagcttcctgctggtgcagttccacctgcccaccatcaccagcaacaccgtgtgcagaatcatctgcgtgaaggtgatgggctgcccctggaccctgatcagacagatgatcatcatcaactggtgcttccactgctacctggacagccagatgaagtggaccctgctgctgacctacgccctgagctaccagatgaaggccagcaccagctgcaacctgaagaagatcctgaagagcagccccgtgcccgccaccaacaaccaggtgcccaccgccatgagcagcagcagcaccccccagagccagggccccccccccaccgtgagccagatgctgagcgtgaagagacagcagcagcagcagcacagccccgccccccccccccagcaggtgcaggtgcaggtgcagcagccccagcaggtgcagatgcaggtgcagccccagcagagcaacgccggcgtgggccagcccgccagcggcgagagcagcctgatcaagcagctgctgctgcccaagagaggccccagcacccccggcggcaagctgatcctgcccgccccccagatccccccccccaacaacgccagagcccccagcccccaggtggtgtaccaggtggccagcaaccaggccgccggcttcggcgtgcagggccagacccccgcccagcagctgctggtgggccagcagaacgtgcagctggtgcccagcgccatgccccccagcggcggcgtgcagaccgtgcccatcagcaacctgcagatcctgcccggccccctgatcagcaacagccccgccaccatcttccagggcaccagcggcaaccaggtgaccatcaccgtggtgcccaacaccagcttcgcccccgccaccgtgagccagggcaacgccacccagctgatcgcccccgccggcatcaccatgagcggcacccagaccggcgtgggcctgcccgtgcagaccctgcccgccacccaggccagccccgccggccagagcagctgcaccaccgccaccccccccttcaagggcgacaagatcatctgccagaaggaggaggaggccaaggaggccaccggcctgcacgtgcacgagagaaagatcgaggtgatggagaaccccagctgcagaagaggcgccaccaacaccagcaacggcgacaccaaggagaacgagatgcacgtgggcagcctgctgaacggcagaaagtacagcgacagcagcctgccccccagcaacagcggcaagatccagagcgagaccaaccagtgcagcctgatcagcaacggccccagcctggagctgggcgagaacggcgccagcggcaagcagaacagcgagcagatcgacatgcaggacatcaagagcgacctgagaaagcccctggtgaacggcatctgcgacttcgacaagggcgacggcagccacctgagcaagaacatccccaaccacaagaccagcaaccacgtgggcaacggcgagatcagccccatggagccccagggcaccctggacatcacccagcaggacaccgccaagggcgaccagctggagagaatcagcaacggccccgtgctgaccctgggcggcagcagcgtgagcagcatccaggaggccagcaacgccgccacccagcagttcagcggcaccgacctgctgaacggccccctggccagcagcctgaacagcgacgtgccccagcagagacccagcgtggtggtgagcccccacagcaccaccagcgtgatccagggccaccagatcatcgccgtgcccgacagcggcagcaaggtgagccacagccccgccctgagcagcgacgtgagaagcaccaacggcaccgccgagtgcaagaccgtgaagagacccgccgaggacaccgacagagagaccgtggccggcatccccaacaaggtgggcgtgagaatcgtgaccatcagcgaccccaacaacgccggctgcagcgccaccatggtggccgtgcccgccggcgccgaccccagcaccgtggccaaggtggccatcgagagcgccgtgcagcagaagcagcagcacccccccacctacgtgcagaacgtggtgccccagaacacccccatgccccccagccccgccgtgcaggtgcagggccagcccaacagcagccagcccagccccttcagcggcagcagccagcccggcgaccccatgagaaagcccggccagaacttcatgtgcctgtggcagagctgcaagaagtggttccagacccccagccaggtgttctaccacgccgccaccgagcacggcggcaaggacgtgtaccccggccagtgcctgtgggagggctgcgagcccttccagagacagagattcagcttcatcacccacctgcaggacaagcactgcagcaaggacgccctgctggccggcctgaagcaggacgagcccggccaggccggcagccagaagagcagcaccaagcagcccaccgtgggcggcaccagcagcacccccagagcccagaaggccatcgtgaaccaccccagcgccgccctgatggccctgagaagaggcagcagaaacctggtgttcagagacttcaccgacgagaaggagggccccatcaccaagcacatcagactgaccgccgccctgatcctgaagaacatcggcaagtacagcgagtgcggcagaagactgctgaagagacacgagaacaacctgagcgtgctggccatcagcaacatggaggccagcagcaccctggccaagtgcctgtacgagctgaacttcaccgtgcagagcaaggagcaggagaaggacagcgagatgctgcagtag

SEQ ID NO: 244187 - DNA, 4338 bp, Artificial Sequence
  derived and/or modified sequence
atgagaggcatggagatcctgggcaacctgtgcaaggccgaggacaacggcgtgctgatctgcgagtacgtggaccaggacagctacagagagatcatctgccacctgaccctgcccgacgtgctgctggtgatcagcaccctggaggtgctgtacatgctgaccgagatgggcgacgtggcctgcaccaagatcgccaaggtggagaagagcatcgccgccgtgaagctgatcgagcaccccagcagcagccaccagatgctgagcgagatcagaccccaggccatcgagcaggtgcagacccagacccacgtggccagcgcccccgccagcagagccgtggtggcccagcacgtggcccccccccccggcatcgtggagatcgacagcgagaagttcgcctgccagtggctgaacgcccacttcgaggtgaaccccgactgcagcgtgagcagagccgagatgtacagcgagtacctgagcacctgcagcaagctggccagaggcggcatcctgaccagcaccggcttctacaagtgcctgagaaccgtgttccccaaccacaccgtgaagagagtggaggacagcagcagcaacggccaggcccacatccacgtggtgggcgtgaagagaagagccatccccctgcccatccagatgtactaccagcagcagcccgtgagcaccagcgtggtgagagtggacagcgtgcccgacgtgagccccgcccccagccccgccggcatcccccacggcagccagaccatcggcaaccacttccagagaacccccgtggccaaccagagcagcaacctgaccgccacccagatgagcttccccgtgcagggcgtgcacaccgtggcccagaccgtgagcagaatcccccagaaccccagcccccacacccaccagcagcagaacgcccccgtgaccgtgatccagagcaaggcccccatcccctgcgaggtggtgaaggccaccgtgatccagaacagcatcccccagaccggcgtgcccgtgagcatcgccgtgggcggcggccccccccagagcagcgtggtgcagaaccacagcaccggcccccagcccgtgaccgtggtgaacagccagaccctgctgcaccaccccagcgtgatcccccagcagagccccctgcacaccgtggtgcccggccagatccccagcggcacccccgtgaccgtgatccagcaggccgtgccccagagccacatgttcggcagagtgcagaacatccccgcctgcaccagcaccgtgagccagggccagcagctgatcaccaccagcccccagcccgtgcagaccagcagccagcagaccagcgccggcagccagagccaggacaccgtgatcatcgcccccccccagtacgtgaccaccagcgccagcaacatcgtgagcgccaccagcgtgcagaacttccaggtggccaccggccagatggtgaccatcgccggcgtgcccagcccccaggccagcagagtgggcttccagaacatcgcccccaagcccctgcccagccagcaggtgagcagcaccgtggtgcagcagcccatccagcagccccagcagcccacccagcagagcgtggtgatcgtgagccagcccgcccagcagggccagacctacgcccccgccatccaccagatcgtgctggccaaccccgccgccctgcccgccggccagaccgtgcagctgaccggccagcccaacatcacccccagcagcagccccagccccgtgcccgccaccaacaaccaggtgcccaccgccatgagcagcagcagcaccccccagagccagggccccccccccaccgtgagccagatgctgagcgtgaagagacagcagcagcagcagcacagccccgccccccccccccagcaggtgcaggtgcaggtgcagcagccccagcaggtgcagatgcaggtgcagccccagcagagcaacgccggcgtgggccagcccgccagcggcgagagcagcctgatcaagcagctgctgctgcccaagagaggccccagcacccccggcggcaagctgatcctgcccgccccccagatccccccccccaacaacgccagagcccccagcccccaggtggtgtaccaggtggccagcaaccaggccgccggcttcggcgtgcagggccagacccccgcccagcagctgctggtgggccagcagaacgtgcagctggtgcccagcgccatgccccccagcggcggcgtgcagaccgtgcccatcagcaacctgcagatcctgcccggccccctgatcagcaacagccccgccaccatcttccagggcaccagcggcaaccaggtgaccatcaccgtggtgcccaacaccagcttcgcccccgccaccgtgagccagggcaacgccacccagctgatcgcccccgccggcatcaccatgagcggcacccagaccggcgtgggcctgcccgtgcagaccctgcccgccacccaggccagccccgccggccagagcagctgcaccaccgccaccccccccttcaagggcgacaagatcatctgccagaaggaggaggaggccaaggaggccaccggcctgcacgtgcacgagagaaagatcgaggtgatggagaaccccagctgcagaagaggcgccaccaacaccagcaacggcgacaccaaggagaacgagatgcacgtgggcagcctgctgaacggcagaaagtacagcgacagcagcctgccccccagcaacagcggcaagatccagagcgagaccaaccagtgcagcctgatcagcaacggccccagcctggagctgggcgagaacggcgccagcggcaagcagaacagcgagcagatcgacatgcaggacatcaagagcgacctgagaaagcccctggtgaacggcatctgcgacttcgacaagggcgacggcagccacctgagcaagaacatccccaaccacaagaccagcaaccacgtgggcaacggcgagatcagccccatggagccccagggcaccctggacatcacccagcaggacaccgccaagggcgaccagctggagagaatcagcaacggccccgtgctgaccctgggcggcagcagcgtgagcagcatccaggaggccagcaacgccgccacccagcagttcagcggcaccgacctgctgaacggccccctggccagcagcctgaacagcgacgtgccccagcagagacccagcgtggtggtgagcccccacagcaccaccagcgtgatccagggccaccagatcatcgccgtgcccgacagcggcagcaaggtgagccacagccccgccctgagcagcgacgtgagaagcaccaacggcaccgccgagtgcaagaccgtgaagagacccgccgaggacaccgacagagagaccgtggccggcatccccaacaaggtgggcgtgagaatcgtgaccatcagcgaccccaacaacgccggctgcagcgccaccatggtggccgtgcccgccggcgccgaccccagcaccgtggccaaggtggccatcgagagcgccgtgcagcagaagcagcagcacccccccacctacgtgcagaacgtggtgccccagaacacccccatgccccccagccccgccgtgcaggtgcagggccagcccaacagcagccagcccagccccttcagcggcagcagccagcccggcgaccccatgagaaagcccggccagaacttcatgtgcctgtggcagagctgcaagaagtggttccagacccccagccaggtgttctaccacgccgccaccgagcacggcggcaaggacgtgtaccccggccagtgcctgtgggagggctgcgagcccttccagagacagagattcagcttcatcacccacctgcaggacaagcactgcagcaaggacgccctgctggccggcctgaagcaggacgagcccggccaggccggcagccagaagagcagcaccaagcagcccaccgtgggcggcaccagcagcacccccagagcccagaaggccatcgtgaaccaccccagcgccgccctgatggccctgagaagaggcagcagaaacctggtgttcagagacttcaccgacgagaaggagggccccatcaccaagcacatcagactgaccgccgccctgatcctgaagaacatcggcaagtacagcgagtgcggcagaagactgctgaagagacacgagaacaacctgagcgtgctggccatcagcaacatggaggccagcagcaccctggccaagtgcctgtacgagctgaacttcaccgtgcagagcaaggagcaggagaaggacagcgagatgctgcagtag

SEQ ID NO: 244188 - protein, 508 aa, Artificial Sequence
  derived and/or modified sequence
MAGQRTCQRRSSRAGPGKMQEPPKSIEEFLKFQNWDYWPREIHFRDDDKWSCTLKKIKEDSSFVSIYTHLWENVPRIFEALLIMESKLKEYSLILQNHTSEIFKWKSMISETSSYRKLERYGEFLKKYHKKKKIMLSDEMETEKNIEGCSFTGFKANELTQLPRHLDAEQIYLFILKAHNFDERVFKIWKTHFLSEASIALLHDSFWWWFLHKFRPDRENQDCLFDRISESYVTLFMSIPLSRKDAFFQIYPDCLAQAIYATFHEAFPESSYLFNDEFKEDLGNNIFLWCSGLKPQKGFWIHWKLKELSTTTIHGSKKAPAKSVKERIADSQEHISTSIDFNIIKILNNPRAYTLPISKEESRLSRLATKSHYSSTGPEFNRVLFNFGGQSPLILYYLKMHELAGISKAPKKTKIKLTKIFQEPLPAPTYRDVIKEAKRQFARNQKDFRILQAKATKKPHEVKQDFEKFLHKLRSEAEIERECVASLSSSSSSSPSSTDNYNFEEEEY

SEQ ID NO: 244189 - DNA, 2008 bp, Artificial Sequence
  derived and/or modified sequence
gcaacaggctgggacgacagcggggggggggttagacgggaagttccgcctcagcctctcaatcagcggcggtgtcgcacttctcccgagaggctccggcgaggggcagggccgcgttcgtccgggacccgcctcaagcctcgcagcctttcacccagtttcctcccgattcttgctgggacaacaaaattgggaagcggttctcgaaacatactgtcaaggcgtagttgcatttggtcgcccaactcacattgaagcctaagacccagctgatttctcttcatttctgcaaagttactgtaccatggcaggccaacgaacatgtcaaaggaggagcagcagagctggccccgggaaaatgcaagaacctccaaagagcattgaagaattcttaaagtttcaaaattgggattattggccaagggaaatccattttagagatgatgataaatggtcatgcactctgaaaaaaataaaagaagatagttcatttgtttcaatttatacacacctatgggaaaatgttcctcgaatatttgaagcacttttgatcatggaatcaaaattaaaggaatattcacttattttgcaaaaccacacctctgaaatatttaagtggaaaagcatgatttctgagacaagttcttatagaaaattggaacgatatggggaatttctaaagaagtaccataagaaaaaaaagataatgctttcagatgaaatggagacagagaagaatatagagggttgcagcttcacaggattcaaagcaaatgaacttactcagctacccagacatttggatgctgaacaaatttatctttttattttaaaagcccataattttgatgaaagagtttttaaaatctggaagactcattttctctcagaagcctccattgctcttttgcatgactccttttggtggtggtttctccataaatttaggcctgacagagaaaaccaagattgcttattcgatagaatttcagaaagttatgtgacacttttcatgagcatacctctaagtcgaaaggatgcattttttcagatatatcctgattgtttggcacaagccatatatgcaacgttccatgaagcatttccagaatcgagttacctctttaatgatgaatttaaagaagatctagggaataacatttttctttggtgttcaggtttaaaacctcaaaaaggcttttggatccactggaaactgaaagaactctccacaaccaccattcatggtagcaaaaaagcacctgcaaaatcagtaaaggaaagaattgcagacagtcaagaacatatatcaactagtatcgacttcaatattataaagattctgaacaacccaagagcatatacgttgcccatatccaaggaagaatcaagattatcaagactagcaacaaagtcgcactatagtagtactggtccagagtttaatcgtgttctcttcaattttggaggtcagagtccattgattttatattatcttaagatgcatgagctggctggtatttccaaagcacctaagaaaaccaagattaaactcactaagatattccaggaaccactacctgctccaacataccgtgatgttataaaggaggcaaaaagacaatttgcaaggaaccaaaaggattttaggatactccaagcaaaggctaccaagaaacctcatgaagtgaaacaggactttgagaagttcctacataaactgcgttccgaagctgaaattgagagagaatgtgtggcatcactatcgtcatcatcatcatcatcaccatcatcaacagacaactacaactttgaggaagaagaatactaagagaaaccagaaatgaactctattcaagaataatgcatacaattcagtggtatcagtttaattgtaacaatatatttaattcaagtccaatccatgtaatcagtattaagagtgtgttttaccattcatctttaaaatcttcaaatcaataaatctcagtaagttattcttaaaaga

SEQ ID NO: 244190 - DNA, 1527 bp, Artificial Sequence
  derived and/or modified sequence
atggccggccagagaacctgccagagaagaagcagcagagccggccccggcaagatgcaggagccccccaagagcatcgaggagttcctgaagttccagaactgggactactggcccagagagatccacttcagagacgacgacaagtggagctgcaccctgaagaagatcaaggaggacagcagcttcgtgagcatctacacccacctgtgggagaacgtgcccagaatcttcgaggccctgctgatcatggagagcaagctgaaggagtacagcctgatcctgcagaaccacaccagcgagatcttcaagtggaagagcatgatcagcgagaccagcagctacagaaagctggagagatacggcgagttcctgaagaagtaccacaagaagaagaagatcatgctgagcgacgagatggagaccgagaagaacatcgagggctgcagcttcaccggcttcaaggccaacgagctgacccagctgcccagacacctggacgccgagcagatctacctgttcatcctgaaggcccacaacttcgacgagagagtgttcaagatctggaagacccacttcctgagcgaggccagcatcgccctgctgcacgacagcttctggtggtggttcctgcacaagttcagacccgacagagagaaccaggactgcctgttcgacagaatcagcgagagctacgtgaccctgttcatgagcatccccctgagcagaaaggacgccttcttccagatctaccccgactgcctggcccaggccatctacgccaccttccacgaggccttccccgagagcagctacctgttcaacgacgagttcaaggaggacctgggcaacaacatcttcctgtggtgcagcggcctgaagccccagaagggcttctggatccactggaagctgaaggagctgagcaccaccaccatccacggcagcaagaaggcccccgccaagagcgtgaaggagagaatcgccgacagccaggagcacatcagcaccagcatcgacttcaacatcatcaagatcctgaacaaccccagagcctacaccctgcccatcagcaaggaggagagcagactgagcagactggccaccaagagccactacagcagcaccggccccgagttcaacagagtgctgttcaacttcggcggccagagccccctgatcctgtactacctgaagatgcacgagctggccggcatcagcaaggcccccaagaagaccaagatcaagctgaccaagatcttccaggagcccctgcccgcccccacctacagagacgtgatcaaggaggccaagagacagttcgccagaaaccagaaggacttcagaatcctgcaggccaaggccaccaagaagccccacgaggtgaagcaggacttcgagaagttcctgcacaagctgagaagcgaggccgagatcgagagagagtgcgtggccagcctgagcagcagcagcagcagcagccccagcagcaccgacaactacaacttcgaggaggaggagtactag

SEQ ID NO: 244191 - DNA, 1527 bp, Artificial Sequence
  derived and/or modified sequence
atggcaggtcagagaacctgccaacggcgttctagtcgggctggccccggcaagatgcaggaacctcctaagagcattgaagaattcctaaagtttcaaaactgggattattggcctcgcgagatacatttcagggacgacgataagtggtcttgcacactaaagaagattaaagaggatagtagtttcgtgagcatctacacccacctatgggagaacgtgccccggatttttgaggccctgttgattatggagtctaagttaaaggaatactctctgattctgcagaaccacaccagcgaaatattcaagtggaaaagcatgatctctgagacaagctcctataggaaattggagcgatacggggagtttctgaagaagtatcataagaagaaaaagatcatgttatctgatgagatggaaaccgagaagaatatcgaggggtgctccttcaccggcttcaaggccaacgagttgactcagctcccccggcacctcgacgccgaacagatctatctatttattttaaaagcccataactttgatgagcgggtgtttaagatatggaagacgcatttcctgtcggaggcatctattgcgttgctccacgactccttttggtggtggttcttgcataagttccgccctgaccgcgagaatcaggactgtttatttgaccgaatttctgagagttatgtgacactgtttatgtctatacccctcagccgcaaagacgccttttttcagatatatcctgattgcctcgcacaggcgatatacgccacatttcatgaagcgttcccggagtccagctatctgttcaatgacgaattcaaagaggacctgggaaataacatctttctgtggtgcagtgggttgaagccccagaagggcttttggatccattggaaactcaaagagttatcgaccaccacaattcatggatcaaaaaaggcccctgccaagtccgtcaaggagcgtatcgctgatagtcaggagcatataagcacaagtattgatttcaatataattaaaatcctgaataaccccagggcatatacgctgcctattagcaaggaagagagccggctatcacgcctggccaccaagagtcactactcttctacgggacccgagttcaatcgggttttattcaactttggcggtcagtcgcctctcatactatattatctcaaaatgcatgaactggccgggatcagcaaagcgcccaagaagacaaaaattaagttaaccaagatatttcaggaacctttgcccgccccaacctacagggacgttatcaaggaggccaaaaggcagttcgctcgtaaccagaaggacttcagaatactgcaggcaaaagccactaagaagccccatgaggtaaagcaagactttgagaaattccttcataaactgcgctctgaggcagaaatagaacgtgaatgtgtggcttccttaagcagctccagctcaagctccccttcaagtaccgataactacaactttgaagaggaggagtattag

SEQ ID NO: 244192 - DNA, 1527 bp, Artificial Sequence
  derived and/or modified sequence
atggccggccagaggacctgccagaggaggagcagccgggccggccctgggaagatgcaggagccccccaagagcattgaggagttcctgaagttccagaactgggactactggccccgggagatccacttcagagatgatgacaagtggagctgcaccctgaagaagatcaaggaggacagcagctttgtgtccatctacacccacctgtgggagaatgtgccccgcatctttgaggccctgctgatcatggagagcaagctgaaggagtacagcctcatcctgcagaaccacaccagcgagatcttcaagtggaagtccatgatcagcgagaccagcagctacaggaagctggagagatatggagagttcctgaagaagtaccacaagaagaagaagatcatgctgagtgatgagatggagacagagaagaacatcgagggctgcagcttcaccggcttcaaggccaatgagctgacccagctgcccaggcacctggatgctgagcagatctacctgttcatcctgaaggcccacaactttgatgagagggtcttcaagatctggaagacccacttcctgtctgaggccagcatcgccctgctgcatgacagcttctggtggtggttcctgcacaagttccggccagaccgggagaaccaggactgcctgtttgaccgcatcagcgagagctatgtgaccctcttcatgagcatccccctgagcaggaaggatgccttcttccagatctacccagactgcctggcccaggccatctatgccaccttccacgaggccttccctgagagcagctacctgttcaatgatgagttcaaggaggacctgggcaacaacatcttcctgtggtgcagcggcctgaagccccagaagggcttctggatccactggaagctgaaggagctgagcaccaccaccatccacggcagcaagaaggccccagccaagtctgtgaaggagagaattgctgacagccaggagcacatcagcaccagcattgacttcaacatcatcaagatcctgaacaacccccgggcctacaccctgcccatcagcaaggaggagagccggctgagccggctggccaccaagagccactacagcagcacaggccctgagttcaacagagtgctcttcaactttggaggccagagccccctcatcctgtactacctgaagatgcatgagctggccggcatcagcaaggcccccaagaagaccaagatcaagctgaccaagatcttccaggagcccctgcctgcccccacctacagagatgtgatcaaggaggccaagaggcagtttgccaggaaccagaaggacttccgcatcctgcaggccaaggccaccaagaagccccatgaggtgaagcaggactttgagaagttcctgcacaagctgcggtctgaggccgagattgagcgggagtgtgtggccagcctgagcagcagcagcagcagcagccccagcagcacagacaactacaactttgaggaggaggagtactag

SEQ ID NO: 244193 - DNA, 1527 bp, Artificial Sequence
  derived and/or modified sequence
atggccggccagcggacctgccagcggcggagcagccgggccggccccggaaagatgcaggagcctcccaaaagtatcgaagaattcctgaagttccaaaactgggattactggccaagagagattcacttccgagacgacgacaagtggtcatgcacgcttaaaaaaattaaagaagattctagttttgtaagtatttatacccacctgtgggaaaacgtccccagaatttttgaggcgctgctcattatggagtcaaaactgaaggagtattctttaatcctgcagaaccatacctctgagatatttaagtggaagtcaatgatttctgagacgagttcttatcgcaagcttgagcgttacggtgagttcttaaaaaagtatcacaagaagaaaaaaatcatgctttcggacgagatggaaacagagaagaacatcgagggttgttcctttactggtttcaaggctaatgaactgacacaactcccacgtcatctggatgcagagcagatctatctgttcattctcaaggcccacaactttgatgagcgcgtatttaaaatctggaagacccactttctgtcagaagctagtatcgccctcctccatgactctttctggtggtggtttctccataagtttaggcccgaccgcgagaaccaggattgtttgtttgaccgaattagcgaatcctatgtcaccttgttcatgagtatccctctgtccaggaaggacgcattcttccagatctacccagattgtctcgcacaggcaatctatgcgacctttcacgaagccttccccgagtcaagttatctgttcaatgatgagttcaaggaagatctggggaataatatctttctgtggtgctccgggctcaagcctcagaagggattttggattcactggaagctgaaagaattgtcaaccactacaatccatggttctaagaaggctcccgcgaaatcggtgaaggagcgcatcgctgattctcaggaacatataagtacgagcattgacttcaatatcatcaagatcctgaataaccctagggcctacacactgcctatctccaaagaagaatcccgcttgagccgccttgcaacaaaatctcattactcctccacaggcccagaatttaatagggtcctatttaactttggcggccagagcccattaattctgtattacttgaaaatgcacgagttggcaggcattagcaaagcccctaaaaagactaagataaaactaactaagatcttccaggaacctctaccggctccaacctaccgcgatgtcatcaaggaagccaagagacagttcgccaggaaccagaaagactttcggatactccaggccaaagcaacaaagaaaccccatgaggttaagcaagacttcgaaaagtttctgcataagttacgcagtgaagccgaaatagagcgcgagtgtgtcgcttctctgtcttccagctccagctcgagcccatcttccacggacaactacaactttgaggaggaagaatactag

SEQ ID NO: 244194 - DNA, 1527 bp, Artificial Sequence
  derived and/or modified sequence
atggcagggcagcggacatgtcaaagaagatctagcagggccggaccaggtaaaatgcaggagccccctaagtctattgaggagttcttaaagttccagaactgggactattggcctagagagatccactttcgcgatgacgataagtggagctgcaccctgaaaaaaatcaaggaagactctagcttcgtgtcaatttacacgcacctgtgggaaaacgtgcctcgcatatttgaggccctgctgatcatggagtctaagctgaaagagtatagtctcatcctgcagaatcacacctccgagatcttcaagtggaagtcgatgatttccgagaccagcagctacaggaagttggagcggtatggcgaattcttgaagaaataccacaagaagaaaaaaatcatgctctccgacgaaatggagaccgaaaagaatattgaaggctgctcattcacaggctttaaggccaacgagctaacacagctgccacgtcatctggatgccgagcaaatttatctgttcattctaaaagcccacaactttgatgaacgcgtgttcaagatatggaaaacacactttttgtctgaggcttctattgccttgctccacgatagcttttggtggtggtttctgcataaattccggcctgatcgggagaatcaggactgcctcttcgatagaatctcggaaagttatgtcacgctttttatgagcatcccccttagtcggaaagatgcctttttccagatttacccagattgcctcgctcaggccatttacgcaacttttcacgaagcattcccagagtcatcatatttgttcaacgacgagtttaaagaggatctcgggaataatatatttctatggtgttcaggactgaagccccagaaggggttttggatccattggaaattaaaagagctctctactactaccatccacggatccaaaaaggcccctgctaagagcgtcaaggagcgtatcgctgacagccaggagcacatctccacttcgatcgacttcaacatcataaaaatcctcaataatcctcgcgcttatacactacccatttcaaaggaagagagcagactgagtaggctggcaaccaagtcccactattcctcaaccgggccagaatttaaccgggtgctgtttaacttcggaggacagtctcctctgattctttattacttgaaaatgcatgagctcgccggaatttcaaaagccccaaaaaagaccaagatcaaactgaccaaaatattccaagagcctcttccggctcccacgtatagagatgtcatcaaagaggctaaaaggcagttcgcgagaaatcagaaagactttagaatcctccaggcaaaggctactaagaagcctcacgaagtgaaacaggatttcgagaagtttcttcacaaactgaggtccgaggcggagatcgagcgcgaatgcgtcgcctctctgagtagcagctcctctagttccccaagttccaccgataactacaattttgaggaagaggagtattag

SEQ ID NO: 244195 - protein, 471 aa, Artificial Sequence
  derived and/or modified sequence
MENLKHIITLGQVIHKRCEEMKYCKKQCRRLGHRVLGLIKPLEMLQDQGKRSVPSEKLTTAMNRFKAALEEANGEIEKFSNRSNICRFLTASQDKILFKDVNRKLSDVWKELSLLLQVEQRMPVSPISQGASWAQEDQQDADEDRRAFQMLRRDNEKIEASLRRLEINMKEIKETLRQYLPPKCMQEIPQEQIKEIKKEQLSGSPWILLRENEVSTLYKGEYHRAPVAIKVFKKLQAGSIAIVRQTFNKEIKTMKKFESPNILRIFGICIDETVTPPQFSIVMEYCELGTLRELLDREKDLTLGKRMVLVLGAARGLYRLHHSEAPELHGKIRSSNFLVTQGYQVKLAGFELRKTQTSMSLGTTREKTDRVKSTAYLSPQELEDVFYQYDVKSEIYSFGIVLWEIATGDIPFQGCNSEKIRKLVAVKRQQEPLGEDCPSELREIIDECRAHDPSVRPSVDEILKKLSTFSK

SEQ ID NO: 244196 - DNA, 1416 bp, Artificial Sequence
  derived and/or modified sequence
atggagaacctgaagcacatcatcaccctgggccaggtgatccacaagagatgcgaggagatgaagtactgcaagaagcagtgcagaagactgggccacagagtgctgggcctgatcaagcccctggagatgctgcaggaccagggcaagagaagcgtgcccagcgagaagctgaccaccgccatgaacagattcaaggccgccctggaggaggccaacggcgagatcgagaagttcagcaacagaagcaacatctgcagattcctgaccgccagccaggacaagatcctgttcaaggacgtgaacagaaagctgagcgacgtgtggaaggagctgagcctgctgctgcaggtggagcagagaatgcccgtgagccccatcagccagggcgccagctgggcccaggaggaccagcaggacgccgacgaggacagaagagccttccagatgctgagaagagacaacgagaagatcgaggccagcctgagaagactggagatcaacatgaaggagatcaaggagaccctgagacagtacctgccccccaagtgcatgcaggagatcccccaggagcagatcaaggagatcaagaaggagcagctgagcggcagcccctggatcctgctgagagagaacgaggtgagcaccctgtacaagggcgagtaccacagagcccccgtggccatcaaggtgttcaagaagctgcaggccggcagcatcgccatcgtgagacagaccttcaacaaggagatcaagaccatgaagaagttcgagagccccaacatcctgagaatcttcggcatctgcatcgacgagaccgtgacccccccccagttcagcatcgtgatggagtactgcgagctgggcaccctgagagagctgctggacagagagaaggacctgaccctgggcaagagaatggtgctggtgctgggcgccgccagaggcctgtacagactgcaccacagcgaggcccccgagctgcacggcaagatcagaagcagcaacttcctggtgacccagggctaccaggtgaagctggccggcttcgagctgagaaagacccagaccagcatgagcctgggcaccaccagagagaagaccgacagagtgaagagcaccgcctacctgagcccccaggagctggaggacgtgttctaccagtacgacgtgaagagcgagatctacagcttcggcatcgtgctgtgggagatcgccaccggcgacatccccttccagggctgcaacagcgagaagatcagaaagctggtggccgtgaagagacagcaggagcccctgggcgaggactgccccagcgagctgagagagatcatcgacgagtgcagagcccacgaccccagcgtgagacccagcgtggacgagatcctgaagaagctgagcaccttcagcaagtag

SEQ ID NO: 244197 - DNA, 1416 bp, Artificial Sequence
  derived and/or modified sequence
atggaaaatctgaaacatatcattacactgggccaggtaatacataaaagatgcgaggaaatgaagtattgcaagaaacagtgcaggagactgggccaccgggtgctgggtctaatcaagcccctggagatgcttcaggaccagggcaaacggtccgtgccaagcgaaaagttgacgactgctatgaatcgttttaaagccgctcttgaagaggcgaacggtgagatcgagaagtttagtaataggagcaatatttgccggttcctgactgcgtcccaggataaaatcttgtttaaagacgtcaacaggaaactgagtgatgtctggaaggaactcagcttgctcttgcaggtggaacagcgcatgccagtctcccctatctcgcagggcgctagctgggctcaggaggaccagcaggacgccgatgaggatagaagggctttccagatgctgaggcgtgacaatgagaagatagaggctagcttgaggcggctggaaattaatatgaaagaaattaaagaaacgctgcgacaatacctcccaccaaagtgtatgcaggagataccacaggaacaaataaaggagattaagaaggagcaactaagtggctctccctggattctccttagggaaaacgaagtgagtaccttgtataagggggagtaccatcgggcccccgtggctatcaaggtttttaagaagctgcaagctggttcaatagctatcgttagacaaactttcaacaaggagataaagaccatgaaaaagtttgaatcgccaaacatcctgcgcatatttggcatctgtatcgacgaaaccgtgactcccccacaatttagcatcgtgatggagtattgtgaattaggcactctgagagaattgctcgaccgtgaaaaggatctcactctgggaaagaggatggtgttagtgctgggcgcagcccgagggctttatagactccaccactcagaagctccagagctgcatggtaagatacgcagctcaaattttcttgtcacacagggataccaggtcaaactcgcagggttcgagctaaggaaaacccagacttcgatgagtctggggactactcgcgagaagaccgaccgcgtgaaatcaacggcgtacctgagccctcaggagctggaggatgtgttctaccaatacgatgtcaagtctgaaatatactcttttggaatagttctctgggaaatcgccactggcgacataccctttcaaggatgcaattcagagaagattcgaaaactcgtggcagtcaagagacagcaggaaccactgggagaagattgtccatcagagttacgcgagattatcgacgagtgtcgggctcacgacccgagcgtccgcccttctgtagacgagatccttaaaaagttgtctactttctctaagtag

SEQ ID NO: 244198 - DNA, 1416 bp, Artificial Sequence
  derived and/or modified sequence
atggagaacctgaagcacatcatcaccctgggccaggtgatccacaagagatgtgaggagatgaagtactgcaagaagcagtgccggcggctgggccaccgggtgctgggcctcatcaagcccctggagatgctgcaggaccagggcaagaggtctgtgcccagcgagaagctgaccacagccatgaaccgcttcaaggccgccctggaggaggccaatggagaaattgagaagttcagcaacagaagcaacatctgccgcttcctgacagccagccaggacaagatcctcttcaaggatgtgaacaggaagctgagtgatgtgtggaaggagctgagcctgctgctgcaggtggagcagaggatgcctgtgagccccatcagccagggcgcctcctgggcccaggaggaccagcaggatgctgatgaagatagaagagccttccagatgctgcggcgggacaatgagaagattgaggccagcctgcggcggctggagatcaacatgaaggagatcaaggagaccctgcggcagtacctgccccccaagtgcatgcaggagatcccccaggagcagatcaaggagatcaagaaggagcagctgagcggcagcccctggatcctgctgagagaaaatgaggtgtccaccctgtacaagggggagtaccaccgggcccctgtggccatcaaggtgttcaagaagctgcaggccggcagcatcgccatcgtgcggcagaccttcaacaaggagatcaagaccatgaagaagtttgagagccccaacatcctgcgcatcttcggcatctgcattgatgaaacagtgaccccaccccagttcagcatcgtgatggagtactgtgagctgggcaccctgcgggagctgctggaccgggagaaggacctgaccctgggcaagaggatggtgctggtgctgggcgccgcccggggcctgtaccgcctgcaccacagcgaggcccctgagctgcacggcaagatccgcagcagcaacttcctggtgacccagggctaccaggtgaagctggccggctttgagctgaggaagacccagacctccatgagcctgggcaccacccgggagaagacagacagagtgaagagcacagcctacctgagcccccaggagctggaggatgtgttctaccagtatgatgtgaagtctgagatctacagctttggcatcgtgctgtgggagatcgccactggagacatccccttccagggctgcaacagcgagaagatcaggaagctggtggccgtgaagaggcagcaggagcccctgggggaggactgccccagcgagctgcgggagatcattgatgaatgtcgggcccatgaccccagcgtgcggcccagcgtggatgagatcctgaagaagctgagcaccttcagcaagtag

SEQ ID NO: 244199 - DNA, 1416 bp, Artificial Sequence
  derived and/or modified sequence
atggagaacctgaagcacatcatcaccctgggccaggtgatccacaaacgctgcgaagagatgaagtactgtaaaaagcaatgccgaaggctgggccacagggtgttggggcttattaagcccctagagatgctgcaagaccaaggtaaacgaagtgtaccttcagaaaagctcactaccgcgatgaatcgctttaaagcggcccttgaagaggctaatggtgagatcgagaagttttccaacagaagtaatatttgtaggttccttacagctagccaggacaagatcctgttcaaggacgttaatcgcaaactgagtgatgtgtggaaggagctctctctcttgttgcaggtcgagcaacggatgccagtgtcgcctataagccaaggtgctagttgggcacaagaggaccagcaggacgccgatgaggatcggcgcgcattccaaatgctgcgacgggataacgagaaaatcgaggcgtcgttaagacgtctggaaattaacatgaaggagattaaggaaactctgcgacagtacctgcctcccaaatgtatgcaggaaattccgcaggaacagattaaggaaatcaagaaggaacagctcagcgggtccccttggattctgttgcgagagaacgaggtctctactctctacaaaggcgaatatcatcgtgctcctgttgccatcaaagtctttaagaagctgcaagcagggagcatagcaattgttagacagacgttcaataaggagatcaagaccatgaaaaaatttgagtctccaaacatcctgcgaatcttcggcatttgcatcgatgagacagtgacaccaccccaattctctattgtgatggaatattgtgaacttgggaccctgcgagagctgctcgatcgggagaaggacctgacactgggtaagagaatggtgctggtactgggagccgcacgcggattgtatagattgcatcattccgaggcacccgagttacatggcaagatacggagctctaacttccttgtgactcaggggtaccaggtcaaactggctggattcgagctccgaaagacccagacttctatgtctctagggacgacgagggagaaaaccgaccgcgtaaagtccactgcttatctttccccacaggaactcgaggatgtcttttaccagtacgacgtaaaaagcgaaatttactcattcggcattgtgctgtgggagattgccaccggagacatccccttccagggttgtaacagcgagaagatacgaaaacttgtagccgtgaagcgccagcaggagcccttgggagaagactgtccctccgagttgcgggaaatcatcgatgaatgtagggcgcacgacccatctgtaaggcccagtgtggatgaaatcctgaagaagctttcaacatttagcaaatag

SEQ ID NO: 244200 - DNA, 2504 bp, Artificial Sequence
  derived and/or modified sequence
agaaagcggctccagggagccagggcaccgtgagcctggtggttggcagctggagccacgtcggagggggaagtgtcgcagcattctctgcaggcatcacagacctgaggcagtggcctccggagggcactggacagaaacagccatccaagtggctgagtggagggaccctgctcaagtgcagctgcagtggccggggtttccctcaggtagggatcggggcgccttgtcgccgccagccacgtgtggcgtccggtacagtcagcagagtgcagggtgcgggcaccaggaaagggggcgcaggggaactcccgcgggcctcgcgtttgcaaacttctcgcctgggcaggaggcggtcgtgggaaagaaggtggaagagcgagctttttggaactgtgcacgggacagattggacgcacacccctcgggaggcgcgaaggcatggaaaatttgaagcatattatcacccttggccaggtcatccacaaacggtgtgaagagatgaaatactgcaagaaacagtgccggcgcctgggccaccgcgtcctcggcctgatcaagcctctggagatgctccaggaccaaggaaagaggagcgtgccctctgagaagttaaccacagccatgaaccgcttcaaggctgccctggaggaggctaatggggagatagaaaagttcagcaatagatccaatatctgcaggtttctaacagcaagccaggacaaaatactcttcaaggacgtgaacaggaagctgagtgatgtctggaaggagctctcgctgttacttcaggttgagcaacgcatgcctgtttcacccataagccaaggagcgtcctgggcacaggaagatcagcaggatgcagacgaagacaggcgagctttccagatgctaagaagagataatgaaaaaatagaagcttcactgagacgattagaaatcaacatgaaagaaatcaaggaaactttgaggcagtatttaccaccaaaatgcatgcaggagatcccgcaagagcaaatcaaggagatcaagaaggagcagctttcaggatccccgtggattctgctaagggaaaatgaagtcagcacactttataaaggagaataccacagagctccagtggccataaaagtattcaaaaaactccaggctggcagcattgcaatagtgaggcagactttcaataaggagatcaaaaccatgaagaaattcgaatctcccaacatcctgcgtatatttgggatttgcattgatgaaacagtgactccgcctcaattctccattgtcatggagtactgtgaactcgggaccctgagggagctgttggatagggaaaaagacctcacacttggcaagcgcatggtcctagtcctgggggcagcccgaggcctataccggctacaccattcagaagcacctgaactccacggaaaaatcagaagctcaaacttcctggtaactcaaggctaccaagtgaagcttgcaggatttgagttgaggaaaacacagacttccatgagtttgggaactacgagagaaaagacagacagagtcaaatctacagcatatctctcacctcaggaactggaagatgtattttatcaatatgatgtaaagtctgaaatatacagctttggaatcgtcctctgggaaatcgccactggagatatcccgtttcaaggctgtaattctgagaagatccgcaagctggtggctgtgaagcggcagcaggagccactgggtgaagactgcccttcagagctgcgggagatcattgatgagtgccgggcccatgatccctctgtgcggccctctgtggatgaaatcttaaagaaactctccaccttttctaagtagtgtatcaaaatctaaaccaaggagtctctggacaagaagctgggagaggcacaaactggacatctctctctctcatatccttcggcattgggttatctatgggtgcaaggagtgggcacgcttctctgttacaaatagaaaacgattccagtcatacaggacacatcccactccaaatgatatttccaaaaacatacctctgacagtaactttgatagatggtttgtcaaatgtatctttctgggtatccacacctcttggcaatgaaatttgcagctcctcccttccataaatgaagtctctttccccaccatttgaatctgggctggcactgtgacttgatttgatcaatagaatgtggaagaagtgactgtatgccagttccaagcctaggtttcaagaggccttataaatgtctgttggaaccttacccagccatgaacatgttgagtgagcatgctggagaatgagagaccacatgaagcagaaacatgctttcctagctgaagtcatactagcccaaccaacatggcagctaacacatgaatgaggccaatcaagaccagaagaaccactcaagcagatcccagcccaaattgcccattcacacaatcaggagctaaataaattactgttgtcttaacact

SEQ ID NO: 244201 - DNA, 1416 bp, Artificial Sequence
  derived and/or modified sequence
atggagaatctgaagcatattattacacttgggcaggtcatccacaagcgatgtgaggagatgaagtactgtaagaaacagtgtaggaggcttgggcaccgtgtgttggggctcattaagccgctcgagatgcttcaggaccaaggtaaaagatcggtaccaagtgagaaactcacaaccgccatgaacagattcaaagctgcactcgaagaggctaatggagagatcgagaaatttagcaatagatctaacatctgtaggttcctgacagccagccaggataaaatcctttttaaggacgtcaatcgtaagttatctgatgtttggaaagagctgagtttacttctgcaggtggagcagcgcatgcccgtaagtccgatttctcagggggcttcctgggcgcaggaagatcagcaggacgccgacgaggatagacgggcatttcaaatgctgcggagagataatgagaagatcgaagcttctctgagaaggttggagatcaacatgaaagaaattaaggagaccttacggcaatatttacccccaaagtgtatgcaggagatcccccaggagcagattaaggaaattaaaaaggagcagctatcgggctctccatggatattgctcagagagaatgaggtgagcactctgtacaagggagagtatcacagggcaccagttgccataaaagtatttaaaaagctgcaggccggaagcattgctatcgtacgccagacctttaataaagaaataaaaaccatgaaaaagtttgaaagcccaaacatcctgcggatttttggcatctgcattgatgaaacagtcactcctccacagttttcaattgtgatggaatattgcgaactggggaccctgagggagctgctcgacagggagaaggatctgactctcgggaaaaggatggtgctggtgctcggggcagccaggggtttgtatagactccaccatagcgaggctccagaactgcacggcaaaatccgctcatctaactttctcgtcacccagggatatcaggtgaagctggctggtttcgagttacggaagacacagacctccatgagcctcgggacaactagagagaagacagatagggtgaagtctacggcatacttgtccccccaggaattagaagatgtattttatcaatatgatgtcaaatcagaaatatattccttcgggattgtgctgtgggagatagccaccggtgacataccctttcaaggctgtaactcagaaaaaattcgcaaactggtagctgtgaagcggcagcaggaaccgctgggcgaagattgtcccagcgaacttagggagatcatcgacgaatgtcgggcacacgaccctagtgttcgcccttcggttgacgaaattttgaaaaagctgtcaaccttctccaagtag

SEQ ID NO: 244202 - protein, 201 aa, Artificial Sequence
  derived and/or modified sequence
MSTEAQRVDDSPSTSGGSSDGDQRESVQQEPEREQVQPKKKEGKISSKTAAKLSTSAKRIQKELAEITLDPPPNCSAGPKGDNIYEWRSTILGPPGSVYEGGVFFLDITFSPDYPFKPPKVTFRTRIYHCNINSQGVICLDILKDNWSPALTISKVLLSICSLLTDCNPADPLVGSIATQYMTNRAEHDRMARQWTKRYAT

SEQ ID NO: 244203 - DNA, 606 bp, Artificial Sequence
  derived and/or modified sequence
atgagcaccgaggcccagagagtggacgacagccccagcaccagcggcggcagcagcgacggcgaccagagagagagcgtgcagcaggagcccgagagagagcaggtgcagcccaagaagaaggagggcaagatcagcagcaagaccgccgccaagctgagcaccagcgccaagagaatccagaaggagctggccgagatcaccctggaccccccccccaactgcagcgccggccccaagggcgacaacatctacgagtggagaagcaccatcctgggcccccccggcagcgtgtacgagggcggcgtgttcttcctggacatcaccttcagccccgactaccccttcaagccccccaaggtgaccttcagaaccagaatctaccactgcaacatcaacagccagggcgtgatctgcctggacatcctgaaggacaactggagccccgccctgaccatcagcaaggtgctgctgagcatctgcagcctgctgaccgactgcaaccccgccgaccccctggtgggcagcatcgccacccagtacatgaccaacagagccgagcacgacagaatggccagacagtggaccaagagatacgccacctag

SEQ ID NO: 244204 - DNA, 606 bp, Artificial Sequence
  derived and/or modified sequence
atgtcaacagaggctcagcgcgtggatgactcgccttccactagcgggggttccagtgatggagatcagcgagaaagcgtgcagcaggaacctgaacgggagcaggtccagcctaagaaaaaggaggggaaaataagcagcaaaacagccgctaagctgagcacgagtgcaaagcggatacaaaaggaactagcggagatcaccctggatccacctccgaattgtagcgctggacccaagggcgataatatctatgaatggcgtagcaccattcttgggccgcctgggtcagtttacgaggggggtgtcttttttctggatattacctttagtcctgactacccctttaagccacctaaggtaaccttccgtactaggatctaccattgtaacatcaatagtcagggcgtcatttgccttgatatcctgaaggacaactggtcacccgcgctgacaataagcaaggtgctccttagtatctgctctctgctgactgactgtaaccctgccgatcccctcgtaggttccattgcaacccagtacatgacaaacagggccgagcatgaccggatggcccggcagtggacgaagaggtatgcaacgtag

SEQ ID NO: 244205 - DNA, 606 bp, Artificial Sequence
  derived and/or modified sequence
atgagcactgaggctcagagagtggacgacagtccaagtacctctggaggatcttcagatggtgatcaacgagaatcagttcagcaggaacccgagcgggagcaggtgcagcctaaaaaaaaagaaggcaagatctcaagtaagactgccgcgaaactgtctacttcagccaagaggatccagaaggagttggccgaaatcacgctcgaccctcccccgaactgttccgctggacccaaaggcgacaacatatacgaatggcggtcaacaatactcggaccccccggatctgtgtatgaaggtggcgtctttttcttagacattaccttcagccctgactatcccttcaaaccacctaaggttactttccgcactaggatctaccattgcaacatcaactcgcagggcgttatctgtttagatattttaaaagataactggagcccagctctaaccatctcgaaggtccttcttagcatttgtagcctcctgacagactgtaatccagccgaccccctggtaggctcgatcgcgacccagtacatgacgaaccgggccgaacacgaccgtatggcgcgccagtggacgaaacgctacgctacttag

SEQ ID NO: 244206 - DNA, 606 bp, Artificial Sequence
  derived and/or modified sequence
atgagcacagaggcccagagggtggatgacagccccagcaccagcggcggcagcagtgatggagaccagcgggagagcgtgcagcaggagcctgagcgggagcaggtgcagcccaagaagaaggagggcaagatcagcagcaagacagctgccaagctgagcaccagcgccaagaggatccagaaggagctggccgagatcaccctggaccccccacccaactgcagcgctggccccaagggggacaacatctatgagtggaggagcaccatcctgggccccccaggctctgtgtatgaaggaggagtcttcttcctggacatcaccttctccccagactaccccttcaagccacccaaggtgaccttccgcacccgcatctaccactgcaacatcaacagccagggcgtcatctgcctggacatcctgaaggacaactggagccctgccctgaccatcagcaaggtgctgctgagcatctgcagcctgctgacagactgcaacccagctgaccccctggtgggcagcatcgccacccagtacatgaccaacagagctgagcatgacaggatggcccggcagtggaccaagagatatgccacctag

SEQ ID NO: 244207 - DNA, 606 bp, Artificial Sequence
  derived and/or modified sequence
atgagcaccgaggcccagcgggtggacgacagccccagcaccagcggcggatcaagcgacggggaccagagggaatctgtgcagcaggagcccgaacgcgaacaggttcagcccaaaaagaaagaagggaaaatttccagcaaaacggcggcaaagctatccacctcggccaagcggatccagaaagaattagctgagataaccctcgatccccccccgaattgcagcgcgggacccaaaggagataatatctacgagtggcgctctacaattctgggtccaccagggagtgtgtacgaaggtggcgtattttttctggatatcacttttagccccgactacccgttcaaacctccaaaagtcacttttcgcacacgcatctatcactgcaatattaactcccaaggcgtgatttgcttggacatactcaaggacaattggtcccccgctctcacaattagcaaagttctcctgagcatttgcagcctgctgactgactgtaatcctgccgacccccttgtgggaagcattgcgacccaatacatgaccaaccgcgccgaacacgaccgcatggccaggcagtggaccaaaagatatgccacttag

SEQ ID NO: 244208 - DNA, 606 bp, Artificial Sequence
  derived and/or modified sequence
atgagcaccgaggcccagcgggtggacgacagccccagcaccagcggcgggagttctgatggagatcagagagaaagcgtgcagcaggaacccgagcgcgagcaggtgcagcctaagaaaaaggaaggaaaaataagttccaaaaccgcagcaaaactgagcacttcagcgaagcgtatacaaaaggaattggctgagatcaccctagatcccccccctaattgcagtgcaggtccgaagggagataacatttatgaatggagatctaccatcctcgggccccctggttctgtgtatgaaggcggagtcttctttctagatatcaccttcagccccgactacccctttaaaccgccgaaagtcaccttcaggacacgcatctatcattgcaacatcaactcgcaaggagtgatttgcttagatattctcaaggacaactggtcaccagcactaactattagcaaggtgttactgagcatttgctccctactcaccgattgcaacccagctgatccactagtgggttccatagcaacccagtatatgaccaacagggcagagcacgacaggatggcaagacagtggaccaagaggtatgcaacatag

SEQ ID NO: 244209 - DNA, 606 bp, Artificial Sequence
  derived and/or modified sequence
atgagcactgaggcacagagagtcgatgattcaccttcgacatcagggggttccagcgacggggaccaacgagagtccgtgcaacaagagccagagcgggaacaggtccagccaaaaaaaaaagaaggcaagatttcctccaagaccgctgctaagctctctacttcggcaaagaggattcagaaggaactggctgagatcacattagatcccccaccaaattgttccgccggtccaaagggggacaatatatacgaatggagatccacaattttaggtcctcccggatccgtgtatgagggcggtgtgttttttctagatatcacatttagccccgactacccgttcaagccgcctaaggtgaccttcaggactagaatctatcactgcaacatcaatagtcagggagtgatctgcctcgatatactcaaagataactggtcacctgcactcacgatctctaaggtgctgctttccatatgctccctgctgaccgattgcaacccggctgatcctttggtcgggagcattgctactcaatatatgacgaatcgagcagagcacgatcggatggcacggcagtggaccaaacgctatgccacgtag

SEQ ID NO: 244210 - DNA, 606 bp, Artificial Sequence
  derived and/or modified sequence
atgtcaacggaggcccagcgtgtagatgactctccttccacaagcggaggcagctccgatggagatcaaagagagtccgtgcaacaggagcctgagcgtgaacaggtccagccaaagaagaaggagggaaagatctcttccaaaactgccgcaaaactgtctactagcgctaagcggatccaaaaggaactggctgaaataacgctggaccctccccctaactgcagcgccggaccaaaaggcgataatatctatgaatggagaagtaccattctcgggcctcctggatctgtatacgaaggaggggtcttcttccttgacatcacctttagccccgactaccccttcaagcccccaaaggtgacgtttagaactagaatctatcattgcaacataaacagtcagggagtgatttgcctcgacatactgaaggataattggtcccccgctctgaccatcagtaaggtgctgctctcaatatgttcattgctgacagactgcaaccctgccgaccccctggttggcagcatcgcaacacagtacatgaccaacagggctgagcacgaccgaatggctcggcagtggactaaacgatatgccacctag

SEQ ID NO: 244211 - DNA, 2748 bp, Artificial Sequence
  derived and/or modified sequence
gacaggcgtggtcgggtgcgtggtgcgtgggtccggctttcggtgactagacggtccgcaggggacatcccgtccctggggcctccccagtctccctccccctcgcgcctgggcagctctctcccagggcttcggctcgagcctgcgacctgcacggacacccccccctcaggatctaaaatgtccactgaggcacaaagagttgatgacagtccaagcactagtggaggaagttccgatggagatcaacgtgaaagtgttcagcaagaaccagaaagagaacaagttcagcccaagaaaaaggagggaaaaatatccagcaaaaccgctgctaaattgtcaactagtgctaaaagaattcagaaggaacttgcagaaatcacattggaccctcctcccaactgtagtgctggacccaaaggagacaacatttatgaatggaggtcaactatattgggacccccaggatctgtctatgaaggaggggtgttctttcttgacattaccttttcaccagactatccgtttaaaccccctaaggttaccttccgaacaagaatctatcactgtaatattaacagccaaggtgtgatctgtctggacatcttaaaggacaactggagtccggctttaactatttctaaagttctcctctccatctgctcacttcttacagattgcaaccctgctgaccctctggtgggcagcatcgccacacagtacatgaccaacagagcagagcatgaccggatggccagacagtggaccaagcggtacgccacataggggcctgctgcctgccgccccgcgggacctgtgcaagcacattcaccaagtgcatcggtagccctgcccacccctccagacctcggttcttattttcctatttttattaaatttggaaccattttgtgatggtatgttgtccatcttcccatcccagttcttcctgccccccttcctctctcccacgctctcttttatctctcattttattcccttgttgatttctgttaacttgaaagatttgggattttttcccacctcatcatagatgggaacttttgttttcagtgcaaacaatgttggagctgtaatagtaagagctttcttacaaagctttgtattactgtgtggttttgttttttttgttgttgtttatttgattttgatttttttttcttttatgtgatctttgggaaaacacattcagaattatatctcgtttctacttaaatgtagtgcttagggttaattttttgtactgaagtctttattggtgggtgcatgctactgggaacaagtttttgtacaaaagcttcaatcagaatcactgtgcattactgagactctgtttatcactagccttctgtccctcccgcagaagactgttggattgaacaaaataatatgtattttgatttacttaaagtgcttgtaaatttcttagggacctgccacttttgactgtggatcagttgatgtacacttgtattattaaagcactcaataaatcactgtggctgataactgcacttctggtaacccgacatttgctttgtgtcctggtgaccgctgtagccctacgtgcagtgaggcttgtctaattcaattacaggttcaagtgtatttttcatctcaaacctctaatatttctttggagttgagttgcttagcatgtggaatttctccagctgtcagtagcctgatgattttatggttgttatagtaaattgctatcattttacatattgactgggcattctttctgttacagccttctttatcaacaattaaaatatgtaactccaaaaatagccttcttgtgaaagtgaagtctgagctaatcattgtgttcagccactttcaactttatttctctcaaaattgttacagtgattgccctcaagctttgtattgttcatttttgttgttgttgttgttgttgttgctgctcttttttctccatgattttagcaaaagaagtaaactcaactgtattggtcacggtcagcccattcaatgacaagggtgtctgtctggcttcaccttcaggctattttagtgtgcagctataggaggcagaggaaacgtgggtggtgtagtttctaaaacacgctgacttgctgattgataattcagggttattagtgtaacaaagcgtagtggaaactcctactcctgctgcaccatacagttacagaccctaccatactcttggtctcatttaaggaaccattaacaccttcactgctgaaaagcaggatttataagcataagtcatccacctctaaatattttaacatttaaaatgcctgattcaaaagatacagtttttgttgtttttaactagttaaaaataaatcctaagaaaatatatttaaatattgcaaatgccacttctaaaccaaaatacctgagaatattttttgtctttttaataacgattttaccattcattttatttaaaaacatttctcagcatagcagggcactgtatggtctctgatgcactactcaaccctctagttgtagtagagggagccacagacagtacataaatgcattgggcagagctatattccagtgaaactttatttaccaccataggcatgggatttggcccatgggttgtagtttgccaatccctgacacagaccaacatagactgggggctggatgaaaaacaaataacgatgtgtcatttctttctttaacataaaataaattcaatatggtacaacactg

SEQ ID NO: 244212 - DNA, 1248 bp, Artificial Sequence
  derived and/or modified sequence
gaggagggaggcgcgcggcgccgcatggccgacgtggggctcgcgctctcgcggtctctcccgggcgggcgcgcaggcacgcgcactcgcgggtgcgcgcgcggacggccgggcggcggcggctcccggaggtggtggcttcactttccaggactcaggggcagccacagcgacagccgcgggcagcagcctcaggagccggagctggaacggccgggggcggcggcagcggcggcgctgagggatctaaaatgtccactgaggcacaaagagttgatgacagtccaagcactagtggaggaagttccgatggagatcaacgtgaaagtgttcagcaagaaccagaaagagaacaagttcagcccaagaaaaaggagggaaaaatatccagcaaaaccgctgctaaattgtcaactagtgctaaaagaattcagaaggaacttgcagaaatcacattggaccctcctcccaactgtagtgctggacccaaaggagacaacatttatgaatggaggtcaactatattgggacccccaggatctgtctatgaaggaggggtgttctttcttgacattaccttttcaccagactatccgtttaaaccccctaaggttaccttccgaacaagaatctatcactgtaatattaacagccaaggtgtgatctgtctggacatcttaaaggacaactggagtccggctttaactatttctaaagttctcctctccatctgctcacttcttacagattgcaaccctgctgaccctctggtgggcagcatcgccacacagtacatgaccaacagagcagagcatgaccggatggccagacagtggaccaagcggtacgccacataggggcctgctgcctgccgccccgcgggacctgtgcaagcacattcaccaagtgcatcggtagccctgcccacccctccagacctcggttcttattttcctatttttattaaatttggaaccattttgtgatggtatgttgtccatcttcccatcccagttcttcctgccccccttcctctctcccacgctctcttttatctctcattttattcccttgttgatttctgttaacttgaaagatttgggattttttcccacctcatcatagatgggaacttttgttttcagtgcaaacaatgttggagctgtaatagtaagagctttcttacaaagctttgtattactgtgtggttttgttttttttgttgttgtttatttgattttgattttt

SEQ ID NO: 244213 - protein, 189 aa, Artificial Sequence
  derived and/or modified sequence
MLLGQLSTLLCLLSGALPTGSGRPEPQSPRPQSWAAANQTWALGPGALPPLVPASALGSWKAFLGLQKARQLGMGRLQRGQDEVAAVTLPLNPQEVIQGMCKAVPFVQVFSRPGCSAIRLRNHLCFGHCSSLYIPGSDPTPLVLCNSCMPARKRWAPVVLWCLTGSSASRRRVKISTMLIEGCHCSPKA

SEQ ID NO: 244214 - DNA, 570 bp, Artificial Sequence
  derived and/or modified sequence
atgttgcttggacagctcagcaccctcctctgcttgctcagcggggctctcccgacaggctctggcagaccagagccacagtctcccaggccccagtcctgggccgctgcaaatcaaacatgggccctgggccctggggcactgccacctctagtgccagcctcagcattaggcagctggaaagccttcctgggcttgcagaaagccaggcaattaggcatgggacgtctccagcgcggacaagacgaggtggcagcagtaaccctgccacttaatccccaggaggtaattcagggcatgtgtaaagccgtgccttttgtgcaggtgttttcaaggcccggatgtagtgccattaggctaagaaaccacttatgttttggacattgctccagcctttacatacccggttccgacccaaccccactcgtgctttgcaacagctgcatgccagcccgtaaacgctgggcacccgtggtgctctggtgcctgaccggaagctctgctagccggcgtcgagtgaaaatctcaactatgttaatcgagggctgtcattgctctccaaaagcctag

SEQ ID NO: 244215 - DNA, 570 bp, Artificial Sequence
  derived and/or modified sequence
atgttattggggcaactgagtacattgctgtgtttattgtcaggtgccctgcccacaggtagtgggcgaccagagccacagtcaccccggccacaatcttgggccgccgccaaccaaacttgggctctgggtcccggcgccttaccacccctcgtacccgcctccgccctaggatcatggaaagcttttttgggcctacagaaagcacgacagctgggtatgggcagacttcagagagggcaggatgaagtagccgctgttactttgcctctcaacccccaggaggtgatccagggcatgtgcaaggccgtcccatttgtgcaagtgttttctcggcccgggtgcagcgctatacgacttaggaaccatctctgttttgggcactgttcctccctctatatcccaggatcagatccgactccactcgtcctatgtaactcttgcatgccagctcgaaaacgctgggcacctgttgtgctctggtgccttacaggctcctcagcttcccgaagacgagtcaagatctctaccatgctgattgagggatgccactgctcccccaaggcatag

SEQ ID NO: 244216 - DNA, 570 bp, Artificial Sequence
  derived and/or modified sequence
atgttgctgggacaactttccactttactgtgtttactatccggagctctaccgacaggcagtggccgaccggaaccccagtcgccacggccccaaagctgggccgccgctaatcagacctgggcactcggacctggcgccctcccaccactggtaccggcctccgcccttgggagctggaaggctttcctgggcctgcaaaaagctagacaactgggaatgggcagactccagagagggcaggatgaagtcgcggccgtgacactacccctcaacccgcaagaggtgattcagggaatgtgcaaggccgtccccttcgtccaggtcttttcccgcccaggttgttcagccatacggttgcgaaatcatctgtgcttcgggcattgtagttccctctacattccaggatccgatcctaccccattggtgttatgcaatagttgcatgccggctcggaagcggtgggcccccgttgtgctgtggtgtctcacaggttcttccgcgagtagacgaagagttaagatttccaccatgcttattgagggatgtcattgtagtcccaaagcttag

SEQ ID NO: 244217 - DNA, 570 bp, Artificial Sequence
  derived and/or modified sequence
atgctgctgggccagctgagcaccctgctgtgcctgctgagcggcgccctgcccaccggcagcggcagacccgagccccagagccccagaccccagagctgggccgccgccaaccagacctgggccctgggccccggcgccctgccccccctggtgcccgccagcgccctgggcagctggaaggccttcctgggcctgcagaaggccagacagctgggcatgggcagactgcagagaggccaggacgaggtggccgccgtgaccctgcccctgaacccccaggaggtgatccagggcatgtgcaaggccgtgcccttcgtgcaggtgttcagcagacccggctgcagcgccatcagactgagaaaccacctgtgcttcggccactgcagcagcctgtacatccccggcagcgaccccacccccctggtgctgtgcaacagctgcatgcccgccagaaagagatgggcccccgtggtgctgtggtgcctgaccggcagcagcgccagcagaagaagagtgaagatcagcaccatgctgatcgagggctgccactgcagccccaaggcctag

SEQ ID NO: 244218 - DNA, 1732 bp, Artificial Sequence
  derived and/or modified sequence
agtccggacagacagacaggcagacagacgcacggacaagcagatgctccttggccagctatccactcttctgtgcctgcttagcggggccctgcctacaggctcagggaggcctgaaccccagtctcctcgacctcagtcctgggctgcagccaatcagacctgggctctgggcccaggggccctgcccccactggtgccagcttctgcccttgggagctggaaggccttcttgggcctgcagaaagccaggcagctggggatgggcaggctgcagcgtgggcaagacgaggtggctgctgtgactctgccgctgaaccctcaggaagtgatccaggggatgtgtaaggctgtgcccttcgttcaggtgttctcccggcccggctgctcagccatacgcctccgaaatcatctgtgctttggtcattgctcctctctctacatccctggctcggaccccaccccactagtcctgtgcaacagctgtatgcctgctcgcaagcgttgggcacccgtggtcctgtggtgtctcactggcagctcagcctcccgtcgacgggtgaagatatccaccatgctgatcgaggggtgtcactgcagcccaaaagcatgaactgagcatcgtggatgggtgcacggagacacgcaccttggagaaatgaggggagatggaccaagaaagacgtggacctggatgatgtactctgggtcaagagaccagggatgcagggttaggcagacaggtccccagagtcctcaccctgctccccagacagtagacacagtgcccgtcctggagttgcaccactgatagtcacagcacacaatgattgacaactcactttttttttttttttttgagatggagtctcgctctgtcgcccaggctggagtgcagtggcgcaatctcagctcactgcaagctccacctcccgggtttatgccattctcctgtctcagcctcccgagtagctgggactacaggcacccgccaacacgcccggctaattttttgtatttttagtaaagacagggtttcaccgtgttagccaggatggtctctatctcctgacctcgtgatctgcctgccttggccttattattttttttttttaaggacagagtctctctctgtcacccaggctggagtgcaatggcgcgatcttggctcactgtaacttccacttgccaggctcaagcagttctcctgcctcagcctcctgagtagctgggactacaggcacccgccaccatgcccagctaatttttgtatttttagtagagacagagtttcaccatattagcctggctggtctcaaactcctggcctcaggtgatctgcccacctcggcctcccaaagtgctgggatcaaatccactgttaatcattaggctgaactgtctcttatagaatgaggtcaaagacactcccagttgcagggagggtagatggccccacccagaccgagagacacagtgatgacctcagcctagggacaccaaaaaagaaaaaaaaaaaaacccaaaccaaaaacgcaaaccaaagcaggcaggcagacagctgctgggggaaatcctggggtccttgagacagaggcaggaccctcgtgttcccagctgcctcttgccttgatagtggtgctgtgtccctctcagaccccccacctgagtctccacagagccccacgcctggcatggcattccacagaaaccataaaggttggctgagtcc

SEQ ID NO: 244219 - DNA, 570 bp, Artificial Sequence
  derived and/or modified sequence
atgctgctgggacagctgtctaccctcctttgcttactgagtggcgccctccccactggctccggacgacccgagccgcagagtcctcggccccaaagctgggccgcagctaaccagacctgggcgttgggccctggagctttgcctccccttgtgcctgctagtgccctgggatcttggaaagcgtttctcggtctccaaaaagccagacagctcgggatggggcggctgcagcgggggcaggatgaggtggccgctgttacattaccactgaatccgcaggaggtcattcaggggatgtgcaaggctgtgccattcgttcaggttttctcccgtccgggttgctctgcaatccggctaagaaaccatctctgtttcgggcattgctcaagtctttacatacccgggtccgatcctacacccctcgtgttatgcaattcctgcatgcctgccaggaagcggtgggcacctgtggtgttgtggtgcttgactgggtcctccgcttcccgacgccgtgtcaagatctccactatgctcatcgaaggctgccactgctcaccaaaggcctag

SEQ ID NO: 244220 - DNA, 570 bp, Artificial Sequence
  derived and/or modified sequence
atgctgctgggccagctgagcaccctgctgtgcctgctgagcggggccctgcccactggaagtggccggcctgagccccagagcccccggccccagagctgggccgccgccaaccagacctgggccctgggccctggggccctgccccccctggtgcctgccagcgccctgggctcctggaaggccttcctgggcctgcagaaggcccggcagctgggcatgggccgcctgcagaggggccaggatgaggtggccgctgtgaccctgcccctgaacccccaggaggtgatccagggcatgtgcaaggctgtgccctttgtgcaggtgttcagcaggcctggctgcagcgccatccggctgaggaaccacctgtgcttcggccactgcagcagcctgtacatccctggcagtgaccccacccccctggtgctgtgcaacagctgcatgcctgccaggaagcgctgggcccctgtggtgctgtggtgcctgaccggcagcagcgccagcagaagaagagtgaagatcagcaccatgctgattgagggctgccactgcagccccaaggcctag

SEQ ID NO: 244221 - DNA, 570 bp, Artificial Sequence
  derived and/or modified sequence
atgctgctgggccagctgagcaccctgctgtgcctgctgagcggcgcactgcctactgggagcgggcgaccagagcctcagagcccgcggcctcagtcgtgggctgctgctaatcagacatgggcccttggacctggcgctctgccaccactggtgcccgcttcagcgctagggtcttggaaggccttcttggggctccaaaaagcaaggcagctgggcatgggcaggctgcaacgaggacaagacgaagtggccgcagttaccttaccgttgaatccacaggaggtgatacagggcatgtgcaaggctgttccgttcgtgcaggtcttttctcgacccggctgttcggccatcagattacgtaatcatctttgtttcggccattgctcatctttgtatatacccgggtcagaccctacgcccttggttttgtgtaactcatgcatgccagcccgtaagcggtgggcccccgttgtgctgtggtgcctgacgggcagtagtgctagtaggagacgggttaaaatctcaacaatgctgattgaaggatgccattgctcccctaaagcgtag

SEQ ID NO: 244222 - DNA, 865 bp, Artificial Sequence
  derived and/or modified sequence
gaaggaggaaaggagtgagcatgtcctgctcctgcatgtccctgcttaagctcaggactggcccttccaggccaaggaccccagcatagaccccaggacagggccccaaggatccctggctcatgagagcggcttgctgggctgccccaagagagcctgaaggaaacacattgttgagctgagctgacgtcgctgtttcttccagactgctctctaaagtgggcagggtagcgaccggccggctccgatggtgacgtcccactgccaaggggtgggagtggggagagtctccacagagcttcggagaagctgctaagatggaaaagtggaaacttggcagacagatccagcctccctggccactggcccatgctcgtggctcctggatggcgctgccacgttctgagcagcttgggacaggtggagatcaggactggcagctgcaaggacacaccagagccacagaaactaaagagaatttccaaaaggagtctatggtgaagtctctgaggatgcaaagaagacaaggagaatgaaaatccaatgaaagcctgattgtatttgttgaccttaaggaaagtgattttatggtacagcctctctggaagggagggtgtgttcgctcacagaatgcaaataccctttgaccccctaatctttcttctaggagtttctcctacagataaacttagaagggtgctcaaataagtaagttcaaggatatcctctgaagcattgccgtagtataaaaaaagcacagataccctcaaaggacatcattaggggcctggtaaaataaattccacacagtggaacaccgtgtagctctttagagaataaacagctctctatatgtgatctggaa

SEQ ID NO: 244223 - RNA, 570 nt, Artificial Sequence
  derived and/or modified sequence
auguuauuggggcaacugaguacauugcuguguuuauugucaggugcccugcccacagguagugggcgaccagagccacagucaccccggccacaaucuugggccgccgccaaccaaacuugggcucugggucccggcgccuuaccaccccucguacccgccuccgcccuaggaucauggaaagcuuuuuugggccuacagaaagcacgacagcuggguaugggcagacuucagagagggcaggaugaaguagccgcuguuacuuugccucucaacccccaggaggugauccagggcaugugcaaggccgucccauuugugcaaguguuuucucggcccgggugcagcgcuauacgacuuaggaaccaucucuguuuugggcacuguuccucccucuauaucccaggaucagauccgacuccacucguccuauguaacucuugcaugccagcucgaaaacgcugggcaccuguugugcucuggugccuuacaggcuccucagcuucccgaagacgagucaagaucucuaccaugcugauugagggaugccacugcucccccaaggcauag

SEQ ID NO: 244224 - RNA, 570 nt, Artificial Sequence
  derived and/or modified sequence
auguugcugggacaacuuuccacuuuacuguguuuacuauccggagcucuaccgacaggcaguggccgaccggaaccccagucgccacggccccaaagcugggccgccgcuaaucagaccugggcacucggaccuggcgcccucccaccacugguaccggccuccgcccuugggagcuggaaggcuuuccugggccugcaaaaagcuagacaacugggaaugggcagacuccagagagggcaggaugaagucgcggccgugacacuaccccucaacccgcaagaggugauucagggaaugugcaaggccguccccuucguccaggucuuuucccgcccagguuguucagccauacgguugcgaaaucaucugugcuucgggcauuguaguucccucuacauuccaggauccgauccuaccccauugguguuaugcaauaguugcaugccggcucggaagcggugggcccccguugugcuguggugucucacagguucuuccgcgaguagacgaagaguuaagauuuccaccaugcuuauugagggaugucauuguagucccaaagcuuag

SEQ ID NO: 244225 - protein, 652 aa, Artificial Sequence
  derived and/or modified sequence
MGNLQSEPSAGGGSRKVQPSDRAPDSRRTSLVEPEMTSQAMRLTRGLGVWFPGSATPPGLMVPREPQASPSTLPLTLERPSPVMPPPEEAAAVSAPPPAPAGTLLPGPSKWQKPAGTPVPRIRRLLEASHRGQGDPPSLRPLKPPPPPRQLSVKDTVPRAPSQFPPPLETWKPPPPLPSERQPADRRITPALATPASPPTESQAGPRNQGQTAGRARGGAPPHAGEGEMAQPADSESGLSLLCKITFKSRPSLAPPAASSSLAAKASLGGGGGGGLFAASGAISYAEVLKQGPLPPGAARPLGEVSRGAQEAEGGDGDGEGCSGPPSAPASQARALPPPPYTTFPGSKPKFDWVSAPDGPERHFRFNGAGGGIGAPRRRAAALSGPWGSPPPPPEQIHSAPGPRRPAPALLAPPTFIFPAPTNGEPMRPGPPGLQELPPLPPPTPPPTLQPPALQPTPLPVAPPLTPGLGHKESALAPTAAPALPPALAADQAPAPSPAPAPTVAEPSPPVSAPAPAAAPIKTRTRRNKGSRAARGATRKDGLHGDGPRERATATVPDSSGGGGGGSGASQTGAANTRAARHWLPFQVLNSCPCKCYCHHQPRHRRLPRNVSAWLSTSTNHLGEPPWVATIKLSGSLVAKLEHYDLQATHSN

SEQ ID NO: 244226 - protein, 224 aa, Artificial Sequence
  derived and/or modified sequence
MGNLQSEPSAGGGSRKVQPSDRAPDSRRTSLVEPEMTSQAMRLTRGLGVWFPGSATPPGLMVPREPQASPSTLPLTLERPSPVMPPPEEAAAVSAPPPAPAGTLLPGPSKWQKPAGTPVPRIRRLLEASHRGQGDPPSLRPLKPPPPPRQLSVKDTVPRAPSQFPPPLETWKPPPPLPSERQPADRRITPALATPACVRARTRGCAHQDPHAQEQGFPCSPGRD

SEQ ID NO: 244227 - DNA, 2151 bp, Artificial Sequence
  derived and/or modified sequence
agaaggcctgggggcgaggaacaagacctcggagtatttcaaggggagacctagttccctgccctgccccgggcccagggcgccgcggtctgaactctgctcggctggaggactcgtctccgagctccgtcagaaatggggaacttgcagtcggagccatccgcgggcgggggctcccgaaaagtgcagccctcggaccgcgcccccgactcccgccggacgtccctggtggagcccgagatgacctcccaggccatgcgcctgactcgtgggctgggtgtctggttccctggcagcgccacacccccgggactcatggtaccccgggagccccaggcctcaccctcgaccctgcccctcaccttagaacggccctctccagtgatgccccctcctgaagaggcggccgcggtctctgcaccacccccggcccccgcggggactctgctgcccggcccgtctaaatggcaaaagcccgcgggcactccagttccccggatccgccgcctgctggaggcgagccatcgcggccagggcgaccctccgagcctccgcccgctgaagccgccgccgccgccccggcaactatccgtgaaggacactgtcccgagggccccatcccaatttccgccgcccctggagacttggaagccgccaccaccattaccttctgaacggcagccggcggaccgcagaatcactcctgctctggccacacccgcctcacccccgacagaaagccaggctgggccccgcaaccagggccagacggccggcagggctcgcggaggggcgcctccccatgcgggcgaaggcgaaatggcccagcctgcggattccgagtccggtctgagcctgctgtgtaaaatcaccttcaagtcgaggccctctttggcccctccggcagcctcgagttccttagcagccaaagcttcgctggggggcggcggaggcggcggcctctttgctgcctcaggtgccatctcttacgccgaggtcctgaagcaagggcccctgcctcctggagccgctcgccccttgggagaggtttctcgaggggcacaggaagccgagggaggtgatggagacggcgaagggtgctctggtcctccctcggcgcctgcgtcccaagcccgggccctaccgccgccaccctacaccaccttcccaggctcgaagcccaaattcgactgggttagcgctcccgacggccctgaacgccacttccgcttcaacggggctggcggaggcatcggggcgccgcgacggcgtgcggccgcactctctgggccttggggctcccctccgccaccaccagagcagatacactcagctcccgggccccggaggcccgcacctgccctgctggcgccgcctacgttcatcttcccagcacccaccaatggcgagcccatgcgcccggggcctccaggcctgcaggagttaccaccgctgccaccgcccacaccgccgcccacactgcagccaccagcgctccagccaacgccgctgccggtggctcccccgctcaccccgggtctgggccacaaggagtcagccctggctcccaccgcagcccctgctctgcccccagccttagccgccgaccaggccccggccccatccccggctccagctcccaccgtggctgagccctcgccgcctgtgtccgcgcccgcacccgcggctgcgcccatcaagacccgcacgcgcaggaacaagggttcccgtgcagcccggggcgcgacccgtaaggatggcttgcatggagatggtcctcgcgaacgagctacagctaccgtgcctgacagcagtggtggagggggtggtggcagcggggcctctcagactggggcagctaacacccgcgctgcgcgccactggctgcccttccaggtgcttaactcctgtccctgcaagtgttactgccaccaccagccacgccatcgccgcctgccacgcaacgtctctgcctggctgagcacatccaccaaccacctgggcgagccaccctgggttgccaccatcaagctgtccggctctctggtggccaagctggagcactacgacttgcaggccacccattccaactgagtgtagtcggctcaacaccctccaccttcccctccatgccaataaaataaccaatcc

SEQ ID NO: 244228 - DNA, 672 bp, Artificial Sequence
  derived and/or modified sequence
atggggaacttgcagtcggagccatccgcgggcgggggctcccgaaaagtgcagccctcggaccgcgcccccgactcccgccggacgtccctggtggagcccgagatgacctcccaggccatgcgcctgactcgtgggctgggtgtctggttccctggcagcgccacacccccgggactcatggtaccccgggagccccaggcctcaccctcgaccctgcccctcaccttagaacggccctctccagtgatgccccctcctgaagaggcggccgcggtctctgcaccacccccggcccccgcggggactctgctgcccggcccgtctaaatggcaaaagcccgcgggcactccagttccccggatccgccgcctgctggaggcgagccatcgcggccagggcgaccctccgagcctccgcccgctgaagccgccgccgccgccccggcaactatccgtgaaggacactgtcccgagggccccatcccaatttccgccgcccctggagacttggaagccgccaccaccattaccttctgaacggcagccggcggaccgcagaatcactcctgctctggccacacccgcctgtgtccgcgcccgcacccgcggctgcgcccatcaagacccgcacgcgcaggaacaagggttcccgtgcagcccggggcgcgac

SEQ ID NO: 244229 - DNA, 1959 bp, Artificial Sequence
  derived and/or modified sequence
atgggcaaccttcagtccgagcctagcgccggtggggggtcaagaaaggtgcagccttctgatagggcccccgacagcagaaggacttctctcgtggaacccgagatgacgagtcaggcgatgagactgacacggggtctcggagtgtggtttcccggcagtgctactccacccggtctgatggtgccccgtgaacctcaggcatctccatcaacattaccgcttacactggagaggccgtctcctgtgatgccacctccagaggaagccgccgctgtgagcgctccacccccggctcccgctggcaccctgctccctggtcccagtaagtggcagaagccagcgggaactccagtacctcgaatcaggagattgctggaagcttcccatcgaggccaaggagacccaccttcactgaggcccttaaagcctccgcccccccctaggcagttgtcagttaaggataccgtgcccagggccccaagccaatttccaccacccctagagacctggaaacctccacctccactcccatcggaaagacagccagccgatagacgaataacccctgcactggccacgccggccagcccaccaaccgagtctcaggcaggacctagaaatcagggccaaaccgccggacgagcacgcggaggtgcccccccccacgccggagagggcgagatggcccaacccgcagattcggaatcaggcctcagccttttatgtaaaatcaccttcaaatctcggccgagcctggcaccacccgcggcctccagcagcttggcagccaaggcctccctgggtggcggcggtggaggaggactcttcgcagcctccggagccatcagctacgcagaggttttaaagcagggaccccttccccccggcgccgctagacccctgggtgaagtatctaggggcgctcaggaggccgagggaggcgacggagatggagagggatgttccggaccgccatccgcccctgccagccaggccagggcattgcctcctcccccttacacgacgttcccaggcagcaagcctaagttcgactgggtttccgcgcccgatggacctgaaagacacttcagattcaatggggccggcggtggcatcggtgcaccacgcagacgggccgctgccctctccggtccctggggtagcccgcccccgcctccagaacagatacactccgcaccaggcccccggcgccccgcccccgctctgctggccccccctacctttatatttccagccccaacgaacggtgaacccatgagacctgggccaccaggtttgcaagagctgccccccctccctccccctacccccccccccacactacagccgccggccttgcagccaacccctctgccggtggctcccccacttacccccggtctgggccacaaggagtctgcacttgcacccaccgctgccccagccctcccgcccgcccttgccgctgatcaggcccccgctccctcccccgcaccagcacctactgtggctgagccttctcctccggtctcggcccctgcccctgccgcagcgccaattaaaacccgcactcgacggaacaaaggctcccgtgccgccagaggcgctacgcggaaagatggcttgcacggggatggtcctagagagagagctactgcaactgttccggatagctccggaggcggaggtgggggaagtggagcctctcagactggcgcagccaacactagggcggctcgtcactggctgcctttccaagtcctgaacagctgcccctgtaagtgttactgtcaccaccagcccagacataggaggctcccaaggaacgtgtccgcctggttgagcacttctacaaatcacttaggcgagccaccttgggtagctacaattaaactgagcggaagtcttgtcgcaaagctcgaacattatgatcttcaagcaacacactccaattag

SEQ ID NO: 244230 - DNA, 675 bp, Artificial Sequence
  derived and/or modified sequence
atgggaaacctccaaagcgagccgagcgccggcggtggttccaggaaagtgcaacccagcgaccgggcccctgattccaggcgaaccagcctggtagagcctgagatgacatcccaggcaatgcggctgactagaggtttaggggtatggtttcccggtagcgcgacacccccgggattgatggtcccgcgggaacctcaagcaagcccaagtacactgcccctcacactggagagaccaagtcccgtgatgcctccccctgaagaagccgctgccgtctctgcccctcccccggccccagccggaacgttgctgcctgggccttctaagtggcagaagccagccggtacgcctgtgcctaggatcaggcgtctgctggaggcctctcaccggggccagggcgatcctccatccctccgccccctcaaaccacccccccctccacggcagctgtcagtaaaggatacagtacccagggcacctagtcagttccccccccccctggaaacttggaagccaccacctccactcccctccgagaggcagccagccgaccgccgtataactcccgcactagccacacccgcatgtgttcgagccagaaccaggggctgtgcccaccaggacccgcacgcgcaagaacaggggttcccctgtagccctggccgagactag

SEQ ID NO: 244231 - DNA, 1959 bp, Artificial Sequence
  derived and/or modified sequence
atgggcaacctgcagagcgagcccagcgctgggggcggcagcaggaaggtgcagcccagcgaccgggccccagacagcaggaggaccagcctggtggagcctgagatgaccagccaggccatgaggctgacccggggcctgggcgtgtggttccctggcagcgccaccccacctggcctgatggtgccccgggagccccaggccagccccagcaccctgcccctgaccctggagcggcccagccctgtgatgcctcctcctgaggaggccgctgctgtgtctgcccctcctccagccccagctggcaccctgctgcccggccccagcaagtggcagaagccagctggcacccctgtgccccgcatccggcggctgctggaggccagccaccggggccagggcgacccccccagcctgcggcccctgaagcccccacctccaccccggcagctgtctgtgaaggacacagtgccccgggcccccagccagtttcctccacccctggagacctggaagcccccaccacccctgcccagcgagcggcagcctgctgaccggcgcatcaccccagccctggccaccccagccagccccccaacagagagccaggccggccccaggaaccagggccagacagctggccgggcccggggcggggcccctcctcatgctggggagggggagatggcccagcctgctgacagcgagagcggcctgagcctgctgtgcaagatcaccttcaagagccggcccagcctggcccctcctgctgccagcagcagcctggccgccaaggccagcctgggcggcggcggcggcggcggcctgtttgctgccagcggggccatctcctatgcagaggtgctgaagcagggccccctgcccccaggggccgcccggcccctgggggaggtgtccagaggagcccaggaggccgagggcggagatggagatggagagggctgcagcggccccccatctgccccagccagccaggcccgggccctgcccccaccaccctacaccaccttccctggcagcaagcccaagtttgactgggtgtctgccccagatggccctgagcggcacttccgcttcaatggagctgggggcggcattggagccccccggcggcgggctgctgccctgagcggcccctggggcagccccccacctcctcctgagcagatccacagcgcccctggcccccggcggcctgccccagccctgctggccccacccaccttcatcttccctgcccccaccaatggagagcccatgaggcctggccccccaggcctgcaggagctgccccccctgcccccacccaccccaccacccaccctgcagcccccagccctgcagcccacccccctgcctgtggccccacccctgaccccaggcctgggccacaaggagagcgccctggcccccacagctgccccagccctgcccccagccctggccgctgaccaggccccagcccccagccctgccccagcccccaccgtggccgagcccagcccccctgtgtctgccccagccccagctgctgcccccatcaagaccaggaccaggagaaataaaggcagcagagctgcccggggggccaccaggaaggatggcctgcatggagatggcccccgggagcgggccacagccaccgtgcctgacagcagcggcggcggcggcggcggcagcggggccagccagacaggagctgccaacaccagggctgcccggcactggctgcccttccaggtgctgaacagctgcccctgcaagtgctactgccaccaccagcccaggcaccggcggctgcccagaaatgtgtctgcctggctgagcaccagcaccaaccacctgggggagcccccctgggtggccaccatcaagctgagcggcagcctggtggccaagctggagcactatgacctgcaggccacccacagcaactag

SEQ ID NO: 244232 - DNA, 675 bp, Artificial Sequence
  derived and/or modified sequence
atgggcaacctgcagagcgagcccagcgctgggggcggcagcaggaaggtgcagcccagcgaccgggccccagacagcaggaggaccagcctggtggagcctgagatgaccagccaggccatgaggctgacccggggcctgggcgtgtggttccctggcagcgccaccccacctggcctgatggtgccccgggagccccaggccagccccagcaccctgcccctgaccctggagcggcccagccctgtgatgcctcctcctgaggaggccgctgctgtgtctgcccctcctccagccccagctggcaccctgctgcccggccccagcaagtggcagaagccagctggcacccctgtgccccgcatccggcggctgctggaggccagccaccggggccagggcgacccccccagcctgcggcccctgaagcccccacctccaccccggcagctgtctgtgaaggacacagtgccccgggcccccagccagtttcctccacccctggagacctggaagcccccaccacccctgcccagcgagcggcagcctgctgaccggcgcatcaccccagccctggccaccccagcctgtgtgcgggcccggacccggggctgtgcccaccaggacccccacgcccaggagcagggcttcccctgcagccctggccgggactag

SEQ ID NO: 244233 - DNA, 1959 bp, Artificial Sequence
  derived and/or modified sequence
atgggcaacctgcagagcgagcccagcgccggcggcggcagccggaaggtacagccatccgatcgagcccctgacagtcgacgtaccagcctggttgaaccagagatgacaagccaggctatgcgtctgaccaggggactgggcgtgtggtttccgggcagtgctacgccgccgggcctgatggtgccgcgggaacctcaggcctccccttccacactcccgctcacactggagcgaccaagccccgtaatgccccctccagaggaggccgctgcggtgtctgcaccccctcccgctcctgccgggacgctgctccccgggccttccaagtggcagaaacctgcaggaactcctgtcccacgcattagacggttgctcgaagcctctcataggggacaaggcgaccccccttcgctgaggcccttaaagccgcctccccccccacgacagctgtcagtcaaagatacagtacctagggctccttcacaattccccccccctcttgaaacatggaagcccccacctcccttacccagcgagcgccagccagccgaccgacgaattaccccagccttggcaactccagcttctccccctacagagtcccaggcggggccaaggaatcagggccaaaccgccggacgcgcacggggcggagcacccccccatgccggcgagggggaaatggcccagcccgccgattccgaaagtggcctctcattactctgcaaaattactttcaaaagccgacctagcctggctccccccgccgctagctcctcattggctgccaaggcatcactgggaggcggaggaggtggcggactgtttgccgcttctggagctatctcctacgccgaggtcctgaaacagggccccctgccgcccggagccgccagacctttaggcgaggtatctcgtggagctcaggaagccgagggcggcgacggcgacggagagggctgcagtgggcctcccagcgcccccgcatcgcaagctagagcgcttccgccacctccttataccacgtttccgggttccaagcctaagtttgattgggtgtccgctccagacggccctgaacgtcatttccgcttcaatggggccggaggcggcatcggggctcctcgacgcagggcggcggctctgtccggaccctggggcagtcctcccccaccgcctgagcagattcacagcgcacccggacccagacggcctgcccccgctctgctggcgccccccaccttcatctttcccgcccctacaaacggcgagcctatgcgcccaggcccccccgggctgcaggaactgccaccgttgccgcctcctaccccacctcccaccctccagcctccggctcttcaacccactccactccctgtcgccccccccctaacccctggtctgggacacaaagaatctgccctggctccaaccgccgcacctgccctccctccagctctggccgcggaccaggccccagcaccgagccctgctccagcacctaccgtggctgaacccagccccccagtgtccgcgccggccccagctgccgctcccataaaaacccggacccgtcgcaataaaggatcaagagccgcaaggggcgcgacacgaaaggacggactgcacggagatggcccacgtgagcgtgcgaccgctaccgttcctgactctagcgggggaggcgggggaggttcgggtgcctcccaaacaggtgctgccaatacacgggcggcgcgccactggctgccattccaagtactgaacagctgcccttgcaaatgctattgccatcaccaacccagacaccgccggctgcctcgcaatgtgtccgcctggttgtctacctcgactaatcacctcggcgagccaccatgggtggcaactatcaagctgtcagggtctcttgtggccaaactggagcactatgatctccaggccacacactccaattag

SEQ ID NO: 244234 - DNA, 675 bp, Artificial Sequence
  derived and/or modified sequence
atgggcaacctgcagagcgagcccagcgccggcggcggcagccggaaggtccaaccttctgacagagctcccgactcccgtcggacttcactcgtagaacccgaaatgactagccaggccatgcgcttgacgaggggtctcggcgtgtggtttccaggaagcgcaacccctcctggattgatggtgccccgtgagcctcaggccagcccttccacattgcccctgaccctcgagcggcctagccccgttatgcccccaccagaggaagccgccgccgttagtgctccccctccggcaccagctggtacccttctgcctgggcctagcaagtggcaaaagcctgcagggacacctgtgcccaggatcaggcggttgcttgaagcaagccaccgcggacagggtgaccctccatcgttacgtcctctgaaaccacctcctccgcctaggcagctcagcgtgaaagacaccgtcccacgtgcgccaagccaattccctcctcccttggaaacatggaagcccccacctcccctgccaagcgagcggcagcctgccgatcggaggattacacccgccctcgcgacccctgcttgcgttagggcaaggacacggggctgtgcccaccaagacccccatgcccaggaacagggtttcccctgttctcccggcagggactag

SEQ ID NO: 244235 - DNA, 1959 bp, Artificial Sequence
  derived and/or modified sequence
atgggcaacttacagtcggagccatccgccggagggggatcccgcaaggtccagccatccgatagggcgccagatagcagacgcacatccctggtggagcccgaaatgacatctcaggccatgaggctcaccagaggattgggcgtctggttcccaggatcagccacacctcccggactcatggtccccagggagccacaggcaagcccgtcaacactgcccttaacattggagcggccatctccagtgatgccgccacctgaagaggccgcagctgtgtctgccccaccgcctgctccagccggaacactgctccctggaccatcaaagtggcaaaagcctgcgggaactcctgttccaagaattcgcagactcctcgaggcttcacatcgtggtcaaggggatccaccatcactgcggcctctgaaaccgccaccccctcccaggcagttgtccgttaaggacaccgtccctcgagcgccatcccaattcccccctcccctcgaaacgtggaaaccgcctccgcctctaccctccgaacgacagcctgctgatagacgtataactccagcgctggctacccctgcctcaccaccaactgaatcccaggcaggacccaggaaccaaggacagactgcgggacgcgcacgtgggggagctccacctcacgccggtgagggcgaaatggcccaacccgctgactcggaatccgggctgtctttgctgtgtaaaattactttcaaatcacgaccttccctggccccaccagccgcaagttcatctctcgcggcaaaggctagccttggcggaggtggaggtggcggtctgtttgcagcctcgggtgcaatttcatacgcagaggtcttgaaacagggacccctacctcctggagctgctcggccactcggagaagtgtcccggggtgctcaggaggctgagggcggagacggtgacggcgaggggtgctccgggcctccttctgcccctgcctctcaggccagggctttgccccctcctccgtacacaacatttcccggttccaaacccaagttcgactgggtaagtgccccagacggcccagaacggcacttccgcttcaatggggcaggcggagggatcggcgcaccaagacgaagagcagctgctctctcgggtccatgggggtccccaccacccccacccgaacagattcattctgcaccaggccctaggcgacccgcacctgctttattggctccaccaacattcatctttcccgctcctacaaatggagaacctatgcggcctggcccacctggcctgcaggaacttccaccgctaccgcctcctacaccccctcctactcttcagcccccagccctccaaccgacaccccttccagtggcaccgccactcacaccaggcctgggccataaagaaagtgccctcgcccctacggccgctccagctcttccgcctgctcttgccgctgaccaagcccctgcgccttctccagcgccagcccctactgtggccgaaccctctccacccgtcagcgccccagctccggcagccgctcccatcaagactcggactcgcagaaacaagggctcccgcgcagcccgaggagcgacaaggaaggatggactgcatggggacgggccacgcgagcgagccacggctactgtcccggatagcagtggaggtggtgggggtggcagcggagcctctcaaacaggcgctgccaatactagagcagccagacactggttgcctttccaagtcctgaattcctgcccctgcaaatgctactgtcaccaccaaccacgccataggcgcttaccaaggaatgtgtccgcctggctctccacgagcaccaaccacctgggggagccaccctgggtggctacaatcaagctttctggctccctcgtggctaagctggagcattatgacttgcaggctacacactcaaattag

SEQ ID NO: 244236 - DNA, 675 bp, Artificial Sequence
  derived and/or modified sequence
atggggaaccttcagtccgagccaagtgctggcggaggcagtagaaaggtgcagccaagcgatagggctccagacagcagacgcacaagcctcgtggagccagagatgacgagccaagccatgagactcacccggggtcttggagtttggtttcctggaagtgctacgccaccaggccttatggtcccgcgtgagcctcaagcttccccatctactttgcctcttaccctcgagaggccgagccccgtgatgccccctccagaagaagctgccgctgtgagcgccccacctcccgctcccgctggcaccctgctgccaggacccagtaaatggcagaagcccgctggcacccccgtgccgcgaatccggagattattagaagcatcccaccgcggacaaggtgatcccccaagcctgagaccactgaagcccccaccgccaccacgccagttatccgtcaaagatacggtccccagggctcccagccagtttcccccacctcttgagacctggaaacctccgccacctctgcccagcgagcgccagcctgcagaccgtcggattaccccagctctcgctacgccagcctgtgttagagctagaactcggggatgcgcgcaccaggatccccacgcccaggagcagggctttccgtgttcccctggacgcgactag

SEQ ID NO: 244237 - DNA, 1959 bp, Artificial Sequence
  derived and/or modified sequence
atgggcaacctgcagagcgagcccagcgccggcggcggcagcagaaaggtgcagcccagcgacagagcccccgacagcagaagaaccagcctggtggagcccgagatgaccagccaggccatgagactgaccagaggcctgggcgtgtggttccccggcagcgccaccccccccggcctgatggtgcccagagagccccaggccagccccagcaccctgcccctgaccctggagagacccagccccgtgatgcccccccccgaggaggccgccgccgtgagcgcccccccccccgcccccgccggcaccctgctgcccggccccagcaagtggcagaagcccgccggcacccccgtgcccagaatcagaagactgctggaggccagccacagaggccagggcgacccccccagcctgagacccctgaagcccccccccccccccagacagctgagcgtgaaggacaccgtgcccagagcccccagccagttccccccccccctggagacctggaagccccccccccccctgcccagcgagagacagcccgccgacagaagaatcacccccgccctggccacccccgccagcccccccaccgagagccaggccggccccagaaaccagggccagaccgccggcagagccagaggcggcgcccccccccacgccggcgagggcgagatggcccagcccgccgacagcgagagcggcctgagcctgctgtgcaagatcaccttcaagagcagacccagcctggccccccccgccgccagcagcagcctggccgccaaggccagcctgggcggcggcggcggcggcggcctgttcgccgccagcggcgccatcagctacgccgaggtgctgaagcagggccccctgccccccggcgccgccagacccctgggcgaggtgagcagaggcgcccaggaggccgagggcggcgacggcgacggcgagggctgcagcggcccccccagcgcccccgccagccaggccagagccctgcccccccccccctacaccaccttccccggcagcaagcccaagttcgactgggtgagcgcccccgacggccccgagagacacttcagattcaacggcgccggcggcggcatcggcgcccccagaagaagagccgccgccctgagcggcccctggggcagccccccccccccccccgagcagatccacagcgcccccggccccagaagacccgcccccgccctgctggccccccccaccttcatcttccccgcccccaccaacggcgagcccatgagacccggcccccccggcctgcaggagctgccccccctgcccccccccacccccccccccaccctgcagccccccgccctgcagcccacccccctgcccgtggccccccccctgacccccggcctgggccacaaggagagcgccctggcccccaccgccgcccccgccctgccccccgccctggccgccgaccaggcccccgcccccagccccgcccccgcccccaccgtggccgagcccagcccccccgtgagcgcccccgcccccgccgccgcccccatcaagaccagaaccagaagaaacaagggcagcagagccgccagaggcgccaccagaaaggacggcctgcacggcgacggccccagagagagagccaccgccaccgtgcccgacagcagcggcggcggcggcggcggcagcggcgccagccagaccggcgccgccaacaccagagccgccagacactggctgcccttccaggtgctgaacagctgcccctgcaagtgctactgccaccaccagcccagacacagaagactgcccagaaacgtgagcgcctggctgagcaccagcaccaaccacctgggcgagcccccctgggtggccaccatcaagctgagcggcagcctggtggccaagctggagcactacgacctgcaggccacccacagcaactag

SEQ ID NO: 244238 - DNA, 675 bp, Artificial Sequence
  derived and/or modified sequence
atgggcaacctgcagagcgagcccagcgccggcggcggcagcagaaaggtgcagcccagcgacagagcccccgacagcagaagaaccagcctggtggagcccgagatgaccagccaggccatgagactgaccagaggcctgggcgtgtggttccccggcagcgccaccccccccggcctgatggtgcccagagagccccaggccagccccagcaccctgcccctgaccctggagagacccagccccgtgatgcccccccccgaggaggccgccgccgtgagcgcccccccccccgcccccgccggcaccctgctgcccggccccagcaagtggcagaagcccgccggcacccccgtgcccagaatcagaagactgctggaggccagccacagaggccagggcgacccccccagcctgagacccctgaagcccccccccccccccagacagctgagcgtgaaggacaccgtgcccagagcccccagccagttccccccccccctggagacctggaagccccccccccccctgcccagcgagagacagcccgccgacagaagaatcacccccgccctggccacccccgcctgcgtgagagccagaaccagaggctgcgcccaccaggacccccacgcccaggagcagggcttcccctgcagccccggcagagactag

SEQ ID NO: 244239 - protein, 536 aa, Artificial Sequence
  derived and/or modified sequence
MEIRQHEWLSASPHEGFEQMRLKSRPKEPSPSLTRVGANFYSSVKQQDYSASVWLRRKDKLEHSQQKCIVIFALVCCFAILVALIFSAVDIMGEDEDGLSEKNCQNKCRIALVENIPEGLNYSENAPFHLSLFQGWMNLLNMAKKSVDIVSSHWDLNHTHPSACQGQRLFEKLLQLTSQNIEIKLVSDVTADSKVLEALKLKGAEVTYMNMTAYNKGRLQSSFWIVDKQHVYIGSAGLDWQSLGQMKELGVIFYNCSCLVLDLQRIFALYSSLKFKSRVPQTWSKRLYGVYDNEKKLQLQLNETKSQAFVSNSPKLFCPKNRSFDIDAIYSVIDDAKQYVYIAVMDYLPISSTSTKRTYWPDLDAKIREALVLRSVRVRLLLSFWKETDPLTFNFISSLKAICTEIANCSLKVKFFDLERENACATKEQKNHTFPRLNRNKYMVTDGAAYIGNFDWVGNDFTQNAGTGLVINQADVRNNRSIIKQLKDVFERDWYSPYAKTLQPTKQPNCSSLFKLKPLSNKTATDDTGGKDPRNV

SEQ ID NO: 244240 - DNA, 1611 bp, Artificial Sequence
  derived and/or modified sequence
atggagatcagacagcacgagtggctgagcgccagcccccacgagggcttcgagcagatgagactgaagagcagacccaaggagcccagccccagcctgaccagagtgggcgccaacttctacagcagcgtgaagcagcaggactacagcgccagcgtgtggctgagaagaaaggacaagctggagcacagccagcagaagtgcatcgtgatcttcgccctggtgtgctgcttcgccatcctggtggccctgatcttcagcgccgtggacatcatgggcgaggacgaggacggcctgagcgagaagaactgccagaacaagtgcagaatcgccctggtggagaacatccccgagggcctgaactacagcgagaacgcccccttccacctgagcctgttccagggctggatgaacctgctgaacatggccaagaagagcgtggacatcgtgagcagccactgggacctgaaccacacccaccccagcgcctgccagggccagagactgttcgagaagctgctgcagctgaccagccagaacatcgagatcaagctggtgagcgacgtgaccgccgacagcaaggtgctggaggccctgaagctgaagggcgccgaggtgacctacatgaacatgaccgcctacaacaagggcagactgcagagcagcttctggatcgtggacaagcagcacgtgtacatcggcagcgccggcctggactggcagagcctgggccagatgaaggagctgggcgtgatcttctacaactgcagctgcctggtgctggacctgcagagaatcttcgccctgtacagcagcctgaagttcaagagcagagtgccccagacctggagcaagagactgtacggcgtgtacgacaacgagaagaagctgcagctgcagctgaacgagaccaagagccaggccttcgtgagcaacagccccaagctgttctgccccaagaacagaagcttcgacatcgacgccatctacagcgtgatcgacgacgccaagcagtacgtgtacatcgccgtgatggactacctgcccatcagcagcaccagcaccaagagaacctactggcccgacctggacgccaagatcagagaggccctggtgctgagaagcgtgagagtgagactgctgctgagcttctggaaggagaccgaccccctgaccttcaacttcatcagcagcctgaaggccatctgcaccgagatcgccaactgcagcctgaaggtgaagttcttcgacctggagagagagaacgcctgcgccaccaaggagcagaagaaccacaccttccccagactgaacagaaacaagtacatggtgaccgacggcgccgcctacatcggcaacttcgactgggtgggcaacgacttcacccagaacgccggcaccggcctggtgatcaaccaggccgacgtgagaaacaacagaagcatcatcaagcagctgaaggacgtgttcgagagagactggtacagcccctacgccaagaccctgcagcccaccaagcagcccaactgcagcagcctgttcaagctgaagcccctgagcaacaagaccgccaccgacgacaccggcggcaaggaccccagaaacgtgtag

SEQ ID NO: 244241 - DNA, 1611 bp, Artificial Sequence
  derived and/or modified sequence
atggagatccgccagcacgaatggctttccgcctctccccacgagggcttcgagcagatgaggctaaagagtcgcccaaaggagccttcacctagtttgacacgggttggtgctaacttttactcaagtgtgaaacagcaggactattccgcttcggtctggttgcggcggaaagataagcttgagcacagccagcaaaaatgtattgttatcttcgcgttggtttgctgtttcgctatacttgtcgccctcattttttcagctgtggacattatgggggaagatgaggatgggctaagtgagaagaactgccaaaataagtgtcggatcgcgctggtagagaatatcccagaaggattgaattatagcgaaaacgcgccgttccatctgtcactgttccagggctggatgaatttgctcaacatggcaaagaaatcagtggacatcgtctccagtcactgggatctaaaccacacacacccgtctgcatgccaggggcagaggttgtttgaaaaacttctgcagcttacaagtcagaacatcgagatcaagttagtgtcagacgtgactgcagacagcaaggtcctggaagccttgaagctcaagggagctgaagtgacttatatgaacatgaccgcctacaacaaaggtcgcttacagtcctctttctggattgtggacaaacaacacgtctatatcgggagcgctggactggactggcagtcactcggacaaatgaaggagctgggagtgatcttctataattgctcttgcctcgtgctggatctccagcgcattttcgccttgtacagttcccttaagttcaaatctagggtgcctcagacatggtctaagcgactgtatggggtttacgacaacgagaaaaaactgcagctgcagttgaacgaaacaaagtctcaggcattcgtgagtaatagcccgaagttattctgcccaaaaaaccggtctttcgacattgatgcaatttatagcgtcatagacgacgcaaaacagtacgtgtacatagcagtcatggattatctgcccatctcatccacaagtacaaagagaacgtactggcccgatctggacgccaaaattcgggaagctctggtactcagatcagtccgggtgcgtctactcttgtccttttggaaggaaacggaccccctgaccttcaatttcatttcaagcctaaaggcaatctgtacggaaatcgccaactgcagcctcaaggttaaatttttcgaccttgagcgagagaacgcctgcgccactaaggagcagaagaaccatacattcccccgcctgaataggaataagtacatggtcacagatggagctgcttacattggaaacttcgactgggtaggaaacgactttacccagaatgccggaaccggacttgtcatcaaccaagctgatgtgagaaataatcgctcgatcattaagcagctgaaggatgtgtttgaaagagactggtactctccttacgcaaagaccctgcaacctacgaagcagcctaactgttcaagtctcttcaagttaaagccactgtctaacaaaacagcaactgacgacaccggagggaaggatccgagaaatgtgtag

SEQ ID NO: 244242 - DNA, 1611 bp, Artificial Sequence
  derived and/or modified sequence
atggagatccggcagcacgagtggctgagcgccagcccccatgagggctttgagcagatgaggctgaagagccggcccaaggagcccagccccagcctgaccagggtgggcgccaacttctacagctctgtgaagcagcaggactacagcgcctctgtgtggctgcggaggaaggacaagctggagcacagccagcagaagtgcatcgtcatctttgccctggtgtgctgctttgccatcctggtggccctgatcttctctgctgtggacatcatgggagaagatgaagatggcctgtctgagaagaactgccagaacaagtgccgcatcgccctggtggagaacatccctgagggcctgaactacagtgaaaatgcccccttccacctgagcctcttccagggctggatgaacctgctgaacatggccaagaagtctgtggacatcgtgagcagccactgggacctgaaccacacccaccccagcgcctgccagggccagaggctgtttgagaagctgctgcagctgaccagccagaacatcgagatcaagctggtgtctgatgtgacagctgacagcaaggtgctggaggccctgaagctgaagggagctgaggtgacctacatgaacatgacagcctacaacaagggccgcctgcagagcagcttctggatcgtggacaagcagcacgtgtacatcggcagcgctggcctggactggcagagcctgggccagatgaaggagctgggcgtcatcttctacaactgcagctgcctggtgctggacctgcagaggatctttgccctgtacagcagcctgaagttcaagagccgggtgccccagacctggagcaagaggctgtatggagtgtatgacaatgagaagaagctgcagctgcagctgaatgagaccaagagccaggcctttgtgagcaacagccccaagctgttctgccccaagaacagaagctttgatattgatgccatctacagcgtgattgatgatgccaagcagtatgtgtacatcgctgtgatggactacctgcccatcagcagcaccagcaccaagaggacctactggccagacctggatgccaagatccgggaggccctggtgctgcggtctgtgcgggtgcggctgctgctgtccttctggaaggagacagaccccctgaccttcaacttcatcagcagcctgaaggccatctgcacagagatcgccaactgcagcctgaaggtgaagttctttgacctggagagagaaaatgcctgtgccaccaaggagcagaagaaccacaccttcccccggctgaacagaaacaagtacatggtgacagatggagctgcctacatcggcaactttgactgggtgggcaatgacttcacccagaatgccggcaccggcctggtgatcaaccaggctgatgtgaggaacaacagaagcatcatcaagcagctgaaggatgtgtttgagcgggactggtacagcccctatgccaagaccctgcagcccaccaagcagcccaactgcagcagcctcttcaagctgaagcccctgagcaacaagacagccacagatgacaccggcggcaaggaccccagaaatgtgtag

SEQ ID NO: 244243 - DNA, 1611 bp, Artificial Sequence
  derived and/or modified sequence
atggagatccggcagcacgagtggctgagcgccagcccccacgagggattcgaacagatgcgtcttaaaagcaggcccaaggaaccaagccccagtcttacgcgagtgggcgctaacttctactcgtccgtgaaacaacaagactactccgccagtgtttggctcagaaggaaggacaaactcgagcactcgcaacagaagtgtatcgtcatcttcgcactggtgtgctgcttcgcgattctagtggcattaattttctcagccgtggacatcatgggcgaggatgaggatgggctgagcgaaaagaactgtcagaataaatgccgtatagccttggtggagaacattcccgagggcctgaattacagtgagaacgctccctttcacttaagtctgttccagggatggatgaaccttctgaatatggccaaaaaaagcgtggatatagtctcaagccactgggaccttaatcatacccacccgagcgcatgtcagggtcagcgcctgttcgagaagctactgcagttaacgtcccagaatattgagattaaactggtgtccgacgtgaccgccgatagcaaagtcctcgaagccctgaaactgaagggcgcggaagtgacctacatgaatatgacagcatataataagggccggctgcagagcagtttctggatagtcgacaagcagcatgtgtacatagggagtgccggcctggattggcagagccttggccaaatgaaagagctcggagtaattttctacaattgctcctgtctggtgttagacctgcagagaatctttgcgctatacagctctctgaagtttaaatctagggtgccacagacgtggagcaagcgactctatggagtgtacgacaacgaaaagaaacttcagctgcagctgaacgagacaaaaagtcaggccttcgtctctaactcccctaaactattttgccccaaaaacagatcttttgatattgacgcaatctactccgtgatcgacgacgcaaaacagtacgtgtatattgcagtgatggattacctgccaatcagctcaacttctacgaagaggacatactggccagatcttgatgccaagatacgagaggcactcgtgctcagatccgtgagagtccgtttattactttccttctggaaggaaactgacccattgacctttaatttcatctcttccctgaaagctatctgtactgagatcgcaaattgcagtctcaaggttaaatttttcgacctggaacgcgagaatgcctgcgcaacaaaggagcagaaaaatcatacctttcccagactgaacagaaacaaatatatggtgactgatggtgccgcttacatcggaaattttgattgggtcggaaatgactttacccagaatgctgggacaggtctggtcatcaaccaggccgacgtgagaaataatagaagcattatcaagcagctgaaagatgtgtttgagagggattggtacagcccgtatgcaaaaaccctgcaacctacaaagcagccgaattgctctagcctgttcaaattaaaaccgctctccaataaaactgccaccgatgatactggcggaaaagatccaaggaacgtctag

SEQ ID NO: 244244 - DNA, 2371 bp, Artificial Sequence
  derived and/or modified sequence
cacctcgccctccctccttccgccccgcgcctcccgcgatcgccccctcccgcccggccgcgctcccagctggcgctcagcaccccgcgctccccgcgcccgctcgctcctccagctcctccagctcagtctccagctccacctccggctcccgctgggcctcccgctcgccctccgcgcccggctccccgcgcgcccgtcccgagtccgctgctcgccggcggccgcccggtcatgtcaggatggagatccggcagcacgagtggctctcggcctccccccatgagggcttcgagcagatgaggctcaaaagccgccccaaggagccctccccaagcctgacccgagtgggcgcgaacttctacagcagcgtcaagcagcaggactacagcgccagcgtctggcttcggaggaaagacaagctggagcactcccagcagaagtgcatcgtgatctttgccctggtgtgctgctttgccattctggttgcactgatcttttcagccgtggacatcatgggagaggatgaggatggactctcagaaaaaaattgccaaaataaatgtcgaattgccctggtggaaaatattcctgaaggccttaactattcagaaaatgcaccatttcacttatcacttttccaaggctggatgaatttactcaacatggccaaaaagtctgttgacatagtgtcttcccattgggatctcaaccacactcatccatcagcatgtcagggtcaacgtctttttgaaaagttgctccagctgacttcgcaaaatattgaaatcaagctagtgagtgatgtaacagctgattcaaaggtattagaagccttgaaattaaagggagccgaggtgacgtacatgaacatgaccgcttacaacaagggccggctgcagtcctccttctggatcgtggacaaacagcacgtgtatatcggcagtgccggtttggactggcaatccctgggacagatgaaagaactcggtgtcatcttctacaactgcagctgcctggtcctagatttacaaaggatatttgctctatatagttcattaaaattcaaaagcagagtgcctcaaacctggtccaaaagactctatggagtctatgacaatgaaaagaaattgcaacttcagttgaatgaaaccaaatctcaagcatttgtatcgaattctccaaaactcttttgccctaaaaacagaagttttgacatagatgccatctacagtgtgatagatgatgccaagcagtatgtgtacatcgctgtcatggactacctgcctatctccagcacaagcaccaaaaggacttactggccagacttggatgcaaaaataagagaagcattagttttacgaagcgttagagttcgactccttttaagcttctggaaggaaactgatccccttacgtttaactttatttcatctcttaaagcgatttgcactgaaatagccaactgcagtttgaaagttaaattttttgatctggaaagagagaatgcttgtgctacaaaagaacaaaagaatcacacctttcctaggttaaatcgcaacaagtacatggtgacagatggagcagcttatattggaaattttgattgggtagggaatgatttcactcagaatgctggcacgggccttgttatcaaccaggcagatgtgaggaacaacagaagcatcattaagcaacttaaagatgtgtttgaaagggactggtattcaccgtatgccaaaaccttacagccaaccaaacagccgaactgctcaagcctgttcaaactcaaacccctctccaacaaaactgccacagacgacacaggcggaaaggatccccggaacgtataacatgatgaagaaactgacaggacagctctgtatttcatatttatacataaaggacttgaggagagaaaaaacactttaatatgtctctttttttagggaaaaagcacacttataaaaaatattctctgaacaacacataatacctatctaacaatatcttagcgtcgtgtacactaaaattaagacttttgtatttgttacctctgacagagaatgtcattctggcgtagaagttagtttttacgtttgcatacaaattttaagactttcattcctgctcctttctagttttagaactttttctgctgacctacccggtcagttgttaggaagcttagcatgaggtgggctctttaacaccattctgagaactgttgatttagagaggaaggtgaggattttgccttggagaagagactgataaaaccaagtgtttattcttgtaaatcgtctccaagacctacacagtcagctaagcatgaatagcttacatctcatgccagccttcaacacccttg

SEQ ID NO: 244245 - DNA, 1611 bp, Artificial Sequence
  derived and/or modified sequence
atggagataaggcagcacgaatggctgtctgcatcgccgcacgagggctttgagcagatgagattaaaaagcaggcccaaggagccatcaccttccctgactcgagtcggagcgaatttctattcttcggtgaaacagcaagactatagcgcaagcgtatggcttcgcagaaaagataagcttgaacattcgcagcagaaatgcatcgtgattttcgcactcgtctgttgctttgctatcctggtagccctgatattctctgccgttgacataatgggagaggatgaggacggcttgtcagaaaagaattgccagaacaaatgccggatcgctctagtagagaatatacccgagggactgaactacagcgagaatgcaccgttccacttatccctcttccagggctggatgaatctgttgaatatggcgaaaaagagtgtggacatcgtgagctcccactgggacctcaaccacacacaccctagtgcttgccagggccagaggctgttcgagaaactgctccagttgacgtctcaaaatatcgagatcaaactggtatctgatgtcactgccgacagcaaggtgctggaagcacttaagctgaagggagccgaggttacctatatgaacatgaccgcatataataagggtagactgcagtctagtttttggatagtggacaagcagcatgtgtacattgggagcgctgggctggactggcagtccttagggcagatgaaagagctgggcgtgatattttacaactgttcatgtctcgtcctggacctgcagaggattttcgcactgtacagttctctaaagttcaagagtcgagtgccccagacgtggagcaaaagactgtatggagtgtatgacaatgaaaaaaagttacagttgcagttaaacgagaccaagagccaggcgtttgtctctaattctccaaagctcttttgtccaaagaaccgctcctttgatattgatgcaatctattccgtgatcgatgatgctaagcagtatgtttacattgctgtgatggactatctccctatctcaagcacgagcacaaagcgcacgtactggccagacctcgatgccaagataagggaagctctcgtactgcgctcggtgcgcgttcgcctcctattaagtttctggaaggagaccgaccctctcaccttcaacttcattagttccttgaaagctatttgtacggaaattgcgaattgttccctcaaggttaagttcttcgaccttgagcgagaaaacgcatgtgcgacaaaggaacagaagaaccacaccttcccaaggctgaacaggaacaagtatatggtgaccgatggtgctgcctatatcggcaattttgattgggtgggcaatgacttcacccaaaacgctggaacagggttagtgataaaccaagcagacgtgcgtaacaatagatcgattattaagcagctgaaggatgtgttcgagagggactggtatagcccatacgccaaaactctccagcctaccaagcagcctaattgttcatcactcttcaagttaaagcctctgtccaataagaccgctaccgatgataccggaggtaaagaccctcgcaacgtgtag

SEQ ID NO: 244246 - protein, 451 aa, Artificial Sequence
  derived and/or modified sequence
MATDDKTSPTLDSANDLPRSPTSPSHLTHFKPLTPDQDEPPFKSAYSSFVNLFRFNKERAEGGQGEQQPLSGSWTSPQLPSRTQSVRSPTPYKKQLNEELQRRSSALGDLRACTYCRKIALSYAHSTDSNSIGEDLNALSDSACSVSVLDPSEPRTPVGSRKASRNIFLEDDLAWQSLIHPDSSNTPLSTRLVSVQEDAGKSPARNRSASITNLSLDRSGSPMVPSYETSVSPQANRTYVRTETTEDERKILLDSVQLKDLWKKICHHSSGMEFQDHRYWLRTHPNCIVGKELVNWLIRNGHIATRAQAIAIGQAMVDGRWLDCVSHHDQLFRDEYALYRPLQSTEFSETPSPDSDSVNSVEGHSEPSWFKDIKFDDSDTEQIAEEGDDNLANSASPSKRTSVSSFQSTVDSDSAASISLNVELDNVNFHIKKPSKYPHVPPHPADQKGRR

SEQ ID NO: 244247 - DNA, 1356 bp, Artificial Sequence
  derived and/or modified sequence
atggctacagacgacaagacaagccctactctggactctgccaatgatctgcctcgaagccccactagtccctctcaccttacccatttcaaacctctgacgcctgatcaagatgagccaccattcaagtccgcttatagttccttcgtaaatctgttccgcttcaataaggagcgtgctgagggcggccagggcgaacaacagcccctttctggctcctggacctctcctcagctgccctcccgcacccagagcgtacgcagtcccaccccctacaagaagcagctgaatgaagagttacaacgccggtcctccgccttaggggacctgcgggcttgtacatactgcagaaaaattgccctaagctatgcccacagcactgatagtaattctataggtgaggaccttaacgcattatctgattctgcttgtagtgttagcgtgctcgatccctccgagccccgaacaccagtgggatcacgtaaggcgagcaggaatatctttttggaggacgatctggcctggcagtcattaatccaccctgacagctccaacaccccactctccacacgattggtttctgtacaagaggatgccgggaagagccccgcacgtaataggtccgctagcatcacgaatttgtctctggacagatccggatcaccgatggtccctagctacgaaacgtctgtgtctcctcaggcgaatagaacctacgtaagaacagagacaactgaagatgaaaggaaaatcctccttgactctgtgcagttgaaggacctgtggaaaaaaatttgtcatcactcaagcggtatggaatttcaggatcaccggtactggctgcgaacccatcctaactgcatagtggggaaggaactagtaaattggctaatacggaatgggcacatcgccactcgagcgcaggcaattgccataggtcaagctatggtggacgggaggtggctcgactgtgttagtcatcacgaccaattgttccgggatgagtatgccctatatcggcccctgcagtcgacagagttctctgagactccatctccggactcagactccgtgaactcagtagagggacatagcgagccatcttggttcaaagatatcaagtttgatgattcagacactgaacagattgcagaagaaggtgatgacaatctggcaaattctgccagtccgtccaagagaaccagcgttagctctttccagagcactgtggattccgacagtgccgcttctatttcgctcaatgtagaacttgacaacgttaactttcatatcaaaaaaccaagcaaatatcctcacgtgccgccccatcctgcggatcagaagggacgcaggtag

SEQ ID NO: 244248 - DNA, 1356 bp, Artificial Sequence
  derived and/or modified sequence
atggccacagatgacaagaccagccccaccctggacagcgccaatgacctgcccaggagccccaccagccccagccacctgacccacttcaagcccctgaccccagaccaggatgagccccccttcaagagcgcctacagcagctttgtgaacctcttccgcttcaacaaggagcgggcagagggcggccagggcgagcagcagcccctgagcggctcctggaccagcccccagctgcccagcaggacccagagcgtgcgcagccccaccccctacaagaagcagctgaatgaggagctgcagaggaggagcagcgccctgggggacctgcgggcctgcacctactgcaggaagatcgccctgtcctatgcccacagcacagacagcaacagcatcggggaggacctgaatgccctgagtgacagcgcctgcagcgtgtctgtgctggaccccagcgagcccaggacccctgtgggcagcaggaaggccagcaggaacatcttcctggaggatgacctggcctggcagagcctcatccacccagacagcagcaacacccccctgagcacccggctggtgtctgtgcaggaggatgctgggaagagccctgccaggaacagaagtgccagcatcaccaacctgagcctggacagaagtggcagccccatggtgcccagctatgagacctctgtgagcccccaggccaacagaacctacgtgaggacagagaccacagaagatgagaggaagatcctgctggacagcgtgcagctgaaggacctgtggaagaagatctgccaccacagcagcggcatggagttccaggaccaccgctactggctgcggacccaccccaactgcatcgtgggcaaggagctggtgaactggctgatcagaaatggccacatcgccacccgggcccaggccatcgccatcggccaggccatggtggatggccgctggctggactgtgtgagccaccacgaccagctgttcagagatgaatatgccctgtaccggcccctgcagagcacagagttcagcgagacccccagcccagacagcgacagcgtgaacagcgtggagggccacagcgagcccagctggttcaaggacatcaagtttgatgacagcgacacagagcagattgctgaggagggagatgacaacctggccaacagcgccagccccagcaagaggacctctgtgtcctccttccagagcacagtggacagcgacagcgctgccagcatcagcctgaatgtggagctggacaacgtgaacttccacatcaagaagcccagcaagtacccccacgtgcccccccaccctgctgaccagaagggcagaagatag

SEQ ID NO: 244249 - DNA, 1356 bp, Artificial Sequence
  derived and/or modified sequence
atggccaccgacgacaagaccagccccaccctggacagcgccaacgacttgcctcgcagccccacgtcccccagccacctgacccacttcaagcctctgaccccagaccaggacgagccaccctttaaatccgcatacagcagcttcgtcaatcttttccggttcaacaaggaaagggctgaggggggacagggggaacagcagcccctttcgggttcttggacgagcccgcagctgcctagtcgtacacagagtgtaagatcgcctaccccttataagaagcagctcaacgaggagctacagagaagatcgagcgctctgggcgacctgcgcgcgtgcacttactgccgcaagatagccttgtcatacgctcatagcaccgattcgaactccatcggggaagacttaaacgccttgtccgactctgcgtgttctgttagtgtcctggacccgtcagagcctcggacacccgtcggcagtaggaaggcttctagaaacatattcctcgaagatgacttagcatggcaatccctgatccaccccgatagttcaaatactcccttgagcacccggcttgtgtcagttcaagaagacgccggcaagtcccctgcacgcaatcgcagtgctagtatcaccaatctgtccctggaccgctctggatccccaatggtgcccagttatgagacctcggtatccccacaagccaatcgcacatacgtgagaacagagacaaccgaagatgagagaaaaattctgctggattctgtgcagctaaaggatctgtggaagaaaatatgtcatcattcatccggcatggagtttcaagaccaccgctattggctcaggacacaccccaattgtatcgtgggtaaagaactggtaaactggctgatccggaatggacacattgctacaagggcacaagcaatcgctattggccaggccatggtcgacggacgctggctcgattgtgtgtcacaccacgatcagttgttccgagacgaatatgccctctatcgccccctacaatccacggagttctcagagaccccatcaccagacagtgattcagtcaacagtgttgaaggtcacagcgaaccaagctggtttaaagacatcaagtttgatgactccgataccgagcagattgccgaagagggcgacgataaccttgcaaactctgcatctccatcaaaaagaacctccgtttccagttttcaaagcactgttgattccgacagcgcagcctccatctctctgaatgtggaactggataacgttaatttccacattaaaaagccaagcaagtatccacatgtacctcctcaccccgcagatcaaaagggccgccggtag

SEQ ID NO: 244250 - DNA, 2039 bp, Artificial Sequence
  derived and/or modified sequence
caaccatgtaagcagcttcgcttcctgccgcaaccgtccgcggcctgaggagcccaccgccgctctcgggggccgacttccgggggctgagccgttgaagcggaggctggggcggggggcagccggcgcggccggggcaggaggcgcagactcatgaaatggccacagatgataagacgtccccaacactggactctgctaatgatttgcctcgatctcctactagtccttctcatctcacacactttaaacctttgactcctgatcaagatgagcccccttttaaatcagcttatagttcttttgtaaatctctttcgttttaacaaagagagagcagaaggaggccagggagaacagcagcctttgagtggaagttggaccagccctcagctcccttcgaggacacagtctgttaggtcacccacaccttataaaaagcagcttaatgaggaactccagcggcgctcttcagcattaggagacctccgagcttgcacatattgtagaaaaatagccttaagttatgctcattccacagacagtaattctattggggaagacttgaatgctctttcagattctgcttgctctgtgtctgtgcttgatccaagtgaaccccgaacacctgttgggagtaggaaagccagccgtaacatatttttagaggatgatttggcctggcaaagtttgattcatccagattcctcaaatactcctctttcaacaagacttgtatctgtgcaagaggatgctgggaaatctcctgctcgaaatagatcagccagcattactaacctgtcactggatagatctggttctcctatggtaccttcatatgagacatctgtcagtccccaggctaaccgaacatatgttaggacagagaccactgaggatgaacgcaaaattcttctggacagtgtgcagttaaaagacctgtggaaaaaaatctgccatcacagcagtggaatggagtttcaggatcaccgctactggttgagaacgcatcccaactgcattgtaggaaaggaattagtcaactggctaatccgaaatgggcatattgccacaagggcacaagctatagcaattggacaagcaatggttgatggacgttggctggattgtgttagtcatcacgaccagcttttcagagatgagtatgcgctgtatagaccactgcagagtacagaattttctgagacgccttctcccgacagtgactcagtgaactccgtggaaggacactctgagccatcctggtttaaagacataaagtttgatgacagtgacacagaacagatagctgaagaaggtgacgataatttggctaattctgccagtcctagcaagcgcacatcagtcagcagtttccagtccacagtggacagtgactcagccgcttctatcagcctgaacgtggagctggacaacgtgaacttccatatcaagaagccctccaagtacccacatgtgccccctcaccctgctgaccaaaaaggtaggaggtagtcaccatctggaatccaaacacaggctggacagctgggccataggatctcatgccagcctgtccttctggcttcctctgtcccacgtggctgagggtatttggtgtgggttttgttctaccctttctcatttctcccacacctcctccccataccttttttggttgattccttttatttcttgttttctccctcagcaccaccatgcccagtgtaaagcttgtagtctttaaaaggaactacatctgactgctcttcccataatgtgcaacttccaaggtggcatttctttgcatttataacatggatgttctgctctattcttttctctttcttcatttaacattttaaagcctatttgcctttgccgttacccagtaacataatatttcactaaacccattaagatgcttgaactagattgggggaaaatcattcacacattccaaaatatctccataataattcataatgcttattatgtatattctatatttattaaaacaatttcttctctaatgtaaaa

SEQ ID NO: 244251 - DNA, 1356 bp, Artificial Sequence
  derived and/or modified sequence
atggctaccgacgataagacctctcccacactagattcagctaacgatctgcctcgcagtcccactagcccaagccacctcactcacttcaaacctttgaccccagatcaagatgaacctcctttcaagtccgcctattcctcctttgttaacctttttagatttaataaagaaagggccgagggcggtcagggggaacagcagcctctgtctggcagttggacaagcccacagcttccgagcaggacccagtcagtgaggagcccaacaccatacaagaaacagctcaatgaagagctacaacgccgttccagcgcgctcggggatctccgggcatgtacatactgtcgaaaaatcgccctgtcctacgcacattcgacggattcaaacagcattggggaagatctcaacgcgttgagcgattccgcctgttctgtgtcggtccttgacccatctgagccacggacgcccgttggtagccggaaggccagtaggaatatctttttggaggatgatctcgcatggcaatcacttattcatcctgacagttcgaacacccccctgtctacaagattagtctcagtccaggaagatgcaggtaagtcgcccgctagaaaccggtcggcctccattaccaatctgtctctggatcgctccggcagccctatggtgccttcctatgaaactagcgtatcccctcaggcgaaccggacatacgttcggacagagactaccgaggacgaacgcaagatactcctcgactccgttcagttgaaagacctgtggaaaaagatctgccatcactcctctggaatggaattccaggaccacaggtattggctccgcactcatcccaattgcattgtgggcaaagaacttgtcaattggctgattaggaatggacacatagccacaagagcacaggccatcgcgatcggccaggccatggtggacggcagatggttagactgcgtcagccaccacgatcaactgttcagagacgagtacgccctgtacaggcctcttcagtccacagaattctcggagacccccagccccgacagcgactctgtcaatagtgttgaggggcatagtgaaccatcctggttcaaggatatcaagttcgacgactccgacaccgaacagatcgccgaagagggcgacgataatctcgccaactctgcaagtccatctaaaagaacaagcgtgtctagctttcaatccaccgtggatagcgactctgcggctagtatttcattgaacgttgagctcgacaatgttaatttccatatcaagaagccctcaaagtaccctcacgtgccccctcatcctgcggaccaaaaaggcagacgatag

SEQ ID NO: 244252 - DNA, 1356 bp, Artificial Sequence
  derived and/or modified sequence
atggccaccgacgacaagaccagccccaccctggacagcgccaacgacctgcccagaagccccaccagccccagccacctgacccacttcaagcccctgacccccgaccaggacgagccccccttcaagagcgcctacagcagcttcgtgaacctgttcagattcaacaaggagagagccgagggcggccagggcgagcagcagcccctgagcggcagctggaccagcccccagctgcccagcagaacccagagcgtgagaagccccaccccctacaagaagcagctgaacgaggagctgcagagaagaagcagcgccctgggcgacctgagagcctgcacctactgcagaaagatcgccctgagctacgcccacagcaccgacagcaacagcatcggcgaggacctgaacgccctgagcgacagcgcctgcagcgtgagcgtgctggaccccagcgagcccagaacccccgtgggcagcagaaaggccagcagaaacatcttcctggaggacgacctggcctggcagagcctgatccaccccgacagcagcaacacccccctgagcaccagactggtgagcgtgcaggaggacgccggcaagagccccgccagaaacagaagcgccagcatcaccaacctgagcctggacagaagcggcagccccatggtgcccagctacgagaccagcgtgagcccccaggccaacagaacctacgtgagaaccgagaccaccgaggacgagagaaagatcctgctggacagcgtgcagctgaaggacctgtggaagaagatctgccaccacagcagcggcatggagttccaggaccacagatactggctgagaacccaccccaactgcatcgtgggcaaggagctggtgaactggctgatcagaaacggccacatcgccaccagagcccaggccatcgccatcggccaggccatggtggacggcagatggctggactgcgtgagccaccacgaccagctgttcagagacgagtacgccctgtacagacccctgcagagcaccgagttcagcgagacccccagccccgacagcgacagcgtgaacagcgtggagggccacagcgagcccagctggttcaaggacatcaagttcgacgacagcgacaccgagcagatcgccgaggagggcgacgacaacctggccaacagcgccagccccagcaagagaaccagcgtgagcagcttccagagcaccgtggacagcgacagcgccgccagcatcagcctgaacgtggagctggacaacgtgaacttccacatcaagaagcccagcaagtacccccacgtgcccccccaccccgccgaccagaagggcagaagatag

SEQ ID NO: 244253 - protein, 340 aa, Artificial Sequence
  derived and/or modified sequence
MEPGRTQIKLDPRYTADLLEVLKTNYGIPSACFSQPPTAAQLLRALGPVELALTSILTLLALGSIAIFLEDAVYLYKNTLCPIKRRTLLWKSSAPTVVSVLCCFGLWIPRSLVLVEMTITSFYAVCFYLLMLVMVEGFGGKEAVLRTLRDTPMMVHTGPCCCCCPCCPRLLLTRKKLQLLMLGPFQYAFLKITLTLVGLFLVPDGIYDPADISEGSTALWINTFLGVSTLLALWTLGIISRQARLHLGEQNMGAKFALFQVLLILTALQPSIFSVLANGGQIACSPPYSSKTRSQVMNCHLLILETFLMTVLTRMYYRRKDHKVGYETFSSPDLDLNLKA

SEQ ID NO: 244254 - DNA, 1023 bp, Artificial Sequence
  derived and/or modified sequence
atggagcccggcagaacccagatcaagctggaccccagatacaccgccgacctgctggaggtgctgaagaccaactacggcatccccagcgcctgcttcagccagccccccaccgccgcccagctgctgagagccctgggccccgtggagctggccctgaccagcatcctgaccctgctggccctgggcagcatcgccatcttcctggaggacgccgtgtacctgtacaagaacaccctgtgccccatcaagagaagaaccctgctgtggaagagcagcgcccccaccgtggtgagcgtgctgtgctgcttcggcctgtggatccccagaagcctggtgctggtggagatgaccatcaccagcttctacgccgtgtgcttctacctgctgatgctggtgatggtggagggcttcggcggcaaggaggccgtgctgagaaccctgagagacacccccatgatggtgcacaccggcccctgctgctgctgctgcccctgctgccccagactgctgctgaccagaaagaagctgcagctgctgatgctgggccccttccagtacgccttcctgaagatcaccctgaccctggtgggcctgttcctggtgcccgacggcatctacgaccccgccgacatcagcgagggcagcaccgccctgtggatcaacaccttcctgggcgtgagcaccctgctggccctgtggaccctgggcatcatcagcagacaggccagactgcacctgggcgagcagaacatgggcgccaagttcgccctgttccaggtgctgctgatcctgaccgccctgcagcccagcatcttcagcgtgctggccaacggcggccagatcgcctgcagccccccctacagcagcaagaccagaagccaggtgatgaactgccacctgctgatcctggagaccttcctgatgaccgtgctgaccagaatgtactacagaagaaaggaccacaaggtgggctacgagaccttcagcagccccgacctggacctgaacctgaaggcctag

SEQ ID NO: 244255 - DNA, 1023 bp, Artificial Sequence
  derived and/or modified sequence
atggaacccggaaggacccaaataaaactcgatccccgatatacagcagacctgcttgaagtgctcaagacaaactatgggatcccttccgcctgtttcagccagccaccaacggcagctcagctcctccgagcattggggcccgtggagcttgccctgactagtatcttgacactgctggcactgggctccattgccatattcctggaagacgcggtgtatttgtataagaacaccctgtgccccataaagaggcgcactttactttggaaatcctccgcccctactgtggtgtcagtgttgtgctgctttggcctctggatcccgaggtctctggttctcgtggagatgaccattacttctttctacgccgtgtgcttctatcttcttatgctggtcatggtggaggggttcgggggaaaagaagcagtcttacggacgcttagagatacacctatgatggttcacaccggcccatgttgttgttgctgcccctgttgccctaggctattgctcacccgtaagaagctgcaactgctgatgctcggtcccttccagtacgcctttcttaagattacccttacactcgtgggcctttttttggtgcccgatggcatctatgaccctgcagacatttctgaaggtagcactgccttgtggatcaacacctttttgggggtgtcaaccctcctcgccttgtggaccctggggatcatttccaggcaggctcggctacatttaggcgaacagaacatgggggcgaagttcgccctgttccaggtattattgatactcacagcactgcaaccgagcattttcagtgtgctggccaatggaggccagattgcctgctccccgccatacagcagcaagaccagatcacaggtcatgaactgtcatctactaatactggaaacatttctgatgacagtgctcacacgtatgtactatagaagaaaggaccacaaagtgggatatgaaaccttcagctctccggacttggatttaaatctgaaagcatag

SEQ ID NO: 244256 - DNA, 1023 bp, Artificial Sequence
  derived and/or modified sequence
atggagcccggccgcacccagatcaagctggacccccgctacacagctgacctgctggaggtgctgaagaccaactacggcatccccagcgcctgcttcagccagcccccaacagctgcccagctgctgcgggccctgggccctgtggagctggccctgaccagcatcctgaccctgctggccctgggcagcatcgccatcttcctggaggatgctgtgtacctgtacaagaacaccctgtgccccatcaagaggaggaccctgctgtggaagagcagcgcccccaccgtggtgtctgtgctgtgctgcttcggcctgtggatccccaggagcctggtgctggtggagatgaccatcaccagcttctatgctgtgtgcttctacctgctgatgctggtgatggtggagggctttggaggcaaggaggccgtgctgcggaccctgcgggacacccccatgatggtgcacacaggcccctgctgctgctgctgcccctgctgcccccggctgctgctgaccaggaagaagctgcagctgctgatgctgggccccttccagtatgccttcctgaagatcaccctgaccctggtgggcctcttcctggtgcctgatggcatctatgaccctgctgacatcagcgagggcagcacagccctgtggatcaacaccttcctgggcgtgtccaccctgctggccctgtggaccctgggcatcatcagccggcaggcccggctgcacctgggggagcagaacatgggcgccaagtttgccctcttccaggtgctgctgatcctgacagccctgcagcccagcatcttctctgtgctggccaacggcggccagatcgcctgcagccccccctacagcagcaagaccaggagccaggtgatgaactgccacctgctgatcctggagaccttcctgatgacagtgctgaccaggatgtactacagaaggaaggaccacaaggtgggctatgagaccttcagcagcccagacctggacctgaacctgaaggcctag

SEQ ID NO: 244257 - DNA, 1023 bp, Artificial Sequence
  derived and/or modified sequence
atggagcccggccggacccagatcaagctggacccccggtacaccgccgatctgctggaggtgcttaagacgaactatgggatcccttcagcatgcttcagccagccgcccacagcagcacagcttctacgggccctcggccccgttgagctcgccttaactagtatcctgacactgctggccttagggtctatcgctatcttcctggaggacgcggtgtacctctacaaaaataccttatgcccgatcaagcgccgtaccttactctggaagtcaagcgcgcccactgtggtctccgtgctgtgctgctttggactctggataccccgatccctggtgctggtggagatgaccataacatccttttatgcagtttgcttttatcttctaatgctcgtgatggtggagggtttcgggggcaaagaggctgtgctgcgaactctgagagataccccgatgatggtgcacaccggaccatgctgttgttgttgtccttgctgtcctcggctcctgctgacaaggaaaaagttacaacttctcatgctcggaccctttcagtatgctttcttgaagatcaccctgaccctggtcgggctctttttggtgccagatggaatttatgaccctgccgacattagcgagggttccaccgcgctgtggatcaacacatttctcggggtcagtaccctcctggcattatggacgctgggtattatttcacgtcaggcccgcctgcatctgggcgagcaaaacatgggagccaagttcgcactattccaagtgctgctcatccttacagctttacagccctccatttttagtgttttggcgaatggcgggcagatcgcgtgtagccccccatacagctctaagactaggtctcaggtgatgaattgtcatcttctcatcctggaaacctttctgatgacagtgttgacccgaatgtattaccggaggaaggatcacaaagtgggatatgagacattttcttcacctgatctggatttgaacctgaaggcatag

SEQ ID NO: 244258 - DNA, 1463 bp, Artificial Sequence
  derived and/or modified sequence
agaggatcaaattcctccggggtgaactctgagatagaaagttggcccgggaagctcaaggagggagagcggcagaggggaagactctgcaattctgcttgccccccaccccggcccaggcaagccaccctgcccccggcccccacctgcccgccccgcctgcccttcctcaccccggtgcctgcgggattgctggagagaacgcggcgatggagccgggcaggacccagataaagcttgaccccaggtacacagcagatcttctggaggtgctgaagaccaattacggcatcccctccgcctgcttctctcagcctcccacagcagcccaactcctgagagccctgggccctgtggaacttgccctcactagcatcctgaccttgctggcgctgggctccattgccatcttcctggaggatgccgtctacctgtacaagaacaccctttgccccatcaagaggcggactctgctctggaagagctcggcacccacggtggtgtctgtgctgtgctgctttggtctctggatccctcgttccctggtgctggtggaaatgaccatcacctcgttttatgccgtgtgcttttacctgctgatgctggtcatggtggaaggctttggggggaaggaggcagtgctgaggacgctgagggacaccccgatgatggtccacacaggcccctgctgctgctgctgcccctgctgtccacggctgctgctcaccaggaagaagcttcagctgctgatgttgggccctttccaatacgccttcttgaagataacgctgaccctggtgggcctgtttctcgtccccgacggcatctatgacccagcagacatttctgaggggagcacagctctatggatcaacactttccttggcgtgtccacactgctggctctctggaccctgggcatcatttcccgtcaagccaggctacacctgggtgagcagaacatgggagccaaatttgctctgttccaggttctcctcatcctgactgccctacagccctccatcttctcagtcttggccaacggtgggcagattgcttgttcgcctccctattcctctaaaaccaggtctcaagtgatgaattgccacctcctcatactggagacttttctaatgactgtgctgacacgaatgtactaccgaaggaaagaccacaaggttgggtatgaaactttctcttctccagacctggacttgaacctcaaagcctaaggtggatggcttggacaatgaaaggatgctgtactcattagaatacaagattcctttactgtccctcaaccttgaccaaatgggaagcattcccccttgtcaacacaagctggcagatacatttgactctacagatgaaggtgaacaatgttagaataaaattgctttggatcttgcctggaaggtgttttaagttttgtaataaacaagatgatgtctgaaaatgtgtaa

SEQ ID NO: 244259 - DNA, 1023 bp, Artificial Sequence
  derived and/or modified sequence
atggagccgggacggacccagatcaaattggatccacggtataccgcagacttgctcgaagtgctgaagaccaattatggaattccctctgcttgcttttcccaacccccaaccgcagcccaacttctgcgggcactgggacctgttgagttagcactcacctccatccttaccctgcttgccctcgggtctatagccatcttcctggaagacgcagtgtacttatataaaaacacactgtgtccaattaaaaggcgaaccctgctttggaagtcttctgcgcctaccgtcgtgagcgtgctctgctgtttcgggttatggatcccaagatctctcgtgcttgtggagatgaccattacatccttctacgccgtatgcttctatctcttgatgctcgtgatggtcgagggctttggcggaaaggaggccgtcctgcgcacgctccgggacactcctatgatggtccatacaggtccatgctgttgttgctgcccctgctgccctcggctcctgttgacgaggaagaagctgcaactgctaatgctgggaccgttccagtacgccttccttaagatcacgctgaccctcgtgggactcttcctggtccctgacggcatctacgacccggctgacatcagtgagggatccacagcgttatggataaacacattcctgggggtaagcaccctgctggcactatggactctcggaattataagccgccaggcacgtcttcacctcggggaacagaacatgggggcaaaatttgcactgttccaggtgctgcttattctgacagccctgcagcctagcatcttttcggtcctggcaaatggcggacagattgcttgcagtccaccctacagctccaagacccgatctcaggtcatgaattgtcatctgctcatcctggaaactttcttaatgacagtcctcacgcgaatgtactatcgcaggaaggaccataaggtcgggtacgaaacctttagtagccctgacctcgacctcaacctcaaggcttag

SEQ ID NO: 244260 - protein, 538 aa, Artificial Sequence
  derived and/or modified sequence
MGCLWGLALPLFFFCWEVGVSGSSAGPSTRRADTAMTTDDTEVPAMTLAPGHAALETQTLSAETSSRASTPAGPIPEAETRGAKRISPARETRSFTKTSPNFMVLIATSVETSAASGSPEGAGMTTVQTITGSDPREAIFDTLCTDDSSEEAKTLTMDILTLAHTSTEAKGLSSESSASSDSPHPVITPSRASESSASSDGPHPVITPSRASESSASSDGPHPVITPSWSPGSDVTLLAEALVTVTNIEVINCSITEIETTTSSIPGASDTDLIPTEGVKASSTSDPPALPDSTEAKPHITEVTASAETLSTAGTTESAAPDATVGTPLPTNSATEREVTAPGATTLSGALVTVSRNPLEETSALSVETPSYVKVSGAAPVSIEAGSAVGKTTSFAGSSASSYSPSEAALKNFTPSETPTMDIATKGPFPTSRDPLPSVPPTTTNSSRGTNSTLAKITTSAKTTMKPPTATPTTARTRPTTDVSAGENGGFLLLRLSVASPEDLTDPRVAERLMQQLHRELHAHAPHFQVSLLRVRRG

SEQ ID NO: 244261 - DNA, 1617 bp, Artificial Sequence
  derived and/or modified sequence
atggggtgtctgtggggtcttgcacttccattgtttttcttttgttgggaggtgggtgtgagcggatcttctgctggcccttccacacgccgagccgataccgccatgactaccgatgacacagaagtgccggcaatgacactggccccaggtcatgccgctctggagacccagaccttatccgccgaaacctcctctcgggcttcaaccccggcaggccctatccccgaggccgagacacggggagccaagcgaatcagccccgcaagggagaccaggtcgttcactaagaccagtccgaatttcatggtgttaatcgctacatccgtggagactagcgcagcctccggctctcccgaaggtgctggaatgaccaccgtgcagacgattactggatccgacccacgggaagccatctttgatacgctgtgcactgatgattcatctgaagaagctaaaactcttaccatggacatactcacactagcacatacctctacagaggccaaaggcctttccagcgagagctccgcttctagtgactccccccacccagtaatcactccaagccgagcttccgaaagctctgcaagctctgacggcccacaccctgttatcactccaagtagggcaagcgagtccagcgccagttcagacggccctcaccccgtgattactccatcttggtccccaggatcagacgttactctacttgctgaggcactggttacagtcacaaacatagaggttattaactgctccatcactgagatagagactactacctctagcatccccggagcatcagacaccgatttgatccctactgaaggcgtcaaggcctcctctaccagcgatccgcctgctctccccgattcaactgaggccaagcctcatatcaccgaagtgacagcttcagcagaaacactgagcacagctggaactactgaatccgcagctccagatgctacagttgggacccccctgcccacgaactcagctactgaacgtgaagtgacagctcccggtgctactaccctttctggggcacttgtcacagtttcccgcaacccgctcgaggagaccagtgccctgtctgtggagactcccagttacgtgaaggtgtccggcgcagccccagtctctatcgaagctggatccgcagttggaaagaccacctccttcgcgggttcgagcgcttctagctacagccccagcgaggcagctttgaagaattttacgcctagcgagacacccaccatggatatcgccactaaaggccctttcccaaccagcagggatccgttaccttctgtgcctccgacaaccactaactcgtcccggggtaccaactctactctcgccaaaattacaacctctgccaaaaccacaatgaagcctccgaccgctactcctacaacagcccgaacaagaccaactaccgacgtgagcgcaggagagaacgggggatttcttcttctgcgcctgtcagtagcatcacccgaggacctcactgatcctcgggttgcagaaaggctaatgcagcagttgcaccgcgagcttcatgcccatgcaccacacttccaggtgtctctgctccgcgtccgcagggggtag

SEQ ID NO: 244262 - DNA, 1617 bp, Artificial Sequence
  derived and/or modified sequence
atgggttgtttatggggtcttgccctgccattattcttcttctgttgggaagtgggcgtgagcgggtcttccgcgggcccaagcacacgtcgggccgataccgccatgacaactgatgacacagaagtgcctgccatgacactagcccctggccatgctgccctagaaacacaaaccctctctgctgaaacctcttctagagcttcaactcccgcaggccctataccagaggcggaaacacgcggtgccaagcggatctccccagcaagagaaacaaggtccttcaccaagacgtctcctaacttcatggttttgattgccacaagcgtggaaaccagcgccgcgtctggtagtcctgagggagccggcatgaccaccgtgcagaccattaccggaagcgatcccagagaggctattttcgataccctctgtaccgacgattcaagtgaagaagccaagactctgaccatggacattctgaccctcgcccacacctcgactgaggctaagggactgagttcggaatcaagcgcatcttccgactcaccccatcccgtgatcactcccagcagggcttctgagtctagcgcatcctccgacgggccgcacccagtgatcacaccctcccgtgcatccgagagctccgcatcatccgacgggccccatccggttatcaccccctcgtggtccccgggcagtgacgttacactcctcgcagaggccctcgttaccgtgacgaacatcgaggttatcaattgttcaattaccgaaatagaaacgaccaccagtagtattcccggcgcatcggataccgacctgattcctaccgagggcgtcaaagcaagtagcactagcgaccctcccgcattacctgactcaaccgaggcaaaaccacacattacagaagtgactgcatccgctgagacactgagcacggctgggacaacagaatcagcggccccagacgctactgtgggtacccccttgcctacaaactcagctaccgagagggaggtgactgcacctggtgccactacactcagcggagcccttgtgacagttagcagaaatccgcttgaagaaacgagtgcgctcagcgtggagacccccagttatgtcaaagtaagtggcgctgcccctgtttctatagaagctgggagcgccgtaggcaagacaactagtttcgccggaagcagcgcgtcttcatacagccccagtgaggcagctctcaagaactttacaccctcagagactcctactatggatattgcaacaaaaggcccatttcccacatctagggatcctttacccagcgtacctcccacaactacaaattcgtctaggggcacgaattccaccctcgctaagattaccaccagcgcaaagacaactatgaaaccgccaaccgccactccgactactgccagaaccaggcccactacagacgtgagcgccggggagaacggcggatttctgcttttgaggctgtccgttgctagccctgaggacctcaccgacccccgggttgccgaacgacttatgcagcaactgcatcgtgagctccatgcccatgccccacacttccaggtcagcctgctccgcgtgagacgcgggtag

SEQ ID NO: 244263 - DNA, 1617 bp, Artificial Sequence
  derived and/or modified sequence
atgggctgtctatggggccttgcactcccgctcttttttttctgctgggaggttggcgtgagcggtagtagtgccgggccatcaacccgtagagctgatacagccatgacaactgatgacacagaagtgccagccatgactcttgccccagggcacgcagcactcgagacccaaaccctgtcagccgagacaagttcccgagcctccacgcctgctggccctatacctgaagccgagactcgaggagcaaagcgcatttcgcctgccagagaaactaggtcattcactaaaacctcgccaaacttcatggtgctcatcgctacatcagtagagacaagtgccgcttctggttcccccgaaggggcaggcatgacgaccgttcaaactattaccgggtctgacccaagggaagccattttcgatactctgtgcaccgacgattccagcgaggaagctaagaccttaacaatggacatactcactcttgcccatacttctactgaggctaagggcctgtcttctgaaagctcagccagctccgactcacctcatcccgtaataacgcccagcagagcttctgaatcctcagcttcatcagatggtccacatccggttataactccaagtagagcctctgaatcttcagccagctctgacgggccacatcctgtcattacacccagttggagccctggctccgatgttaccctcctcgctgaagctctcgttaccgttaccaacattgaagtgattaattgcagcataactgagatcgaaactacaacttcttcaataccaggcgcatctgacaccgacttgatccccaccgagggagttaaggctagttcgactagtgatcctccagccttgcccgacagcacagaagctaagccccatattacagaagtgactgcttccgccgagactctcagtaccgccgggactacagaatcagccgctccagacgccaccgtgggaacacccctcccaacaaactccgctaccgaaagagaggttacagctcctggagccaccaccctttctggagcactagtaacagtctctagaaatcctcttgaggagaccagtgccttaagtgtcgaaaccccaagttacgttaaagtgtccggggccgcaccagtgtcaattgaagcaggatcagccgtcggtaagacaacatcattcgccgggtccagtgcctcctcttactcaccctccgaagcagccctgaaaaactttacaccttccgaaacacctacaatggacatcgctacgaaaggtccctttccaacatcacgggatcccctaccttctgtaccccccacgacaacgaactcttctcggggtaccaattcaactctggccaagattactacttccgccaagacaaccatgaaaccccccaccgctacccccaccaccgccagaacacgccctaccactgatgtgtctgccggagaaaatggaggatttctgctgctccgcttgtccgtcgcatcgcccgaagacctaaccgatccaagggtggcagaacgtttaatgcagcaattacaccgagaacttcacgcacacgcccctcactttcaagtgagcttgcttcgtgtacgccgcggttag

SEQ ID NO: 244264 - DNA, 1617 bp, Artificial Sequence
  derived and/or modified sequence
atgggctgcctgtggggcctggccctgcccctgttcttcttctgctgggaggtgggcgtgagcggcagcagcgccggccccagcaccagaagagccgacaccgccatgaccaccgacgacaccgaggtgcccgccatgaccctggcccccggccacgccgccctggagacccagaccctgagcgccgagaccagcagcagagccagcacccccgccggccccatccccgaggccgagaccagaggcgccaagagaatcagccccgccagagagaccagaagcttcaccaagaccagccccaacttcatggtgctgatcgccaccagcgtggagaccagcgccgccagcggcagccccgagggcgccggcatgaccaccgtgcagaccatcaccggcagcgaccccagagaggccatcttcgacaccctgtgcaccgacgacagcagcgaggaggccaagaccctgaccatggacatcctgaccctggcccacaccagcaccgaggccaagggcctgagcagcgagagcagcgccagcagcgacagcccccaccccgtgatcacccccagcagagccagcgagagcagcgccagcagcgacggcccccaccccgtgatcacccccagcagagccagcgagagcagcgccagcagcgacggcccccaccccgtgatcacccccagctggagccccggcagcgacgtgaccctgctggccgaggccctggtgaccgtgaccaacatcgaggtgatcaactgcagcatcaccgagatcgagaccaccaccagcagcatccccggcgccagcgacaccgacctgatccccaccgagggcgtgaaggccagcagcaccagcgacccccccgccctgcccgacagcaccgaggccaagccccacatcaccgaggtgaccgccagcgccgagaccctgagcaccgccggcaccaccgagagcgccgcccccgacgccaccgtgggcacccccctgcccaccaacagcgccaccgagagagaggtgaccgcccccggcgccaccaccctgagcggcgccctggtgaccgtgagcagaaaccccctggaggagaccagcgccctgagcgtggagacccccagctacgtgaaggtgagcggcgccgcccccgtgagcatcgaggccggcagcgccgtgggcaagaccaccagcttcgccggcagcagcgccagcagctacagccccagcgaggccgccctgaagaacttcacccccagcgagacccccaccatggacatcgccaccaagggccccttccccaccagcagagaccccctgcccagcgtgccccccaccaccaccaacagcagcagaggcaccaacagcaccctggccaagatcaccaccagcgccaagaccaccatgaagccccccaccgccacccccaccaccgccagaaccagacccaccaccgacgtgagcgccggcgagaacggcggcttcctgctgctgagactgagcgtggccagccccgaggacctgaccgaccccagagtggccgagagactgatgcagcagctgcacagagagctgcacgcccacgccccccacttccaggtgagcctgctgagagtgagaagaggctag

SEQ ID NO: 244265 - DNA, 6193 bp, Artificial Sequence
  derived and/or modified sequence
acatttgtgatcacctggtcacacacctgggcaggaggctgcccctcctccctggtttgaggaagcaggaaaaggtacccgcgagagacagccagcagttctgtggagcagcggtggccggctaggatgggctgtctctggggtctggctctgccccttttcttcttctgctgggaggttggggtctctgggagctctgcaggccccagcacccgcagagcagacactgcgatgacaacggacgacacagaagtgcccgctatgactctagcaccgggccacgccgctctggaaactcaaacgctgagcgctgagacctcttctagggcctcaaccccagccggccccattccagaagcagagaccaggggagccaagagaatttcccctgcaagagagaccaggagtttcacaaaaacatctcccaacttcatggtgctgatcgccacctccgtggagacatcagccgccagtggcagccccgagggagctggaatgaccacagttcagaccatcacaggcagtgatcccagggaagccatctttgacaccctttgcaccgatgacagctctgaagaggcaaagacactcacaatggacatattgacattggctcacacctccacagaagctaagggcctgtcctcagagagcagcgcctcttccgacagcccccatccagtcatcaccccgtcacgggcctcagagagcagcgcctcttccgacggcccccatccagtcatcaccccgtcacgggcctcagagagcagcgcctcttccgacggcccccatccagtcatcaccccctcatggtccccgggatctgacgtcactctcctcgctgaagccctggtgactgtcacaaacatcgaggttattaattgcagcatcacagaaatagaaacaacgacttccagcatccctggggcctcagacacagatctcatccccacggaaggggtgaaggcctcgtccacctccgatccaccagctctgcctgactccactgaagcaaaaccacacatcactgaggtcacagcctctgccgagaccctgtccacagccggcaccacagagtcagctgcacctgatgccacggttgggaccccactccccactaacagcgccacagaaagagaagtgacagcacccggggccacgaccctcagtggagctctggtcacagttagcaggaatccccttgaagaaacctcagccctctctgttgagacaccaagttacgtcaaagtctcaggagcagctccggtctccatagaggctgggtcagcagtgggcaaaacaacttcctttgctgggagctctgcttcctcctacagcccctcggaagccgccctcaagaacttcaccccttcagagacaccgaccatggacatcgcaaccaaggggcccttccccaccagcagggaccctcttccttctgtccctccgactacaaccaacagcagccgagggacgaacagcaccttagccaagatcacaacctcagcgaagaccacgatgaagcccccaacagccacgcccacgactgcccggacgaggccgaccacagacgtgagtgcaggtgaaaatggaggtttcctcctcctgcggctgagtgtggcttccccggaagacctcactgaccccagagtggcagaaaggctgatgcagcagctccaccgggaactccacgcccacgcgcctcacttccaggtctccttactgcgtgtcaggagaggctaacggacatcagctgcagccaggcatgtcccgtatgccaaaagagggtgctgcccctagcctgggcccccaccgacagactgcagctgcgttactgtgctgagaggtacccagaaggttcccatgaagggcagcatgtccaagcccctgaccccagatgtggcaacaggaccctcgctcacatccaccggagtgtatgtgtggggaggggcttcacctgttcccagaggtgtccttggactcaccttggcacatgttctgtgtttcagtaaagagagacctgatcacccatctgtgtgcttccatcctgcattaaaattcactcagtgtggcccagaggctgtctattgatctgcatgctttcgccatttttatagtacagggattgtgtatagtctcactgctacctcctccttctactcccccaggtcttggtttggactttgatgatagcatttactgagacgggcctggagcctgtcgaacagcccgctgcagcagggcagggaccacctttgttcatctcagtatcccctgaactagcagagtgtctggcctgcagtgggatcgcagagaatgtggaattgacctaaatttaaatttcaagttctggacacaagcctcaattattcctcttatatgttataacttacatgctattatttttttaaaaaattaatatggtttactttttattataaaagtaaaacttggccaggctcagtggctcacgcctgtaatcccagcactttgggaggccgaggccggtggatcacgaggtcaggagtttgagactagcctggccaacatggtgaaaccccgtctctactaaaaacacgaaaattagctgggtgtggtggcaggtgcctgtaatcccagctacccaggaggctgagacgggagaatcacttgaacccgggaggcagaggttgcagtgacccaagatcctaccactgcaccccagcctgggcaaaagggcaagactctgtctcataaataaataaatttaaaataaaagtaaaacttgtttatgatttcaaaattttgaaatattccaaagaccaagcaaagtaagaagtgggaagaggagaaagaaaaacttttctataatcccacctcttagatacaacgatttattttttaaaattgagacagggtctcactctcacccaaactgcagtgcagtggtgcgaccatggctcactgcagcctccacctcccagctccagtgatcctcccacctcagcctcctgaggagctgggaccacagctggctaatttttgtactttgttttgtaaaaaaggggctttaccatgttgagcaggttggtctcgatcttctgagctcaagcagtcctcctgcctcagactcgcaaagtgctgggattacagacatgagccactgtgcccagccttatatacagctattattattaatgtatactgtgtattcatttcaattcttaatctctccacttggatgttgatgaaatacatacctcacattcaacatttctttctttttttttttctttttgagatggaaaggagcctggctctgtcacccaggctggagtgcagtggcgtgatctcagctcactgcaagctccacctcttgggttcacgtgattctcctgcctcagcctcctgagtatctgggactacaggtgccaccaccatgctcggctaattttttgaatttttagtagagacggagtttcaccgtgtcagccagcctggtctcaaactcctgacctcaagtgatccacccacctcggcctcccaaagtgctgggattccagttaatgagcactgctcctggcctccacatttctaaaatcgaagttctgatcttttcctctggacctgccccacctgcatcttccccatctcagttaacgtcagttgcatccttcaggtgctcaggccgaaatcctcggcaccgtctttattcccctctcacattttgcaccaggaaattctgctggctctaaggccatcaaactgtgcccagaatgtggcccctcctcagcatctccagtgctaccaccgagatggtccacgatgccatcatctctcacctgcactactacaggtctccctgtttccagctcagcccccaccccagtctagtcccagtgtgtcagccagggctgtctttttacaacataaggcagaccacaccacttctttgctccaatcctcccatttcactcagaagaaaagctccgacaacagctgcaaagccgtgcacgacctgcgcccctcccctgcctccttaatttgctgactgcaccgcagccacacggacgtctttcttgtcccttgaatgcgctgggcctgctcttgccttgggacctttctgtgcattgcttagtctgctcagaagccttctcctctacatatccacttgtctaaaccctctacctccaccttcatgccccttctcagcgaggtctaccatgaccatgctgcctacaaattcagtctccccttctgtactttgacgtactttatagtgctgatcacaattgaacgtcatacatattttgttttctttattatctgagtcctccaactagaatgaaagattttgcccattatggtttccctagtgccaagaacagtacctggcacataccaggggctcagtaaacatttgttagatgaatgaaggaaacaaggagacaatgttgatgctgctgtgagcaaggggagtctgaacgtttgacagatcccttccatttctggagtggggcagaatgagtttcataaagtagctcggacaaaaataattcgctcatcttggcatatatgttgggcagctgccgcagaagagagactgagctatgtgccgtggaggattcaaatctgtctcttctcccagggattgaagttagacacgtacagcaataataagttgaaagaacttatttacaccgcatatagcaacaacaggatgcccttaatatatagagaactcttacagcgcaagaaaataaaaaggcaaacataccagtagaaaaatgggtaaatggcaacaggtaattcacaaaagaagaaatacaaatgtcctctcctcccgccaccaccccccatgaaaaagaacgtgtgacttcagtagcaaaaacaggtccattaatacagtgagatattgcttattgtatgtctgtactgatctatactgggtgctgggcaaacgggcattcttaaacactcctagtagggaagaaattggtacaacctttccggaggacaatttaactgatttatttaaagcccgaaaaatgtacatacctttaactcagcagtttcgttactgatttatcttaaggaagtaatttagaatctgtgcctaactgtttacaataactcatagatgaaaaaggcaaaacaaaacacaagtaacctcaaatctccccatgtaacagtttgcttaaacactatagcgttattttacgcaagctacagaagcattgttgaaacatatatttattaggacagaaaaaaattcatgaaatgttattttatcttcttttttcttaaaatggaacttaaaaaaaatttttttaactccaacctaccttttacaccatctgcagagctttcctctcccaaatcaaagctactcctgttcctacctccaggatggaatccccaccttcgtatgcaagggtcttcatgatatggcctcagccaactatcttagctccaggtcacggccccatcttccatatcctatgctgcttgcacaggaagcagctcgctaaccccaggcacacctgctttcatctggagcgtctgcccatcatgattcctccccctggtcccttcacctggaaaactcctattcattcctcaaagcccagttcagatggcacctctccatgacttcatcagattccctacagaggtgctgattttctggtctcttgtgtttctgttgtaacacttaacatgctgtattataatgtgcttattttatttacaagtttgttacattgtacgtgctcgaggacaagcagccggtagtattcacctctgtcatcacagaagctggcgtggagccctccacatgagggcactgatgtgtttgctgagtgactgggacaatggtgggccacgtgagccccgaaactttcagtgggctctgaaagttaagaaaagggcattcagtactgaaatcacacaaaacgtaaatttaatgatataattgttccgaagctgctctataatttggcatgaatggagagcagtttacaaaaatgacaacaccactgttatataaacccaattcttaaataggttttcttctcttgctttgtatttcctcaagtgggtgatacttaatacagtggctcatgtaatcttaattactacatatgaggacacggacatgtacatatgatgctgattactgttatttttggaagtaaaaaaattgtaaaatttg

SEQ ID NO: 244266 - DNA, 1617 bp, Artificial Sequence
  derived and/or modified sequence
atgggctgcctgtggggtctggccctcccgcttttctttttttgctgggaagtgggggtgtccggctcttctgctgggccttcaaccaggagagcggataccgcaatgactacagatgatacagaggttccagcaatgacactagctccagggcatgctgccctggagacacagacactgagcgcagaaacctcttcaagggcttcaactccagcagggcccatacctgaggcagagactcgaggcgccaagagaatttctcctgcccgtgagacccgcagttttactaagaccagccccaatttcatggttctgattgccaccagcgtagaaactagtgcggcttctgggagtcctgagggcgccggcatgactactgtgcaaaccatcacggggtctgaccccagagaggcgatctttgataccctgtgtacagacgacagcagtgaagaagccaagacccttactatggacattttgaccctcgctcataccagcactgaggcaaagggattgagtagtgaatcatctgccagctcagatagcccccaccccgtgataactccctcacgagcctccgaatcttccgcctcatctgacggtccacacccggttatcaccccgagccgcgcttctgagtcctccgcttctagcgacgggccccatcctgtcattacaccttcctggtcaccaggatctgatgtgacattgctggccgaagctctggtcactgttacaaatatcgaagtaatcaattgctccatcactgaaatagagactacgacatcttccatccccggggctagcgatacggatctcatccctactgagggtgtaaaagctagctcaacgagtgatccacccgcccttcccgactccaccgaggcaaaaccccacattaccgaggtgacggctagcgcggaaacgctgtcaacggcaggtacgactgaatcagccgctcctgacgctaccgtggggacccccctgcccacgaactccgccaccgagagggaagtgacagcccccggtgctaccacactgagcggtgcactggtgaccgtaagtagaaacccgcttgaagagactagcgcgctcagtgttgaaactccttcgtacgtgaaggtgtctggggccgccccagtgtctattgaggccggcagcgccgtggggaagacgacctccttcgctggctcctcggctagctcttattcgcctagcgaggccgcgctgaaaaatttcaccccgtcagagactcctacaatggacatcgcgacgaaaggccctttcccaacgtccagagatcccctcccaagtgttcctcccacaacaacaaactctagtagaggcacaaatagcacccttgccaaaatcaccacctctgcaaagaccacaatgaagccgcctaccgccacccccaccaccgcccggacacggccgacaacagatgtttccgccggcgagaatggtggattcctgttactccgtcttagtgtggccagccccgaggatctgaccgatcctcgggtggccgagcggttgatgcagcaactccatagagagcttcatgcgcatgccccacactttcaagtcagcctgcttagggtccgtaggggttag

SEQ ID NO: 244267 - DNA, 1617 bp, Artificial Sequence
  derived and/or modified sequence
atgggctgcctgtggggcctggccctgcccctcttcttcttctgctgggaggtgggcgtgtctggcagcagcgctggccccagcacccggcgggctgacacagccatgaccacagatgacacagaggtgcctgccatgaccctggcccctggccatgctgccctggagacccagaccctgtctgctgagaccagcagccgggccagcaccccagctggccccatccctgaggccgagaccaggggggccaagaggatcagccctgcccgggagaccaggagcttcaccaagaccagccccaacttcatggtgctgattgccacctctgtggagaccagcgctgccagcggcagccctgagggcgccggcatgaccaccgtgcagaccatcactggaagtgacccccgggaggccatctttgacaccctgtgcacagatgacagcagcgaggaggccaagaccctgaccatggacatcctgaccctggcccacaccagcacagaggccaagggcctgagcagcgagagcagcgccagcagtgacagcccccaccctgtgatcacccccagccgggccagcgagagcagcgccagcagtgatggcccccaccctgtgatcacccccagccgggccagcgagagcagcgccagcagtgatggcccccaccctgtgatcacccccagctggagccctggcagtgatgtgaccctgctggccgaggccctggtgacagtgaccaacatcgaggtgatcaactgcagcatcacagaaattgagaccaccaccagcagcatccctggggccagtgacacagacctgatccccacagagggcgtgaaggccagcagcaccagtgaccccccagccctgcctgacagcacagaggccaagccccacatcacagaggtgacagccagcgctgagaccctgagcacagctggcaccacagagagcgctgccccagatgccaccgtgggcacccccctgcccaccaacagcgccacagagcgggaggtgacagcccctggggccaccaccctgagcggggccctggtgacagtgtccaggaaccccctggaggagaccagcgccctgtctgtggagacccccagctatgtgaaggtgtctggggccgcccctgtgtccattgaagctggcagcgctgtgggcaagaccaccagctttgctggcagcagcgccagcagctacagccccagcgaggccgccctgaagaacttcacccccagcgagacccccaccatggacatcgccaccaagggccccttccccaccagccgggaccccctgcccagcgtgccccccaccaccaccaacagcagccggggcaccaacagcaccctggccaagatcaccaccagcgccaagaccaccatgaagcccccaacagccacccccaccacagcccggacccggcccaccacagatgtgtctgctggagaaaatggaggcttcctgctgctgcggctgtctgtggccagccctgaggacctgacagacccccgggtggccgagcggctgatgcagcagctgcaccgggagctgcacgcccacgccccccacttccaggtgtccctgctgcgggtgcggcggggctag

SEQ ID NO: 244268 - DNA, 1617 bp, Artificial Sequence
  derived and/or modified sequence
atgggctgcctgtggggcctggccctgcccctgttcttcttctgctgggaagttggcgtgtcaggttctagcgccggacccagcaccaggcgggccgacaccgccatgaccacggacgacactgaagtcccggctatgacgctggcacctggccacgccgcccttgagacccagactctgagtgccgagacatcatcacgggccagcacacccgccggccccattcctgaggcagaaaccaggggggcaaaacgcatttcacctgctagggaaactagaagttttacaaaaacttcgcctaactttatggtccttattgcaacatccgtggaaacctccgccgcctcaggttccccagagggcgcagggatgacgactgttcaaacgatcactgggtctgatccccgtgaggccatctttgacactctgtgtacagacgattctagcgaagaggccaaaactctgaccatggacatcctgacactagcgcacaccagtacagaggcgaaggggctgagcagcgaatcttcagctagttcagattccccgcacccggtcatcacacccagccgtgcctcagagagcagtgcttcttcagacggccctcatcctgtgatcacgccgagcagagcctctgaatcttcggcctcgagcgacggcccgcaccctgtgataacaccttcctggtcaccgggtagcgatgtcacacttttagccgaggcactagtgacagtaactaacattgaagtgatcaactgttccattacagaaatcgaaaccacaacgagttccattccaggtgccagcgacacagacctgattcccacagaaggcgtcaaagcgtcctccacgtcggaccccccggccctgccagattcgacggaagcaaagccacatattactgaggtgaccgccagcgcggagactctttccacggcgggaacaaccgagagtgccgctcccgacgccacggttggtacgcctctgcccaccaattccgcaacggaacgcgaagttaccgctcctggtgccacaacattatcaggcgctcttgtgaccgttagtcgcaaccccttagaagagaccagtgctctttcagtggagactcccagttatgtgaaggtatctggcgcagctcctgtgtccatcgaggctggatccgcagttggcaagacaaccagcttcgcgggtagtagcgcctcgtcctactctccaagcgaagccgccctgaagaatttcacacctagcgagactccaactatggatattgcaacaaaaggcccattccctacttcacgggatccgctgcctagcgtccctccgaccacaactaacagcagccgtggaactaatagtacccttgccaagatcacgactagcgccaaaaccaccatgaagccccctaccgccacccccactaccgcccggaccagaccaaccacagacgtgagtgcaggtgaaaatgggggcttcctattgttgagactgtcagtcgccagccccgaggatctgacagacccgagagtagcagagaggctcatgcaacagctccatcgcgaattgcatgcacatgccccacattttcaggtgagtcttctccgggtaaggcgtggatag

SEQ ID NO: 244269 - RNA, 1617 nt, Artificial Sequence
  derived and/or modified sequence
auggguuguuuauggggucuugcccugccauuauucuucuucuguugggaagugggcgugagcgggucuuccgcgggcccaagcacacgucgggccgauaccgccaugacaacugaugacacagaagugccugccaugacacuagccccuggccaugcugcccuagaaacacaaacccucucugcugaaaccucuucuagagcuucaacucccgcaggcccuauaccagaggcggaaacacgcggugccaagcggaucuccccagcaagagaaacaagguccuucaccaagacgucuccuaacuucaugguuuugauugccacaagcguggaaaccagcgccgcgucugguaguccugagggagccggcaugaccaccgugcagaccauuaccggaagcgaucccagagaggcuauuuucgauacccucuguaccgacgauucaagugaagaagccaagacucugaccauggacauucugacccucgcccacaccucgacugaggcuaagggacugaguucggaaucaagcgcaucuuccgacucaccccaucccgugaucacucccagcagggcuucugagucuagcgcauccuccgacgggccgcacccagugaucacacccucccgugcauccgagagcuccgcaucauccgacgggccccauccgguuaucacccccucgugguccccgggcagugacguuacacuccucgcagaggcccucguuaccgugacgaacaucgagguuaucaauuguucaauuaccgaaauagaaacgaccaccaguaguauucccggcgcaucggauaccgaccugauuccuaccgagggcgucaaagcaaguagcacuagcgacccucccgcauuaccugacucaaccgaggcaaaaccacacauuacagaagugacugcauccgcugagacacugagcacggcugggacaacagaaucagcggccccagacgcuacuguggguacccccuugccuacaaacucagcuaccgagagggaggugacugcaccuggugccacuacacucagcggagcccuugugacaguuagcagaaauccgcuugaagaaacgagugcgcucagcguggagacccccaguuaugucaaaguaaguggcgcugccccuguuucuauagaagcugggagcgccguaggcaagacaacuaguuucgccggaagcagcgcgucuucauacagccccagugaggcagcucucaagaacuuuacacccucagagacuccuacuauggauauugcaacaaaaggcccauuucccacaucuagggauccuuuacccagcguaccucccacaacuacaaauucgucuaggggcacgaauuccacccucgcuaagauuaccaccagcgcaaagacaacuaugaaaccgccaaccgccacuccgacuacugccagaaccaggcccacuacagacgugagcgccggggagaacggcggauuucugcuuuugaggcuguccguugcuagcccugaggaccucaccgacccccggguugccgaacgacuuaugcagcaacugcaucgugagcuccaugcccaugccccacacuuccaggucagccugcuccgcgugagacgcggguag

SEQ ID NO: 244270 - RNA, 1617 nt, Artificial Sequence
  derived and/or modified sequence
augggcugucuauggggccuugcacucccgcucuuuuuuuucugcugggagguuggcgugagcgguaguagugccgggccaucaacccguagagcugauacagccaugacaacugaugacacagaagugccagccaugacucuugccccagggcacgcagcacucgagacccaaacccugucagccgagacaaguucccgagccuccacgccugcuggcccuauaccugaagccgagacucgaggagcaaagcgcauuucgccugccagagaaacuaggucauucacuaaaaccucgccaaacuucauggugcucaucgcuacaucaguagagacaagugccgcuucugguucccccgaaggggcaggcaugacgaccguucaaacuauuaccgggucugacccaagggaagccauuuucgauacucugugcaccgacgauuccagcgaggaagcuaagaccuuaacaauggacauacucacucuugcccauacuucuacugaggcuaagggccugucuucugaaagcucagccagcuccgacucaccucaucccguaauaacgcccagcagagcuucugaauccucagcuucaucagaugguccacauccgguuauaacuccaaguagagccucugaaucuucagccagcucugacgggccacauccugucauuacacccaguuggagcccuggcuccgauguuacccuccucgcugaagcucucguuaccguuaccaacauugaagugauuaauugcagcauaacugagaucgaaacuacaacuucuucaauaccaggcgcaucugacaccgacuugauccccaccgagggaguuaaggcuaguucgacuagugauccuccagccuugcccgacagcacagaagcuaagccccauauuacagaagugacugcuuccgccgagacucucaguaccgccgggacuacagaaucagccgcuccagacgccaccgugggaacaccccucccaacaaacuccgcuaccgaaagagagguuacagcuccuggagccaccacccuuucuggagcacuaguaacagucucuagaaauccucuugaggagaccagugccuuaagugucgaaaccccaaguuacguuaaaguguccggggccgcaccagugucaauugaagcaggaucagccgucgguaagacaacaucauucgccggguccagugccuccucuuacucacccuccgaagcagcccugaaaaacuuuacaccuuccgaaacaccuacaauggacaucgcuacgaaaggucccuuuccaacaucacgggauccccuaccuucuguaccccccacgacaacgaacucuucucgggguaccaauucaacucuggccaagauuacuacuuccgccaagacaaccaugaaaccccccaccgcuacccccaccaccgccagaacacgcccuaccacugaugugucugccggagaaaauggaggauuucugcugcuccgcuuguccgucgcaucgcccgaagaccuaaccgauccaaggguggcagaacguuuaaugcagcaauuacaccgagaacuucacgcacacgccccucacuuucaagugagcuugcuucguguacgccgcgguuag

SEQ ID NO: 244271 - DNA, 1305 bp, Artificial Sequence
  derived and/or modified sequence
atgccatctgagattctactgaaaatattcagctacctcgatgctgtgagtctactctgtactggatgcgtctctaggcgattttaccatctcgctaacgacaacttcatttggatcggtatctacagcactgctttctcacccgccagaagtaattggaagttcaattcagttgagaagatcgcaatgagtatgagtttcctttctgtgcaagataaagaagccgggtattggaaaaaggagtatatcacaaaacaaatcgcctctgtgaaggcggcccttgctgatatcctaaaacccgtgaatccatacactggactccccgtaaaaactaaagaggctcttcgaatcttcgggttgggatgggccatcatcctgaaagagaagggtggaaaagagtatatcatggaacacgttgaccttagtatcaacgatacatctgtcacggtcatatggtatggtaaaaaatggccctgcctggccagtctgagcactctcgatttgtgtgggatgactccagttttcaccgactggtataagaccccaaccaaacacagactgcgatggcacagcctcatcgccaaatataatctgagccacctgacaattagtaccatgatcggctgtgataggctgattagaatcttctgtttacaccccggactactagtcggtgtgtggaaaaaagaagaggagcttgccttcgtaatggctaatctccatttccatcaccttgtggagcgaagcaccctcggctccgcgactatcccctacgagttacccccccacagcccatttctcgacgatagccccgagtatgggttgcacggttaccagctacacgtcgacctgcattcaggtggagtcttctatctgtgtggtacgttcaggaacctttttactaagcggggcaatatagagaacggacacgtgaaattgatagtcatacacctgaagaataacagagagcatctgcctttaataggcaaggtcgggttatcttggaaaactgatatcttcgatggctgcatcaagagctgcagcatgatggatgttacgttgctggacgagcatggtaaaccattctggtgcttcagcagcccagtgtgcctgcgaagtcccgccacacccagcgattcttctagttttttgggacagacttacaacgtggactacgtggacgccgaagggagagtccacgtggaactggtgtggatccgagaaaccgaggagtatctgatagtcaaccttgtgttgtatttgtctattgccaaaatcaaccattggttcggaacggagtattag

SEQ ID NO: 244272 - DNA, 1305 bp, Artificial Sequence
  derived and/or modified sequence
atgcccagcgagatcctgctgaagatcttctcctacctggatgctgtgtccctgctgtgcaccggctgtgtgagccgccgcttctaccacctggccaatgacaacttcatctggattggcatctacagcacagccttcagccctgcccggagcaactggaagttcaacagcgtggagaagatcgccatgtccatgtccttcctgtctgtgcaggacaaggaggccggctactggaagaaggagtacatcaccaagcagatcgcctctgtgaaggccgccctggccgacatcctgaagcctgtgaacccctacacaggcctgcctgtgaagaccaaggaggccctgcgcatcttcggcctgggctgggccatcatcctgaaggagaagggcggcaaggagtacatcatggagcacgtggacctgagcatcaatgacacctctgtgaccgtcatctggtacggcaagaagtggccctgcctggccagcctgagcaccctggacctgtgtggcatgacccctgtgttcacagactggtacaagacccccaccaagcaccggctgcgctggcacagcctgattgccaagtacaacctgagccacctgaccatcagcaccatgattggctgtgacaggctcatccgcatcttctgcctgcaccctggcctgctggtgggcgtgtggaagaaggaggaggagctggcctttgtgatggccaacctgcacttccaccacctggtggagaggagcaccctgggcagcgccaccatcccctatgagctgcccccccacagccccttcctggatgacagcccagaatatggcctgcacggctaccagctgcacgtggacctgcacagcggcggcgtcttctacctgtgtggcaccttcaggaacctcttcaccaagaggggcaacattgaaaatggccacgtgaagctgattgtcatccacctgaagaacaaccgggagcacctgcccctcatcggcaaggtgggcctgtcctggaagacagacatctttgatggctgcatcaagagctgcagcatgatggatgtgaccctgctggatgagcacggcaagcccttctggtgcttcagcagccctgtgtgcctgcggagccctgccacccccagcgacagcagcagcttcctgggccagacctacaacgtggactatgtggatgctgagggccgggtgcacgtggagctggtgtggatccgggagacagaggagtacctgattgtgaacctggtgctgtacctgagcatcgccaagatcaaccactggtttggaacagagtactag

SEQ ID NO: 244273 - DNA, 1305 bp, Artificial Sequence
  derived and/or modified sequence
atgcccagcgagatcctgctgaagatcttcagctacctggacgccgttagtttactttgtaccggatgcgtgtctcgcagattctaccatctggctaatgacaacttcatctggatcggcatctactcaactgccttctcccccgccagaagcaattggaagttcaactccgtggaaaaaatagccatgagcatgagtttcctctccgtccaggacaaagaagctggatactggaagaaagaatatattacaaaacaaatcgcaagtgtaaaggccgctctcgcggacattctcaaaccagtgaacccctacaccggactcccagtcaagacaaaggaggccctgaggatcttcggtctcgggtgggccataattctgaaggagaaagggggcaaggaatacattatggagcatgtggacttgagcataaatgatacgtccgtgacagttatatggtacggtaagaagtggccctgtctggcctcactgtctacattggacctgtgtggcatgacccctgtcttcacagattggtacaagactcctaccaaacatcgtctgagatggcacagcttaatcgcaaagtacaatctttcccacctgacgatctccactatgatcggttgcgaccgactcattaggattttttgcctgcacccgggcctgctggtgggcgtttggaagaaggaggaagagctggcctttgttatggccaacctgcacttccaccacttagtggagcgcagcacgcttggttccgccacgatcccatacgaactccctccccacagtccattcctcgacgattcaccagaatacggccttcatggctatcaattacacgtggatcttcactccgggggcgtattttatctgtgcggcacattccgcaacctcttcacaaaaagggggaatatcgagaacgggcacgtgaaattgatcgttatccacttaaaaaataatcgtgaacatcttccgctgatcggaaaagtgggactctcctggaaaaccgatatctttgacggctgtatcaagtcctgcagtatgatggatgttaccctgctggatgagcatgggaagcccttctggtgtttttcttcaccagtttgtttgcgaagtcccgccacaccctctgattcttctagctttctcggacaaacttataatgtggactatgtagatgcggaagggagagtgcatgtagaacttgtctggatccgcgagaccgaagagtacctgattgtgaatctcgtgctgtacctgtctatagccaagattaaccattggtttggcaccgagtattag

SEQ ID NO: 244274 - DNA, 1305 bp, Artificial Sequence
  derived and/or modified sequence
atgccatccgaaatcttactcaagatcttcagttatctagacgccgtcagtttactctgtaccggctgcgtgagccgcaggttttatcatttggccaacgacaacttcatctggattgggatatacagcacagccttctctccggcacgatccaactggaagttcaactcagttgagaaaatcgccatgtctatgagcttcttaagcgttcaggataaagaagccggatactggaagaaagagtacattactaagcaaatcgcatctgtgaaggccgctctggcagatatactaaaacccgtcaacccctacaccggtttgccagtgaagaccaaagaagcactaagaatcttcggcctggggtgggccatcatattgaaggagaaaggtgggaaagagtatatcatggagcatgtggatttgagcattaacgatacgagtgttacagtgatatggtacggtaagaagtggccctgtcttgccagtctatctacactggacttatgtggcatgactccggttttcactgactggtacaaaaccccaaccaagcatagacttcggtggcactccctgattgcgaaatataacctctcccacctgacaatcagcacaatgattggttgcgataggctgattaggattttctgcctccaccccggtctgctggtcggcgtatggaaaaaggaagaggaactggcgtttgttatggcgaatctccatttccaccacctggtggagagaagcactctcggcagcgccacgatcccctacgaacttcctccacacagcccctttttggatgattcccccgagtacggactgcacggataccagctccatgttgaccttcacagcggaggggtattctacctctgcggcacatttcggaatctgtttaccaaaaggggaaatattgagaatggccacgtgaagctgatcgtgatccacctcaaaaataaccgagaacacctgcccttaatcggaaaggtggggctgtcctggaaaactgatatctttgacggttgcatcaaaagctgcagcatgatggacgtgaccttactggatgagcatggaaagccattttggtgtttttctagcccagtttgcttaagatcccctgcaacaccttccgacagctcttcattcctcgggcagacttacaacgtcgattacgtcgatgccgagggcagagtccatgtcgagctggtgtggataagagagacagaggagtatctgattgttaatctggtattgtatttgtcaattgccaaaatcaatcactggtttggcacagagtactag

SEQ ID NO: 244275 - DNA, 1305 bp, Artificial Sequence
  derived and/or modified sequence
atgcccagcgagatcctgctgaagatcttcagctacctggacgccgtgagcctgctgtgcaccggctgcgtgagcagaagattctaccacctggccaacgacaacttcatctggatcggcatctacagcaccgccttcagccccgccagaagcaactggaagttcaacagcgtggagaagatcgccatgagcatgagcttcctgagcgtgcaggacaaggaggccggctactggaagaaggagtacatcaccaagcagatcgccagcgtgaaggccgccctggccgacatcctgaagcccgtgaacccctacaccggcctgcccgtgaagaccaaggaggccctgagaatcttcggcctgggctgggccatcatcctgaaggagaagggcggcaaggagtacatcatggagcacgtggacctgagcatcaacgacaccagcgtgaccgtgatctggtacggcaagaagtggccctgcctggccagcctgagcaccctggacctgtgcggcatgacccccgtgttcaccgactggtacaagacccccaccaagcacagactgagatggcacagcctgatcgccaagtacaacctgagccacctgaccatcagcaccatgatcggctgcgacagactgatcagaatcttctgcctgcaccccggcctgctggtgggcgtgtggaagaaggaggaggagctggccttcgtgatggccaacctgcacttccaccacctggtggagagaagcaccctgggcagcgccaccatcccctacgagctgcccccccacagccccttcctggacgacagccccgagtacggcctgcacggctaccagctgcacgtggacctgcacagcggcggcgtgttctacctgtgcggcaccttcagaaacctgttcaccaagagaggcaacatcgagaacggccacgtgaagctgatcgtgatccacctgaagaacaacagagagcacctgcccctgatcggcaaggtgggcctgagctggaagaccgacatcttcgacggctgcatcaagagctgcagcatgatggacgtgaccctgctggacgagcacggcaagcccttctggtgcttcagcagccccgtgtgcctgagaagccccgccacccccagcgacagcagcagcttcctgggccagacctacaacgtggactacgtggacgccgagggcagagtgcacgtggagctggtgtggatcagagagaccgaggagtacctgatcgtgaacctggtgctgtacctgagcatcgccaagatcaaccactggttcggcaccgagtactag

SEQ ID NO: 244276 - protein, 183 aa, Artificial Sequence
  derived and/or modified sequence
MQAPRAALVFALVIALVPVGRGNYEELENSGDTTVESERPNKVTIPSTFAAVTIKETLNANINSTNFAPDENQLEFILMVLIPLILLVLLLLSVVFLATYYKRKRTKQEPSSQGSQSALQTYELGSENVKVPIFEEDTPSVMEIEMEELDKWMNSMNRNADFECLPTLKEEKESNHNPSDSES

SEQ ID NO: 244277 - DNA, 552 bp, Artificial Sequence
  derived and/or modified sequence
atgcaggcccccagagccgccctggtgttcgccctggtgatcgccctggtgcccgtgggcagaggcaactacgaggagctggagaacagcggcgacaccaccgtggagagcgagagacccaacaaggtgaccatccccagcaccttcgccgccgtgaccatcaaggagaccctgaacgccaacatcaacagcaccaacttcgcccccgacgagaaccagctggagttcatcctgatggtgctgatccccctgatcctgctggtgctgctgctgctgagcgtggtgttcctggccacctactacaagagaaagagaaccaagcaggagcccagcagccagggcagccagagcgccctgcagacctacgagctgggcagcgagaacgtgaaggtgcccatcttcgaggaggacacccccagcgtgatggagatcgagatggaggagctggacaagtggatgaacagcatgaacagaaacgccgacttcgagtgcctgcccaccctgaaggaggagaaggagagcaaccacaaccccagcgacagcgagagctag

SEQ ID NO: 244278 - DNA, 552 bp, Artificial Sequence
  derived and/or modified sequence
atgcaggcccccagggcagccctagtctttgccctggtaatagccctggttcccgtcgggcgcggtaactatgaggagctcgaaaattctggtgacacaaccgtcgaatccgagagaccaaacaaagtgaccattccaagcacctttgcagccgtgacgatcaaggagaccctcaacgcaaacataaattccacaaacttcgctccagacgaaaatcaactggagtttatcctgatggtcttgattcccttgattctgttagtgttactcctgctaagcgtcgtcttcttggccacctattacaaacgcaagaggaccaaacaggagccgagtagtcaaggcagccaaagcgcccttcagacttacgagctaggttctgagaacgtcaaagttcccatatttgaggaggatacccccagtgtgatggaaatcgagatggaggaacttgataaatggatgaattctatgaacaggaacgccgatttcgagtgtctgccaaccctcaaggaagaaaaagagagtaaccataatccgagtgacagtgaatcctag

SEQ ID NO: 244279 - DNA, 552 bp, Artificial Sequence
  derived and/or modified sequence
atgcaggccccccgggccgccctggtgtttgccctggtgattgccctggtgcctgtgggccggggcaactatgaggagctggagaacagcggggacaccaccgtggagagcgagcggcccaacaaggtgaccatccccagcacctttgctgctgtgaccatcaaggagaccctgaatgccaacatcaacagcaccaactttgccccagatgagaaccagctggagttcatcctgatggtgctgatccccctcatcctgctggtgctgctgctgctgtctgtggtgttcctggccacctactacaagaggaagaggaccaagcaggagcccagcagccagggcagccagagcgccctgcagacctatgagctgggctctgaaaatgtgaaggtgcccatctttgaggaggacacccccagcgtgatggagattgagatggaggagctggacaagtggatgaacagcatgaacagaaatgctgactttgaatgtctgcccaccctgaaggaggagaaggagagcaaccacaaccccagcgacagcgagagctag

SEQ ID NO: 244280 - DNA, 552 bp, Artificial Sequence
  derived and/or modified sequence
atgcaggccccccgggccgccctggtgttcgccctggtgatcgccctggttcctgtggggagagggaactatgaagaattggagaactccggtgataccaccgtcgagtcagaaaggcctaacaaagtaactattccttccacgtttgccgcagtgaccatcaaagagacacttaatgctaatatcaactccacgaattttgcccctgacgagaatcagctggagttcatccttatggtgctgatccctcttatcctcctggtgctcctgttgctttctgtggtgtttcttgctacctactataaacgcaaacgaaccaagcaagaaccatctagccaaggctcccagagtgcattacagacatacgagctgggctccgagaatgtgaaggttccaatcttcgaggaggatacacccagcgttatggagatagagatggaggaattggataaatggatgaactctatgaatcgtaacgcagacttcgaatgcttgcctactctcaaggaagagaaggaatccaaccacaaccctagtgacagcgagtcttag

SEQ ID NO: 244281 - DNA, 552 bp, Artificial Sequence
  derived and/or modified sequence
atgcaggcccctcgtgccgcactggttttcgccttagtaatcgctctcgtgcctgtgggcagaggaaactatgaggagctcgagaattccggggacacaacggtggagagcgaacggccaaacaaagtgacaatcccctcaaccttcgccgctgtaactatcaaagaaaccctcaatgcaaatatcaattccaccaactttgctccggacgaaaaccaactggagttcattttgatggtcctgatcccgctcattcttctggtgcttctccttctttcggtggtcttcctagctacctactacaaacggaaacggacaaagcaagaaccatcaagtcagggcagtcagtccgccctccagacctatgaactgggatccgagaatgttaaggtaccaatctttgaagaggatacaccaagcgtgatggaaatagaaatggaggaactcgataaatggatgaactccatgaatcgtaacgcagatttcgagtgcctgccaaccctaaaggaagagaaggaatcaaaccataacccctcagactccgaaagctag

SEQ ID NO: 244282 - DNA, 10698 bp, Artificial Sequence
  derived and/or modified sequence
ggctggagaggcgtgataatagaaccagtgcttcaacagcaacttctcttttgcaatccttgctggtctgacaggctcctgcagaattacatcacttcctaaaaaacaggcacacacctctccttcaagtcagcaccgacccaaacaagcaggaaacaggaaatgttcacgtttcagagaggctgcagcccggcgcagcatcctgagcgcgcctctgccgaggcgagcggacatgcaggctccccgcgcagccctagtcttcgccctggtgatcgcgctcgttcccgtcggccggggtaattatgaggaattagaaaactcaggagatacaactgtggaatctgaaagaccaaataaagtgactattccaagcacatttgctgcagtgaccatcaaagaaacattaaatgcaaatataaattctaccaactttgctccggatgaaaatcagttagagtttatactgatggtgttaatcccattgattttattggtcctcttacttttatccgtggtattccttgcaacatactataaaagaaaaagaactaaacaagaaccttctagccaaggatctcagagtgctttacagacatatgaactgggaagtgaaaacgtgaaagtccctatttttgaggaagatacaccctctgttatggaaattgaaatggaagagcttgataaatggatgaacagcatgaatagaaatgccgactttgaatgtttacctaccttgaaggaagagaaggaatcaaatcacaacccaagtgacagtgaatcctaaacctgaatggcgctcatgttttccaagagaagcagcccctgagggagtctgctgaggctgccaacagaggatgaagaggatacaaatttaattaatttcaaatcaacatagacacaagaaccttttgctgtttcttccaacgcccactcttcctaatgatggcatcacttgcacttggaagaatgtgcaattgagaagtactaggaaaaggcctggctgccatccatcgctgcctctgagggtggagaaggaggcgggtgatgtgctcacttctgatcaacatgtgttgcctcctctcagccaacttctagctcactgaactcactctggtcatgataaatgttcgtcacctttctgcttcattccttagggcctaaatcaggaagctgttttatcgatggtttccttttgggtcagtaaccagctttggataatttcctctgattattcaagtcgtgggacaggtaaactacattcagcaggaacttttctcgaggagtgttatgtcatggaaaagacaccaaacacagcaagtattttaatgaatacaccatcccagggggtcagtaagctctgcctgccaagaagacacagtgagaggggtccacagtcctgatgaggtggcgtttggtaacttgtagaccctagcatggccaggtctggtcacccttaagaacttctcagagaaactaggaatcttcagtgaaagaactaatgttctcctcagctgaaattcccttgcttgtcagcatttctgcaaagctcacacttgtttcaccatacctcccttggatgtgacatgtaggtaggaagtatgtgcaggtgggagtcatctgtcagccttctatgtttcagagatcctgaaggtggtttgaaacaaacagaagaggagcaggaaatatccgtgcctgtggcagatctcactcatcatgcttagcattctctcccgccaagctgggataagcctcatgtcctaacacagcacaacaggaggtctctgtcagtccatcagagatgacattctatgtgatatttttgacatccttgtgctaaaagcaatggcacaaaatggaaaagggcctattgaccacacctactccagtaaaattgttcttcatttattccttaattttctaaatctgacccctttaaagcaatctagcaaattgagaatcctcagctctccttggatacctgatattttatttcaagaaagagacaaagaaggaaaattttatttattttactacccacatataaaccgaagggagatgggactacccaaacatttgctgctcaattttgtgtcttgtgcttgaaagtctgccctaatgcataacaaaaactacttgtctcctaccttttgggatccctttaacaagtatttgccttctgaactacgtggataatttcaaaggcagagttccagaccagagaggtctttccatacaatgaaagctataactagctggttgtgtttaaccactgctatcacgctatcctgggactgcatagaactttgacaaaagacagacttcatggtacacaacttcaacagattttctgtcatattctcaccagcacatctgaatgaggctttgtgttttccttgctctcttgcatgttccttttcaactcatggcccacagtgactctcagatatttatgccaaaattgcatacaattgttttctgaatcataacttgtctatttttctgcctatgtgtgctactttcagtttgtttctcatcaacattttgactctcagaagagcctccatttgcccctttctctctttaggtatctaagatctttgaacacctgggcctttacatttgatccaaccctatcaaataatgaacttctcagagaggcatctggggtcctggaacttcatgttgatgaagtcatattatataatatgataaaaatattctcatgcagtattttaaataatttcaaattctagaagaagcaaatttcagcgacatgtcattgagtttttatttggtaaagctataattgtgcagtgtacaaagcactttttaaaaagatagtttattctgtcagggtatatgaagttagtatacagccagaacagccaagcctcaattcttgtaccttgtgtctttttattactgtttaatcaatagatatcatatgtttatgacagtttcaagaattgtttttaaacccaaacttaattttatgtttcagactattgttaaaaaaacaaaacaaaaaccaaaaaaaccctcactaatttgccctaattggatagggcaatcagaacaaaatctgactttcgaatatttaaaagatatgtaagtttgattgcattttcgtacattttaagcaaactaggttaacaacaacatagcctagtcaaacttctcaggaaacttgttttaataaatatgtaaaaatacccattcatgactcttgacccaatggtgtgactcctccctctgggaagggctttgttacccaatgcaagaccacagcctggatccaccttgatgtaggtggctcctggataacccacatcaaacaaatgtgataaagatgagtaaaactggtcttgggaaaataatttcatagtttttttttctcctagttatgctgtataatacaggagaaccaaaagctgtaaaattattttattttattttttaaagacagggtctcactatgttgcccaggctggtttcaaactcctgggctcaagcagtcctcctgtctcagcctcccaaagtgctgggattacaggcatgagccactgagcccgaccagctgtaaaattattatattcattttcactatgtgctacttcttctcacctgactttttttttttttttttgagatggagtctcactctgtcacccaggttagagtgcagtgtcacgatctcggctcactgcaacctccgcctcccaggttcaagcaattctcttgcctcagcctcccaagcaactgagattacaggcctgtgtcactatgcccagctaatttttgtatttttagtagagatggggttttcaccatgttggtcaggctggtctcaaactcctgacctcaagtgatccaccagcctcggcctcccaaagtgctggattacaattgtgagccactgtgtctggccacacactgactttcactgtaatatctggatgttttatgtaacatatctgggcaatagggcttatggcagaattggccctcgtggtgtaggccttccaagttccaagtctcatttttagtattcctccgttccaacccctggatccaccagttccaacagcctggatccaccttgatattgacagccaggcagatgcttctgctgatcaccgcagctctagcaatggaaatggatatgttaagaaaatacttgtctattcttttattttggtggtttaaactattaattcacaccatctctgaaaaaaggccttatgttgactaaagaaaacataggctttagtttcagcttctgtcagaattagtaccaattctgaatctggtggagtgataagacatggtttcatgctgggaagacactgctgaaatcctccttgtgggagaacatggaaattttatactgaattaaattaacgcatgtgacttttcacattcagagacattcaggatgaattctggggtttccatttaatagctataacaggcagtccagaacaacttcacatatagcagcatttctgctatgtgacaatgaccaaaagagttcctgtatattagtgtctagtggaatatttcaaattgcagaacccagacaaccaattgcctgaattattattattttttgtttttagcaactctttggctttatcttgatactgtcttgtctggcaccaaagttttatttccttcttagtcctcttggggatagtttttgggtgtttttttttatttttctttttttgagacggggtctcatgctgatgcccaggctggagtgcaatggtgtgattatggctcactgcagcctcaacttcccaggctcaggtgattctattacctcagcctcccaagtagctgggactactggtgtgcactactaggactggctaattttttgtatcttttgtacagatagggtttcaccgtgttgctcaggctggttttgaacttctaggttcaagcaatcctcccaccacagcctccaaaagtcctgggattacaggtgtgagccaccataactggctggaattatttgtacctggaccttgtgttttgtttttttgccctactatcttttctaaataacatatcatgttcctgagatagcagtatatacaattatgtaaaatagagctttatatgaactctgtacatgctctaagctctttttgaatgatattttaagaagtttctaaaccaaagtgcttaagaaaacatgaagatgttaatttcatgaagactgtacaagtttagaagtacaatgtagacctgtttaagacaaaggtggatgggctttggggttttttttacaattggacttcaggtacagaaggcttgggtaatggtactcctcagttcatatcaccttatcattggcctttagtattttgtaaataagtaactggacttttatgaaaagcatattcttaacagtttcccatttcctttttttttttttttaagatagtgttttgctctgttgccctggctggagtgcagtggcatgatcttggctcactgcagcctccacctcccaggctcaggcgatcctcctgccccagcctcccaagtagctgggattacaggcgtgcacaactgcatgcacaactaatttttgtatttttagtagagacagggtttcgccatgttggccaagctagtctcaaactcctgggctcaagtgatccgcccacctcagcctcccaacatgttgggattataggcataagccaccatgcccagccagttttcatttctttggtctgcatgtaaaggactaaagaatgatatgtagctactacactgcagcaaacaacatttttccagtgtacaaatcagtggagagtaagcaatgtattactctgatgtcggtgaaacacctcaaattataaataatgccaggaacatgtgaaaactccacatgtttaataaatgccagctttcagaaaaagcagagattataggtattcaacaagttaaacaataatctggtagattagtaataatttaacacatgtgtatcttgtatttaaagttaactgaaaattatgtaaaaaaaaaaaacactgtgtttgactttcttttgttttacaagtgatgcagagtatctgctgagaaggtcagttagatcatctgatgtcatatttgccacttagcttttgtcccagcagcatataaattctaccttgtaagcctcatattagaagtggtcccagccaggcacagtggcttacttcccaacactttgggagtccacggctggtggattgcctgagctcgggagtttgagaccagcctggccaacatggtgaaaccccatttttacaaaaatgcaaaaattagccaggtgtggtagtacacacctgtaatcccacctactcggggggctgaggcccaagaatcacttgaacccaggaggcggcagttgcagtgagccaagattgtgccactgcactgcatcctgggtgacagagcaagattctgtctcaaagaaaagaaaaagaaatggtcccattgctacggattagaactaatttgtaaaactatcagaattttaagactgattaaaggttttaggtgtttttctcctactttgcatactgagaataatatgtatagtatttttccagtatgatttacaattttataaatgtcagtatacatatgtatatataaattattctcaactccatttttttttaaataaaataagtacatgtttgtgtgctaaattgctcatttggcagtgatagattgaaaaacatttataaatttaaaaataaagcactataagatatgaggaatgaatagcttctatgtgaatttctatgtaattaatatcaatatttagaataaaagtgtatttgaggataagatatttgtttactaaaatgttttatttactaagagtagaggtgaattatgcatctttctaaggaaaagttcttttaatttctgtgtctatgaaaaagaattcataattcataattcttaattgccctcttttgatccatataattctttaaataaacgaaacaataccaattcaaaaaggggcctgctttgtataaaattgtctaacctaaaaattaagtagactttctgcatatctaaaatatattattacacattcttgtctttattcttccttacaaaacatttttaaatgaaggaatgaaattttaattgtttatgagaatataacttttaaaaatatttctagtaggccaggcatggtggctcatgcctgtaatcccagcactttgggaggctgaggcacgtggatcacctgaggtcaggagttcgagaccagtctgaccaatatggtgaaaccctgtctctactaaaaatacaaaaattagccaggcatggtggctgtcgcctgtaatcccagctattcgggaggctgaggcaggagaattgcttgaacctgggaggcggggtttgcagtgagtgccaagactgagccactgcactgcaggctgggtgacagagtgaaactccatctcaaaaaaaaaaaaaattctagtaaaaatggaaaaatccacaagaaaacctctttttttcctgattactcacttttcttcatgcctttaattttaacctcatctcacaccttgatattagaagaaagtaaggctgaaaggcagattcataagttgtagataacatgaagacttccttgaataaggatttattctttcggctcacaaagaccagtcagtattattgacaaacaacaggcaggaagatttctcctaaaagtctcaactaaagttaaacctggtccattatggcatcaatctacccctagaaactgatgcagagtctatttcctccctgttttaactagaacttagccagactggagacagcatggacccaaagagcatgcagtcccacagagttagggaaaggatgcatcttgaccagcattcatcatgtggatcagttaggaattaagttcctgattcaaggtgagctcatatggccgctccctggtcatctaggacacaagttccttctaactcttccccaccttcattagtacagggcttctttcctgtgttgccacatgatccaaaatggtggttgtaactccagcatgatattcacaagaaggaaagagagggaaccagcacaagggtgagcctcccaagtaggtcagccacttttaaatagctttcctgccagcccagtgaagcaactctgcttacatctcattggccaatctctgcaaggcagcagggaacagtcatctctatggttggtacattatcactttcaacaataagggattctgtctcacaaagtggtggaagaatattgggtatctgaagaggtagccaccctggccagaaggtgctaaacactaaacatacatcatctcattttaatcctagtaattacttatgaggtaggtttagagaacttataccttgttccatgtctttccaactccaaagcacaagtttttaatcactgcactgcactgcatccccaataactagccgtaggaaagtgttttaaaaggcatcacttggcggggtgcagtggctcacacctgtaatcccaccactttgggaggccgaggcaggcggatcacctgaggtcaggagtttgagaccagcctggccaacatggtgaaacccccgtctcaactaaaaatacaaaaattagccaggcatagtggcatgtacctgtaatcccagctactcaggaggctgaggcaggagaatcacttgaacctgggaggcggaggttacagtgagatgagatcacaccattgtactccagccttgtctaaaaaaaaacaacaaaaaaacaaacaaaaaaaagtttcagtcattgtcaaggatgccttaaggtgagcatagcctgagataagaagtaacagaggctgcaggctgagataagaaggaacagaggcagtgaaggcaggaccctaggcccagaagtaatggtctatcatgctgagaaaaaagccagggcttagaataggggtgataagtaaaaagcctagttttaaaatctaagtgctggtaaaggtttggtcactaggtgaaaaaataaagttcccacttactagagctgacataaacagcatatgatcctctttaaggttgcagtggagaggcatgtccagggactctcaagttagagacaggtgtgtttagtgctagaattggaaagacattcaagcagactggcatgttgcctcttcacagccatagtcgtgctggcttgcaggatactccagcctagaatgtatataggagtgtggagaacagcaaaatcagcattgcttgggattcagcctgagctcaagtggcccacccctggaggcatccagtgttcacacttcccaagagagaaaacctgattggatgggtgtttcagcagtctattgctgcttaaacacctcaaaacttagcagcttaaaacaacaacactcaatttatttttcacacaaatctgcaatttgcatgaggctcagtgcaaatggttcaactctctcccacacggcattggctgggcagttcaactggatctgggggtcccactttcagatgactcacatggctggcaagtttgttctggctgtcggataggagcccagccaagcctgtggtccagcggccttggcttttatgatgtgggcctctccatagactccttgggcttcttcacagcatggcagctgagttccaagagcaagtgtcccaagagagcaaagtagaaatgcatagtatttttataatttagactcagaaatcacatcacatcacttctgccatactttattgtttgagacagttacaaagtctacctaggttcaaggtggaaaggacataaaccccacttgtccttggaggcgtgtcaaagccacattatgagaagagcaagtgggataagggatttgttgcaggcaccgttggaaaatgtgatctgcccaaattggtgtgtcttcatgcaatatcgaggaaatatattaggtagtttcgtgtcaaggaacattgtggatatttgacctccctgaatcccagtgcctatgtgctctttggcttggacatagacccctggtccagtagtctgtagtaggtggtagaactagttttaccaactacatgagtcatgagccatgggactgaatgggttgtaggtggatcagacacatagaaatgtatgactactctcaaagcatgaggttaaaatgggagcagattagactgagcaccttgaggatagggatcagtcttactcatctctgtatcctgaaaagtgcttggcgctactgcacgctccataataacagaaaaaccaattatttaatgagctaggagttacatatcatctttccttaagtacctaatcagtctttatcatcagtgagtgcagaactcaaatatggtattgttcatcttccatcaccattttctcccaagtttcctggtttaattgcattttcctcactttccatctaatggatcctgatgtcattctttatctttatttcatattgtcctattgtgtgtattgtattgtatttttagctacattaaatccaatatggaaggaagcagagaacgatcataattgaactaacaagcaagtggaggtggagagaaagtggccccaatttggaaggtgaaggaaaactggggatggagcctaactgatcattaaaatgctcgaagcagctctttccaa

SEQ ID NO: 244283 - protein, 560 aa, Artificial Sequence [sequence omitted]

SEQ ID NO: 244284 - DNA, 1683 bp, Artificial Sequence
  derived and/or modified sequence
atgaacagaaagtgggaggccaagctgaagcagatcgaggagagagccagccactacgagagaaagcccctgagcagcgtgtacagacccagactgagcaagcccgaggagccccccagcatctggagactgttccacagacaggcccaggccttcaacttcgtgaagagctgcaaggaggacgtgcacgtgttcgccctggagtgcaaggtgggcgacggccagagaatctacctggtgaccacctacgccgagttctggttctactacaagagcagaaagaacctgctgcactgctacgaggtgatccccgagaacgccgtgtgcaagctgtacttcgacctggagttcaacaagcccgccaaccccggcgccgacggcaagaagatggtggccctgctgatcgagtacgtgtgcaaggccctgcaggagctgtacggcgtgaactgcagcgccgaggacgtgctgaacctggacagcagcaccgacgagaagttcagccagcacctgatcttccagctgcacgacgtggccttcaaggacaacatccacgtgggcaacttcctgagaaagatcctgcagcccgccctggacctgctgggcagcgaggacgacgacagcgcccccgagaccaccggccacggcttcccccacttcagcgaggcccccgccagacagggcttcagcttcaacaagatgttcaccgagaaggccaccgaggagagctggaccagcaacagcaagaagctggagagactgggcagcgccgagcagagcagccccgacctgagcttcctggtggtgaagaacaacatgggcgagaagcacctgttcgtggacctgggcgtgtacaccagaaacagaaacttcagactgtacaagagcagcaagatcggcaagagagtggccctggaggtgaccgaggacaacaagttcttccccatccagagcaaggacgtgagcgacgagtaccagtacttcctgagcagcctggtgagcaacgtgagattcagcgacaccctgagaatcctgacctgcgagcccagccagaacaagcagaagggcgtgggctacttcaacagcatcggcaccagcgtggagaccatcgagggcttccagtgcagcccctaccccgaggtggaccacttcgtgctgagcctggtgaacaaggacggcatcaagggcggcatcagaagatggaactacttcttccccgaggagctgctggtgtacgacatctgcaagtacagatggtgcgagaacatcggcagagcccacaagagcaacaacatcatgatcctggtggacctgaagaacgaggtgtggtaccagaagtgccacgaccccgtgtgcaaggccgagaacttcaagagcgactgcttccccctgcccgccgaggtgtgcctgctgttcctgttcaaggaggaggaggagttcaccaccgacgaggccgacgagaccagaagcaacgagacccagaacccccacaagcccagccccagcagactgagcaccggcgccagcgccgacgccgtgtgggacaacggcatcgacgacgcctacttcctggaggccaccgaggacgccgagctggccgaggccgccgagaacagcctgctgagctacaacagcgaggtggacgagatccccgacgagctgatcatcgaggtgctgcaggagtag

SEQ ID NO: 244285 - DNA, 2289 bp, Artificial Sequence
  derived and/or modified sequence
gcgccccgcccccgcgccccgcgtcctcacgccctggtcccgccctcgcgtcccgcgccagtcctcccgctttggtcccgccctgaggctcggcccggctcccccgccccggatttgaaatctaggtcttcctgagagtccgcgggcttccgctcccagcgcgggattctggagggaaattgagggagacttggaaaccgcgccaggcccaacgggtacctagaagggagacaaagccaggcctgctgcccagtttgagctctgggaagaagaggagcaggccgggacgcccaccgaggtatcccagaggtgacagaacttgatctgggcctggaaggggaagaattcgggaaaagcaacgtggggcattccagtagtaattgatagaaatattacgtgggataggatttattctctccacacttctgaaccaatgaatagaaaatgggaagcaaaactgaagcaaattgaagaacgagcatctcattatgagaggaaaccgttgtcctcagtgtatagaccaagattgtccaagccagaagaaccaccctccatctggagactatttcatcgacaagctcaagcttttaattttgttaaaagctgtaaagaagacgttcatgtatttgctttggaatgcaaagtaggagatggacaacgtatttaccttgtgacaacctatgctgaattttggttttactataaatccagaaaaaatctcttacactgctatgaagttattcctgaaaatgctgtgtgcaagctttattttgatttggaatttaacaaacctgccaacccaggagctgatgggaaaaagatggttgcattactcattgagtatgtgtgtaaagcacttcaagagttatacggtgttaattgctcagctgaagatgttttgaacttggattctagcactgatgaaaaattcagccagcatttaatatttcagctccatgatgtggcatttaaagataatattcatgttggtaattttttgagaaaaattttgcagcctgctcttgacttgcttggcagtgaagatgatgatagcgctccagagacaacaggccatggatttccccatttttcagaagcacctgcaagacaaggattttctttcaataaaatgttcacagaaaaggctacagaggaaagctggacatcgaattcaaagaaactggagaggctggggtcagctgagcaaagcagtcctgacctttcatttctagttgtgaagaataacatgggagagaagcatctttttgtagatctcggagtttatacaagaaatagaaactttcggctatataaatcatcaaaaattggaaagcgtgtggctttggaggttactgaagataacaaattttttcctatacagtcaaaagatgtttctgacgaatatcaatattttctctcttctttggtcagcaatgtcaggttctcagatactttacgaattcttacatgtgagccatctcagaataaacaaaaaggagttggatattttaacagtatcggcacttcagtagaaaccattgaaggttttcagtgttctccctatcctgaagttgatcattttgttctttctttggtgaataaagatggcattaaaggaggaattcggcgttggaactactttttcccagaagaattactggtttatgatatttgtaaatatcggtggtgtgaaaacattggaagagcccataagagtaataatataatgattctggttgatctgaaaaatgaagtttggtatcaaaaatgtcatgaccctgtatgtaaagcagaaaacttcaaatctgactgtttcccattacctgctgaagtatgtctcctgtttcttttcaaagaggaagaagagtttacaacagatgaagcagatgaaactaggagcaatgaaacccagaatcctcataaaccatcacctagcaggctgtcaacaggtgcatctgctgatgctgtctgggataatggcattgatgatgcttattttttagaagctactgaagatgctgaattagctgaagctgcagagaacagtcttctcagttataacagtgaagtggatgaaattcctgatgaactaattatagaagtattacaagagtaactaattcactatgaacacttttgtcaccaggctataatttgcctgatgtctgtgagatttgataaatatatcattcaacctgtttatataaactaagttttattactttgctttccaatttttgttttttacttctgtaaaccaatttcattaaaaattagctttggtgtaaa

SEQ ID NO: 244286 - DNA, 1683 bp, Artificial Sequence
  derived and/or modified sequence
atgaataggaagtgggaggctaagctcaagcagatcgaggagcgtgcctcacactatgagcgaaagccccttagctctgtatatcggcctcggctctccaagcccgaggagccgccaagtatctggcgcctgttccaccgccaggctcaagcatttaacttcgtgaaaagttgtaaagaggatgtgcacgtcttcgcactcgagtgcaaagtcggtgatggtcagaggatctacctggtcacaacatatgccgaattctggttctactataaatcgagaaagaatctgttacattgctacgaggtaatccccgaaaacgctgtctgtaaactttacttcgacttagaattcaataagcccgccaatcccggggcggatggaaagaaaatggtagccctgctgatcgaatacgtctgtaaggccttacaggaattgtatggcgtgaattgcagcgctgaggatgtcctgaatctagactctagtaccgatgaaaaattttctcagcacctgatattccagctgcacgacgtagcattcaaagataacatccacgttgggaacttcctgcggaaaatccttcagccagccctcgatctgttggggtcagaggacgatgattccgcaccagaaacgacaggtcacggcttcccgcattttagcgaagctccggcacggcaggggttctcattcaacaaaatgtttaccgagaaggccactgaggaaagctggacaagcaattcgaagaaactggaacgactgggaagcgcagagcagtcatcccctgacctgtccttcctagttgtgaagaacaatatgggggagaagcacctgttcgtggaccttggtgtttatacacggaacaggaactttaggctgtataagtcctccaagattggcaaacgggttgctctggaggtgaccgaagacaataaattctttccaatccagagcaaagacgtgagtgacgaatatcaatatttcttatcctctctggtgtcaaacgttcggtttagtgacacactgcgtatcctgacttgtgaacctagtcaaaataagcagaaaggagtgggctatttcaatagtatcggtacaagcgtagaaacgatcgagggttttcaatgctctccatatccggaggttgatcatttcgtgctgtccttagttaataaagatggcattaaggggggtatccgtaggtggaattattttttccccgaggaactcctcgtgtacgacatatgcaaataccgatggtgtgaaaacattggaagagctcataagtcaaataacatcatgattcttgtagatctaaagaacgaggtgtggtaccagaagtgccacgacccagtatgtaaggctgaaaactttaagagcgattgtttccctctgcctgctgaagtctgtttactattcctgttcaaggaggaagaggagttcactacggatgaggccgacgagactcgctccaacgaaacccagaacccacacaagcccagcccgagccgtctgagcactggggcctcagctgacgccgtctgggataacgggatcgatgatgcatattttttggaagccacggaggatgccgagttagcagaggcagcagaaaattcattactgtcatataacagcgaggtggatgagatcccagacgagctgataattgaagtcctgcaggagtag

SEQ ID NO: 244287 - DNA, 1683 bp, Artificial Sequence
  derived and/or modified sequence
atgaacaggaagtgggaggccaagctgaagcagatcgaggagcgggccagccactatgaaaggaagcccctgagctctgtgtaccggccccggctgagcaagccagaggagccccccagcatctggaggctcttccaccggcaggcccaggccttcaactttgtgaagagctgcaaggaggatgtgcacgtgtttgccctggagtgcaaggtgggagatggccagaggatctacctggtgaccacctacgccgagttctggttctactacaagagcaggaagaacctgctgcactgctatgaggtgatcccagaaaatgctgtgtgcaagctgtactttgacctggagttcaacaagccagccaaccctggagcagatggcaagaagatggtggccctgctgattgaatatgtgtgcaaggccctgcaggagctgtatggagtgaactgcagcgcagaagatgtgctgaacctggacagcagcacagatgagaagttcagccagcacctgatcttccagctgcatgatgtggccttcaaggacaacatccacgtgggcaacttcctgaggaagatcctgcagcctgccctggacctgctgggctctgaagatgatgattctgcccctgagaccaccggccacggcttcccccacttcagcgaggccccagcccggcagggcttctccttcaacaagatgttcacagagaaggccacagaggagagctggaccagcaacagcaagaagctggagcggctgggcagcgctgagcagagcagcccagacctgtccttcctggtggtgaagaacaacatgggagagaagcacctgtttgtggacctgggcgtgtacaccaggaacagaaacttccggctgtacaagagcagcaagattggcaagagggtggccctggaggtgacagaggacaacaagttcttccccatccagagcaaggatgtgtctgatgagtaccagtacttcctgagcagcctggtgtccaatgtgcgcttcagtgacaccctgcgcatcctgacctgtgagcccagccagaacaagcagaagggcgtgggctacttcaacagcatcggcacctctgtggagaccatcgagggcttccagtgcagcccctacccagaggtggaccactttgtgctgagcctggtgaacaaggatggcatcaagggcggcatccgccgctggaactacttcttccctgaggagctgctggtgtatgacatctgcaagtaccgctggtgtgagaacatcggccgggcccacaagagcaacaacatcatgatcctggtggacctgaagaatgaggtgtggtaccagaagtgccacgaccctgtgtgcaaggccgagaacttcaagagtgactgcttccccctgcctgctgaggtgtgcctgctcttcctgttcaaggaggaggaggagttcaccacagatgaagcagatgagaccaggagcaatgagacccagaacccccacaagcccagccccagccggctgagcactggagccagcgcagatgctgtgtgggacaatggaattgatgatgcctacttcctggaggccacagaagatgctgagctggccgaggccgctgagaacagcctgctgagctacaacagcgaggtggatgagatcccagatgagctgatcatcgaggtgctgcaggagtag

SEQ ID NO: 244288 - DNA, 1683 bp, Artificial Sequence
  derived and/or modified sequence
atgaaccggaagtgggaggccaagctgaagcagatcgaggagcgggcctctcattacgagcgtaagccactgagttctgtttacagacccagactgagcaagcctgaggaaccaccatctatttggcgactgtttcaccggcaggcccaggcatttaactttgtaaaatcttgtaaagaggatgtccacgtgtttgcgcttgagtgcaaggtgggcgacgggcagcggatttatctggtgactacatacgccgaattttggttttactacaagtccagaaaaaacctcttacattgttatgaggtaatccctgaaaacgcggtttgtaagctctactttgatctcgagttcaacaagccagccaacccaggtgcagatggcaaaaaaatggttgccttgctaatcgagtacgtgtgtaaggctttacaggagctttatggagtgaactgcagcgccgaggatgtactcaacctggacagcagtactgatgagaaattctcccagcatctcatattccaactccacgatgttgcattcaaggacaacattcatgtagggaattttctgcgtaagatcctgcagcccgccctggacctgttaggatccgaggacgatgacagcgctccagagaccaccggacacgggttcccacacttcagcgaagcccctgcacggcagggctttagttttaataaaatgttcaccgagaaggcaaccgaggaatcatggacttcaaattctaagaagctagaacggctcgggtctgccgaacagtccagcccagacctgtctttcctagtcgtcaagaataacatgggggagaagcaccttttcgttgacctcggggtgtacacaagaaaccggaactttcggctgtataagtcttctaagataggcaagcgcgtagccttggaggtgacggaggataacaaattcttccctatccagtccaaggacgtgagcgatgaataccagtattttctgagttcattggtttctaacgtaaggttttctgataccttgaggattcttacttgtgaacctagtcagaacaaacagaagggagtcgggtatttcaatagcatcggaacttccgtagaaaccattgagggttttcagtgcagcccataccctgaagtagatcacttcgtgctgagcttggtcaacaaggacggcattaaggggggaattagacgctggaattacttctttccggaagagttgttggtctacgacatttgtaagtaccgatggtgtgagaatatcggccgtgcgcacaagtctaataatattatgatcttggtggacttaaaaaacgaggtgtggtatcagaaatgccacgatccggtgtgcaaagctgagaacttcaagagcgattgctttcctcttcccgctgaggtgtgcttactgttcctgttcaaggaggaagaagaattcacgaccgacgaagcagatgaaaccagatcaaacgaaacgcaaaatccgcataaaccatcacctagtcgcttgagtactggtgcttcagccgatgcagtttgggataatgggattgatgatgcctacttccttgaggccactgaggacgctgaacttgccgaagccgccgagaactcactgctttcctataatagcgaggtggacgagattcctgatgagctaattatcgaagtcttacaagagtag

SEQ ID NO: 244289 - DNA, 1683 bp, Artificial Sequence
  derived and/or modified sequence
atgaatcgtaaatgggaggctaagcttaagcagatcgaggagcgggcatcccactatgagcggaaacccctgtcgagtgtgtacagaccccgactgagtaagccagaggaacctccttctatttggcgcttattccataggcaggctcaggcctttaattttgtgaagagctgtaaggaagacgttcacgtcttcgccctagagtgtaaagtgggcgatggccagcgaatttatctcgttaccacttatgcagagttttggttttattataagtcgcgcaagaatctacttcactgctatgaggttattccagaaaacgctgtgtgcaaactgtattttgacctcgaatttaacaagcctgcaaaccctggggctgatggcaagaaaatggtggcactcttaatcgaatacgtgtgcaaagctctgcaagaattatacggagtaaactgtagcgcagaagacgttttgaacctggactcgtccacagatgagaaattttcgcagcatttgattttccagctgcacgatgtggcgtttaaagacaatatccatgtgggtaactttttgaggaaaatcttgcagcctgctttggatctgctgggttccgaggatgacgactctgctcccgaaaccactggtcacggattcccacactttagcgaagccccagctagacagggcttcagcttcaataagatgttcacagagaaagccacagaagaaagttggacaagcaattccaaaaagcttgaaagactcggtagtgctgaacagagctctccagatctaagcttccttgtggtgaagaataacatgggtgagaagcatctgttcgtagacctaggagtgtacactcggaatcgaaatttcaggttgtataaaagctcgaagatcggaaagcgagtggctcttgaagtgacggaagacaacaaatttttccccattcagtcaaaagacgtctctgatgaataccagtatttcctgtcatccctggtgtccaacgtgcgcttcagtgacaccctgcgcattctgacgtgcgagccgagtcagaataaacagaaaggagtgggatatttcaacagtatcggaacttcagtggaaactatagagggctttcagtgctctccttatccggaggtagatcattttgtgctcagtctggtcaacaaggacggaataaaagggggaatccggagatggaactatttctttccagaggaactgcttgtgtatgatatctgcaaatacaggtggtgtgaaaacatcggcagagcccataagtcaaacaatatcatgatactcgtggacctaaagaacgaggtgtggtaccagaagtgccatgatcccgtatgtaaggctgaaaattttaagtcggactgctttccccttcctgcggaggtctgtcttctatttctctttaaagaagaagaggaattcacgaccgacgaagccgacgagacacggagcaatgaaactcagaatcctcataaacccagcccctcgcgcctgtccactggcgcttcagccgatgccgtgtgggacaatggaattgacgacgcctacttcctcgaagccacggaggatgccgagctggctgaggccgcagagaattctctgctgtcatataactccgaggtggacgagatcccggatgagctgatcatagaggtgctgcaggaatag

SEQ ID NO: 244290 - protein, 602 aa, Artificial Sequence
  derived and/or modified sequence
MRAQEDLEGRTQHETTRDPSTPLPTEPKFDMLYKIEDVPPWYLCILLGFQHYLTCFSGTIAVPFLLAEALCVGHDQHMVSQLIGTIFTCVGITTLIQTTVGIRLPLFQASAFAFLVPAKAILALERWKCPPEEEIYGNWSLPLNTSHIWHPRIREVGLHVQGAIMVSSVVEVVIGLLGLPGALLNYIGPLTVTPTVSLIGLSVFQAAGDRAGSHWGISACSILLIILFSQYLRNLTFLLPVYRWGKGLTLLRIQIFKMFPIMLAIMTVWLLCYVLTLTDVLPTDPKAYGFQARTDARGDIMAIAPWIRIPYPCQWGLPTVTAAAVLGMFSATLAGIIESIGDYYACARLAGAPPPPVHAINRGIFTEGICCIIAGLLGTGNGSTSSSPNIGVLGITKVGSRRVVQYGAAIMLVLGTIGKFTALFSSLPDPILGGMFCTLFGMITAVGLSNLQFVDMNSSRNLFVLGFSMFFGLTLPNYLESNPGAINTGILEVDQILIVLLTTEMFVGGCLAFILDNTVPGSPEERGLIQWKAGAHANSDMSSSLKSYDFPIGMGIVKRITFLKYIPICPVFKGFSSSSKDQIAIPEDTPENTETASVCTKV

SEQ ID NO: 244291 - protein, 392 aa, Artificial Sequence
  derived and/or modified sequence
MRAQEDLEGRTQHETTRDPSTPLPTEPKFDMLYKIEDVPPWYLCILLGFQHYLTCFSGTIAVPFLLAEALCVGHDQHMVSQLIGTIFTCVGITTLIQTTVGIRLPLFQASAFAFLVPAKAILALERWKCPPEEEIYGNWSLPLNTSHIWHPRIREVGLHVSIEEAGGYMGVRVAAEFGDLRRWSRSFVPASSSQVQGAIMVSSVVEVVIGLLGLPGALLNYIGPLTVTPTVSLIGLSVFQAAGDRAGSHWGISACSILLIILFSQYLRNLTFLLPCAQQSAPLWQASLSPSEITTPVPAWLVHHPLQYMLSTGASSPKAFAASSRGYWARATGPPRPVPTLASWELPRWAAGAWCSMVRLSCWSWAPSASSRPSSPRSLTPSWGACSALSLA

SEQ ID NO: 244292 - DNA, 1179 bp, Artificial Sequence
  derived and/or modified sequence
atgcgagctcaggaggaccttgaaggcagaacccagcatgagactacaagggacccttccacacctctcccaaccgagccaaaatttgacatgctttataaaatcgaggacgtgccaccctggtatctgtgtattctgttaggctttcagcattacctaacttgcttttcgggcacgatcgccgttccctttcttcttgcagaagccctgtgtgtgggacacgatcaacacatggtgtcccagcttatcggaaccatttttacttgcgtggggataacgacactgatacaaaccaccgtgggcataagacttccactgttccaggcttccgcatttgccttcctcgtcccagccaaagccattctggccctggaacgctggaaatgcccacccgaggaggaaatatacgggaattggtcactcccgctcaatacgtcccatatatggcacccacgcatccgcgaggtcgggctccatgtatcaattgaggaggctggaggctacatgggagtgagagtggcggcagagtttggcgatctgcggagatggtcgcgaagctttgttcccgcctcgagctcccaagttcagggggctatcatggtgtcttccgtggtagaagtggtcattggcttgctgggtcttcctggagcgctgcttaattatatcggacctctgaccgtcacaccgactgtgtccctcatcggactctcagtgtttcaggctgctggagatcgagccggatcacattggggaataagtgcctgctcaatcctgcttatcattcttttcagccagtacctgcgtaacttaacttttttgcttccgtgtgctcagcagagtgcgcccctgtggcaagctagcctgtccccgagtgaaattacaacccctgttcctgcctggctagtccaccatcctctccagtatatgttatccactggagccagctcacctaaagcctttgctgcgagttctagaggttactgggctcgcgcaaccgggcccccccgccccgtaccaaccctagcttcttgggaactgcctcgctgggctgcaggcgcttggtgttctatggtcaggctttcctgctggagctgggctccctccgcatcttcacggccaagttctcctaggtccctcactccttcctggggggcctgctctgcactgtcgctcgcttag

SEQ ID NO: 244293 - DNA, 1179 bp, Artificial Sequence
  derived and/or modified sequence
atgagggcccaggaggacctggagggccgcacccagcacgagaccacccgggaccccagcacccccctgcccacagagcccaagtttgacatgctgtacaagattgaagatgtgcccccctggtacctgtgcatcctgctgggcttccagcactacctgacctgcttcagcggcaccatcgctgtgcccttcctgctggccgaggccctgtgtgtgggccatgaccagcacatggtgtcccagctgattggcaccatcttcacctgtgtgggcatcaccaccctcatccagaccaccgtgggcatccggctgcccctcttccaggccagcgcctttgccttcctggtgcctgccaaggccatcctggccctggagcgctggaagtgccccccagaggaggagatctacggcaactggagcctgcccctgaacaccagccacatctggcacccccgcatccgggaggtgggcctgcacgtgtccattgaggaggccggcggctacatgggcgtgcgggtggccgctgagtttggagacctgcggcgctggagccgcagctttgtgcctgccagcagcagccaggtgcagggcgccatcatggtgtcctctgtggtggaggtggtgattggcctgctgggcctgcccggggccctgctgaactacatcggccccctgactgtgacccccaccgtgtccctcatcggcctgtctgtgttccaggccgccggggaccgggccggcagccactggggcatcagcgcctgcagcatcctgctgatcatcctcttcagccagtacctgaggaacctgaccttcctgctgccctgtgcccagcagagcgcccccctgtggcaggccagcctgagccccagcgagatcaccacccctgtgcctgcctggctggtgcaccaccccctgcagtacatgctgagcactggagccagcagccccaaggcctttgctgccagcagccggggctactgggcccgggccaccggcccccccaggcctgtgcccaccctggcctcctgggagctgccccgctgggccgccggggcctggtgcagcatggtgcggctgagctgctggagctgggcccccagcgccagcagccggcccagcagccccaggagcctgacccccagctggggcgcctgcagcgccctgagcctggcctag

SEQ ID NO: 244294 - DNA, 1179 bp, Artificial Sequence
  derived and/or modified sequence
atgcgggcccaggaggacctggagggccggacccagcacgagaccacacgcgatccctcgacccccctccctacagaacctaagtttgacatgctgtataagatagaggacgtgcccccttggtatctgtgtattcttttgggttttcagcattacctgacatgtttctccggcaccattgctgtgccattcttactcgcagaggcactgtgcgtggggcacgatcagcatatggtctctcaactgattgggacaatctttacttgtgtgggcattacgactcttattcagaccaccgtaggtatacgattacctctcttccaagcgtctgccttcgcgtttctcgttccggccaaagcgatcctcgccctggaaaggtggaagtgcccaccagaggaggagatctatggcaactggagtctgccccttaatacctcacatatttggcacccaaggatccgggaggtgggtctgcacgtgtccattgaggaggccggaggctatatgggtgtcagggtagccgccgagttcggcgacctgaggcggtggtcccgttcttttgtcccagccagcagcagccaagtccagggggccatcatggtgagcagcgtggtggaggtggttattggcctgttggggctgccaggagcactcctaaattatatcgggccattgactgtgacaccaaccgtgtctctaattggcctgagcgtgttccaagctgccggcgatagggccggcagtcattggggtatctcagcatgcagcatcttgctaatcatcctgttcagccagtatttgcgtaatctgaccttcctattaccctgcgcccaacagtccgcacctctctggcaggcatccctctccccatcagagatcaccacaccggttcctgcctggttggttcaccacccactccagtatatgctgtctacgggagcctcctctcctaaagcatttgctgccagttcccgaggatactgggcacgtgctactggtcctcctcgccccgtgccaacgctcgcctcctgggagctacctcggtgggcagcgggcgcttggtgtagtatggtcaggctcagttgttggagctgggccccaagcgcatcatcccggccttcatccccacggtcattgaccccaagttggggagcgtgttcagccctctcactggcatag

SEQ ID NO: 244295 - DNA, 1179 bp, Artificial Sequence
  derived and/or modified sequence
atgagggcacaggaggacttggaggggcgaacacagcacgaaacaaccagagaccccagcacacctttgccgacagaacctaagttcgatatgctttataagatagaggacgtcccaccttggtatctctgcattttactgggcttccagcattatcttacgtgtttctccgggacaatagcagtgccttttctcctggcagaagccctttgcgtcgggcacgatcaacatatggtgtctcagctgattgggactattttcacttgtgtcgggatcacgacactgatccagaccacggttgggatacgactgccactttttcaagccagtgcatttgcgtttcttgtgccagccaaagccatactggcactcgagagatggaagtgtccccctgaagaggaaatttacggaaactggtcactgcctctcaatactagtcatatttggcacccgagaattagggaagttggtttgcacgtgagcatagaagaagccggtggctacatgggtgtgagggtggcggctgagtttggcgacctcagaagatggtcaagaagcttcgttcccgcaagttcgagccaggtgcagggagcaattatggtgagcagcgtggtggaagtcgtcatcgggctactagggctgccaggagctttgctgaactatataggaccactgacagtgacgcccaccgtgagtctcattggtctgtcagtgtttcaggctgccggtgaccgggctggcagtcactggggcatatcagcctgcagtattctgctgataattcttttcagtcaatatctgcgcaatttgaccttccttctgccgtgtgctcaacaaagcgctccactgtggcaggcctcgctctcaccttccgagatcactacacccgtacctgcttggctggttcaccacccactccagtacatgttatccaccggagcgtcgagcccgaaagcgtttgccgctagctctcgcggttattgggcacgggctaccgggcctcctcggcctgtccctacattggccagttgggagctaccaaggtgggctgcaggggcatggtgcagcatggttaggctttcctgttggtcatgggctccctccgcttctagcaggccgtctagccccagatcacttacaccttcatggggtgcttgtagtgcccttagcttggcatag

SEQ ID NO: 244296 - DNA, 1179 bp, Artificial Sequence
  derived and/or modified sequence
atgagagcccaggaggacctggagggcagaacccagcacgagaccaccagagaccccagcacccccctgcccaccgagcccaagttcgacatgctgtacaagatcgaggacgtgcccccctggtacctgtgcatcctgctgggcttccagcactacctgacctgcttcagcggcaccatcgccgtgcccttcctgctggccgaggccctgtgcgtgggccacgaccagcacatggtgagccagctgatcggcaccatcttcacctgcgtgggcatcaccaccctgatccagaccaccgtgggcatcagactgcccctgttccaggccagcgccttcgccttcctggtgcccgccaaggccatcctggccctggagagatggaagtgcccccccgaggaggagatctacggcaactggagcctgcccctgaacaccagccacatctggcaccccagaatcagagaggtgggcctgcacgtgagcatcgaggaggccggcggctacatgggcgtgagagtggccgccgagttcggcgacctgagaagatggagcagaagcttcgtgcccgccagcagcagccaggtgcagggcgccatcatggtgagcagcgtggtggaggtggtgatcggcctgctgggcctgcccggcgccctgctgaactacatcggccccctgaccgtgacccccaccgtgagcctgatcggcctgagcgtgttccaggccgccggcgacagagccggcagccactggggcatcagcgcctgcagcatcctgctgatcatcctgttcagccagtacctgagaaacctgaccttcctgctgccctgcgcccagcagagcgcccccctgtggcaggccagcctgagccccagcgagatcaccacccccgtgcccgcctggctggtgcaccaccccctgcagtacatgctgagcaccggcgccagcagccccaaggccttcgccgccagcagcagaggctactgggccagagccaccggcccccccagacccgtgcccaccctggccagctgggagctgcccagatgggccgccggcgcctggtgcagcatggtgagactgagctgctggagctgggcccccagcgccagcagcagacccagcagccccagaagcctgacccccagctggggcgcctgcagcgccctgagcctggcctag

SEQ ID NO: 244297 - protein, 358 aa, Artificial Sequence
  derived and/or modified sequence
MAATLGSGERWTEAYIDAVRRNKYPEDTPPESHDPCGCCNCMKAQKEKKSENEWTQTRQGEGNSTYSEEQLLGVQRIKKCRNYYEILGVSRDASDEELKKAYRKLALKFHPDKNCAPGATDAFKAIGNAFAVLSNPDKRLRYDEYGDEQVTFTAPRARPYNYYRDFEADITPEELFNVFFGGHFPTGNIHMFSNVTDDTYYYRRRHRHERTQTQKEEEEEKPQTTYSAFIQLLPVLVIVIISVITQLLATNPPYSLFYKSTLGYTISRETQNLQVPYFVDKNFDKAYRGASLHDLEKTIEKDYIDYIQTSCWKEKQQKSELTNLAGLYRDERLKQKAESLKLENCEKLSKLIGLRRGG

SEQ ID NO: 244298 - protein, 25 aa, Artificial Sequence
  derived and/or modified sequence
MAATLGSGERWTEAYIDAVRRNKYP

SEQ ID NO: 244299 - protein, 173 aa, Artificial Sequence
  derived and/or modified sequence
MAATLGSGERWTEAYIDAVRRNKYPEDTPPESHDPCGCCNCMKAQKEKKSENEWTQTRQGEGNSTYSEEQLLGVQRIKKCRNYYEILGVSRDASDEELKKAYRKLALKFHPDKNCAPGATDAFKAIGNAFAVLSNPDKRLRYDEYGDEQVTFTAPRARPYNYYRDFEADITPE

SEQ ID NO: 244300 - protein, 181 aa, Artificial Sequence
  derived and/or modified sequence
MAATLGSGERWTEAYIDAVRRNKYPEDTPPESHDPCGCCNCMKAQKEKKSENEWTQTRQGEGNSTYSEEQLLGVQRIKKCRNYYEILGVSRDASDEELKKAYRKLALKFHPDKNCAPGATDAFKAIGNAFAVLSNPDKRLRYDEYGDEQVTFTAPRARPYNYYRDFEADITPEELFNVFFG

SEQ ID NO: 244301 - DNA, 1077 bp, Artificial Sequence
  derived and/or modified sequence
atggccgccaccctgggcagcggcgagagatggaccgaggcctacatcgacgccgtgagaagaaacaagtaccccgaggacaccccccccgagagccacgacccctgcggctgctgcaactgcatgaaggcccagaaggagaagaagagcgagaacgagtggacccagaccagacagggcgagggcaacagcacctacagcgaggagcagctgctgggcgtgcagagaatcaagaagtgcagaaactactacgagatcctgggcgtgagcagagacgccagcgacgaggagctgaagaaggcctacagaaagctggccctgaagttccaccccgacaagaactgcgcccccggcgccaccgacgccttcaaggccatcggcaacgccttcgccgtgctgagcaaccccgacaagagactgagatacgacgagtacggcgacgagcaggtgaccttcaccgcccccagagccagaccctacaactactacagagacttcgaggccgacatcacccccgaggagctgttcaacgtgttcttcggcggccacttccccaccggcaacatccacatgttcagcaacgtgaccgacgacacctactactacagaagaagacacagacacgagagaacccagacccagaaggaggaggaggaggagaagccccagaccacctacagcgccttcatccagctgctgcccgtgctggtgatcgtgatcatcagcgtgatcacccagctgctggccaccaaccccccctacagcctgttctacaagagcaccctgggctacaccatcagcagagagacccagaacctgcaggtgccctacttcgtggacaagaacttcgacaaggcctacagaggcgccagcctgcacgacctggagaagaccatcgagaaggactacatcgactacatccagaccagctgctggaaggagaagcagcagaagagcgagctgaccaacctggccggcctgtacagagacgagagactgaagcagaaggccgagagcctgaagctggagaactgcgagaagctgagcaagctgatcggcctgagaagaggcggctag

SEQ ID NO: 244302 - DNA, 78 bp, Artificial Sequence
  derived and/or modified sequence
atggccgccaccctgggcagcggcgagagatggaccgaggcctacatcgacgccgtgagaagaaacaagtacccctag

SEQ ID NO: 244303 - DNA, 522 bp, Artificial Sequence
  derived and/or modified sequence
atggccgccaccctgggcagcggcgagagatggaccgaggcctacatcgacgccgtgagaagaaacaagtaccccgaggacaccccccccgagagccacgacccctgcggctgctgcaactgcatgaaggcccagaaggagaagaagagcgagaacgagtggacccagaccagacagggcgagggcaacagcacctacagcgaggagcagctgctgggcgtgcagagaatcaagaagtgcagaaactactacgagatcctgggcgtgagcagagacgccagcgacgaggagctgaagaaggcctacagaaagctggccctgaagttccaccccgacaagaactgcgcccccggcgccaccgacgccttcaaggccatcggcaacgccttcgccgtgctgagcaaccccgacaagagactgagatacgacgagtacggcgacgagcaggtgaccttcaccgcccccagagccagaccctacaactactacagagacttcgaggccgacatcacccccgagtag

SEQ ID NO: 244304 - DNA, 546 bp, Artificial Sequence
  derived and/or modified sequence
atggccgccaccctgggcagcggcgagagatggaccgaggcctacatcgacgccgtgagaagaaacaagtaccccgaggacaccccccccgagagccacgacccctgcggctgctgcaactgcatgaaggcccagaaggagaagaagagcgagaacgagtggacccagaccagacagggcgagggcaacagcacctacagcgaggagcagctgctgggcgtgcagagaatcaagaagtgcagaaactactacgagatcctgggcgtgagcagagacgccagcgacgaggagctgaagaaggcctacagaaagctggccctgaagttccaccccgacaagaactgcgcccccggcgccaccgacgccttcaaggccatcggcaacgccttcgccgtgctgagcaaccccgacaagagactgagatacgacgagtacggcgacgagcaggtgaccttcaccgcccccagagccagaccctacaactactacagagacttcgaggccgacatcacccccgaggagctgttcaacgtgttcttcggctag

SEQ ID NO: 244305 - DNA, 5103 bp, Artificial Sequence
  derived and/or modified sequence
cgtgccccgcgctccgcgcccccttctctttcagcctcgggcacgggggaggctcggcggacctgctgattgggaaccgatatggcggcgactctgggcagcggggagcgctggacggaagcttacattgacgcagttagaagaaacaaatacccagaagacacacctcctgagagtcatgacccctgtggctgctgtaactgcatgaaggcacaaaaggaaaagaagtctgagaatgagtggactcagacccggcagggtgaggggaactccacgtatagtgaggaacagctgcttggggtacaaaggatcaagaaatgcagaaattactatgaaattctgggagtttctcgagatgctagtgacgaagagcttaagaaagcttacagaaaactcgccctgaaatttcaccctgacaagaactgtgctcctggagcaacagatgctttcaaagcaataggaaatgcatttgcagtcctgagcaatcctgataagagacttcgctatgatgaatacggagatgaacaggtgactttcactgcccctcgagccagaccttataattattacagggattttgaagctgacatcactccagaagagctgttcaacgtcttctttggaggacattttcctacaggaaatattcatatgttttcaaatgtgacagatgacacttactattaccgtcgacggcaccgacatgagaggacacagactcagaaggaggaggaagaagagaaacctcagactacatattctgcatttattcagctacttccagttcttgtgattgtgattatatctgtcattactcagctgctggctactaatcccccatatagtctgttctataaatcgaccttgggctacaccatttctagagaaactcagaacctgcaggtgccttactttgtggataaaaactttgacaaggcctacagaggagcttctctgcatgacttggagaaaacaatagagaaggattacattgattatatccagactagttgttggaaggagaaacaacaaaagtcagagctgacaaatttggcaggattatacagagatgaacgattgaaacagaaagcagagtcgctgaaacttgaaaactgtgagaaactttccaaactcattggcctacgcagaggtggctgagaggataatggtcctacgcagggctggggttttgctacttgttcctatttatgttcctgattccattttataatacaaaactaggtaatgatgaacactttactatttgctaacttcgttggttgggcagagtggcaggagcatgggcacgagagccagatgtgtcttcacaggatccttcctggggagtggctccagggaccaggagtagttcatctaagttaaattaatggcaaggcattggattccgtctccctgctccatgcctaccctgcctatgtgaatggagttcagggcatcccagagcagatccatgctttcttccttcttcccttcttcagtgaagtcttaagaaccaggcattcctaggcttagccaaagcttaatattagttatttacactgtctaccaagaattatacctctcccttcattagagtcatcatctccgccaagatttagcctttggaacatgttcctgcccagctttccattttctaggggaatatggagaaatttaaactattgtagtcaatagttttctattattccaatctctgctcagttagtagcattagcaaactgcctaatttgagattcctttatttccttaaccctctctcctttagagagtccagaaattaaaactactgagcagcatctggaggcgggggccagggcgaaggtataatgcaagaccgagcctcatctcctccacgaagcctccctactccatcatagaacccagagaatgtcccttcggtcatttcccctcagtatcatcattggtgtcatcgcacttaggctgagttcctacatcccacagaggcagatggtcagacccaggaggaggcattgccagctctccaggctgtttgctcaagcctagagatagaggagacagatcctctctccttggatatgggggtctagctttggccccagcagccactttgtttaacccagtatcctatagtttgtgatttgagatgatttttcattcattcaacatttattgagtgcctactataaaagcaggggctctcacacatattttcttacttaaacctcctcacaactctgaagtagatgtattatccctggttctatgaatgagaacattggcccagagaggatgacccaggtcttgtagtggcagagcaagacggtaggctgagtgtcaagtagaaagtgggagagcatcctcatgtctcaggtgattctagccagactggcaaagcagaacctttcccgaggatgcctccgtcctccccaaccccatgacccctcatcttttctgtggcaatcttgcatctgttcaggacaacatccctgctgctctttaggaagcaggaccctgtctaacataaattctgtacacaaaataagaggtccctcacaggcaggcagccctccactggtgactaggaagaattcagtcactgcctgggctgtgtggttctgggccttcctgtggagctgagctgcctgaattatcatgactctgaacttggaaggatcattaagtgactgtagcctacactccatgcttccttcatattggaagaaaagtttctggtagagagtcggccgggtgcactggctcaagcctgtaatcccagcactttgggaggctgtggcaggtggatcacctgaggtcaggagttcaagaccagcctggccaacacagtgaaaccccatctctactaataatacaaaaattagccaggtgtggtggcacatgcctgtagtcccagctactcgggaggctgaggcatgagaatcgctgcaacttgcaaggtggaggttacagtgagctgaaatcacgccactgcactccactccatctcaaaaaaaaaaagagtctacattaaacagattccaaagtaaagtttcttcatcccaatgcatggccatgatttacacagacgtgcctagcatggctcatcaacatctgaacggttgttccctaccatgcctctgcaggcattccacagagtcaggagatgggttcacaggtaaagattgggggctttagtggcttgtaggggacaactgctcagttgcagggagagggagcatttctagaaatagccagattttgctgcccaactagatctgtcctcctggttttagggggcccttcttgatcccctctgagtgactgagggaggttacattgtaaaatatgtccatgagccaaacaggcttatggaaagttcttctacacacaaaaaaatcaaagctctcctctccccatccccaaccactgctagaaaattggccataatgaaactgacttgacaggttaaaagaccctgtcctagatgcccaggaatcaggtagtcacacattttatggacttcatggcagcgataagtaatctgtgatgatactaaatagaagcaataataactaactccattaaatgtcacgctgattgtctgtttttatagcaccgatggtactgttttatttattgccaatagaccacaacattcacatctgtttttcctcaagggaaccgtatttgcttttggttgaaggatttatctatttgatactatccagaatattgtgaagctataatttcctgggttatattttagatgggttgtctgcatggtggtaaaataagctttttcctctcgcctacgtcctttggaagatctcctgatcatacataactaggtagggcttattcttgctgccggagcttggcacccagctctagactgtttctttgagcattactgcagattggagacgtgtgtgagaggagcagcgctcagaaatagggcttgaggctcaagcagaaactgaagctctcattcaaatgaagatgctctctctaccgcacgatcggcagtgagaaaaggaggatgaaaatccttctcatcacaaagagcttgaaggaacccacgtccccagattagcaaccctagagttcatctgctcaggccgggaaatgtgtaagcttccttgatcagctccaggcctcacagcacgggagcagtgaccagtaaggaaacgtcactgctgtgctttctgttggaaattgttcgaaaatacagtgaactggccaggcccagtagctcatgcctgtaatcccagcactttgaaaggctgaggcaggcagatcatttgaggtcaggagttccagaccagcctggccaacatggtgaaaccctgtctgtactaaaaatacaaaaattaggcgggcatggtagcacgtgtctgtaatcccagctcctcaggaggctgaggcagaagaatctcttgagcctgggaggcagaggttgcagtaagctgagatcacatcattgcactccagcctgggtgacagagcaagactctgtctcaaaaaaaaaaaaagaaagaaaaaagaaaatacagtgaactccagatgccactggaacatgggttccagcagcctggccaagctatgtgtcattctttttcctcatgatacccaggatgggctttgtgaggaggcactgtgccgttccagtggctttctgttacagctggccacaccatacaagcaagtacatcatctgcatgcactgctcctcacaggagcttgcacttcattcatatttattctgccctcatttaaggtataagcttagtgtcctaatatatttatttttggaaagggccaagttacaaaacatcttttttttgaggctgcactgttgatatgtcatgcagtggccaccaagaaagtatatactcgtgttagatactgattacatcatttacatcacgctcagtatttggaattaaagatgtgaatgttctgtgaccagagtagggatgacacaaatggaatcagctcctggtggactaagaatcttgaaaaaatctggccacctcatccactacatctggattgagtgtactgcaacaaagaaaaacattaaacaattttatattaaaagaa

SEQ ID NO: 244306 - DNA, 579 bp, Artificial Sequence
  derived and/or modified sequence
gttattctgcctgccatgggcactgagtacagctgctcatcatactggactaatcaggtcaaggacatggggcttcattctaagtaactcagctgtcatcttcattataaaaccacacattttcctctgactctgggcaatgacctgcgtatataagctgttagtcataagggctggatggggcagcatctcaatcatatagggcacaggacagacctcagtatcaccagcaagaatccattacagttcaacatgtaagtagtacctccagaccttttccctgtgcccctggactccaaggtctatcccaccctcagctgtccatcttctagagcaggcggtctagcctccccaaaccagaagaacttcctttttatattcaaccacctgatggatgtccctgatcagttccctcagctgcagagcacaagaaggaccttcaggatccagctttctcctcgggcacgggggaggctcggcggacctgctgattgggaaccgatatggcggcgactctgggcagcggggagcgctggacggaagcttacattgacgcagttagaagaaacaaatacccag

SEQ ID NO: 244307 - DNA, 832 bp, Artificial Sequence
  derived and/or modified sequence
gtttgtgctgttgttattctgcctgccatgggcactgagtacagctgctcatcatactggactaatcaggtcaaggacatggggcttcattctaagtaactcagctgtcatcttcattataaaaccacacattttcctctgactctgggcaatgacctgcgtatataagctgttagtcataagggctggatggggcagcatctcaatcatatagggcacaggacagacctcagtatcaccagcaagaatccattacagttcaacatcctcgggcacgggggaggctcggcggacctgctgattgggaaccgatatggcggcgactctgggcagcggggagcgctggacggaagcttacattgacgcagttagaagaaacaaatacccagaagacacacctcctgagagtcatgacccctgtggctgctgtaactgcatgaaggcacaaaaggaaaagaagtctgagaatgagtggactcagacccggcagggtgaggggaactccacgtatagtgaggaacagctgcttggggtacaaaggatcaagaaatgcagaaattactatgaaattctgggagtttctcgagatgctagtgacgaagagcttaagaaagcttacagaaaactcgccctgaaatttcaccctgacaagaactgtgctcctggagcaacagatgctttcaaagcaataggaaatgcatttgcagtcctgagcaatcctgataagagacttcgctatgatgaatacggagatgaacaggtgactttcactgcccctcgagccagaccttataattattacagggattttgaagctgacatcactccagaa

SEQ ID NO: 244308 - DNA, 1046 bp, Artificial Sequence
  derived and/or modified sequence
gttgttattctgcctgccatgggcactgagtacagctgctcatcatactggactaatcaggtcaaggacatggggcttcattctaagtaactcagctgtcatcttcattataaaaccacacattttcctctgactctgggcaatgacctgcgtatataagctgttagtcataagggctggatggggcagcatctcaatcatatagggcacaggacagacctcagtatcaccagcaagaatccattacagttcaacatgtagtacctccagaccttttccctgtgcccctggactccaaggtctatcccaccctcagctgtccatcttctagagcaggcggtctagcctccccaaaccagaagaacttcctttttatattcaaccacctgatggatgtccctgatcagttccctcagctgcagagcacaagaaggaccttcaggatccagctttctcctcgggcacgggggaggctcggcggacctgctgattgggaaccgatatggcggcgactctgggcagcggggagcgctggacggaagcttacattgacgcagttagaagaaacaaatacccagaagacacacctcctgagagtcatgacccctgtggctgctgtaactgcatgaaggcacaaaaggaaaagaagtctgagaatgagtggactcagacccggcagggtgaggggaactccacgtatagtgaggaacagctgcttggggtacaaaggatcaagaaatgcagaaattactatgaaattctgggagtttctcgagatgctagtgacgaagagcttaagaaagcttacagaaaactcgccctgaaatttcaccctgacaagaactgtgctcctggagcaacagatgctttcaaagcaataggaaatgcatttgcagtcctgagcaatcctgataagagacttcgctatgatgaatacggagatgaacaggtgactttcactgcccctcgagccagaccttataattattacagggattttgaagctgacatcactccagaagagctgttcaacgtcttctttggag

SEQ ID NO: 244309 - DNA, 1077 bp, Artificial Sequence
  derived and/or modified sequence
atggctgctactcttggcagtggagagaggtggacagaggcttacatcgacgcggtgcggcggaacaagtatcccgaggataccccacccgagagccacgacccatgcggctgttgtaactgcatgaaggcccaaaaagagaagaagtccgagaacgaatggacacagacgcgacagggggagggcaactccacgtactcagaagaacagttgttgggggtgcaacggataaagaagtgcagaaactactacgaaattctgggagtgagccgggatgccagcgacgaggagttgaagaaggcctatcgtaaattggctctgaagttccacccagataaaaattgcgcccctggagccaccgacgcatttaaagccataggaaatgcgttcgcagtgctgagcaatcctgataaacgactcagatacgatgaatacggggacgaacaggtgacatttacagcccctcgagctaggccttataactactacagggactttgaggccgacatcacacctgaggagctgttcaatgtgttctttggtggccactttccgaccggcaacatccacatgttctcgaatgtgacagatgatacgtactactatcgcaggagacacagacacgagcggacacagacccagaaagaggaagaggaagagaagccacagactacatatagcgcttttattcaactcctgcctgttttagtcatagtgatcatatccgttataacacagttgctggccaccaaccccccgtactcgctgttttacaagtcaacgctgggttacactatatcaagggagacacagaatctgcaagtaccttatttcgtcgataagaatttcgataaggcctatcggggggcaagtctgcacgatctagagaagaccattgaaaaagattacatcgattatatacagacatcatgctggaaagagaagcagcagaaatccgagttaacaaatctcgccggactgtatagagacgagaggctgaaacaaaaagccgaatccctgaagctggaaaactgtgagaaactatccaaactgattggcctgcgcagaggcggttag

SEQ ID NO: 244310 - DNA, 78 bp, Artificial Sequence
  derived and/or modified sequence
atggcggcgaccctgggcagtggggaaaggtggactgaagcttacatagacgccgtcaggcgcaataagtatccttag

SEQ ID NO: 244311 - DNA, 522 bp, Artificial Sequence
  derived and/or modified sequence
atggcggccacgttgggttccggggagcggtggacggaggcctacatagacgcagtacgccgcaataaatacccagaagacacccccccagaaagccacgatccatgcgggtgttgcaattgtatgaaggcccagaaagaaaaaaaatccgagaatgaatggacacagactaggcaaggtgagggaaactccacttactctgaggagcaactcctgggcgtgcagcgaatcaagaagtgccggaattattacgagattttaggcgtttctagagatgcctcagatgaggagctcaaaaaggcgtaccggaagctggccctcaaattccatccggacaaaaactgtgcaccaggcgccaccgatgcctttaaggccattgggaatgcctttgccgtgttgtcaaatccagataagagacttcggtacgatgagtacggcgatgagcaggtgaccttcaccgctcctcgcgctagaccgtataattattaccgcgattttgaagccgacatcacacctgaatag

SEQ ID NO: 244312 - DNA, 546 bp, Artificial Sequence
  derived and/or modified sequence
atggctgctaccctgggtagtggcgaacggtggacggaggcttacatcgacgcggtgcgccgcaacaaatatcctgaagacacaccacctgagagtcacgacccatgtggttgctgtaactgtatgaaggcccagaaagaaaagaaatctgagaacgagtggactcagacgcgacaaggcgaaggaaactcaacctattccgaggagcagctgctgggggtgcaaaggatcaagaaatgccggaattattatgaaatcctgggtgtgagcagggatgcaagcgacgaagagcttaagaaggcttacagaaaactggccttgaagttccatccggacaaaaattgcgctcccggggcaacagacgccttcaaggccataggcaacgccttcgctgtgttatcaaaccccgataagaggttgcgatacgatgaatacggggacgaacaggtaacattcaccgcccccagagcacgaccttacaactattacagagatttcgaagcagacatcacccccgaggaattgtttaatgtatttttcggctag

SEQ ID NO: 244313 - DNA, 1077 bp, Artificial Sequence
  derived and/or modified sequence
atggccgccaccctgggcagcggggagcgctggacagaggcctacattgatgctgtgagaagaaacaagtacccagaggacaccccacctgagagccatgacccctgtggctgctgcaactgcatgaaggcccagaaggagaagaagtcagaaaatgagtggacccagacccggcagggcgagggcaacagcacctacagcgaggagcagctgctgggcgtgcagaggatcaagaagtgcaggaactactatgagatcctgggcgtgtccagagatgccagtgatgaggagctgaagaaggcctacaggaagctggccctgaagttccacccagacaagaactgtgcccctggggccacagatgccttcaaggccatcggaaatgcctttgctgtgctgagcaacccagacaagaggctgcgctatgatgaatatggagatgagcaggtgaccttcaccgccccccgggcccggccctacaactactacagagactttgaggccgacatcaccccagaggagctgttcaacgtgttcttcggcggccacttccccaccggcaacatccacatgttcagcaatgtgacagatgacacctactactacagaagaagacacagacatgagaggacccagacccagaaggaggaggaggaggagaagccccagaccacctacagcgccttcatccagctgctgcctgtgctggtgattgtcatcatcagcgtcatcacccagctgctggccaccaaccccccctacagcctcttctacaagagcaccctgggctacaccatcagccgggagacccagaacctgcaggtgccctactttgtggacaagaactttgacaaggcctacagaggagccagcctgcatgacctggagaagaccatcgagaaggactacatcgactacatccagaccagctgctggaaggagaagcagcagaagtctgagctgaccaacctggccggcctgtacagagatgagcggctgaagcagaaggccgagagcctgaagctggagaactgtgagaagctgagcaagctgattggcctgcggcggggcggctag

SEQ ID NO: 244314 - DNA, 78 bp, Artificial Sequence
  derived and/or modified sequence
atggccgccaccctgggcagcggggagcgctggacagaggcctacattgatgctgtgagaagaaacaagtacccctag

SEQ ID NO: 244315 - DNA, 522 bp, Artificial Sequence
  derived and/or modified sequence
atggccgccaccctgggcagcggggagcgctggacagaggcctacattgatgctgtgagaagaaacaagtacccagaggacaccccacctgagagccatgacccctgtggctgctgcaactgcatgaaggcccagaaggagaagaagtcagaaaatgagtggacccagacccggcagggcgagggcaacagcacctacagcgaggagcagctgctgggcgtgcagaggatcaagaagtgcaggaactactatgagatcctgggcgtgtccagagatgccagtgatgaggagctgaagaaggcctacaggaagctggccctgaagttccacccagacaagaactgtgcccctggggccacagatgccttcaaggccatcggaaatgcctttgctgtgctgagcaacccagacaagaggctgcgctatgatgaatatggagatgagcaggtgaccttcaccgccccccgggcccggccctacaactactacagagactttgaggccgacatcaccccagagtag

SEQ ID NO: 244316 - DNA, 546 bp, Artificial Sequence
  derived and/or modified sequence
atggccgccaccctgggcagcggggagcgctggacagaggcctacattgatgctgtgagaagaaacaagtacccagaggacaccccacctgagagccatgacccctgtggctgctgcaactgcatgaaggcccagaaggagaagaagtcagaaaatgagtggacccagacccggcagggcgagggcaacagcacctacagcgaggagcagctgctgggcgtgcagaggatcaagaagtgcaggaactactatgagatcctgggcgtgtccagagatgccagtgatgaggagctgaagaaggcctacaggaagctggccctgaagttccacccagacaagaactgtgcccctggggccacagatgccttcaaggccatcggaaatgcctttgctgtgctgagcaacccagacaagaggctgcgctatgatgaatatggagatgagcaggtgaccttcaccgccccccgggcccggccctacaactactacagagactttgaggccgacatcaccccagaggagctgttcaacgtgttcttcggctag

SEQ ID NO: 244317 - DNA, 1077 bp, Artificial Sequence
  derived and/or modified sequence
atggccgccaccctgggcagcggcgagcggtggaccgaggcctacatagacgctgttaggcgaaacaagtaccctgaggatacgccaccggaatcccatgacccttgcgggtgctgtaattgcatgaaagcacagaaggaaaagaaatccgagaacgaatggacccaaacgcggcagggcgagggaaactccacgtacagtgaggagcagctactgggcgtccagcggatcaaaaagtgcaggaactattatgaaatactaggcgtctccagggatgcctcagacgaggagctgaaaaaggcctaccggaagcttgctttgaagttccaccctgacaagaattgcgcccccggggctaccgacgcatttaaagccattggcaacgcgtttgccgtgctctcaaatccggataaacgtctgcgctacgacgagtacggcgatgaacaagtcacattcaccgcaccaagagccaggccgtacaattactatagagattttgaggctgacattacccctgaggagctcttcaacgtattcttcggcggacatttccccaccgggaacatccatatgttctccaatgtaactgatgatacctactattatcggagaagacacaggcacgagagaacgcagacgcagaaagaagaggaggaagagaaaccccaaaccacctacagtgccttcatacaactgttgcccgtgctggtcattgtgattattagcgtgatcacccaattgttggctaccaatccaccatactccttgttttataaatctaccctgggctacaccatcagcagagagacgcagaatctgcaggtgccatactttgtggacaagaactttgacaaggcttataggggcgccagtttgcatgacctggagaagacaattgagaaggactatatagattatattcagacatcatgttggaaagagaaacagcagaagtccgaactgacaaatttagcaggcttatacagggacgagcgactgaagcagaaggcagagtccctgaagttggagaactgcgaaaagctgagtaagttaattggattgagaagaggcgggtag

SEQ ID NO: 244318 - DNA, 78 bp, Artificial Sequence
  derived and/or modified sequence
atggccgccaccctgggcagcggcgagcggtggaccgaggcctacatcgacgccgttcgacggaataaatatccttag

SEQ ID NO: 244319 - DNA, 522 bp, Artificial Sequence
  derived and/or modified sequence
atggccgccaccctgggcagcggcgagcggtggaccgaggcctacattgacgctgtgcgtcggaacaagtaccctgaggacacacccccggagtctcacgatccttgtggttgttgcaactgcatgaaggcgcagaaagaaaagaagtcagagaacgagtggacacagacgcggcagggcgaagggaatagcacctactctgaggagcagctgctcggcgtccagcgcattaaaaagtgtagaaactattacgagattctgggagtttcacgggatgccagtgatgaggagcttaagaaggcctaccgaaagctcgccctgaagttccaccccgacaaaaactgtgcccccggcgccaccgacgcttttaaagcgatagggaacgcttttgctgttttgagcaatcccgacaagagactcaggtatgatgagtacggggatgaacaagtcacatttactgcacctcgcgctagaccctacaattactacagggattttgaagctgatataactcccgagtag

SEQ ID NO: 244320 - DNA, 546 bp, Artificial Sequence
  derived and/or modified sequence
atggccgccaccctgggcagcggcgagcggtggaccgaggcctacattgacgcagtgcgcagaaataaataccctgaggatacccccccagagagccatgacccatgtggatgttgtaactgtatgaaagcacaaaaggaaaaaaagagtgaaaatgagtggactcagaccagacagggtgaaggaaattccacctatagtgaggagcagctgctcggcgtccagcgtataaagaaatgtaggaattactatgagatcctcggagtgagtagggacgcatcagacgaggaattaaagaaagcatacagaaaactcgcactgaaatttcaccccgacaagaactgtgcccctggagccaccgatgcctttaaagcaatcggcaacgccttcgccgttctgagtaatcctgataagagattgcggtacgatgaatacggtgatgaacaggttacctttacagccccacgagcccgcccttataactactaccgcgatttcgaagccgacatcactcctgaagaattgttcaatgtattcttcggatag

SEQ ID NO: 244321 - DNA, 1077 bp, Artificial Sequence
  derived and/or modified sequence
atggctgcgacattggggagtggggaacgctggactgaggcctacatcgatgccgttcgcaggaacaaataccccgaggatacacccccagaaagccatgatccctgcggctgctgcaattgcatgaaggcgcagaaggagaagaagtcagaaaatgagtggactcagactcggcagggggagggaaacagcacctacagtgaggagcagttgctgggagtgcagagaatcaagaagtgtcgcaattattatgaaatcttgggggtgtcacgcgatgccagcgatgaagagctcaaaaaggcctaccgaaagctggctttgaagtttcaccccgacaaaaattgcgcgcctggggctaccgatgcatttaaagcaatagggaatgcattcgccgtactgtctaatcccgacaagagattgcggtacgacgagtacggtgacgagcaagtgactttcacagcgccacgagcacggccttacaattactaccgcgactttgaagctgatattaccccagaggagctctttaatgtgttctttggcggacatttcccgacgggcaacatccatatgttctcaaatgttacagatgacacctactactaccgcaggcgtcacaggcacgagcggacccagactcagaaggaagaagaggaagagaaaccacaaacaacctactccgcctttattcagcttctgccggtgctggtcatagttataatctctgtcataacccaactgcttgccacgaacccaccctacagcctattctataagagtacgttggggtatactataagcagggagacccaaaacctgcaagtaccatatttcgtggacaagaactttgataaggcctaccgcggtgcgtctctgcacgaccttgaaaaaaccatcgagaaagattacatcgattacatccaaacgagctgttggaaggagaagcagcagaagtcagaactgaccaatttggccggactgtacagagacgaaaggctgaagcagaaggcagagagcttgaaactcgagaactgcgagaagctcagtaagttgataggcctgaggcggggaggctag

SEQ ID NO: 244322 - DNA, 78 bp, Artificial Sequence
  derived and/or modified sequence
atggccgctacgctcgggtcaggcgagcgatggactgaggcatacatagatgctgtgcggcgtaacaagtacccatag

SEQ ID NO: 244323 - DNA, 522 bp, Artificial Sequence
  derived and/or modified sequence
atggccgctacattggggtcaggagagcgatggacagaggcatatatagatgcagttagaaggaacaagtatcccgaagacacaccacctgaaagccatgacccatgtgggtgctgtaactgcatgaaggcgcaaaaggagaaaaagagcgagaacgagtggacccagacacgacagggcgaaggtaactcaacttacagcgaagagcagttactgggtgtccagcgaataaagaaatgccgcaattactatgagatcctgggggtgtctagagatgctagcgacgaggaactcaagaaggcttatcggaaactggcattgaaattccaccctgataaaaattgcgcccctggagccaccgacgcatttaaagcgatcggcaacgccttcgcggttcttagtaatccagacaagcgcctccgctatgatgagtacggcgacgagcaggtgacgtttacagcaccacgcgcacgcccatacaattactaccgagacttcgaagccgacattacacccgagtag

SEQ ID NO: 244324 - DNA, 546 bp, Artificial Sequence
  derived and/or modified sequence
atggccgcaaccctgggtagtggggaaagatggacggaggcttacatagacgccgtacgccgtaataagtacccagaggatacaccacctgagagtcacgacccctgcggctgttgcaattgtatgaaagcccagaaggagaaaaaatctgagaacgagtggactcaaacacgacaaggggagggcaattctacctactcagaggagcagctgttaggagtgcagagaatcaagaagtgccgaaattactatgagatactgggggtgtcccgtgatgctagcgacgaggagctgaaaaaggcataccgcaagttggcccttaagtttcaccctgataagaattgcgccccaggagccacagacgctttcaaggccatcgggaacgctttcgccgtgttgtccaacccagataaacgcctccgatacgacgaatacggtgatgagcaggtcacctttacggcaccacgtgctcggccatacaactactacagagattttgaagcggacattactcctgaagagctgttcaacgtcttcttcggttag

SEQ ID NO: 244325 - protein, 349 aa, Artificial Sequence
  derived and/or modified sequence
MEEEKYLPELMAEKDSLDPSFVHASRLLAEEIEKFQGSDGKKEDEEKKYLDVISNKNIKLSERVLIPVKQYPKFNFVGKLLGPRGNSLKRLQEETGAKMSILGKGSMRDKAKEEELRKSGEAKYAHLSDELHVLIEVFAPPGEAYSRMSHALEEIKKFLVPDYNDEIRQEQLRELSYLNGSEDSGRGRGIRGRGIRIAPTAPSRGRGGAIPPPPPPGRGVLTPRGSTVTRGALPVPPVARGVPTPRARGAPTVPGYRAPPPPAHEAYEEYGYDDGYGGEYDDQTYETYDNSYATQTQSVPEYYDYGHGVSEDAYDSYAPEEWATTRSSLKAPPQRSARGGYREHPYGRY

SEQ ID NO: 244326 - DNA, 2058 bp, Artificial Sequence
  derived and/or modified sequence
gcgtcctgttcccgcctctccagttaaggccgctggtgtgagccggggctctgcgcgagcgagggacgacggaagggacgggcaggtgtgggcgcggggccacgcagcccgacggcgggagtcgcaggtgctgggtgcatgggccagtgaggacgcacagagatccctcgccgcgcggaggaggagcagcgcgggagccaggcgctgccccaagaccctgcctgcgtccgagcgagcggaacctcgcgcttcgcccggggacaatccgaagtccgcgctatggaagaggagaaatatttgcctgagctgatggcagagaaagatagcctggatccatcttttgtgcatgcgtcgcgccttttggcagaagaaattgaaaagtttcaaggttctgatggaaaaaaggaagacgaagaaaagaagtatcttgatgtcatcagcaacaaaaacataaagctctcagaaagagtactgattcctgtcaagcagtatccaaagttcaattttgtggggaaattgcttggaccaagaggaaactccttgaagaggctacaggaagaaacaggtgctaaaatgtctatcctgggcaaaggatcaatgagagataaagctaaggaagaagaactaaggaagagtggggaagccaaatatgcccacttgagtgatgagcttcatgtattaattgaagtgtttgctccacctggggaagcttattcacgtatgagtcatgcattggaagagattaaaaaattcctggttcctgactacaatgatgaaattcgtcaggaacaactacgtgaattatcttacttaaatggctcagaggactctggtcgtggcagaggtattagaggcagagggatcagaatagctcccacagctccttcaaggggccgtgggggtgccattcctcctcccccaccacctggacgaggtgttctcacccctcggggaagcactgtaacccgtggagcgcttccagtgccacctgtagcaagaggtgtccctacccctcgagcccggggggcaccaacagtgccaggatacagggcacctcctcctccagcccatgaagcttatgaagaatatggttatgatgatggctacgggggtgaatatgatgaccagacctatgagacttatgataacagctatgcgacccaaacacaaagtgtgcctgaatactatgactacggtcatggagtaagtgaggatgcctatgacagctacgcaccagaagaatgggccacaacccgctctagcttgaaggcaccaccgcaaaggtcagccagagggggatacagggaacacccctatggtagatattgaaggtccttcccacctgtgacctcacctcaaagacaattcatagcctgtggtctccacataaacagcaacaagacaagtaatagtcctttttttgtttgtttgtttctattctagggataactgctcatgattactcccatatatttctagtatttccctctgtactgttggcgtgacattgacactagtattattttacaaaacagactgaaaaagacattagcaagcatagtctataaacctttcagtaggatgatattctcttggttgtttttcattgttgtgtgtaatcttttttttttctttttcttttttttttttttgaggaaaagcatgaatttgttaacagattttgagtctcaaccaactagcagaaactttgtttagggttgctaaaagactgtaatatgatttttgaactagctgataataaagttgtagataagatgttttaacctgtcttttaatatctgttagttagacaaagatgtttgatattaagtttgtaaatttaattttaatgctgttttaatggggttgaaaacaagcagctactgtatgtatgtagctaactgaatttgttcagtgttttaacctgtatttgttaaaaaagaaaaaaaaacacacataaagttccatgtgtaagcttctctaaataggaaaccacaatttgtcaaatatgtttgccataatttgtcaataaagctgaaaacttttgtaaaaattaaa

SEQ ID NO: 244327 - DNA, 1050 bp, Artificial Sequence
  derived and/or modified sequence
atggaggaagagaaatacttacctgaactgatggcagaaaaggactctttagatcccagtttcgtacacgccagcaggcttcttgccgaggagattgaaaagtttcagggctccgacggcaagaaagaggatgaggagaagaaatatttggacgtcatcagtaataagaacatcaagttaagtgaaagagttctaatccccgtgaagcaatatcctaagttcaacttcgtaggtaagctcttgggcccccgtggcaattctttaaagcgcttgcaggaggaaacaggcgccaagatgtccatcttgggaaagggttccatgcgggacaaagccaaagaggaggagctccggaagtctggcgaggctaagtacgctcacttaagtgacgaactccatgtactaattgaagtattcgcccctcccggggaggcctattctcggatgtcacatgcattggaggagatcaaaaagttcttggtgccagattacaatgacgagatccggcaagaacagctgcgtgagctttcctacctcaatggaagcgaagatagtgggcgcggccggggcattcggggcaggggtattcgaatcgcacccactgcaccctcaagggggagggggggagctataccccctccaccccccccaggccggggcgtgttgacgcctcggggcagcacagtgacacgcggtgcactgcctgttcctcccgtagcccgaggagtgccaaccccacgggctcgcggggcccctacggttccagggtacagggcccctccgcccccagcacacgaagcgtacgaagaatacggctacgacgatggttacggaggcgagtacgatgaccagacatacgaaacctatgataatagttacgctacccagacccagtctgtaccggagtactatgattacgggcacggcgtgtccgaggatgcctatgacagctacgcaccagaggagtgggccaccactaggtcctcgttgaaagcccctccccaacggtcagcacggggcgggtaccgggagcatccatacgggaggtactag

SEQ ID NO: 244328 - DNA, 1050 bp, Artificial Sequence
  derived and/or modified sequence
atggaggaggagaagtacctgcctgagctgatggccgagaaggacagcctggaccccagctttgtgcacgccagccggctgctggccgaggagattgagaagttccagggcagtgatggcaagaaggaggatgaggagaagaagtacctggatgtgatcagcaacaagaacatcaagctgtctgagcgggtgctgatccctgtgaagcagtaccccaagttcaactttgtgggcaagctgctgggcccccggggcaacagcctgaagaggctgcaggaggagactggagccaagatgagcatcctgggcaagggctccatgagggacaaggccaaggaggaggagctgaggaagtctggagaggccaagtatgcccacctgagtgatgagctgcacgtgctgattgaggtgtttgcccctcctggagaggcctacagcaggatgagccacgccctggaggagatcaagaagttcctggtgcctgactacaatgatgagatccggcaggagcagctgcgggagctgagctacctgaatggaagtgaggacagcggccggggccggggcatccggggccggggcatcagaattgcccccacagcccccagccggggccggggcggggccatccccccacctcctcctcctggccggggcgtgctgaccccccggggcagcacagtgaccaggggggccctgcctgtgccccctgtggcccggggcgtgcccaccccccgggcccggggggcccccaccgtgcccggctaccgggcccctcctcctccagcccacgaggcctatgaggagtatggctatgatgatggctacggcggggagtatgatgaccagacctatgagacctatgacaacagctatgccacccagacccagagcgtgcctgagtactatgactatggccatggagtgtctgaagatgcctatgacagctatgcccctgaggagtgggccaccaccaggagcagcctgaaggccccaccccagaggtctgcccggggcggctaccgggagcacccctacggccgctactag

SEQ ID NO: 244329 - DNA, 1050 bp, Artificial Sequence
  derived and/or modified sequence
atggaggaggagaagtacctgcccgagctgatggccgagaaggactctctggacccatccttcgtacatgcatcccgattgttggccgaggaaatagaaaaatttcagggatctgatggaaagaaggaggacgaggaaaaaaagtacttagacgtcatttctaacaagaacatcaaactatccgaacgtgttctcatccccgttaaacaataccccaaatttaacttcgtcggtaagctgcttggtcctcgcggtaattctcttaaacgcctgcaagaggaaaccggcgccaaaatgtcaattctgggaaagggttctatgcgcgacaaagccaaagaggaggaactgcggaaaagcggggaggcaaagtatgcccacctttccgatgagttacacgttctgatagaggttttcgccccacctggggaagcgtacagccgcatgtctcatgctttagaggaaattaagaagtttctggtccccgactacaatgatgaaatcaggcaggaacagctaagagaactgtcatatctgaacggaagtgaggatagtggtcgcgggcgaggaatccgagggcgtgggattagaatcgctccaacggcccctagcagaggcagaggcggcgctatcccacctccgccgccccctggcagaggagtgcttacaccgagaggatccaccgtgactaggggggcccttcctgtacctcctgtggctcgcggcgtccctactccgcgggctcgcggagctccaactgtgcctggatatagagcaccacctcccccagctcacgaagcgtacgaagaatacgggtacgatgatggatatggcggtgaatacgatgaccagacgtatgaaacttacgacaactcatacgccactcagacacagtccgtccccgaatattatgattatgggcacggcgtgtccgaagatgcctacgattcttacgcccccgaggagtgggccaccactcggtcctctctgaaagccccacctcagagaagtgctaggggaggctacagagaacatccatacggccggtactag

SEQ ID NO: 244330 - DNA, 1050 bp, Artificial Sequence
  derived and/or modified sequence
atggaagaagagaagtatctccctgagctgatggccgagaaggattcactggatcccagctttgttcatgcgtccagactgcttgctgaggaaatcgaaaaattccaaggaagcgacggcaaaaaagaggacgaagaaaaaaaatacttagacgtgataagcaataagaacatcaagctgagtgaaagagtattgatacctgtcaaacaataccctaagtttaatttcgtcgggaaactgttgggacctagggggaattctttgaaacggttacaagaagagacaggcgctaagatgtcaatcttgggtaaaggttccatgcgcgacaaggccaaggaggaagagctccgcaaaagcggagaagccaagtatgctcacctgtcagatgagctccacgtgttgatagaagtgtttgcccctccaggcgaagcttattcgcggatgagccatgctctggaggagattaagaagttcttggtacccgactataacgatgagatcaggcaggaacagctccgggagctgagctacctgaacggtagcgaagactcaggccgaggtcgaggaatcagggggagaggaattcgaattgccccaaccgccccaagtcgcggtcgtggaggcgcaatccccccacccccacctccaggcaggggcgtgcttactcctcgcggtagtacagttacaagaggcgcactgccagtgcccccagtagctagaggagttccgacgcccagagccaggggcgctcctacagttccgggatatagagcacctcctcctccagcccacgaagcatatgaagagtacggctacgacgatggatacggaggtgagtatgacgatcaaacatacgagacatacgacaactcctatgccacccagacccagtccgtacccgaatactatgattatgggcacggggtctccgaggacgcttacgatagctacgcacctgaggagtgggccactacacgctcctcactgaaagcaccaccccagcgcagtgctcggggtggctacagggaacatccctatggcaggtattag

SEQ ID NO: 244331 - DNA, 1050 bp, Artificial Sequence
  derived and/or modified sequence
atggaggaggagaagtacctgcccgagctgatggccgagaaggacagcctggaccccagcttcgtgcacgccagcagactgctggccgaggagatcgagaagttccagggcagcgacggcaagaaggaggacgaggagaagaagtacctggacgtgatcagcaacaagaacatcaagctgagcgagagagtgctgatccccgtgaagcagtaccccaagttcaacttcgtgggcaagctgctgggccccagaggcaacagcctgaagagactgcaggaggagaccggcgccaagatgagcatcctgggcaagggcagcatgagagacaaggccaaggaggaggagctgagaaagagcggcgaggccaagtacgcccacctgagcgacgagctgcacgtgctgatcgaggtgttcgccccccccggcgaggcctacagcagaatgagccacgccctggaggagatcaagaagttcctggtgcccgactacaacgacgagatcagacaggagcagctgagagagctgagctacctgaacggcagcgaggacagcggcagaggcagaggcatcagaggcagaggcatcagaatcgcccccaccgcccccagcagaggcagaggcggcgccatcccccccccccccccccccggcagaggcgtgctgacccccagaggcagcaccgtgaccagaggcgccctgcccgtgccccccgtggccagaggcgtgcccacccccagagccagaggcgcccccaccgtgcccggctacagagccccccccccccccgcccacgaggcctacgaggagtacggctacgacgacggctacggcggcgagtacgacgaccagacctacgagacctacgacaacagctacgccacccagacccagagcgtgcccgagtactacgactacggccacggcgtgagcgaggacgcctacgacagctacgcccccgaggagtgggccaccaccagaagcagcctgaaggcccccccccagagaagcgccagaggcggctacagagagcacccctacggcagatactag

SEQ ID NO: 244332 - protein, 318 aa, Artificial Sequence
  derived and/or modified sequence
MLSESSSFLKGVMLGSIFCALITMLGHIRIGHGNRMHHHEHHHLQAPNKEDILKISEDERMELSKSFRVYCIILVKPKDVSLWAAVKETWTKHCDKAEFFSSENVKVFESINMDTNDMWLMMRKAYKYAFDKYRDQYNWFFLARPTTFAIIENLKYFLLKKDPSQPFYLGHTIKSGDLEYVGMEGGIVLSVESMKRLNSLLNIPEKCPEQGGMIWKISEDKQLAVCLKYAGVFAENAEDADGKDVFNTKSVGLSIKEAMTYHPNQVVEGCCSDMAVTFNGLTPNQMHVMMYGVYRLRAFGHIFNDALVFLPPNGSDND

SEQ ID NO: 244333 - DNA, 957 bp, Artificial Sequence
  derived and/or modified sequence
atgctgagtgaaagttcatcttttctgaaaggcgtcatgctggggagcattttctgcgctctcatcacaatgctggggcatattcgaatcgggcacggcaaccgcatgcaccaccatgaacaccaccatctccaagctcccaataaggaagacatcctgaaaatttccgaagatgagcggatggaactaagtaaatcttttagggtgtactgtatcatcttagtcaagccgaaggacgtctcactgtgggcggctgtgaaggaaacatggaccaaacattgcgataaggccgaatttttttcatctgagaacgtgaaagtctttgagtcaatcaacatggacacaaatgatatgtggctgatgatgcgcaaggcatataagtatgcatttgataaatatagagaccaatacaactggttcttcttagcaaggccgacgacgttcgccattatagagaatctgaagtactttctgctgaagaaggacccatctcagcccttctatctgggacatactataaagtcaggcgacctcgagtatgttggcatggagggcggcatagtgctgtcagtggaatcaatgaaacggttgaattcgctactcaacatccccgagaaatgtcccgagcagggaggaatgatttggaagatttcagaggataagcagctagcagtgtgtctcaagtacgccggcgtcttcgcagagaacgcagaagacgcagatggcaaagacgtattcaacacaaagagcgtaggactgagtatcaaggaagccatgacctaccaccccaaccaggtggtagagggctgttgttcagacatggccgtgacattcaatggcctgacaccaaaccagatgcacgtgatgatgtacggcgtgtacagattgcgcgcttttggacatatattcaacgacgcacttgtgtttctgccacccaatggatccgacaacgattag

SEQ ID NO: 244334 - DNA, 957 bp, Artificial Sequence
  derived and/or modified sequence
atgctttctgagtcatcatctttcttgaagggagtcatgctgggcagtatattctgcgccttgataacaatgctgggccatatccggattggacatggcaaccgtatgcaccaccatgaacatcatcacctgcaggccccaaacaaagaggatatcctgaagatttctgaggacgagcggatggagctttcaaaaagtttcagggtgtactgtattattctggtaaaaccaaaggacgtatcgctttgggcagccgtgaaagaaacctggacgaaacactgcgataaagccgaattttttagttctgagaacgtcaaagtgtttgaaagcatcaacatggacaccaatgacatgtggctgatgatgcgaaaagcctacaagtatgcattcgacaagtatcgcgaccagtacaattggttttttttagccagacctacaactttcgcgattattgaaaacctgaaatatttcctacttaaaaaggacccttctcaaccattctatctgggacacaccattaagtcaggagacctcgaatatgtcgggatggagggaggaatcgtcctcagcgtggagtctatgaagaggcttaattctctgcttaacatccctgaaaaatgccctgaacagggcgggatgatttggaaaatttctgaggataagcaactggctgtgtgtctgaaatacgctggtgtctttgctgagaacgctgaggatgctgacggtaaagacgttttcaataccaagtccgttggcctttcaatcaaagaggctatgacttatcaccccaaccaggtggtggagggctgttgctcagacatggctgtaacattcaatggactgacgcccaatcagatgcacgtgatgatgtacggtgtttacagacttagggctttcgggcatattttcaacgacgccctggtcttccttccaccaaacgggagtgacaacgactag

SEQ ID NO: 244335 - DNA, 957 bp, Artificial Sequence
  derived and/or modified sequence
atgctgtctgagagcagcagcttcctgaagggcgtgatgctgggcagcatcttctgtgccctgatcaccatgctgggccacatccgcatcggccacggcaacaggatgcaccaccacgagcaccaccacctgcaggcccccaacaaggaggacatcctgaagatcagtgaagatgagaggatggagctgagcaagagcttccgggtgtactgcatcatcctggtgaagcccaaggatgtgtccctgtgggccgctgtgaaggagacctggaccaagcactgtgacaaggccgagttcttcagcagtgaaaatgtgaaggtgtttgagagcatcaacatggacaccaatgacatgtggctgatgatgaggaaggcctacaagtatgcctttgacaagtacagagaccagtacaactggttcttcctggcccggcccaccacctttgccatcatcgagaacctgaagtacttcctgctgaagaaggaccccagccagcccttctacctgggccacaccatcaagagcggggacctggagtatgtgggcatggagggcggcatcgtgctgtctgtggagagcatgaagaggctgaacagcctgctgaacatccctgagaagtgcccagagcagggcggcatgatctggaagatcagcgaggacaagcagctggccgtgtgcctgaagtatgctggggtgtttgctgaaaatgcagaagatgctgatggcaaggatgtgttcaacaccaagtctgtgggcctgagcatcaaggaggccatgacctaccaccccaaccaggtggtggagggctgctgcagcgacatggctgtgaccttcaacggcctgacccccaaccagatgcacgtgatgatgtatggagtgtaccgcctgcgggccttcggccacatcttcaatgatgccctggtgttcctgcccccaaatggaagtgacaatgactag

SEQ ID NO: 244336 - DNA, 957 bp, Artificial Sequence
  derived and/or modified sequence
atgctgagcgagagcagcagcttcctgaagggcgtgatgctgggcagcatcttttgcgccttaattacaatgctgggccacataagaattggccacggaaatcggatgcatcaccacgagcaccaccacctccaggcccccaacaaagaggatattcttaagattagcgaggacgagaggatggaattgagcaagagcttcagggtgtattgcattattctagtgaagcctaaagacgtgtctctgtgggctgccgttaaggagacatggacaaagcattgtgataaggccgaatttttctcctccgagaatgtcaaggtgttcgagagtattaatatggataccaatgacatgtggcttatgatgagaaaggcgtataaatatgcttttgacaaatatcgcgaccagtataattggtttttcctagcccgccctaccacctttgccatcatcgagaatctgaagtatttcctgcttaaaaaggatccttctcaacccttctaccttggacacacaatcaagtccggcgacctggagtacgtcgggatggagggcggcatagtgctctccgtcgagtccatgaaaaggctgaactccctcctcaatatccccgaaaagtgtccagagcaaggcggtatgatctggaaaatctctgaggataagcagcttgctgtgtgcctgaaatacgccggggtgtttgcagagaatgccgaagacgcagatggcaaggacgtgttcaataccaagtctgttggcctttctatcaaagaggcaatgacgtatcacccgaaccaagtggttgaaggatgttgctctgatatggcggtcacctttaacggactcacacccaaccagatgcacgtcatgatgtatggagtctatcgcctccgagcgttcggtcacatcttcaacgatgccctggtgttcctccctcctaacggcagtgataatgattag

SEQ ID NO: 244337 - DNA, 957 bp, Artificial Sequence
  derived and/or modified sequence
atgctgagcgagagcagcagcttcctgaagggcgtgatgctgggctctatattttgcgctctgattaccatgctggggcacatccgcatcggtcatggaaatagaatgcaccatcacgagcatcaccacttacaggcccctaacaaagaagatatattaaagatcagtgaggatgaacgcatggaactgagcaagtcctttcgggtttactgcatcatcctggtcaagcctaaagatgtctctctgtgggccgctgtcaaagaaacgtggactaaacactgtgataaggccgaatttttttcatccgaaaacgttaaagtgttcgaatcaattaacatggacactaatgacatgtggctcatgatgcggaaggcctataagtacgcctttgataaataccgcgaccaatataactggtttttcctggcccgccctaccacctttgcgatcattgagaacctgaaatactttcttctgaaaaaggacccttcccagccgttctatctcggtcatacaattaagtcaggtgatttggaatacgtaggaatggagggcggaatcgttctctcagtggagagtatgaagagattgaactctctgctgaatatccccgaaaaatgtcccgagcagggtggaatgatctggaagatctcagaagataaacaactggcagtctgcctgaaatacgccggagtctttgccgaaaacgccgaggatgccgacggaaaggacgttttcaacactaagtcagtaggcctttctattaaggaggcaatgacctatcacccaaatcaggttgtagaaggatgttgcagcgatatggcagtcactttcaatggcttgactcctaatcaaatgcatgttatgatgtacggcgtttatcgtctgagggcgttcggtcatatttttaatgatgcgctggtgtttctgccacccaatggttccgacaatgattag

SEQ ID NO: 244338 - DNA, 957 bp, Artificial Sequence
  derived and/or modified sequence
atgctgtccgaaagtagctccttccttaaaggtgtcatgctggggtcaattttctgcgcattgatcactatgcttgggcacatacgtatcggccatgggaatcgcatgcaccatcacgagcaccaccatctgcaggccccaaataaggaggacatcttgaaaatctctgaggacgagaggatggagctttcaaagagcttcagagtctattgcataattctggtgaagccaaaggatgtttcgctgtgggcagctgtcaaggagacatggacaaagcactgtgacaaggccgagttcttttcctcagagaacgtcaaggtgttcgagtcgatcaacatggacaccaacgatatgtggctcatgatgcgcaaagcttataagtacgcctttgacaagtatcgagaccagtataactggttcttcctggctcgaccaactacatttgcaattatcgaaaacttaaaatacttcctgctgaaaaaagatccaagccagcctttctacctgggccatacgataaaatccggcgatctggaatacgtgggcatggaagggggaattgtgctgtccgtggaatctatgaaaaggttaaattccctgctaaatattcccgagaagtgcccagagcaaggagggatgatctggaagattagcgaggataaacagcttgccgtgtgtctgaagtatgcgggtgtgtttgctgaaaatgctgaggatgccgacgggaaagacgtgttcaataccaagtctgttggtcttagcattaaggaagctatgacttaccaccctaatcaagtggtggagggatgctgctccgacatggcagtgacgtttaatggcctgactcctaatcagatgcacgtgatgatgtatggggtctatagactgcgggcatttggccacatttttaacgatgcgctcgtattcttgcctcctaacggcagcgataatgactag

SEQ ID NO: 244339 - DNA, 957 bp, Artificial Sequence
  derived and/or modified sequence
atgctgagtgaatcatcctcatttttaaaaggggtaatgctcggatcaatattttgtgccctcataaccatgctaggacacattagaattggtcatggtaaccgcatgcaccatcatgagcaccaccaccttcaggcaccaaataaggaagatatcctaaaaatatctgaggacgagcgcatggagctgtctaagagtttccgcgtttattgcattatactagttaagcccaaagacgtttccctttgggcggctgtcaaagaaacctggacaaagcattgtgataaagctgagttcttttcctcagaaaatgtaaaagtctttgagagcatcaatatggataccaacgatatgtggctgatgatgcgaaaggcctacaaatacgcatttgataagtacagggatcagtataattggtttttcctggcgagacccacaactttcgccataatcgagaatctgaaatactttctgctaaagaaagatccctcccagcccttttacctgggccataccatcaagtccggggatctcgaatacgtaggcatggaaggcggtatcgtcctgtcggtggaatcaatgaaacgcctgaacagtctactcaacatcccagaaaagtgcccggagcaaggaggcatgatctggaagatttccgaagataagcagctggcagtctgcctcaaatatgccggagtctttgcggaaaatgccgaggatgcagatggcaaagatgtgtttaacactaaaagcgtcggcctgtcaattaaagaggccatgacttatcacccgaaccaggttgtcgagggatgctgtagtgacatggccgtgacatttaatggcctgacgccaaatcagatgcatgtaatgatgtacggcgtgtatcgcttgagggccttcggacacatatttaatgacgccctggtgttcctcccccctaacggaagtgacaacgactag

SEQ ID NO: 244340 - DNA, 1613 bp, Artificial Sequence
  derived and/or modified sequence
cgcgggcgggcaaacggacggctccgcccagccgccggctcctttaccccgccccactacccccgccttcgcggcgctcgtttcctggcgctccccacctttagcgagaccaacgagagaacaccgcctgcagctagaacagcctggtcaggagcgtaacggagtggtgcgccaacgtgagaggaaacccgtgcgcggctgcgctttcctgtccccaagccgttctagacgcgggaaaaatgctttctgaaagcagctcctttttgaagggtgtgatgcttggaagcattttctgtgctttgatcactatgctaggacacattaggattggtcatggaaatagaatgcaccaccatgagcatcatcacctacaagctcctaacaaagaagatatcttgaaaatttcagaggatgagcgcatggagctcagtaagagctttcgagtatactgtattatccttgtaaaacccaaagatgtgagtctttgggctgcagtaaaggagacttggaccaaacactgtgacaaagcagagttcttcagttctgaaaatgttaaagtgtttgagtcaattaatatggacacaaatgacatgtggttaatgatgagaaaagcttacaaatacgcctttgataagtatagagaccaatacaactggttcttccttgcacgccccactacgtttgctatcattgaaaacctaaagtattttttgttaaaaaaggatccatcacagcctttctatctaggccacactataaaatctggagaccttgaatatgtgggtatggaaggaggaattgtcttaagtgtagaatcaatgaaaagacttaacagccttctcaatatcccagaaaagtgtcctgaacagggagggatgatttggaagatatctgaagataaacagctagcagtttgcctgaaatatgctggagtatttgcagaaaatgcagaagatgctgatggaaaagatgtatttaataccaaatctgttgggctttctattaaagaggcaatgacttatcaccccaaccaggtagtagaaggctgttgttcagatatggctgttacttttaatggactgactccaaatcagatgcatgtgatgatgtatggggtataccgccttagggcatttgggcatattttcaatgatgcattggttttcttacctccaaatggttctgacaatgactgagaagtggtagaaaagcgtgaatatgatctttgtataggacgtgtgttgtcattatttgtagtagtaactacatatccaatacagctgtatgtttctttttcttttctaatttggtggcactggtataaccacacattaaagtcagtagtacatttttaaatgagggtggtttttttctttaaaacacatgaacattgtaaatgtgttggaaagaagtgttttaagaataataattttgcaaataaactattaataaatattatatgtgataaattctaaattatgaacattagaaatctgtggggcacatatttttgctgattggttaaaaaattttaacaggtctttagcgttctaagatatgcaaatgatatctctagttgtgaatttgtgattaaagtaaaacttttagctgtg

SEQ ID NO: 244341 - DNA, 1492 bp, Artificial Sequence
  derived and/or modified sequence
gtaacggagtggtgcgccaacgtgagaggaaacccgtgcgcggctgcgctttcctgtccccaagccgttctagacgcggatgaagtgcaaaacaaacttctccatagaggagttgttgcaaagttccagtttataccaaacagtaatcagattccattggaagctaaagattttgagagccttttgtactatatgcaactaacttgatttcaagcttgggaaccttttaaaaaaaacattaaaagcaaaatgaaaaatgctttctgaaagcagctcctttttgaagggtgtgatgcttggaagcattttctgtgctttgatcactatgctaggacacattaggattggtcatggaaatagaatgcaccaccatgagcatcatcacctacaagctcctaacaaagaagatatcttgaaaatttcagaggatgagcgcatggagctcagtaagagctttcgagtatactgtattatccttgtaaaacccaaagatgtgagtctttgggctgcagtaaaggagacttggaccaaacactgtgacaaagcagagttcttcagttctgaaaatgttaaagtgtttgagtcaattaatatggacacaaatgacatgtggttaatgatgagaaaagcttacaaatacgcctttgataagtatagagaccaatacaactggttcttccttgcacgccccactacgtttgctatcattgaaaacctaaagtattttttgttaaaaaaggatccatcacagcctttctatctaggccacactataaaatctggagaccttgaatatgtgggtatggaaggaggaattgtcttaagtgtagaatcaatgaaaagacttaacagccttctcaatatcccagaaaagtgtcctgaacagggagggatgatttggaagatatctgaagataaacagctagcagtttgcctgaaatatgctggagtatttgcagaaaatgcagaagatgctgatggaaaagatgtatttaataccaaatctgttgggctttctattaaagaggcaatgacttatcaccccaaccaggtagtagaaggctgttgttcagatatggctgttacttttaatggactgactccaaatcagatgcatgtgatgatgtatggggtataccgccttagggcatttgggcatattttcaatgatgcattggttttcttacctccaaatggttctgacaatgactgagaagtggtagaaaagcgtgaatatgatctttgtataggacgtgtgttgtcattatttgtagtagtaactacatatccaatacagctgtatgtttctttttcttttctaatttggtggcactggtataaccacacattaaagtcagtagtacatttttaaatgagggtggtttttttctttaaaacacatgaacattgtaaatgtgttggaaagaagtgttttaagaataataattttgcaaataaactattaataaatattatatgtgataaattctaa

SEQ ID NO: 244342 - DNA, 957 bp, Artificial Sequence
  derived and/or modified sequence
atgctgagcgagagcagcagcttcctgaagggcgtgatgctgggcagcatcttctgcgccctgatcaccatgctgggccacatcagaatcggccacggcaacagaatgcaccaccacgagcaccaccacctgcaggcccccaacaaggaggacatcctgaagatcagcgaggacgagagaatggagctgagcaagagcttcagagtgtactgcatcatcctggtgaagcccaaggacgtgagcctgtgggccgccgtgaaggagacctggaccaagcactgcgacaaggccgagttcttcagcagcgagaacgtgaaggtgttcgagagcatcaacatggacaccaacgacatgtggctgatgatgagaaaggcctacaagtacgccttcgacaagtacagagaccagtacaactggttcttcctggccagacccaccaccttcgccatcatcgagaacctgaagtacttcctgctgaagaaggaccccagccagcccttctacctgggccacaccatcaagagcggcgacctggagtacgtgggcatggagggcggcatcgtgctgagcgtggagagcatgaagagactgaacagcctgctgaacatccccgagaagtgccccgagcagggcggcatgatctggaagatcagcgaggacaagcagctggccgtgtgcctgaagtacgccggcgtgttcgccgagaacgccgaggacgccgacggcaaggacgtgttcaacaccaagagcgtgggcctgagcatcaaggaggccatgacctaccaccccaaccaggtggtggagggctgctgcagcgacatggccgtgaccttcaacggcctgacccccaaccagatgcacgtgatgatgtacggcgtgtacagactgagagccttcggccacatcttcaacgacgccctggtgttcctgccccccaacggcagcgacaacgactag

SEQ ID NO: 244343 - protein, 755 aa, Artificial Sequence
  derived and/or modified sequence
MKKQRKILWRKGIHLAFSEKWNTGFGGFKKFYFHQHLCILKAKLGRPVTWNRQLRHFQGRKKALQIQKTWIKDEPLCAKTKFNVATQNVSTLSSKVKRKDAKHFISSSKTLLRLQAEKLLSSAKNSDHEYCREKNLLKAVTDFPSNSALGQANGHRPRTDPQPSDFPMKFNGESQSPGESGTIVVTLNNHKRKGFCYGCCQGPEHHRNGGPLIPKKFQLNQHRRIKLSPLMMYEKLSMIRFRYRILRSQHFRTKSKVCKLRKAQRSWVQKVTGDHQETRRENGEGGSCSPFPSPEPKDPSCRHQPYFPDMDSSAVVKGTNSHVPDCHTKGSSFLGKELSLDEAFPDQQNGSATNAWDQSSCSSPKWECTELIHDIPLPEHRSNTMFISETEREIMTLGQENQTSSVSDDRVKLSVSGADTSVSSVDGPVSQKAVQNENSYQMEEDGSLKQSILSSELLDHPYCKSPLEAPLVCSGLKLENQVGGGKNSQKASPVDDEQLSVCLSGFLDEVMKKYGSLVPLSEKEVLGRLKDVFNEDFSNRKPFINREITNYRARHQKCNFRIFYNKHMLDMDDLATLDGQNWLNDQVINMYGELIMDAVPDKVHFFNSFFHRQLVTKGYNGVKRWTKKVDLFKKSLLLIPIHLEVHWSLITVTLSNRIISFYDSQGIHFKFCVENIRKYLLTEAREKNRPEFLQGWQTAVTKCIPQQKNDSDCGVFVLQYCKCLALEQPFQFSQEDMPRVRKRIYKELCECRLMD

SEQ ID NO: 244344 - DNA, 2268 bp, Artificial Sequence
  derived and/or modified sequence
atgaagaagcagagaaagatcctgtggagaaagggcatccacctggccttcagcgagaagtggaacaccggcttcggcggcttcaagaagttctacttccaccagcacctgtgcatcctgaaggccaagctgggcagacccgtgacctggaacagacagctgagacacttccagggcagaaagaaggccctgcagatccagaagacctggatcaaggacgagcccctgtgcgccaagaccaagttcaacgtggccacccagaacgtgagcaccctgagcagcaaggtgaagagaaaggacgccaagcacttcatcagcagcagcaagaccctgctgagactgcaggccgagaagctgctgagcagcgccaagaacagcgaccacgagtactgcagagagaagaacctgctgaaggccgtgaccgacttccccagcaacagcgccctgggccaggccaacggccacagacccagaaccgacccccagcccagcgacttccccatgaagttcaacggcgagagccagagccccggcgagagcggcaccatcgtggtgaccctgaacaaccacaagagaaagggcttctgctacggctgctgccagggccccgagcaccacagaaacggcggccccctgatccccaagaagttccagctgaaccagcacagaagaatcaagctgagccccctgatgatgtacgagaagctgagcatgatcagattcagatacagaatcctgagaagccagcacttcagaaccaagagcaaggtgtgcaagctgagaaaggcccagagaagctgggtgcagaaggtgaccggcgaccaccaggagaccagaagagagaacggcgagggcggcagctgcagccccttccccagccccgagcccaaggaccccagctgcagacaccagccctacttccccgacatggacagcagcgccgtggtgaagggcaccaacagccacgtgcccgactgccacaccaagggcagcagcttcctgggcaaggagctgagcctggacgaggccttccccgaccagcagaacggcagcgccaccaacgcctgggaccagagcagctgcagcagccccaagtgggagtgcaccgagctgatccacgacatccccctgcccgagcacagaagcaacaccatgttcatcagcgagaccgagagagagatcatgaccctgggccaggagaaccagaccagcagcgtgagcgacgacagagtgaagctgagcgtgagcggcgccgacaccagcgtgagcagcgtggacggccccgtgagccagaaggccgtgcagaacgagaacagctaccagatggaggaggacggcagcctgaagcagagcatcctgagcagcgagctgctggaccacccctactgcaagagccccctggaggcccccctggtgtgcagcggcctgaagctggagaaccaggtgggcggcggcaagaacagccagaaggccagccccgtggacgacgagcagctgagcgtgtgcctgagcggcttcctggacgaggtgatgaagaagtacggcagcctggtgcccctgagcgagaaggaggtgctgggcagactgaaggacgtgttcaacgaggacttcagcaacagaaagcccttcatcaacagagagatcaccaactacagagccagacaccagaagtgcaacttcagaatcttctacaacaagcacatgctggacatggacgacctggccaccctggacggccagaactggctgaacgaccaggtgatcaacatgtacggcgagctgatcatggacgccgtgcccgacaaggtgcacttcttcaacagcttcttccacagacagctggtgaccaagggctacaacggcgtgaagagatggaccaagaaggtggacctgttcaagaagagcctgctgctgatccccatccacctggaggtgcactggagcctgatcaccgtgaccctgagcaacagaatcatcagcttctacgacagccagggcatccacttcaagttctgcgtggagaacatcagaaagtacctgctgaccgaggccagagagaagaacagacccgagttcctgcagggctggcagaccgccgtgaccaagtgcatcccccagcagaagaacgacagcgactgcggcgtgttcgtgctgcagtactgcaagtgcctggccctggagcagcccttccagttcagccaggaggacatgcccagagtgagaaagagaatctacaaggagctgtgcgagtgcagactgatggactag

SEQ ID NO: 244345 - DNA, 2268 bp, Artificial Sequence
  derived and/or modified sequence
atgaaaaagcagaggaagattctctggagaaaaggcatccacttggcgtttagtgaaaaatggaacaccggtttcgggggatttaaaaaattttatttccatcaacacctatgcatacttaaagcaaaactggggagacctgtcacctggaatagacagctccgacactttcagggacggaaaaaggccctgcagatccaaaagacatggattaaagacgagcccctgtgcgccaagaccaaatttaacgtcgccacccagaatgtcagtacactgagttccaaggtgaagcgaaaagatgcgaaacacttcatctcttccagcaaaacacttctaagactccaagctgagaaactgctgtcgtctgccaagaactcagatcacgagtattgtagggagaaaaacctgctcaaggcggtgacagactttccttctaactctgccctgggacaggccaatggccacaggcccagaaccgatcctcagccctccgattttcctatgaaatttaatggggagagccagtcccctggagagtccgggactatagtggttacactgaacaaccacaagagaaaaggtttctgttacggttgttgtcaaggcccagaacaccacaggaatgggggacctctaattcctaaaaagttccagctcaaccagcacaggagaattaagctttcgccactgatgatgtacgaaaaactgtctatgattcgatttagatatcggatccttcggagtcagcattttcgaaccaaatccaaagtgtgtaagctcagaaaggctcagaggtcatgggtgcaaaaggtgactggggatcatcaggaaactagaagagagaacggggaaggtggaagctgttctccgtttccttccccagagcctaaggacccatcatgccggcaccaaccatatttccccgacatggatagctctgctgtggttaagggaaccaattcccatgtaccagactgccacacaaagggctcgagcttcctgggcaaagagctgtcgcttgatgaagcctttccagaccagcagaacggcagtgcaaccaatgcatgggaccagagcagttgctcatcccctaaatgggagtgtacagagctgatacatgacatccctctgcctgaacaccgatcgaacaccatgttcatctccgagactgaacgagaaatcatgaccctcggacaagagaaccagacaagttcagtgagtgacgacagagtgaagctgagcgttagcggggctgataccagtgtgagttccgtggatggtccagtttctcaaaaggccgttcagaatgagaactcataccagatggaagaggatgggtcactcaaacagtcgatcctttctagtgagctgctcgaccatccctattgtaaaagcccgcttgaggcacctctggtctgttctgggctcaagcttgagaaccaggttgggggcggtaaaaatagccagaaggcatctccagtcgacgacgagcagctatctgtttgcctgagcggctttttggacgaagttatgaaaaaatatggcagtctcgtaccactctccgagaaggaggtgctgggtagattgaaggatgtcttcaatgaagacttcagcaaccgcaaaccatttataaacagagaaatcaccaactaccgagcacggcaccagaagtgtaattttaggatcttctacaataaacacatgcttgatatggatgacttggctacactcgacggtcaaaattggctgaatgaccaggtgatcaatatgtatggtgaactgattatggacgctgttcccgacaaggtgcacttttttaatagttttttccacagacagctggtgacaaagggatataacggggtaaagagatggacgaaaaaagtagacctgttcaaaaagtctctgttgctaatcccaattcacctcgaagtccactggtctctcattaccgtgaccctatcaaataggataatctcattttacgattcccaggggattcattttaaattttgcgttgagaacattcgcaagtatttgttgaccgaagcaagggaaaaaaataggcctgagttcctgcaggggtggcagaccgctgtgacaaaatgcattcctcagcagaaaaacgattcagactgcggcgtgttcgtgctgcaatattgtaaatgtctggccctggagcagccattccaattttctcaagaggatatgcccagagtgcgcaaaaggatttacaaagaactgtgtgagtgtcggctcatggactag

SEQ ID NO: 244346 - DNA, 2268 bp, Artificial Sequence
  derived and/or modified sequence
atgaagaagcagaggaagatcctgtggaggaagggcatccacctggccttcagcgagaagtggaacacaggctttggaggcttcaagaagttctacttccaccagcacctgtgcatcctgaaggccaagctgggccggcctgtgacctggaaccggcagctgcggcacttccagggcaggaagaaggccctgcagatccagaagacctggatcaaggatgagcccctgtgtgccaagaccaagttcaacgtggccacccagaatgtgtccaccctgagcagcaaggtgaagaggaaggatgccaagcacttcatcagcagcagcaagaccctgctgcggctgcaggccgagaagctgctgagcagcgccaagaacagcgaccacgagtactgccgggagaagaacctgctgaaggctgtgacagacttccccagcaacagcgccctgggccaggccaacggccaccggcccaggacagacccccagcccagcgacttccccatgaagttcaatggagagagccagagccctggagagagcggcaccatcgtggtgaccctgaacaaccacaagaggaagggcttctgctacggctgctgccagggccctgagcaccacagaaatggaggccccctcatccccaagaagttccagctgaaccagcaccggcgcatcaagctgagccccctgatgatgtatgagaagctgtccatgatccgcttccgctaccgcatcctgcggagccagcacttccgcaccaagagcaaggtgtgcaagctgaggaaggcccagaggtcctgggtgcagaaggtgactggagaccaccaggagaccaggagagaaaatggagagggcggcagctgcagccccttccccagccctgagcccaaggaccccagctgccgccaccagccctacttcccagacatggacagcagcgctgtggtgaagggcaccaacagccacgtgcctgactgccacaccaagggcagcagcttcctgggcaaggagctgagcctggatgaggccttcccagaccagcagaatggaagtgccaccaatgcctgggaccagagcagctgcagcagccccaagtgggagtgcacagagctgattcatgacatccccctgcctgagcacaggagcaacaccatgttcatcagcgagacagagcgggagatcatgaccctgggccaggagaaccagaccagctctgtgtctgatgacagagtgaagctgtctgtgtctggagctgacacctctgtgtcctctgtggatggccctgtgtcccagaaggctgtgcagaatgaaaattcctaccagatggaggaggatggcagcctgaagcagagcatcctgagcagcgagctgctggaccacccctactgcaagagccccctggaggcccccctggtgtgcagcggcctgaagctggagaaccaggtgggcggcggcaagaacagccagaaggccagccctgtggatgatgagcagctgtctgtgtgcctgagcggcttcctggatgaggtgatgaagaagtatggcagcctggtgcccctgtctgagaaggaggtgctgggccgcctgaaggatgtgttcaatgaagacttcagcaacaggaagcccttcatcaaccgggagatcaccaactaccgggcccggcaccagaagtgcaacttccgcatcttctacaacaagcacatgctggacatggatgacctggccaccctggatggccagaactggctgaatgaccaggtgatcaacatgtatggagagctgatcatggatgctgtgcctgacaaggtgcacttcttcaacagcttcttccaccggcagctggtgaccaagggctacaacggggtgaagcgctggaccaagaaggtggacctcttcaagaagagcctgctgctgatccccatccacctggaggtgcactggagcctcatcaccgtgaccctgagcaaccgcatcatctccttctatgacagccagggcatccacttcaagttctgtgtggagaacatcaggaagtacctgctgacagaggcccgggagaagaacagacctgagttcctgcagggctggcagacagctgtgaccaagtgcatcccccagcagaagaatgacagcgactgtggggtgtttgtgctgcagtactgcaagtgcctggccctggagcagcccttccagttcagccaggaggacatgccccgggtgaggaagaggatctacaaggagctgtgtgagtgccgcctgatggactag

SEQ ID NO: 244347 - DNA, 2268 bp, Artificial Sequence
  derived and/or modified sequence
atgaagaagcagcggaagatcctgtggcggaagggcatccacctggcattctctgaaaagtggaacacaggcttcgggggatttaaaaaattttactttcaccagcacctttgtatcttgaaggcaaaattaggccgaccagtcacctggaacaggcagttgaggcacttccagggcagaaagaaagcattgcaaattcaaaaaacatggatcaaggatgagcctttgtgtgctaagaccaaattcaatgtggcgacacaaaatgtcagcactctatctagcaaggtgaagaggaaggatgcaaagcatttcataagttcatcaaaaacattactgaggttgcaggccgaaaagctcctgagcagcgcgaaaaattccgatcatgagtactgtcgagagaagaacctcttaaaggcagtaactgactttccctcaaattctgccttggggcaggctaatggccaccgacctcgcactgaccctcagccctctgatttccccatgaagtttaacggggaatcccaaagtcccggagagagtggcaccatcgtggtgactcttaataaccacaaacgcaaggggttttgttatggctgttgccaggggcctgagcaccacagaaatggtgggcccttgattcccaagaagttccagctgaatcagcaccgccgaataaaactctccccacttatgatgtatgagaaattgtccatgatccggttccgttataggatcctgcggtcacaacactttcggacgaagagcaaagtttgtaagttgagaaaggcacaacggtcttgggtccagaaggtcactggggaccaccaagaaacccggcgcgaaaacggcgagggggggtcttgtagtccattcccctcccccgaaccaaaagatccatcctgtcgtcaccagccatacttcccggatatggactctagcgccgtggtgaagggcacgaatagtcacgtgcctgattgccacacaaaaggctctagttttcttggcaaggaactcagcctcgatgaggcgtttcctgatcagcaaaacggcagtgccactaatgcttgggaccagagtagctgcagctcacccaaatgggagtgcaccgagctcattcacgatatccctttaccggaacacagatctaataccatgttcataagtgagacagaaagggagattatgacacttggccaggagaatcaaacctcctctgtctcagatgatcgagtgaagctgtccgtgagtggcgcagacacctccgtatcctctgttgacggccctgtaagtcagaaagccgtccaaaatgagaattcttatcagatggaagaagatggtagccttaaacagtcaattctgagctccgaactgctggatcacccttactgcaaatcaccactggaggctccccttgtctgctccggactaaaattggagaaccaagtgggtggtgggaaaaacagccagaaagcttcacccgtggatgatgagcagttatctgtgtgtttaagcggctttctggacgaggtgatgaagaagtatggatccctggtgcccctctccgagaaagaggtgctggggcgcctgaaggacgttttcaatgaggatttttcaaacaggaaaccattcattaacagagaaatcaccaactacagggccaggcaccagaagtgtaattttcggatcttctacaacaagcacatgctggacatggacgatctggcgactctggacggacaaaattggctgaatgaccaggtgatcaatatgtacggcgaactgataatggacgctgtgccagacaaagtccacttttttaatagctttttccataggcagcttgtgactaaaggctataatggtgtcaagcgctggacaaaaaaagttgacttatttaagaagtccttgttgctcataccaatccaccttgaagtgcactggagcctcataactgtgaccctgagcaatagaatcatttccttttacgattcacagggcatacacttcaaattctgcgtggagaatattcgcaaatatcttctgacagaggcccgggagaaaaatcgccccgagtttcttcaaggatggcagacagctgtgacaaagtgtattccacaacagaagaacgattccgattgcggtgtgtttgttctacagtactgtaagtgtctcgccctggaacaaccctttcagttctcccaggaagacatgccaagagtccgtaaaagaatctataaggaactttgcgaatgccgcttgatggactag

SEQ ID NO: 244348 - DNA, 2268 bp, Artificial Sequence
  derived and/or modified sequence
atgaagaagcagcgcaagatcctgtggcgtaagggaatccatctcgcgttttccgagaagtggaatacgggattcggaggcttcaagaagttctacttccatcagcacttgtgtattcttaaggccaaactgggtcgccctgtcacatggaatagacagttgaggcattttcaagggaggaaaaaagcactccagattcagaagacctggatcaaggacgaacctttgtgtgcaaaaactaaattcaatgtggcgactcagaacgtcagtactctctcttctaaagtcaaacggaaagacgccaagcattttatctcctctagtaaaacccttcttcgcttacaggcagagaagctcctgtcctctgctaagaattcagaccatgagtactgtcgcgagaagaacttattgaaagctgtgaccgactttcccagcaatagcgcactgggccaggctaacggccatcgccctcggacagatcctcaaccaagcgattttcccatgaaatttaatggggaatcccaatcaccaggagaaagtgggacaatagtggtcaccctgaacaatcacaagaggaaaggcttctgctacgggtgctgtcagggcccagagcaccatagaaacgggggtcctctgatacctaaaaagtttcagctcaaccagcaccgaagaataaaactcagtcctctgatgatgtatgagaagttgtcgatgattaggttcagatataggatccttagatcgcaacatttccgaaccaagagcaaggtgtgcaagttacgtaaagcacagaggtcctgggtccagaaggttaccggggatcatcaggagacaagacgggaaaatggggaaggagggagctgctccccctttccatccccagagcctaaagatccttcttgtcgtcaccagccgtattttcccgatatggacagcagtgcagtggtgaaaggcactaatagtcatgtgcccgattgccacactaagggttcttcattcttaggaaaggaactgagcctcgacgaggcgttcccagatcagcagaacggtagcgccaccaatgcctgggatcagtcatcttgtagttcccccaaatgggagtgcacagaactgattcatgacattcccctgcccgagcaccgcagcaacacaatgtttatctcagagaccgaacgggaaattatgaccttgggccaggagaaccagacaagttctgtgagtgatgatcgcgtgaagttaagcgtgagcggtgcagacacctctgtctcgtccgtcgatggccctgtaagccagaaggcagtgcagaacgaaaacagttaccagatggaagaggatggatctcttaagcaatccatcctgtcttccgagcttctggaccatccctattgcaagtcgccactggaggcacccctcgtctgtagcggtttgaagctcgagaaccaagtgggcggaggcaaaaatagccaaaaggccagcccagttgatgacgaacaactctcagtgtgtctctccgggttcctggacgaggtgatgaagaagtatggttcactggtgcctctgagtgaaaaagaagtgctcggtaggctgaaagacgtgtttaatgaggacttttctaaccgcaagccctttattaacagagagattacaaactaccgggcaagacaccagaagtgcaactttcggatattctataacaagcatatgctcgatatggacgacttagccacgcttgatggtcagaactggttaaatgatcaggtgatcaatatgtacggggaactgattatggacgccgtgcctgacaaagtgcatttcttcaactcattctttcaccgtcagctggttaccaagggttataatggagtaaagcgatggaccaaaaaagttgacttgttcaaaaagagcctgctgctgatccctattcatttggaggtgcattggtcgctgatcactgtaactttgtccaatcgtatcatttctttttatgacagccagggaatccactttaagttctgtgtggagaatattcgtaaatacctacttacagaagccagagagaagaatcgacctgaatttctgcagggttggcagactgccgtaacaaagtgtatcccccagcaaaagaacgattccgactgcggagtgttcgttctgcagtactgtaagtgtctcgctctggagcaaccatttcagttttctcaggaagatatgcctagagtgaggaagagaatttataaggagctctgtgaatgtcgcctaatggactag

SEQ ID NO: 244349 - DNA, 6308 bp, Artificial Sequence
  derived and/or modified sequence
gcaggcggaagggcgcggaggaggtgacgcgataggccagcgccggcgtcgcggcagccgcttcagaggaagctcggcggctgtggccgcggcgaacaggccggacgcctcgtcgctggcggggcttcccttggagctgacgaaggcggggtccgcggtccaggctgctgccgcgacggggccggcggcggggcagctgccaggaacgagggtagcagctgcatccagatctcattatgcatcagaaaaatgaaaaaacagaggaaaattctatggaggaaaggaatccacttagccttttctgagaaatggaatactgggtttggaggctttaagaagttttattttcaccaacacttgtgcattctgaaagctaagctgggaaggccagttacttggaatagacagttgagacatttccagggtagaaagaaagctcttcaaatccagaaaacgtggatcaaggatgaacccctttgtgctaagaccaagttcaatgtggctactcaaaatgttagtactttgtcctctaaagtgaaaagaaaggacgctaaacacttcatttcctcctcaaagactctcctgagactccaagcagagaagctgttgtcatcagcaaagaattctgaccatgaatactgcagagagaaaaatctcttgaaggcagttactgactttccatcaaatagtgctttaggtcaggccaatggtcacagacctaggacagacccacaaccttctgactttcccatgaagttcaatggggagagccaaagtccaggtgagagtggcacgattgtggtcaccttgaacaaccataagagaaagggcttttgttacggctgctgccaagggccggagcaccacaggaatgggggacccttgattccaaaaaagttccaacttaaccaacatagaaggataaaattatctcctcttatgatgtatgagaaattatccatgattagatttcggtacaggattctcagatcccagcacttcagaaccaaaagcaaggtttgcaagctaagaaaagcccagcgaagctgggtacagaaagtcactggggaccatcaagagacccgtagggagaacggtgagggtggcagttgcagcccatttccttccccagaacctaaagacccttcttgtcggcatcagccgtactttccagatatggacagcagtgctgtggtgaaggggacgaactctcatgtgcctgattgccacactaaaggaagctctttcttgggcaaggagcttagtttagacgaagcattccctgaccaacagaatggcagtgccacaaacgcctgggaccagtcatcctgttcttctcctaagtgggagtgtacagagctgattcatgacatccccttaccagaacatcgttctaataccatgttcatttcagaaactgaaagagaaattatgactctgggtcaggaaaatcagacaagttctgtcagtgatgacagagtaaaactgtcagtgtctggagcagatacatctgtgagtagcgtagatgggcctgtgtcccaaaaggctgttcaaaatgagaactcataccagatggaggaggatggatctctcaagcagagcattcttagttctgagttgctggaccacccttactgtaaaagtccactggaggctcccttggtgtgcagtggactcaaactagaaaatcaagtaggaggtggaaagaacagtcagaaagcctctccagtggatgatgaacagctgtcagtctgtctttctggattcctagatgaggttatgaagaagtatggcagtttggttccactcagtgaaaaagaagtccttggaagattaaaagatgtctttaatgaagacttttctaatagaaaaccatttatcaatagggaaataacaaactatcgggccagacatcaaaaatgtaacttccgtatcttctataataaacacatgctggatatggacgacctggcgactctggatggtcagaactggctgaatgaccaggtcattaatatgtatggtgagctgataatggatgcagtcccagacaaagttcacttcttcaacagcttttttcatagacagctggtaaccaaaggatataatggagtaaaaagatggactaaaaaggtggatttgtttaaaaagagtcttctgttgattcctattcacctggaagtccactggtctctcattactgtgacactctctaatcgaattatttcattttatgattcccaaggcattcattttaagttttgtgtagagaatataagaaagtatttgctgactgaagccagagaaaaaaatagacctgaatttcttcagggttggcagactgctgttacgaagtgtattccacaacagaaaaacgacagtgactgtggagtctttgtgctccagtactgcaagtgcctcgccttagagcagcctttccagttttcacaagaagacatgccccgagtgcggaagaggatttacaaggagctatgtgagtgccggctcatggactgaaactcagcagggactctgggaagtctgaccaagttggagcagatggtttgttacttgaatctccaaacacttagttgaatttttacagatatttcagatcagtggtgttgggccactattgttacctcaaatttattttttgcccttattcatttctccagctaccatgtactattgtttaatgttcagtttggtttcatttttaattttatggttctgtgcgtcccccatatttaatatttattattcaaacgcatgcatatagacagagcatgcagtgaagagtattaaaaaaaaaagcttagtagatttggtgcagcttttgaaacttagttagacgtgaactgaatacaggtttcaaatttactcccagaacctaaaaatgcaagatgtttttgatacaacataactctgagaatagtaagtgttccctggggcattaagggtagctgggggtggttttgacaaatccagtcctgttttactttaccagcggcaactttcaccaacttccctctccaagtgagtcttagagagtgcagtccattccttttgaagggtgagatggaagtggtcgtaaactgactggtgtcttctgtttctggaggcacacttgtaagcacagtggctgctttgggaggagtaaggtgtgagaaaaagcaaccttggaggccagtaacaatgacagatttcaatcgtggttttaggaattataatacgtggcatacatctcataaaggcttttgctgggatattgaattccctgaatttttctgttttcgacctgttaaaaaaatcttaacatccatcaaactagtggtcaaacaaatgagaatgcagctgttctcagagtaatttttaagttgtcatttccctgtgttgcctcccaattggaagaagttaaggtttaccaaatgcatttctatttcaagggtatctgaaacgtaaacattcaaaactgaaggctgactgacttgagatgttttgcaggtggctggagagaagagggaaggtaatagagacaacttagtcccatgggagcgcagcaaccgtgtcaggttctttctcctgtcccattagtgacctcagtaacatgcagggtacgtctggcttctgcatggccagtgctgacactagcacagctgttcttctccttctgttgaacctcatcttctgaagaaaggccaagtggcccttgtccatacacttagctgcattaggatgaatatcacgcgtctcacatctttaatccagcctttcgtgacatgttggaaagatacatgtgaaacctacccagttaccctttctgaattgggaggaaaaccaaccaatgtatgtatgagaaactcagaagtctgaatagaaaaacaaagtaaatggcagaagattctcgagtttatgcccgcgtaggtttggagtgttgaaaaagctaaaatgtttagtttcacttggccctgaggtatggttgagaaggctgactgccagcagttgaggattgagtccgaccatgtttacatgcagggttcccaacaccagtggtgacactgggaagcagccccagcactttcctctcctgagtcctccagacccaaaatccttaatgtcaaaccaggtcagtgtttcttactgtgtttcaagtcgttaaaaagactgagagtagaggcactttatgctgctataggtggggttctgtcagcgttaggaaaaaatgacagtttagggtaaggaagatctcataatgagtttttcaaacataattatgcaaacatgagatttttcaaaacatgccagaaatttgcctctgattttttttttttttttttttttttttttgtgggggtgtggtataccaaagtagccagtcactgggctgtcagttcaaaatgtcttgtacttcagagtgaggaagtgtttcagttcctcagtgacagaacctggcatgcagaagagacagaattgttcctgtaagaaaatcaacgccgagagagagctgcccaaatccagtgactcttccacttccagtctcatgcttcatagggcaccttgaggtgtgctgcccagtgtggcttagactaaatgttgagtttgggttttttgtttttttttttttttgagtcagagtctcactgtccctcaggctggagtgcaatggcgcaatcttgcctcactgcaacctccacctcccaggttcaagcgattctcctgcctcagcctcccaagtagctgggattacaggtgtgtgccaccacgccccaccgatttttgtacttttagtagagacaggatttcaccatgttggccaggctggtcttgaactcctgacctcaagtgatctgcccgcctgggcctcccaaagtgctgggattacaggcgggagccaccgtgcctggccaatgttaagtattttaaaagtcattttaaaatatttgtcattgatgaaacttggtttcagcacacgtaattgctttccctctcttcttgtgattaggtgtaaacctctatttaactcaagtcctagattagaatgtcctttgtcctgatgtttgcagtaattgcttccttggttaataaagatatttttgaaatatactctggactgttggtgaaagaggcaggcatggctttactggtactagtttggcactgaactgtttgggtgcccatgaggtaggcagaccttatgctttttttttttgagacggagtcttgctctgttgcccaggctggagtgcagtgatgtgatctcggctcactgcaacccctgcctcccaggttcaagtgattctcctgcctcagcttccccaatagctgggactacaggtgtgcgccaccactcccagctaatttttgtatttttagtagagacagggttttgccatgttggtcaggctggtctcggaactcctgacctcaggtgatccacccgcctctgcctcacaaagtgctgggattacaggcatgagctaccgtgcctggcctaaaccttacgcttttgaggttgagtgcaggccttgtgataactaagcgctacttttgacgagccttcaacaagctgcccagtcctctcctcagcagacgcatcaggttgtagttgcatctttacagtggtctttccttttattaaatctatagcagtgaatatagatttgattcaacttttagttacgttctctcaagaatcctaatcaactttcagttagcctcttaagaaagggaaaaaaaggtgctgccagtcatccccaaattatgtttttggctgtgcattctattttctacatagcactgaatctgagtaacagtcatcctggatttatagttggaacagaacagtaacagacctaactgggactcagccagcactagcctcatcttagctgccccttttctctgctttgcagtttactgcttccctgggctagccataacggggttctgggcaggtcagactcttcagcaagacagtgtattaatagtgtgaattagatacactgatgacctgctctgcctagttaagaaactgaattaatcagcagttacaaagcacatactttgttacgtgctaggctttgcctcctggcctctagataattaagacggcccagggaataccagcagagaagtgctaattgtatttgggtgttacaaaagcagacctagacgagctgttcacttaactggtacctgttggtcagaaaaagaatttatttagagattatgatcatgtaaaattacagtactcaacccttctagcaaagtatttttttgaaaaataaactaaatgcctttataaa

SEQ ID NO: 244350 - protein, 5058 aa, Artificial Sequence
  derived and/or modified sequence
MGHAGCQFKALLWKNWLCRLRNPVLFLAEFFWPCILFVILTVLRFQEPPRYRDICYLQPRDLPSCGVIPFVQSLLCNTGSRCRNFSYEGSMEHHFRLSRFQTAADPKKVNNLAFLKEIQDLAEEIHGMMDKAKNLKRLWVERSNTPDSSYGSSFFTMDLNKTEEVILKLESLHQQPHIWDFLLLLPRLHTSHDHVEDGMDVAVNLLQTILNSLISLEDLDWLPLNQTFSQVSELVLNVTISTLTFLQQHGVAVTEPVYHLSMQNIVWDPQKVQYDLKSQFGFDDLHTEQILNSSAELKEIPTDTSLEKMVCSVLSSTSEDEAEKWGHVGGCHPKWSEAKNYLVHAVSWLRVYQQVFVQWQQGSLLQKTLTGMGHSLEALRNQFEEESKPWKVVEALHTALLLLNDSLSADGPKDNHTFPKILQHLWKLQSLLQNLPQWPALKRFLQLDGALRNAIAQNLHFVQEVLICLETSANDFKWFELNQLKLEKDVFFWELKQMLAKNAVCPNGRFSEKEVFLPPGNSSIWGGLQGLLCYCNSSETSVLNKLLGSVEDADRILQEVITWHKNMSVLIPEEYLDWQELEMQLSEASLSCTRLFLLLGADPSPENDVFSSDCKHQLVSTVIFHTLEKTQFFLEQAYYWKAFKKFIRKTCEVAQYVNMQESFQNRLLAFPEESPCFEENMDWKMISDNYFQFLNNLLKSPTASISRALNFTKHLLMMEKKLHTLEDEQMNFLLSFVEFFEKLLLPNLFDSSIVPSFHSLPSLTEDILNISSLWTNHLKSLKRDPSATDAQKLLEFGNEVIWKMQTLGSHWIRKEPKNLLRFIELILFEINPKLLELWAYGISKGKRAKLENFFTLLNFSVPENEILSTSFNFSQLFHSDWPKSPAMNIDFVRLSEAIITSLHEFGFLEQEQISEALNTVYAIRNASDLFSALSEPQKQEVDKILTHIHLNVFQDKDSALLLQIYSSFYRYIYELLNIQSRGSSLTFLTQISKHILDIIKQFNFQNISKAFAFLFKTAEVLGGISNVSYCQQLLSIFNFLELQAQSFMSTEGQELEVIHTTLTGLKQLLIIDEDFRISLFQYMSQFFNSSVEDLLDNKCLISDNKHISSVNYSTSEESSFVFPLAQIFSNLSANVSVFNKFMSIHCTVSWLQMWTEIWETISQLFKFDMNVFTSLHHGFTQLLDELEDDVKVSKSCQGILPTHNVARLILNLFKNVTQANDFHNWEDFLDLRDFLVALGNALVSVKKLNLEQVEKSLFTMEAALHQLKTFPFNESTSREFLNSLLEVFIEFSSTSEYIVRNLDSINDFLSNNLTNYGEKFENIITELREAIVFLRNVSHDRDLFSCADIFQNVTECILEDGFLYVNTSQRMLRILDTLNSTFSSENTISSLKGCIVWLDVINHLYLLSNSSFSQGHLQNILGNFRDIENKMNSILKIVTWVLNIKKPLCSSNGSHINCVNIYLKDVTDFLNIVLTTVFEKEKKPKFEILLALLNDSTKQVRMSINNLTTDFDFASQSNWRYFTELILRPIEMSDEIPNQFQNIWLHLITLGKEFQKLVKGIYFNILENNSSSKTENLLNIFATSPKEKDVNSVGNSIYHLASYLAFSLSHDLQNSPKIIISPEIMKATGLGIQLIRDVFNSLMPVVHHTSPQNAGYMQALKKVTSVMRTLKKADIDLLVDQLEQVSVNLMDFFKNISSVGTGNLVVNLLVGLMEKFADSSHSWNVNHLLQLSRLFPKDVVDAVIDVYYVLPHAVRLLQGVPGKNITEGLKDVYSFTLLHGITISNITKEDFAIVIKILLDTIELVSDKPDIISEALACFPVVWCWNHTNSGFRQNSKIDPCNVHGLMSSSFYGKVASILDHFHLSPQGEDSPCSNESSRMEITRKVVCIIHELVDWNSILLELSEVFHVNISLVKTVQKFWHKILPFVPPSINQTRDSISELCPSGSIKQVALQIIEKLKNVNFTKVTSGENILDKLSSLNKILNINEDTETSVQNIISSNLERTVQLISEDWSLEKSTHNLLSLFMMLQNANVTGSSLEALSSFIEKSETPYNFEELWPKFQQIMKDLTQDFRIRHLLSEMNKGIKSINSMALQKITLQFAHFLEILDSPSLKTLEIIEDFLLVTKNWLQEYANEDYSRMIETLFIPVTNESSTEDIALLAKAIATFWGSLKNISRAGNFDVAFLTHLLNQEQLTNFSVVQLLFENILINLINNLAGNSQEAAWNLNDTDLQIMNFINLILNHMQSETSRKTVLSLRSIVDFTEQFLKTFFSLFLKEDSENKISLLLKYFHKDVIAEMSFVPKDKILEILKLDQFLTLMIQDRLMNIFSSLKETIYHLMKSSFILDNGEFYFDTHQGLKFMQDLFNALLRETSMKNKTENNIDFFTVVSQLFFHVNKSEDLFKLNQDLGSALHLVRECSTEMARLLDTILHSPNKDFYALYPTLQEVILANLTDLLFFINNSFPLRNRATLEITKRLVGAISRASEESHVLKPLLEMSGTLVMLLNDSADLRDLATSMDSIVKLLKLVKKVSGKMSTVFKTHFISNTKDSVKFFDTLYSIMQQSVQNLVKEIATLKKIDHFTFEKINDLLVPFLDLAFEMIGVEPYISSNSDIFSMSPSILSYMNQSKDFSDILEEIAEFLTSVKMNLEDMRSLAVAFNNETQTFSMDSVNLREEILGCLVPINNITNQMDFLYPNPISTHSGPQDIKWEIIHEVIPFLDKILSQNSTEIGSFLKMVICLTLEALWKNLKKDNWNVSNVLMTFTQHPNNLLKTIETVLEASSGIKSDYEGDLNKSLYFDTPLSQNITHHQLEKAIHNVLSRIALWRKGLLFNNSEWITSTRTLFQPLFEIFIKATTGKNVTSEKEERTKKEMIDFPYSFKPFFCLEKYLGGLFVLTKYWQQIPLTDQSVVEICEVFQQTVKPSEAMEMLQKVKMMVVRVLTIVAENPSWTKDILCATLSCKQNGIRHLILSAIQGVTLAQDHFQEIEKIWSSPNQLNCESLSKNLSSTLESFKSSLENATGQDCTSQPRLETVQQHLYMLAKSLEETWSSGNPIMTFLSNFTVTEDVKIKDLMKNITKLTEELRSSIQISNETIHSILEANISHSKVLFSALTVALSGKCDQEILHLLLTFPKGEKSWIAAEELCSLPGSKVYSLIVLLSRNLDVRAFIYKTLMPSEANGLLNSLLDIVSSLSALLAKAQHVFEYLPEFLHTFKITALLETLDFQQVSQNVQARSSAFGSFQFVMKMVCKDQASFLSDSNMFINLPRVKELLEDDKEKFNIPEDSTPFCLKLYQEILQLPNGALVWTFLKPILHGKILYTPNTPEINKVIQKANYTFYIVDKLKTLSETLLEMSSLFQRSGSGQMFNQLQEALRNKFVRNFVENQLHIDVDKLTEKLQTYGGLLDEMFNHAGAGRFRFLGSILVNLSSCVALNRFQALQSVDILETKAHELLQQNSFLASIIFSNSLFDKNFRSESVKLPPHVSYTIRTNVLYSVRTDVVKNPSWKFHPQNLPADGFKYNYVFAPLQDMIERAIILVQTGQEALEPAAQTQAAPYPCHTSDLFLNNVGFFFPLIMMLTWMVSVASMVRKLVYEQEIQIEEYMRMMGVHPVIHFLAWFLENMAVLTISSATLAIVLKTSGIFAHSNTFIVFLFLLDFGMSVVMLSYLLSAFFSQANTAALCTSLVYMISFLPYIVLLVLHNQLSFVNQTFLCLLSTTAFGQGVFFITFLEGQETGIQWNNMYQALEQGGMTFGWVCWMILFDSSLYFLCGWYLSNLIPGTFGLRKPWYFPFTASYWKSVGFLVEKRQYFLSSSLFFFNENFDNKGSSLQNREGELEGSAPGVTLVSVTKEYEGHKAVVQDLSLTFYRDQITALLGTNGAGKTTIISMLTGLHPPTSGTIIINGKNLQTDLSRVRMELGVCPQQDILLDNLTVREHLLLFASIKAPQWTKKELHQQVNQTLQDVDLTQHQHKQTRALSGGLKRKLSLGIAFMGMSRTVVLDEPTSGVDPCSRHSLWDILLKYREGRTIIFTTHHLDEAEALSDRVAVLQHGRLRCCGPPFCLKEAYGQGLRLTLTRQPSVLEAHDLKDMACVTSLIKIYIPQAFLKDSSGSELTYTIPKDTDKACLKGLFQALDENLHQLHLTGYGISDTTLEEVFLMLLQDSNKKSHIALGTESELQNHRPTGHLSGYCGSLARPATVQGVQLLRAQVAAILARRLRRTLRAGKSTLADLLLPVLFVALAMGLFMVRPLATEYPPLRLTPGHYQRAETYFFSSGGDNLDLTRVLLRKFRDQDLPCADLNPRQKNSSCWRTDPFSHPEFQDSCGCLKCPNRSASAPYLTNHLGHTLLNLSGFNMEEYLLAPSEKPRLGGWSFGLKIPSEAGGANGNISKPPTLAKVWYNQKGFHSLPSYLNHLNNLILWQHLPPTVDWRQYGITLYSHPYGGALLNKDKILESIRQCGVALCIVLGFSILSASIGSSVVRDRVIGAKRLQHISGLGYRMYWFTNFLYDMLFYLVSVCLCVAVIVAFQLTAFTFRKNLAATALLLSLFGYATLPWMYLMSRIFSSSDVAFISYVSLNFIFGLCTMLITIMPRLLAIISKAKNLQNIYDVLKWVFTIFPQFCLGQGLVELCYNQIKYDLTHNFGIDSYVSPFEMNFLGWIFVQLASQGTVLLLLRVLLHWDLLRWPRGHSTLQGTVKSSKDTDVEKEEKRVFEGRTNGDILVLYNLSKHYRRFFQNIIAVQDISLGIPKGECFGLLGVNGAGKSTTFKMLNGEVSLTSGHAIIRTPMGDAVDLSSAGTAGVLIGYCPQQDALDELLTGWEHLYYYCSLRGIPRQCIPEVAGDLIRRLHLEAHADKPVATYSGGTKRKLSTALALVGKPDILLLDEPSSGMDPCSKRYLWQTIMKEVREGCAAVLTSHSMEECEALCTRLAIMVNGSFKCLGSPQHIKNRFGDGYTVKVWLCKEANQHCTVSDHLKLYFPGIQFKGQHLNLLEYHVPKRWGCLADLFKVIENNKTFLNIKHYSINQTTLEQVFINFASEQQQTLQSTLDPSTDSHHTHHLPI

SEQ ID NO: 244351 - DNA, 15177 bp, Artificial Sequence
  derived and/or modified sequence
atggggcatgctggctgtcaattcaaggctttgctgtggaagaattggctgtgtcgcctgcgtaacccagtgctgtttttggcggaatttttttggccttgcattctttttgtgatcctaacagtactacggtttcaggagcctccacggtatagggatatctgttaccttcagcctcgagacctcccctcatgtggcgtcattcccttcgtccaatcccttttgtgtaacaccggaagtcggtgcagaaacttttcgtatgaaggatctatggaacaccatttccggctatccagatttcagacagccgccgaccccaaaaaggttaataacctggccttcctcaaagagattcaggatctggccgaggagatccatgggatgatggataaagcaaaaaacctgaaacgactgtgggtcgagagatctaatacaccggactccagttatggttcgtccttcttcaccatggacctcaataaaaccgaggaggtcatcttaaagcttgaaagcctccatcagcagccgcacatctgggatttcctgctgttactcccaagattgcatacttcgcacgatcatgttgaagatggaatggacgtagcagttaacctactgcagacgatcttgaactctctgatctcactggaggacctagactggcttccccttaatcaaaccttttcacaggtaagtgagctggtgctgaatgtgaccatctccaccttgactttcctacagcagcacggagtggcagtgactgagccagtgtaccacctctctatgcagaacattgtgtgggaccctcagaaagtacagtatgatttgaagtctcagttcgggtttgatgacctccacaccgagcagatcctcaattctagcgccgagctcaaagagatcccaaccgatacgagtctggaaaaaatggtatgtagtgtgctctctagcacttctgaagacgaagccgaaaagtgggggcatgtcggaggttgtcatcctaagtggtctgaggccaaaaattacctagtgcatgccgtcagttggctccgcgtgtaccagcaagtgtttgtccagtggcagcagggaagcctactgcagaagactctgacagggatgggccatagcctcgaggctctgcgaaaccagtttgaagaagaatcaaaaccttggaaggtagtagaggccttgcacaccgcgctattgctgttgaatgactccctgtctgcagacggacctaaggataatcatacatttccaaagatactgcagcacctgtggaagctgcagagcctcctccagaatttaccacagtggcccgctctgaaacggttcctgcagctcgacggggcattgaggaacgctattgcacaaaatctacacttcgttcaggaagtcttgatatgtttggagacctcagccaacgattttaaatggttcgagctgaaccaactcaagctcgagaaagacgtattcttctgggagcttaagcagatgttggccaagaatgccgtttgtcccaatggtcgattttccgaaaaggaagttttcctgccccctgggaactcctccatctggggcggtctgcagggcctgttgtgttattgcaacagctccgagactagcgtgctgaacaaattattgggttctgtcgaagacgctgaccgaatcctacaggaagtgattacctggcataagaatatgtccgtacttattcccgaagagtatctggactggcaagagctggaaatgcagctctccgaagcttctttgtcctgtaccaggctgttccttttgttgggcgccgacccatccccagagaacgacgtctttagtagcgattgcaagcatcaattggtgtctaccgtgatttttcacacactcgagaaaactcaattcttcttagagcaagcttactactggaaagctttcaaaaagttcattagaaaaacctgcgaggtggctcagtatgtgaacatgcaggagtccttccagaatcgtctcttggcttttcccgaggaatccccatgcttcgaagaaaacatggattggaagatgatatcagataattatttccagttcctcaacaacttactgaagtcacccacagcgagtatttcccgagctcttaatttcacaaagcatctgttgatgatggaaaagaagttacatacactggaagatgagcagatgaacttcctcctgtcctttgtagagtttttcgagaagttgctgctccccaacttatttgactcctcaatcgtcccatccttccactcactgccttcattaaccgaggatatcctcaatatctctagtctgtggaccaaccacctgaagtcacttaagcgtgacccctcggctacagacgcccagaagttgctggagttcggtaatgaagtgatctggaagatgcagacactcggctctcactggatcagaaaggagcccaagaatttgctacgtttcattgagttaatcctattcgaaattaatccaaagttgctcgagctttgggcttacggaatttctaagggcaaacgtgcaaagttggagaatttcttcaccctgctgaattttagtgtacccgaaaacgaaatcttatcaacttcttttaatttttcacagctgttccattcagactggccgaaaagcccagcgatgaatatcgatttcgttcgactgagtgaagccatcatcacgagcctgcatgaattcgggttcttggagcaggaacagatctccgaggctctgaacacggtctacgcaataaggaacgcatccgacctgttttctgcgctctccgagccccagaagcaagaggtcgataaaatccttactcatatccacctaaacgtgtttcaagataaggatagtgctctgctgcttcagatatactcttctttctatcgttacatctatgaactccttaatatccagtcgcgcggctcctccctgacttttttaacacaaatctccaagcacatcttggacattatcaagcaattcaactttcagaacatcagcaaggcgtttgcctttttgttcaagactgccgaagttctgggagggataagcaacgtgagctactgccagcagctgttatctatctttaattttcttgaactgcaagcacaatctttcatgagcaccgagggccaagagctcgaggtaattcatacaactctcaccggactgaaacaactccttattattgatgaggattttcgaatctcccttttccagtacatgtcccagttctttaattcatccgtggaggatttgcttgacaataaatgtctcatttctgacaataagcacataagcagtgtcaactattcaacttcggaggagtccagctttgtgtttcccctcgcacagattttttcaaacctgagcgcaaatgtgtcggtctttaacaagtttatgagtattcattgcacagtatcttggctccaaatgtggactgaaatctgggagaccattagtcagctctttaagttcgacatgaatgtgttcacgtccttacatcacggcttcacgcagctgctcgatgaacttgaagacgatgtaaaagtctcaaagtcttgccaggggattctcccaacccataatgtcgcacgcctgattctcaacctgttcaagaacgtaacacaggccaatgattttcacaactgggaggactttcttgatctacgcgacttcctggtcgcgctgggcaatgcccttgtgtcagtcaagaagttaaacctagaacaagtggaaaaatccctgttcaccatggaggctgcccttcaccagctcaaaacatttccgttcaacgagagtacctctcgggagtttctcaactcacttttggaggtcttcattgagttctcgtccacatctgagtatattgttcgaaatctggattccattaacgatttcctgagtaataacctcacaaactacggtgagaagtttgaaaatattattacagaactgagggaggcaatcgtattcctccggaatgtgtcgcacgatcgtgacctgtttagctgcgcggacatcttccaaaatgtgaccgagtgcatcctagaggatggcttcctctatgtgaataccagccaacgcatgttacggatccttgacacactgaactctaccttctcctccgagaacaccatatcttcacttaaaggctgtattgtgtggctcgatgtgattaatcatctctatctgttgagcaacagcagcttctctcaagggcatctccagaacattctcgggaattttcgagatatcgagaacaagatgaatagtatcctgaaaattgtcacctgggtactcaacatcaagaaaccactctgttctagcaatggcagccatataaattgcgtaaacatatatctgaaagacgtgacagattttctgaacatagttctcaccactgtgttcgaaaaagagaagaagcctaaatttgagatccttctcgcattactgaacgatagcaccaaacaggtgaggatgtccatcaataatctgaccactgattttgactttgcttctcaaagcaactggaggtacttcactgaactgatactgaggcccattgagatgtcagacgaaattcccaatcagttccagaacatatggttgcatctcatcaccttggggaaggagtttcagaagttggtgaaaggtatctacttcaacatcctggagaacaactcttcttcaaagactgagaaccttttgaacatctttgccaccagccctaaggaaaaggatgttaactccgtaggcaattctatttaccatcttgcctcctatctggcctttagtctcagccatgacctgcagaacagccccaagatcattatttcaccagagataatgaaggccactggactgggtatacagctcataagagatgttttcaattcccttatgcccgttgtccatcacacaagcccacaaaacgcagggtatatgcaagccttaaaaaaggtgacttcggtaatgcgaactttgaaaaaggccgacattgatctgctagtggatcaactggagcaggtctccgtgaatcttatggatttctttaagaatatttccagcgtgggtaccgggaacttggtcgttaatcttttggtgggcctgatggagaaattcgccgactcatctcactcttggaatgtaaaccacctactgcagctgtctaggctgttccccaaagacgttgttgacgcggtcatcgacgtttactacgtgctcccccatgctgtaagattactccagggcgttccagggaaaaacatcaccgaaggactgaaagacgtgtactcctttaccctgctgcacggcataacgattagtaatattaccaaggaagattttgccatcgttataaagattctgctcgacaccatcgagctcgtgtctgataagcctgacatcatctccgaagctctggcgtgcttccctgttgtttggtgctggaaccacactaattccggcttcagacagaattcaaagattgacccctgtaatgtccacggtctcatgagctcctctttctacggcaaggtagcctcaattcttgaccactttcacctgtctcctcagggtgaggatagtccttgctctaatgagagctcccgtatggaaattactagaaaggtggtctgtatcatacacgaattggtcgactggaactccatattgcttgaattaagcgaggtgtttcatgtcaacatcagtttagtgaaaaccgttcagaaattctggcacaagattttgccttttgtccccccttccatcaaccaaacccgagattctatctcggagttatgcccttctggcagcattaagcaggtggccttgcagatcatcgaaaaactgaaaaatgtgaactttaccaaggttacttccggagaaaatatattggataagttaagcagtcttaacaaaatcctgaacatcaacgaggatacagagacaagcgtgcagaacatcatctctagtaatctggagagaactgtacagctgatatcggaggactggagtctcgaaaagagtactcataacctgctcagcttgttcatgatgctgcagaatgccaacgtcacggggtcatcactggaggccctttccagctttatcgaaaagtctgagactccatacaactttgaagagctttggccaaaatttcagcagattatgaaggatctaacgcaagactttaggattcggcacctgctatccgagatgaataagggtatcaagtccatcaactccatggccctgcagaagatcaccctgcagtttgcccacttcctcgaaatcctcgattctccctcattgaagactctggagatcatcgaagatttccttctggtgaccaagaactggctccaggaatacgccaatgaggattactctcgcatgatcgagaccctgttcattcccgtgacaaatgagagcagtaccgaggatatcgcgttacttgctaaggcgattgccactttctggggtagtctcaagaatattagcagagctggcaatttcgacgtggcatttctgacccaccttctcaatcaggaacagctcaccaatttttcggtggtgcagttgctgttcgagaatatattaatcaatcttatcaataaccttgccgggaactcccaggaagccgcctggaacctaaatgacacagatcttcagatcatgaactttattaacctgatcctgaatcatatgcagagcgagacttctcgaaagaccgtgctgtccctgcgatctatcgtagacttcaccgagcagtttcttaaaacatttttcagcctttttctcaaggaggacagcgaaaataaaatatcgctgcttctgaagtattttcacaaagatgtgattgccgagatgtctttcgttcccaaagataaaatcctagaaatcctgaaactggatcagttcctgaccctgatgatccaggaccgcctcatgaatatattttctagtctcaaagaaaccatctatcacttgatgaagtcatcttttatactcgacaatggagaattctactttgatacgcaccaggggctcaagttcatgcaggacctttttaacgcgcttcttagggagacgtcgatgaaaaataaaacagaaaacaacattgactttttcactgtggtgtctcagctgttttttcatgtcaacaagagtgaggatttatttaagctgaatcaggacctcggctccgccctacacttggtgcgcgaatgttccacggagatggcccggctgctcgacactatcctgcacagtccaaacaaggacttttacgcactatacccaaccttgcaagaggttattctcgccaacctcaccgacctcctgttcttcatcaacaatagctttcctttgcgcaacagagcgaccctggaaattactaaaagattggtgggcgctatcagtcgagcctctgaggagtcccacgtgttgaagcctttactggaaatgtcggggactttggtcatgttgctgaacgattctgctgaccttcgcgacctggccacgagcatggactcaatcgtgaagctgttgaagttggtgaagaaggtgagcgggaaaatgagcactgtcttcaaaacccactttatcagcaatacgaaagactctgtaaagttcttcgatactctatatagcatcatgcagcagtccgtgcagaatctagtcaaagaaatcgccaccctcaagaagatcgaccactttactttcgaaaaaattaacgacctgttggtacctttcttggacctcgcgtttgagatgattggggtcgaaccctatatatcgagtaactccgatattttcagtatgtcgccctccatcctttcatatatgaaccagtccaaagatttcagcgacattctcgaggagattgcagagtttctaaccagcgtgaaaatgaacctggaagacatgcggtcactcgcagttgcgtttaataatgagactcaaacattctccatggattctgttaacctgcgagaagagattcttggctgcttggttcctatcaacaacatcaccaaccagatggacttcctctaccctaaccccatttcaacgcatagtggcccacaggatatcaagtgggagataatccatgaggttattccttttctggacaagatcttgtcacagaatagcacagaaatcggtagttttctgaagatggtgatttgtctgacactggaggccttgtggaagaacctgaagaaggacaattggaacgtgtcaaatgtcttaatgacctttacacaacaccctaacaacctcctgaagacaattgagaccgtgctggaagcttccagcggtattaagagcgactacgaaggcgatcttaataagtcactgtactttgacactcccctgtcacagaatatcacccaccaccagctggagaaggccatccataacgtgcttagccgcattgccctctggcgcaaaggattactgttcaataacagcgaatggataaccagcacacgcactctgtttcagcccttgttcgaaatcttcatcaaggccactacagggaagaacgtgacctctgaaaaagaggagcgaactaagaaggaaatgatcgatttcccctactcattcaagcccttcttctgtcttgaaaaatacctgggcggcctgtttgttctgaccaaatattggcagcagatccccctgactgatcaatcagtagttgaaatctgcgaagtttttcagcagaccgtgaagccatctgaagccatggagatgctgcaaaaagtgaagatgatggtggttcgagtgcttaccatcgtcgctgagaatccgtcttggaccaaagatatactctgtgccacactctcctgtaagcaaaatggaatccgccatcttatcctgtccgccattcagggcgttacactcgcccaggatcacttccaggagatcgagaagatatggagcagccctaaccaactaaactgtgagtcactaagcaagaacttaagctcgaccctcgaatcctttaaatctagtctggagaacgccaccgggcaggactgcacgagtcagccacggctggaaacagtacaacagcacctgtatatgcttgcaaagtctctggaagagacatggtcttccggcaacccaatcatgactttcctgagtaatttcacggtgaccgaggacgttaagattaaggatcttatgaagaacattacaaagctaaccgaggaactacgtagctcaatacagattagcaatgagaccattcatagtattctggaggctaacatctctcactcaaaagtgctttttagcgctttgaccgtcgctctttccggtaagtgcgaccaggagatactgcatttactgttgacattccctaaaggggaaaaatcttggattgcagctgaagaattgtgtagcttgcccggctccaaagtgtattccctcattgtgctgctgtcgcgaaacctggatgtgagggccttcatctataaaacactgatgccctcagaagccaacgggctgctgaatagccttttggacatagtgagtagtctgtccgcgctgctcgccaaagcacagcatgtctttgaataccttcccgagttccttcacacatttaagattactgccttacttgagactctggatttccaacaggtgtcccagaacgtgcaggctaggagcagcgctttcggctccttccagttcgtcatgaagatggtgtgcaaagaccaagcatcttttctgagcgatagcaatatgttcatcaacttgccacgggttaaggagctgctcgaggatgataaggagaaattcaacatccccgaagactccacccctttctgcctgaagttataccaggaaatacttcagctgcccaatggcgccttggtctggacatttctgaagcccattctgcacggcaaaattctttacactcctaatactcctgaaattaataaggtgattcagaaggccaattataccttctacatcgtcgacaagcttaagacactgtcagaaaccctgcttgagatgtcctcactgttccaacgcagcggtagtggtcaaatgtttaaccagctgcaggaggccctcaggaacaaattcgtgcgcaattttgtagaaaatcagctgcacatcgatgttgacaagctgaccgagaagctccagacgtacgggggactgctggacgagatgttcaaccacgccggagctggtcgattccgttttctgggctccattctcgttaacctgagtagttgcgttgccctaaatcgcttccaggctctgcaatccgttgacatcctggaaactaaagcacacgagcttctgcagcaaaattcattcctggcctccatcatcttcagcaactctttgttcgacaagaatttccggtctgaaagcgtcaagctgcccccacatgtgtcctacaccattcgaacaaacgtactctattccgttcgaaccgacgtggtcaaaaatcctagctggaagttccacccccagaacctgcccgcagacggctttaaatataattacgtttttgcccccctgcaggatatgatcgagcgggcaatcatcctcgtgcagacaggccaggaagcactggagcctgccgcacagacacaagccgcgccgtatccgtgtcataccagcgatctgtttctgaataatgtcggcttctttttccctctcataatgatgcttacttggatggtgtccgtagcatccatggtgcgaaaactggtctatgaacaggagatccaaatcgaagaatacatgcgtatgatgggagtccatcctgtgattcactttcttgcttggttcctcgagaacatggctgttctgacaattagctcagccacgctggctatcgttctgaagacctccggcattttcgcacactccaatacctttatagtatttctgttccttctggacttcgggatgagtgtggtgatgctctcgtatttactgtccgccttcttttctcaagccaacacagccgccctttgtacctcactggtgtacatgattagtttcctcccctatattgtgctactcgtgcttcataaccagctgagtttcgttaaccaaacttttttgtgccttctctccactaccgcttttgggcagggggtttttttcatcacatttctggagggccaggaaacggggatccaatggaacaatatgtatcaggccctagaacagggggggatgacatttgggtgggtatgctggatgatcctatttgatagttccctctactttctgtgtgggtggtacttaagcaacctgattcctggcacatttgggcttcgaaagccatggtactttccttttaccgcttcttactggaagtcagttggattcttggtggaaaaaagacagtactttctgagttcaagtctgtttttctttaatgagaactttgacaacaaagggtcttccctgcagaatcgggagggggagttagaaggctcagcacccggcgtcacacttgtgagcgttaccaaagagtatgaggggcacaaggctgtggtccaggacctgagtctgaccttctaccgagaccagataaccgcgctcctcgggacaaatggggccggtaagacgacaatcataagcatgctgactgggctccatccccccacgtcgggcacaataattattaacggcaagaacttacaaactgatctctctcgcgttagaatggaactgggtgtttgtccacagcaggacattctcctggacaacttgactgtgcgcgaacacctgttactgtttgctagcatcaaggccccacaatggacaaagaaggagctgcaccagcaggtgaaccagacgcttcaggacgtcgatctcacccagcaccaacacaagcagacccgtgctctgtccggcggcttgaagcgaaagctctctttaggtattgcattcatggggatgtcaaggacagttgttttggatgagccaaccagcggagttgacccctgcagccgccattccctgtgggacatattgctgaagtaccgggaagggaggaccattatctttactactcaccacctggatgaggccgaagccctctccgaccgggtggcggtgctgcagcatgggaggctgcggtgctgcgggccgcccttctgcctgaaggaagcctacggccaggggttaaggctgactctgacgcgccaaccctccgtgctggaagcccacgacctgaaggatatggcttgcgtcacttctctgatcaaaatctacatcccgcaggccttcctgaaggactcctcaggctccgagctcacctacacaatccctaaagacacagacaaggcgtgtctcaagggactcttccaggctcttgatgaaaatctgcaccagctccacctgactggatacggaattagtgataccacgctggaggaggtctttcttatgctgctccaagattctaataagaaatcccatatcgccctgggaaccgaatccgagctacaaaatcaccggcctacaggacatctgagcggctactgcggaagtttggctcgccccgccacagtgcagggtgtgcaattgttaagagcccaggtggcagccattctggcccgacgactgcgccggactctgagggccggaaaaagcactctagccgatctgctcctgccagttctatttgttgccctcgctatggggttattcatggttagacctttagctacagagtacccgcccctgaggctgactccgggccattaccagcgtgcagaaacatactttttcagcagcggcggggacaacttggatcttacccgagtcctgttacgcaagttcagagaccaggacctaccctgcgcagacctcaacccccggcaaaagaactccagctgttggcggacggatcccttttcccatccagaatttcaggacagttgcggatgtctgaaatgtccgaatcggtcagcctcagcaccctacctgactaaccatctgggtcataccctgctgaacctatctggattcaatatggaagagtacctgctggctccctccgagaaacccaggctgggaggatggagcttcggactgaaaatcccctccgaggcgggcggtgctaatggtaacatctctaagccccctaccctggccaaagtgtggtacaatcaaaaaggatttcatagtctaccttcttaccttaatcatctcaacaatcttattctctggcagcacttaccgccaacggtcgactggcgccagtacggcattaccctctattctcatccttatgggggcgccctgctgaataaagataagattcttgagtcaatacggcagtgcggcgtggcgctgtgcatagtactgggttttagcatcctctcggcctcaattgggtcctctgtagtgcgcgaccgcgttattggggccaaacgtctccaacacatttccggactaggctacaggatgtattggtttacgaactttctgtacgacatgttattctacctcgtgagtgtctgtttatgtgtcgccgtgatagtggctttccaactcaccgccttcacattccgaaagaaccttgcagcaactgctcttcttttgagcttgttcggctacgccacactcccatggatgtacctgatgtcaaggatcttctcatcaagtgatgtggctttcatctcatatgtgagcctaaatttcattttcggactctgcaccatgctcatcacgataatgcctcgccttctggcgataatctcaaaggctaagaatcttcagaacatatatgacgtgttgaagtgggtctttactatattcccacagttttgtctaggtcaaggcctagttgaactgtgttacaatcagattaaatacgatctgacgcataacttcgggatcgattcctacgttagccccttcgaaatgaatttcctggggtggatcttcgttcagttggcctcacaggggaccgtgttgctgctgctacgggtgctgctgcactgggatctactgcggtggcctcgcggccatagcacactgcaaggcaccgttaagtcttcaaaggataccgacgtggaaaaggaggaaaagagagtttttgaggggcgtacaaacggcgacatcctggtcttgtataatctgtcgaaacactataggagattctttcagaacattatcgcggtccaagatataagcttagggatcccgaaaggtgaatgtttcggactcctgggcgtgaatggcgcaggcaagtcaaccacgtttaagatgctgaatggagaagtatccttgacgagcggacacgcaatcattcgtacccccatgggggacgctgtggatctaagctcagcaggcacagcgggagtgctcatcggttactgtccgcagcaggatgcgctcgatgagctcttgacagggtgggaacacttgtattactactgctccctccggggcattccgcgtcaatgcattccagaggtggccggggacctgatccgtagactccatctggaggcccacgctgacaagcctgtggctacttattcaggaggtaccaagagaaaactgagtacagccctcgctctcgtgggcaagccagatatcctgctgttagacgaaccatctagcggcatggacccttgcagcaaacgctatctgtggcagactataatgaaggaagtgcgagaaggatgtgcagccgtgctgacctctcacagtatggaagaatgtgaggcactgtgtacccggttagcgattatggtgaacgggtccttcaaatgcctgggtagcccgcagcacatcaaaaatcggtttggggacggctacaccgttaaggtgtggttatgcaaggaagccaatcagcactgcacagtgagcgaccacttgaaactgtactttccgggaattcagtttaagggccaacacctcaatcttctcgagtaccacgtgcccaagcgctggggctgtcttgctgacctgtttaaagtcattgagaataacaagacttttctgaacataaaacactatagcattaaccaaaccactttggaacaggtttttataaactttgcctctgagcaacaacagaccctccaatctacactggacccatccactgacagtcaccatacccatcaccttcctatttag

SEQ ID NO: 244352 - DNA, 15177 bp, Artificial Sequence
  derived and/or modified sequence
atgggccacgccggctgccagttcaaggccctgctgtggaagaactggctgtgccgcctgagaaatcctgtgctcttcctggccgagttcttctggccctgcatcctgtttgtgatcctgactgtgctgcgcttccaggagcccccacgctacagagacatctgctacctgcagccccgggacctgcccagctgtggggtcatcccctttgtgcagagcctgctgtgcaacacaggcagccgctgcaggaacttctcctatgagggctccatggagcaccacttccggctgagccgcttccagacagctgctgaccccaagaaggtgaacaacctggccttcctgaaggagatccaggacctggccgaggagatccacggcatgatggacaaggccaagaacctgaagaggctgtgggtggagaggagcaacaccccagacagcagctatggcagcagcttcttcaccatggacctgaacaagacagaggaggtgatcctgaagctggagagcctgcaccagcagccccacatctgggacttcctgctgctgctgccccggctgcacaccagccatgaccacgtggaggatggcatggatgtggccgtgaacctgctgcagaccatcctgaacagcctcatcagcctggaggacctggactggctgcccctgaaccagaccttcagccaggtgtctgagctggtgctgaatgtgaccatcagcaccctgaccttcctgcagcagcacggcgtggccgtgacagagcctgtgtaccacctgtccatgcagaacatcgtgtgggacccccagaaggtgcagtatgacctgaagagccagtttggatttgatgacctgcacacagagcagatcctgaacagcagcgctgagctgaaggagatccccacagacaccagcctggagaagatggtgtgcagcgtgctgagcagcaccagtgaagatgaggccgagaagtggggccacgtgggcggctgccaccccaagtggagcgaggccaagaactacctggtgcatgctgtgtcctggctgcgggtgtaccagcaggtgtttgtgcagtggcagcagggcagcctgctgcagaagaccctgaccggcatgggccacagcctggaggccctgaggaaccagtttgaggaggagagcaagccctggaaggtggtggaggccctgcacacagccctgctgctgctgaatgacagcctgtctgcagatggccccaaggacaaccacaccttccccaagatcctgcagcacctgtggaagctgcagagcctgctgcagaacctgccccagtggccagccctgaagcgcttcctgcagctggatggagccctgagaaatgccatcgcccagaacctgcactttgtgcaggaggtgctgatctgcctggagaccagcgccaatgacttcaagtggtttgagctgaaccagctgaagctggagaaggatgtgttcttctgggagctgaagcagatgctggccaagaatgctgtgtgccccaacggccgcttcagcgagaaggaggtgttcctgcccccaggcaacagcagcatctggggcggcctgcagggcctgctgtgctactgcaacagcagcgagacctctgtgctgaacaagctgctgggctctgtggaggatgctgaccgcatcctgcaggaggtgatcacctggcacaagaacatgtctgtgctgatccctgaggagtacctggactggcaggagctggagatgcagctgtctgaggccagcctgagctgcaccaggctcttcctgctgctgggcgctgaccccagcccagaaaatgatgtgttcagcagtgactgcaagcaccagctggtgtccaccgtcatcttccacaccctggagaagacccagttcttcctggagcaggcctactactggaaggccttcaagaagttcatcaggaagacctgtgaggtggcccagtatgtgaacatgcaggagagcttccagaaccggctgctggccttccctgaggagagcccctgctttgaggagaacatggactggaagatgatcagtgacaactacttccagttcctgaacaacctgctgaagagccccacagccagcatcagccgggccctgaacttcaccaagcacctgctgatgatggagaagaagctgcacaccctggaggatgagcagatgaacttcctgctgagctttgtggagttctttgagaagctgctgctgcccaacctgtttgacagcagcatcgtgcccagcttccacagcctgcccagcctgacagaggacatcctgaacatcagcagcctgtggaccaaccacctgaagagcctgaagagggaccccagcgccacagatgcccagaagctgctggagtttggaaatgaggtgatctggaagatgcagaccctgggcagccactggatcaggaaggagcccaagaacctgctgcgcttcatcgagctgatcctgtttgagatcaaccccaagctgctggagctgtgggcctacggcatcagcaagggcaagagggccaagctggagaacttcttcaccctgctgaacttctctgtgcctgaaaatgagatcctgagcaccagcttcaacttcagccagctgttccacagcgactggcccaagagccctgccatgaacatcgactttgtgcggctgtctgaggccatcatcaccagcctgcatgaatttggcttcctggagcaggagcagatcagcgaggccctgaacacagtgtatgccatcagaaatgccagtgacctcttcagcgccctgtctgagccccagaagcaggaggtggacaagatcctgacccacatccacctgaatgtgttccaggacaaggacagcgccctgctgctgcagatctacagcagcttctaccgctacatctatgagctgctgaacatccagagccggggcagcagcctgaccttcctgacccagatcagcaagcacatcctggacatcatcaagcagttcaacttccagaacatcagcaaggcctttgccttcctgttcaagacagctgaggtgctgggcggcatcagcaatgtgtcctactgccagcagctgctgagcatcttcaacttcctggagctgcaggcccagagcttcatgagcacagagggccaggagctggaggtgatccacaccaccctgaccggcctgaagcagctgctgatcattgatgaggacttccgcatcagcctcttccagtacatgagccagttcttcaacagctctgtggaggacctgctggacaacaagtgcctgatcagtgacaacaagcacatcagctctgtgaactacagcaccagcgaggagagcagctttgtgttccccctggcccagatcttcagcaacctgagcgccaacgtgtctgtgttcaacaagttcatgagcatccactgcaccgtgtcctggctgcagatgtggacagagatctgggagaccatcagccagctgttcaagtttgacatgaatgtgttcaccagcctgcaccacggcttcacccagctgctggatgagctggaggatgatgtgaaggtgtccaagagctgccagggcatcctgcccacccacaacgtggcccggctcatcctgaacctcttcaagaatgtgacccaggccaatgacttccacaactgggaggacttcctggacctgcgggacttcctggtggccctgggcaatgccctggtgtctgtgaagaagctgaacctggagcaggtggagaagagcctcttcaccatggaggccgccctgcaccagctgaagaccttccccttcaatgaaagcaccagccgggagttcctgaacagcctgctggaggtgttcatcgagttcagcagcaccagcgagtacatcgtgaggaacctggacagcatcaatgacttcctgagcaacaacctgaccaactacggggagaagtttgagaacatcatcacagagctgcgggaggccatcgtgttcctgagaaatgtgtcccatgaccgggacctcttcagctgtgccgacatcttccagaatgtgacagagtgcatcctggaggatggcttcctgtatgtgaacaccagccagaggatgctgcgcatcctggacaccctgaacagcaccttcagcagcgagaacaccatcagcagcctgaagggctgcatcgtgtggctggatgtgatcaaccacctgtacctgctgagcaacagcagcttcagccagggccacctgcagaacatcctgggcaacttccgggacatcgagaacaagatgaacagcatcctgaagatcgtgacctgggtgctgaacatcaagaagcccctgtgcagcagcaatggcagccacatcaactgtgtgaacatctacctgaaggatgtgacagacttcctgaacatcgtgctgaccaccgtgtttgagaaggagaagaagcccaagtttgagatcctgctggccctgctgaatgacagcaccaagcaggtgaggatgagcatcaacaacctgaccacagactttgattttgccagccagagcaactggagatacttcacagagctgatcctgcggcccatcgagatgtctgatgagatccccaaccagttccagaacatctggctgcacctgatcaccctgggcaaggagttccagaagctggtgaagggcatctacttcaacatcctggagaacaacagcagcagcaagacagagaacctgctgaacatctttgccaccagccccaaggagaaggatgtgaacagcgtgggcaacagcatctaccacctggccagctacctggccttcagcctgagccatgacctgcagaacagccccaagatcatcatcagccctgagatcatgaaggccaccggcctgggcatccagctgatcagagatgtgttcaacagcctgatgcctgtggtgcaccacaccagcccccagaatgccggctacatgcaggccctgaagaaggtgacctctgtgatgaggaccctgaagaaggctgacatcgacctgctggtggaccagctggagcaggtgtctgtgaacctgatggacttcttcaagaacatcagctctgtgggcactggaaacctggtggtgaacctgctggtgggcctgatggagaagtttgctgacagcagccacagctggaatgtgaaccacctgctgcagctgagccgcctcttccccaaggatgtggtggatgctgtgattgatgtgtactacgtgctgccccatgctgtgcggctgctgcagggcgtgcctgggaagaacatcacagagggcctgaaggatgtgtacagcttcaccctgctgcacggcatcaccatcagcaacatcaccaaggaggactttgccatcgtcatcaagatcctgctggacaccatcgagctggtgtctgacaagccagacatcatcagcgaggccctggcctgcttccctgtggtgtggtgctggaaccacaccaacagcggcttccggcagaacagcaagattgacccctgcaatgtgcacggcctgatgagcagcagcttctacggcaaggtggccagcatcctggaccacttccacctgagcccccagggcgaggacagcccctgcagcaatgaaagcagcaggatggagatcaccaggaaggtggtgtgcatcatccacgagctggtggactggaacagcatcctgctggagctgtctgaggtgttccacgtgaacatcagcctggtgaagacagtgcagaagttctggcacaagatcctgccctttgtgcccccatccatcaaccagacccgggacagcatcagcgagctgtgccccagcggcagcatcaagcaggtggccctgcagatcatcgagaagctgaagaatgtgaacttcaccaaggtgaccagcggggagaacatcctggacaagctgagcagcctgaacaagatcctgaacatcaatgaagacacagagacctctgtgcagaacatcatcagcagcaacctggagaggacagtgcagctgatcagcgaggactggagcctggagaagagcacccacaacctgctgagcctcttcatgatgctgcagaatgccaacgtgacaggcagcagcctggaggccctgagcagcttcatcgagaagtctgagaccccctacaactttgaggagctgtggcccaagttccagcagatcatgaaggacctgacccaggacttccgcatccgccacctgctgtctgagatgaacaagggcatcaagagcatcaacagcatggccctgcagaagatcaccctgcagtttgcccacttcctggagatcctggacagccccagcctgaagaccctggagatcatcgaggacttcctgctggtgaccaagaactggctgcaggagtatgccaatgaagactacagcaggatgattgagaccctcttcatccctgtgaccaatgaaagcagcacagaggacatcgccctgctggccaaggccatcgccaccttctggggcagcctgaagaacatcagccgggccggcaactttgatgtggccttcctgacccacctgctgaaccaggagcagctgaccaacttctctgtggtgcagctgctgtttgagaacatcctgatcaacctgatcaacaacctggccggcaacagccaggaggccgcctggaacctgaatgacacagacctgcagatcatgaacttcatcaacctgatcctgaaccacatgcagagcgagaccagcaggaagacagtgctgagcctgcggagcatcgtggacttcacagagcagttcctgaagaccttcttcagcctcttcctgaaggaggacagcgagaacaagatcagcctgctgctgaagtacttccacaaggatgtgattgctgagatgagctttgtgcccaaggacaagatcctggagatcctgaagctggaccagttcctgaccctgatgatccaggaccggctgatgaacatcttcagcagcctgaaggagaccatctaccacctgatgaagagcagcttcatcctggacaacggggagttctactttgacacccaccagggcctgaagttcatgcaggacctcttcaatgccctgctgcgggagacctccatgaagaacaagacagagaacaacatcgacttcttcaccgtggtgtcccagctgttcttccacgtgaacaagtctgaggacctcttcaagctgaaccaggacctgggcagcgccctgcacctggtgcgggagtgcagcacagagatggcccggctgctggacaccatcctgcacagccccaacaaggacttctacgccctgtaccccaccctgcaggaggtgatcctggccaacctgacagacctgctcttcttcatcaacaacagcttccccctgaggaacagagccaccctggagatcaccaagaggctggtgggcgccatcagccgggccagcgaggagagccacgtgctgaagcccctgctggagatgagcggcaccctggtgatgctgctgaatgattctgctgacctgcgggacctggccacctccatggacagcatcgtgaagctgctgaagctggtgaagaaggtgtctgggaagatgagcaccgtcttcaagacccacttcatcagcaacaccaaggacagcgtgaagttctttgacaccctgtacagcatcatgcagcagagcgtgcagaacctggtgaaggagatcgccaccctgaagaagattgaccacttcacctttgagaagatcaatgacctgctggtgcccttcctggacctggcctttgagatgattggagtggagccctacatcagcagcaacagcgacatcttctccatgagccccagcatcctgagctacatgaaccagagcaaggacttcagtgacatcctggaggagattgctgagttcctgacctctgtgaagatgaacctggaggacatgaggagcctggccgtggccttcaacaatgagacccagaccttctccatggacagcgtgaacctgcgggaggagatcctgggctgcctggtgcccatcaacaacatcaccaaccagatggacttcctgtaccccaaccccatcagcacccacagcggcccccaggacatcaagtgggagatcatccacgaggtgatccccttcctggacaagatcctgagccagaacagcacagaaattggcagcttcctgaagatggtgatctgcctgaccctggaggccctgtggaagaacctgaagaaggacaactggaatgtgtccaatgtgctgatgaccttcacccagcaccccaacaacctgctgaagaccattgaaacagtgctggaggccagcagcggcatcaagagtgactatgaaggagacctgaacaagagcctgtactttgacacccccctgagccagaacatcacccaccaccagctggagaaggccatccacaacgtgctgagcagaattgccctgtggaggaagggcctgctcttcaacaacagcgagtggatcaccagcaccaggaccctcttccagcccctgtttgagatcttcatcaaggccaccaccgggaagaatgtgaccagcgagaaggaggagaggaccaagaaggagatgattgacttcccctacagcttcaagcccttcttctgcctggagaagtacctgggcggcctgtttgtgctgaccaagtactggcagcagatccccctgacagaccagagcgtggtggagatctgtgaggtgttccagcagacagtgaagcccagcgaggccatggagatgctgcagaaggtgaagatgatggtggtgcgggtgctgaccatcgtggccgagaaccccagctggaccaaggacatcctgtgtgccaccctgagctgcaagcagaatggcatccgccacctgatcctgagcgccatccagggcgtgaccctggcccaggaccacttccaggagattgagaagatctggagcagccccaaccagctgaactgtgagagcctgagcaagaacctgagcagcaccctggagagcttcaagagcagcctggagaatgccaccggccaggactgcaccagccagccccggctggagaccgtgcagcagcacctgtacatgctggccaagagcctggaggagacctggagcagcggcaaccccatcatgaccttcctgagcaacttcaccgtgacagaagatgtgaagatcaaggacctgatgaagaacatcaccaagctgacagaggagctgcggagcagcatccagatcagcaatgagaccatccacagcatcctggaggccaacatcagccacagcaaggtgctcttcagcgccctgactgtggccctgagcgggaaatgtgaccaggagatcctgcacctgctgctgaccttccccaagggggagaagtcctggattgctgctgaggagctgtgcagcctgcccggcagcaaggtgtacagcctgattgtgctgctgagcaggaacctggatgtgcgggccttcatctacaagaccctgatgcccagcgaggccaacggcctgctgaacagcctgctggacatcgtgagcagcctgagcgccctgctggccaaggcccagcacgtgtttgagtacctgcctgagttcctgcacaccttcaagatcacagccctgctggagaccctggacttccagcaggtgtcccagaatgtgcaggcccggagcagcgccttcggcagcttccagtttgtgatgaagatggtgtgcaaggaccaggccagcttcctgagtgacagcaacatgttcatcaacctgccccgggtgaaggagctgctggaggatgacaaggagaagttcaacatccctgaggacagcacccccttctgcctgaagctgtaccaggagatcctgcagctgcccaacggggccctggtgtggaccttcctgaagcccatcctgcacggcaagatcctgtacacccccaacaccccagagatcaacaaggtgatccagaaggccaactacaccttctacatcgtggacaagctgaagaccctgtctgagaccctgctggagatgagcagcctcttccagaggagcggcagcggccagatgttcaaccagctgcaggaggccctgaggaacaagtttgtgaggaactttgtggagaaccagctgcacattgatgtggacaagctgacagagaagctgcagacctatggaggcctgctggatgagatgttcaaccacgccggggccggccgcttccgcttcctgggcagcatcctggtgaacctgagcagctgtgtggccctgaaccgcttccaggccctgcagagcgtggacatcctggagaccaaggcccacgagctgctgcagcagaacagcttcctggccagcatcatcttcagcaacagcctgtttgacaagaacttccgctctgagagcgtgaagctgccccctcatgtgtcctacaccatccgcaccaacgtgctgtacagcgtgaggacagatgtggtgaagaaccccagctggaagttccacccccagaacctgcctgcagatggcttcaagtacaactacgtgtttgcccccctgcaggacatgattgagcgggccatcatcctggtgcagacaggccaggaggccctggagcctgctgcccagacccaggccgccccctacccctgccacaccagtgacctcttcctgaacaacgtgggcttcttcttccccctcatcatgatgctgacctggatggtgtctgtggcctccatggtgaggaagctggtgtatgagcaggagatccagatcgaggagtacatgaggatgatgggcgtgcaccctgtgatccacttcctggcctggttcctggagaacatggctgtgctgaccatcagcagcgccaccctggccatcgtgctgaagaccagcggcatctttgcccacagcaacaccttcatcgtgttcctgttcctgctggactttggcatgtctgtggtgatgctgagctacctgctgagcgccttcttcagccaggccaacacagctgccctgtgcaccagcctggtgtacatgatctccttcctgccctacatcgtgctgctggtgctgcacaaccagctgagctttgtgaaccagaccttcctgtgcctgctgagcaccacagccttcggccagggcgtcttcttcatcaccttcctggagggccaggagaccggcatccagtggaacaacatgtaccaggccctggagcagggcggcatgaccttcggctgggtgtgctggatgatcctgtttgacagcagcctgtacttcctgtgtggctggtacctgagcaacctgatccctggcaccttcggcctgaggaagccctggtacttccccttcaccgccagctactggaagtctgtgggcttcctggtggagaagaggcagtacttcctgagcagcagcctcttcttcttcaatgaaaattttgacaacaagggcagcagcctgcagaaccgggagggggagctggagggcagcgcccctggggtgaccctggtgtctgtgaccaaggagtatgagggccacaaggctgtggtgcaggacctgagcctgaccttctacagagaccagatcacagccctgctgggcaccaatggagctgggaagaccaccatcatctccatgctgaccggcctgcacccccccaccagcggcaccatcatcatcaacgggaagaacctgcagacagacctgagccgggtgaggatggagctgggcgtgtgcccccagcaggacatcctgctggacaacctgactgtgcgggagcacctgctgctgtttgccagcatcaaggccccccagtggaccaagaaggagctgcaccagcaggtgaaccagaccctgcaggatgtggacctgacccagcaccagcacaagcagacccgggccctgagcggcggcctgaagaggaagctgagcctgggcatcgccttcatgggcatgagcaggacagtggtgctggatgagcccaccagcggcgtggacccctgcagccgccacagcctgtgggacatcctgctgaagtaccgggagggccgcaccatcatcttcaccacccaccacctggatgaagctgaggccctgagtgacagagtggccgtgctgcagcacggccgcctgcgctgctgcggcccccccttctgcctgaaggaggcctacggccagggcctgcggctgaccctgacccggcagcccagcgtgctggaggcccatgacctgaaggacatggcctgtgtgaccagcctcatcaagatctacatcccccaggccttcctgaaggacagcagcggcagcgagctgacctacaccatccccaaggacacagacaaggcctgcctgaagggcctcttccaggccctggatgagaacctgcaccagctgcacctgaccggctacggcatcagtgacaccaccctggaggaggtgttcctgatgctgctgcaggacagcaacaagaagagccacatcgccctgggcacagagagcgagctgcagaaccaccggcccaccggccacctgagcggctactgcggcagcctggcccggcctgccaccgtgcagggcgtgcagctgctgcgggcccaggtggccgccatcctggcccggcggctgcggaggaccctgcgggccggcaagagcaccctggccgacctgctgctgcctgtgctgtttgtggccctggccatgggcctcttcatggtgcggcccctggccacagagtacccacccctgcggctgaccccaggccactaccagagagctgagacctacttcttcagcagtggaggagacaacctggacctgaccagggtgctgctgaggaagttccgggaccaggacctgccctgtgccgacctgaacccccggcagaagaacagcagctgctggaggacagaccccttcagccaccctgagttccaggacagctgtggctgcctgaagtgccccaacagaagtgccagcgccccctacctgaccaaccacctgggccacaccctgctgaacctgagcggcttcaacatggaggagtacctgctggcccccagcgagaagccccggctgggcggctggagctttggcctgaagatccccagcgaggccggcggggccaatggaaacatcagcaagccacccaccctggccaaggtgtggtacaaccagaagggcttccacagcctgcccagctacctgaaccacctgaacaacctgatcctgtggcagcacctgccccccaccgtggactggaggcagtatggcatcaccctgtacagccacccctatggaggagccctgctgaacaaggacaagatcctggagagcatccggcagtgtggggtggccctgtgcatcgtgctgggcttcagcatcctgagcgccagcatcggcagctctgtggtgcgggacagagtgattggagccaagaggctgcagcacatcagcggcctgggctacaggatgtactggttcaccaacttcctgtatgacatgctgttctacctggtgtctgtgtgcctgtgtgtggccgtcatcgtggccttccagctgacagccttcaccttcaggaagaacctggccgccacagccctgctgctgagcctgtttggctacgccaccctgccctggatgtacctgatgagccgcatcttcagcagcagtgatgtggccttcatctcctatgtgtccctgaacttcatcttcggcctgtgcaccatgctgatcaccatcatgccccggctgctggccatcatcagcaaggccaagaacctgcagaacatctatgatgtgctgaagtgggtgttcaccatcttcccccagttctgcctgggccagggcctggtggagctgtgctacaaccagatcaagtatgacctgacccacaactttggcatcgacagctatgtgagcccctttgagatgaacttcctgggctggatctttgtgcagctggccagccagggcaccgtgctgctgctgctgcgggtgctgctgcactgggacctgctgcgctggccccggggccacagcaccctgcagggcaccgtgaagagcagcaaggacacagatgtggagaaggaggagaagagggtgtttgagggccgcaccaacggggacatcctggtgctgtacaacctgagcaagcactaccgccgcttcttccagaacatcatcgctgtgcaggacatcagcctgggcatccccaagggggagtgcttcggcctgctgggcgtgaatggagctgggaagagcaccaccttcaagatgctgaatggagaggtgtccctgaccagcggccacgccatcatccgcacccccatgggagatgctgtggacctgagcagcgctggaacagctggggtgctgattggctactgcccccagcaggatgccctggatgagctgctgaccggctgggagcacctgtactactactgcagcctgcggggcatcccccggcagtgcatccctgaggtggccggggacctgatccggcggctgcacctggaggcccacgccgacaagcctgtggccacctacagcggcggcaccaagaggaagctgagcacagccctggccctggtgggcaagccagacatcctgctgctggatgagcccagcagcggcatggacccctgcagcaagcgctacctgtggcagaccatcatgaaggaggtgcgggagggctgtgccgctgtgctgaccagccacagcatggaggagtgtgaggccctgtgcacccggctggccatcatggtgaatggcagcttcaagtgcctgggcagcccccagcacatcaagaacagatttggagatggctacacagtgaaggtgtggctgtgcaaggaggccaaccagcactgcaccgtgtctgaccacctgaagctgtacttccctggcatccagttcaagggccagcacctgaacctgctggagtaccacgtgcccaagcgctggggctgcctggccgacctcttcaaggtgattgagaacaacaagaccttcctgaacatcaagcactacagcatcaaccagaccaccctggagcaggtgttcatcaactttgccagcgagcagcagcagaccctgcagagcaccctggaccccagcacagacagccaccacacccaccacctgcccatctag

SEQ ID NO: 244353 - DNA, 15177 bp, Artificial Sequence
  derived and/or modified sequence
atgggccacgccggctgccagttcaaggccctgctgtggaagaactggttgtgccgcctaaggaaccccgttctttttttggccgagttcttctggccatgtattctgttcgtcattctaactgtcttacggtttcaggagcccccgagataccgggatatctgctatctccagcctagagatctgccaagctgcggtgtcataccctttgtgcagtctttactctgcaatactggttctagatgtcgcaacttctcttatgagggatctatggaacatcattttagactttcccgtttccaaaccgctgccgacccaaagaaggtcaataatctcgcctttctcaaggagatccaagatctagcggaggaaattcacggcatgatggacaaggctaagaatctgaaaagactgtgggtcgagcgctccaacacccctgacagcagctatggcagctctttcttcaccatggacctgaataaaaccgaagaggtgattctgaaactcgaatctctccatcaacagccacatatttgggactttttgttgctacttccgaggctgcatacaagccatgaccacgtggaagatggcatggatgtcgccgtgaatttgctgcagacgatcctgaactctctcatttcgttggaagacctagattggcttcctttgaaccagacgttttcccaggtctccgagctggtgttaaatgtgaccatctcgaccttgactttcctgcaacaacatggcgttgcggtgacggagccagtttaccaccttagcatgcagaacatcgtctgggatcctcagaaggtccagtacgatctgaagtcccagttcgggttcgatgatcttcacaccgagcagatactgaattcttccgccgagttgaaggaaatcccgaccgatacctctttagagaagatggtgtgctccgtcctctcatctaccagcgaagacgaagccgaaaagtggggtcatgtcgggggatgccatcctaaatggagtgaggccaaaaactaccttgtgcacgcagtcagttggctccgggtttaccagcaggtctttgtgcagtggcaacagggctcactccttcagaaaactctgacaggtatggggcactctcttgaggcactccgcaaccagttcgaggaagagtccaaaccttggaaggtggtggaggctctgcacaccgctctgctgctactgaacgacagtttgagcgccgacggaccaaaggataaccacacctttcccaagattctgcaacatctctggaaattgcagtctcttctccagaacctccctcaatggccggcactgaaaaggtttctgcagttggacggagccctgcgcaacgctatcgcccaaaacctgcactttgtacaggaagtcctcatttgtctcgagactagtgcaaacgacttcaaatggttcgaattgaatcagctcaagctggagaaggatgtcttcttctgggagctgaaacaaatgctagcaaaaaacgcagtgtgccccaacggccgatttagcgagaaagaagtcttcctcccgcctggaaacagctccatctggggcggactacaagggctgctgtgctattgtaattcttcggagacttctgtgctgaataagttactcggctccgttgaagacgccgacaggatcctgcaggaagttatcacctggcacaaaaatatgtccgtgctaatccctgaggagtatctggactggcaagagctggaaatgcagctgagtgaggcctcgctgagctgtacacgcttattcctattgctgggagccgacccaagcccagagaacgatgtcttttcctcagactgtaaacaccagctcgtgtcaaccgttatattccacacccttgaaaagacacaatttttcctggagcaggcttactactggaaggcctttaagaaattcatccggaagacctgcgaggtcgcacagtacgtcaacatgcaggagagcttccagaataggctcttagccttccccgaagaatccccctgttttgaagaaaacatggattggaagatgatctctgacaattactttcagttccttaacaacttattaaagtcaccaacggcctcaattagcagggctcttaatttcacaaaacacctgcttatgatggaaaaaaaactccacacccttgaggatgagcagatgaactttctgctttcctttgttgagttcttcgaaaagctgctcctacctaacctctttgactcttccatcgttccaagctttcattccttgccatccctaaccgaggatatcttgaacatcagcagcctgtggacaaatcacctgaaatctcttaaacgcgatcccagcgccaccgatgcccagaaactgcttgagttcggcaacgaagtgatttggaagatgcagacattagggtcccactggatcaggaaggaacctaagaacttactgcggttcatagagctgatactgtttgaaattaatcctaaactgcttgagctgtgggcctacgggatttctaagggaaaaagagccaaactcgaaaacttcttcactcttctaaattttagtgtgccagagaacgagatcctgagtacaagcttcaactttagccagctcttccactcagactggccaaaaagtccggccatgaatatcgacttcgtgcgacttagtgaggccattattaccagcttacatgaatttgggttcctcgaacaggagcagatttctgaggctctgaacaccgtgtacgcaattcgaaacgcttcagacctgttctctgcgctctcggagcctcagaagcaggaggtggacaaaatcttgacccacattcacttgaacgttttccaagataaagactccgcactcctcctgcaaatttattcgagcttttataggtacatttacgaactgttgaatatccagtccaggggcagtagtctgacatttctgacgcagatttcaaagcacatcctggacataataaagcaattcaattttcaaaatatctcaaaggcttttgccttcctgttcaaaaccgctgaagtcctgggggggatcagcaacgtatcatactgtcagcagctgctaagcatctttaacttcctagaactgcaagctcagagtttcatgagcactgaaggccaagagctcgaggtaatccataccaccctgactgggctcaagcagctcttgatcatcgatgaggactttagaatctctctgtttcagtacatgtcacaatttttcaactctagcgtggaagatctccttgacaataaatgtcttatcagcgacaacaagcacatcagtagcgtgaattattcaacaagcgaggaatcttcctttgtttttccattggctcagatctttagcaatcttagcgccaatgtttccgtgttcaacaagtttatgtcaatccactgcactgtctcctggttacaaatgtggaccgaaatctgggagaccatctcccaattgtttaaattcgacatgaatgttttcacttccctgcaccatggctttacacaactgctggacgagctcgaagacgacgttaaggtaagcaaaagttgccagggaattcttcccactcataatgtagctagactcatcttaaatttgtttaaaaacgttactcaggccaacgattttcacaactgggaggattttcttgatctgcgagattttctggttgccttgggtaacgcgctggtttcagttaagaaactgaacctggaacaggtcgaaaagagcctgtttaccatggaggccgcgctgcatcagctgaaaaccttcccttttaacgagtctacctctagggaattcttgaatagcctgctggaggtcttcatcgagttcagtagcacatccgaatacatagtccggaatcttgactcaattaacgatttcctcagcaacaatctaactaactatggtgaaaagtttgaaaacattataacagagttgcgcgaagcaatcgtttttctccgcaatgtgtcacatgacagagatcttttttcgtgtgctgatatctttcagaatgtcacggagtgtatcctagaagacggatttctgtatgttaatacgagccagaggatgttgcgcatactggatacactcaattctacctttagctcagaaaacacaatcagctctttgaagggatgcattgtgtggcttgatgtgattaatcacctatatcttctgtcaaactcttctttctcccaagggcacctccagaacattctgggaaattttcgcgacatcgagaataaaatgaactctattctcaagatcgtaacatgggtgcttaacataaagaaacccctctgctcatcgaacggttctcatattaattgcgtgaatatttatctcaaagatgtgactgacttcctgaatatcgttttgactactgtcttcgaaaaggagaagaagccaaagtttgagatcctccttgctctgcttaacgactccaccaagcaggtccggatgtctatcaataacctgactacagacttcgactttgcgtctcagtccaactggcggtactttacagagctgatattacgacctatcgagatgtctgatgagattcctaatcaatttcagaacatttggttacatctgataacactggggaaggaatttcagaaactagtaaagggcatttactttaatattctcgagaacaattccagctcgaagacggaaaatctactgaatatcttcgctacgtcccctaaggaaaaagacgtcaattcggtcggaaacagcatctatcacctcgcatcctacctggcattttccctgtcacacgatctgcaaaatagtccaaaaatcatcatctctcccgagattatgaaagccactggccttggaattcagctcatccgggacgtgtttaactctttgatgccagtggtccaccacacgtccccacagaacgctggctacatgcaagcactcaagaaagtgacatctgttatgagaactctgaagaaagcagatatcgacctgcttgtggatcagcttgaacaagtctccgtcaacctcatggacttctttaagaacatcagcagcgtcggcacgggtaatctggtggtcaaccttctcgtgggccttatggaaaagttcgcggactcctctcattcttggaacgtgaatcaccttctgcagcttagccgtctcttccctaaagacgtcgtggatgctgtgatcgacgtgtactacgtactcccccacgccgttagattactgcagggggttcctggcaaaaatatcacggagggtctgaaagatgtgtatagtttcaccctgttgcacggtatcacaatcagtaacatcaccaaagaagacttcgctatagttataaagatcctgcttgacactattgagttagtgtctgacaaaccggacattatttctgaggcactcgcttgtttccctgtcgtgtggtgctggaaccatactaatagcggatttagacaaaactctaagatagacccgtgtaatgtccatggactgatgtcttcgtcattttatggaaaggtggcatcaatcttagaccacttccacttgtccccccagggtgaggattctccctgttcaaatgagtccagtcgcatggagatcactaggaaagtcgtgtgtatcattcatgagttggtagactggaacagcatcctcttagagctctcagaagtgtttcacgtgaacatctcgttggttaaaaccgtgcagaagttttggcacaaaattctcccatttgtaccgccctctattaaccagaccagagactctatttccgagctctgcccgtccggtagcatcaaacaggttgctctgcaaataatcgagaaactaaagaatgtgaacttcacgaaagtcacaagtggtgagaatatcctcgataaacttagctccttgaacaaaattctgaatattaatgaagataccgagaccagtgtgcaaaatatcatttctagcaacctcgaacggaccgtccaattaatctccgaagactggagtctggagaaatccactcataacctgctgtctctctttatgatgctgcaaaatgcgaacgtgactgggagcagtctggaagcactatctagcttcatcgagaagtctgaaaccccctacaacttcgaagagctttggcccaagtttcaacagataatgaaggatctcactcaggacttccgcattcgacatctgctgtcagagatgaataagggcattaagtccatcaactccatggccttacaaaaaattacgttgcagttcgcccactttctcgaaattttggacagcccctccctgaagaccctcgaaatcatcgaggactttctgcttgtcacaaaaaactggcttcaggagtatgccaatgaggactattcccgcatgatcgagactttgtttatccccgtgacaaacgaatcttccacagaggatattgccctattagctaaagccatcgctaccttctggggctctctgaagaatatatcccgtgcaggaaactttgatgtagctttcctgactcacctgctgaaccaagaacagttgaccaacttctctgtggtccagctgctcttcgagaatatcctgattaacttaataaacaatctggcgggtaattcacaagaggccgcatggaatctgaacgacaccgatctgcagatcatgaattttatcaatctcattctaaaccacatgcaatctgagaccagccggaaaaccgtcctaagcctgcgaagtatcgtggatttcactgaacagttcctgaaaacgttcttcagtttgtttctgaaggaagactcggagaataagatctccctgctgcttaaatactttcacaaggacgtcatagccgagatgagcttcgtgcctaaggacaaaatcttggaaatcctgaagctggatcagtttctcacactcatgattcaggataggctgatgaacatcttctcttctttgaaggagactatttaccatctaatgaaatcttcctttattctggacaacggggaattttattttgacacccatcaggggctgaagttcatgcaggatctctttaatgccctgttgcgcgaaacctcaatgaagaacaagactgagaacaatatcgatttttttaccgttgtgtcacagctgtttttccacgtgaacaagagcgaagatcttttcaagttgaaccaggatctggggagcgcgcttcacctggttcgcgagtgttctaccgagatggcgagactgctcgatacaatattgcacagccccaataaagacttctatgcactgtaccctactctgcaggaggttattctggccaacttaacagacctcttgttcttcataaataattcgtttccccttaggaatagagcgaccctggagatcaccaagcgactggtgggggcaattagccgtgcctccgaggagtctcacgtcctgaagcctttgttggagatgagtgggacactggttatgctcttaaacgatagtgctgatctacgggatttagccacatcaatggattccatagtgaaattactaaagctggtcaaaaaagtcagcggcaagatgagtactgtgtttaagacacacttcattagtaacacaaaagatagcgttaaattcttcgatacactatacagcatcatgcagcagtctgtacaaaacttagtaaaagagatcgctactctcaagaagattgatcactttacttttgagaaaattaatgatctactagtcccatttctggatttagcttttgagatgatcggcgtcgaaccttacatcagtagtaacagcgacatcttcagtatgtcaccctcgattctgagttatatgaatcagtccaaagacttctcagatatcctggaggagatcgcagagtttcttacatcggtcaaaatgaaccttgaggacatgaggagcctcgctgtggcttttaacaatgagacgcagaccttctctatggatagtgtgaatttgagagaagagattctcgggtgcctggtacccattaacaacataacaaaccaaatggactttctgtacccgaacccaataagcacccacagcgggccacaggacataaagtgggagatcatccacgaggttatccccttccttgataaaatcttgagccaaaactcgacggaaatcggctccttcttgaagatggtaatatgcctcacattagaggcgctctggaaaaatctcaagaaggataactggaatgtgtccaatgtgctcatgacctttacacagcatccaaacaacttactgaaaacgatcgaaacagtcttggaagcctccagcggtatcaagtctgactatgaaggcgacctcaacaaaagcctgtactttgacactccactctcccaaaatattacacaccaccagttggagaaagcgatccataacgtgctcagccggattgctttgtggagaaaaggcttgctgtttaataattcggaatggatcacctcaacccgcactctgttccagcctctctttgagatattcatcaaagccaccacaggaaagaatgtgacctcagaaaaagaggagcgcaccaagaaagaaatgatagactttccgtacagctttaagccattcttctgcctcgaaaaatatctgggggggctctttgtgctgaccaaatactggcaacaaatccccctgaccgaccagagcgtggtcgagatttgcgaggtcttccagcagactgtgaagccatctgaggcaatggaaatgttgcagaaggttaaaatgatggtggtccgcgtgctgacaattgtggctgagaatccatcatggacgaaggatatcctgtgtgctacattgtcttgtaaacagaatgggatcaggcacctgatcctctccgcaattcagggagtgacattagcacaggatcatttccaggaaatcgagaaaatctggtcaagtcctaatcagttaaattgtgagtctttgtcaaaaaacttaagtagcactcttgagtctttcaagtcctctttggagaacgccacagggcaggactgtaccagccagccccgcctggaaacagtgcagcagcacctctatatgttggctaagagcctggaagaaacctggagctccgggaatcccattatgacatttttgtctaattttacggtcacggaggatgtcaaaattaaggaccttatgaaaaacattaccaagttgaccgaggagctgaggagctccatacagataagtaacgagactatacactctattctggaagcaaatatcagtcactcaaaggtgttattcagcgcattgacagtcgcgctatctggaaaatgtgaccaggaaattctccatctgctgttaacgttccccaaaggagagaagtcttggattgctgctgaggagctttgctcattaccgggctctaaagtgtatagcctcatcgtccttttgtctcggaacttggatgtgcgcgcattcatctacaagaccttgatgccctcagaggcaaatgggctgctcaattcgttgctcgacatagtctctagcctgagcgctctgctggctaaggctcagcacgtttttgagtacttacctgagtttctccatacatttaaaatcaccgctctgctggagaccctggacttccagcaggtctcccaaaacgtgcaggcacgttcgtcagcttttggctcttttcaatttgtaatgaagatggtatgtaaggaccaggcttcctttctctccgactctaacatgtttataaatttgccaagggtgaaggaacttctcgaagacgataaggaaaaatttaacatccctgaagactctacccctttttgtctgaaactttatcaggagatcttgcaactcccaaatggagctctggtgtggacatttctcaagccaattttacacggaaagatcctgtatacccccaacacgcccgaaatcaacaaggtaatccagaaagccaactatactttctacattgttgacaaattgaagactctctctgagacgttattggagatgtcctcactgtttcagagaagcggctcgggccagatgttcaaccagctccaggaggccctgagaaataaatttgtgagaaatttcgtcgagaaccaactgcacatagatgtggacaagctgactgagaaactgcagacctacggaggtcttctcgacgagatgttcaaccacgctggcgcgggccgcttcaggtttctcggcagcatcctcgtcaatctgtcaagttgtgtggcactgaaccgctttcaagcactgcagtctgtcgacatcctggagactaaagctcacgagctgctacagcagaactcttttctggcatccattatattttctaactccttgtttgataaaaactttcgtagcgaatctgttaagttgccgcctcatgtatcctatacaattaggaccaacgtgctctattcagttcgaactgatgtggtgaagaacccgtcttggaagttccacccacagaatctgccagcagatggcttcaaatacaactacgtgtttgcacctctgcaggacatgatcgaacgggcaatcattctagtgcaaacaggacaagaggcactggaacctgcagcccagacccaagccgctccatatccctgccacacatcagaccttttccttaacaacgtggggtttttttttccactgattatgatgcttacgtggatggttagtgttgcaagcatggtcagaaaacttgtttatgaacaggagatccaaatcgaggagtacatgagaatgatgggggtccaccccgtgattcactttttggcctggtttcttgagaatatggcagttctcactatatcaagtgccactctcgctattgtcctgaaaacgtccggcatcttcgctcacagtaacacctttatcgtcttcttatttttattagactttggcatgtcagtggtgatgttgagctatctgctgagcgcctttttctcccaggccaatactgcagctctctgcacctccttagtgtacatgatcagcttcctgccatacatcgtgctcctcgtcttgcataatcagctgtccttcgtgaatcagaccttcctgtgcctgttatccactactgcattcggccagggcgtgtttttcatcacattcctggagggacaagagaccggtatccagtggaacaacatgtatcaagccctggaacaaggcggcatgacattcgggtgggtttgctggatgatcctctttgactcaagtctgtactttctatgcggctggtatctgtccaacctaatacctggcacctttggcttgaggaaaccatggtactttccttttactgcaagttactggaaatctgttgggttcctggtggaaaaaaggcaatactttctcagcagctccctgttctttttcaacgagaacttcgacaataaaggaagctccctgcaaaatagggagggagaactggagggttccgcacccggcgtcacactggtgagcgtcaccaaagagtatgagggccacaaggccgttgtgcaagacctatccctgacattttatcgagaccagattaccgcattgctgggaacgaatggcgcaggcaagactacgattattagcatgctgaccggattgcaccccccaaccagtggtactattatcatcaacggaaaaaacctccagacagacctgtcgcgcgtgcgcatggaactaggagtatgtccccagcaggacattttacttgacaatctgactgtgagagaacaccttttattgtttgcctccattaaagctcctcagtggacaaagaaggagctccaccagcaggtgaaccagaccctgcaggatgtggacctgacccaacaccagcacaaacagacccgcgccctgtccggtggactgaagcgtaagctgagcctgggtatcgcctttatgggtatgtcgagaacagtggtattggatgagccaacctcgggcgtcgacccttgttcaaggcacagcctgtgggacatattgctaaaataccgagagggccgtactattattttcaccacccatcatctcgacgaggctgaggccctctctgatagagtagcagtgttacagcacggcaggctacgctgttgtgggcccccattctgtctcaaggaggcttatgggcaggggctgcggctgaccctcactcgtcagccctccgttctggaggcccacgacttgaaggacatggcctgcgttaccagcctgatcaagatttatatcccgcaggcttttctgaaggacagcagcggttctgagctcacctataccatcccaaaggacacagacaaggcctgtctcaagggattattccaggctctagacgaaaacctgcaccaactgcatctcactgggtatgggatatcagacacgacattggaggaagtgttcttgatgctgctgcaggatagcaataagaaatcccacatcgccctgggtaccgaatctgagctgcagaaccacaggcccacaggacacctatcaggctattgtggcagtttggcgcgacccgcgacagtccagggagtgcagttactcagggcccaggtggctgcaatacttgctagacggcttagacgaacacttagagcgggcaaaagtacactagctgacctcttactccctgtgttatttgttgccctggctatgggcctcttcatggtcaggcctcttgccacagaatacccacccctccggcttacccccgggcactaccagagagcggaaacttacttcttttccagcggcggtgacaatctagatttgacgcgggtactgctccgcaagttccgtgaccaggatctgccttgtgccgacctgaaccctcgacagaaaaattcttcctgttggcggacggacccattttctcacccagagtttcaggacagttgcggttgcctaaagtgtcccaataggtcagctagcgctccatatttgaccaatcatctcggccacaccctgctcaacctttcagggttcaacatggaggagtacctcctcgctcctagcgaaaagcctcgtctcggaggctggtcctttgggcttaagattccttctgaggccggcggggcaaatggaaacatatcaaaacccccaacactggcaaaagtttggtataatcagaagggatttcattccctgcctagttatttaaatcatttgaacaaccttatcctgtggcagcatcttcccccaaccgtcgattggcggcagtatggcataacactgtacagtcacccatacgggggagctttgctgaacaaggataagatattagaaagcatacgacagtgcggcgtggctctgtgcatagtattgggtttcagcattctgagtgcaagcattgggagcagtgtagtgcgagatcgggtgatcggggcaaagcggctccaacatattagtgggttgggttacagaatgtattggtttaccaacttcttatacgacatgcttttctacctcgtgtctgtgtgtctatgtgtggctgttattgtcgcttttcagctgacggcttttacatttcgaaagaatttggctgccacagctctgctgttgtctctgttcggctatgccacgttgccatggatgtatcttatgtcgaggattttcagcagctcagacgtagcctttatttcttacgtgagcctaaattttatttttggcctgtgcacaatgttgatcactattatgccacgactgctggccataatcagcaaagcaaaaaacttacaaaacatctacgacgtgctgaagtgggtgttcacgatctttccacagttttgtttgggccagggcctggtggaattatgctataatcagatcaagtatgacctgacccacaacttcggcatcgacagctatgtcagcccattcgagatgaatttccttgggtggatctttgttcaactcgcctcacagggcacagtcctgctgcttcttcgcgtcctattgcactgggatttgctgaggtggccacgcggacattcaacactgcagggcactgtgaagtcttctaaggacacagatgtggaaaaggaggagaagcgggtgttcgagggacgaaccaatggcgatattctggttctttataatctttcaaagcactacaggcgattttttcagaatataatcgcggtgcaggatattagtctgggcattcctaaaggggagtgctttgggctcctaggggtgaatggcgccggcaaatctactacttttaagatgctaaacggagaggtgtccctgaccagcggccatgccatcattaggacgcctatgggcgacgcggtggatttgagtagtgccggcactgcaggagtattgataggctactgcccacagcaggacgcactggacgagcttctgacgggctgggaacacctctattactactgctcacttcgggggatccctagacaatgtatccctgaagtggctggcgaccttatacgtcgactgcatctcgaggcacatgcagataaacctgttgcgacctactccggcgggaccaaacgcaagctgtccacagctctcgcactggtaggcaaaccggatattctgttgctggacgagcccagtagcggcatggacccttgttctaaacggtacctgtggcagactatcatgaaagaagtcagggagggatgtgcggccgtgcttacctcccatagcatggaagagtgtgaggcgttgtgtacccggctcgctattatggtgaatgggtcgtttaagtgcctcggtagtcctcaacacataaaaaatcgcttcggggatggctacacggtgaaggtgtggctttgcaaggaagcaaaccagcactgtaccgtctctgatcacctgaagctctacttcccaggaattcaattcaaggggcaacatctgaacctgctggaataccacgtgcccaaacgttggggttgtttagctgacttgttcaaggtcatcgagaataacaagacatttttgaacatcaagcactattctattaaccagacaacactggaacaggttttcattaacttcgcctccgaacagcagcagaccctgcagtctaccctcgatccatccacggactcccatcacacgcatcaccttccaatatag

SEQ ID NO: 244354 - DNA, 15177 bp, Artificial Sequence
  derived and/or modified sequence
atggggcacgcaggatgccagttcaaggccttactctggaagaactggctatgtcgactgcggaatccagttctgttccttgcagaattcttctggccctgcatcctgttcgtgatcctgaccgtgcttcggttccaggagcctccaaggtacagagacatatgttacttacaacctcgcgacctaccctcttgtggggttataccctttgtgcagagcctgttgtgcaacaccgggtcccgctgccgcaatttctcgtacgagggatccatggagcatcattttagactgtcccggtttcagaccgccgctgatcctaagaaggtaaataatctggcttttctgaaggagatacaggaccttgctgaggaaatccatgggatgatggacaaggccaaaaatcttaagagattatgggttgagcggtccaatactcccgatagcagttacggatcatcattctttacaatggatctcaataagaccgaggaagttatcctgaaactcgagagcctgcaccagcagcctcacatctgggatttcctattattgctcccccgactccacaccagccacgaccacgttgaggatgggatggatgtcgccgttaacctgttgcagactattttaaacagtctcattagtctggaggacctcgactggctccctctcaatcaaaccttttctcaggtgtccgaacttgtgctgaacgtgaccatcagtactctaacctttctacagcagcatggggtggcagtgaccgaacccgtataccacctctccatgcagaatatagtatgggatccgcagaaagttcagtacgacctgaagagccaattcggtttcgatgatctgcacactgaacagattctaaactctagcgccgaattaaaagagatccctactgataccagtttagaaaaaatggtgtgctccgtactgtccagtacctctgaagacgaagccgaaaagtggggtcacgtcggcggatgccaccctaaatggtctgaagcaaagaactaccttgtgcatgcagtatcttggctcagggtgtatcagcaggttttcgttcagtggcagcaaggaagccttctgcagaagaccctgactggtatggggcacagcctggaggctttacgcaaccagtttgaggaagagtcgaagccatggaaggtagtcgaggcccttcacactgccctgctccttctgaacgactccttgtccgcggacgggccaaaagataaccatacatttcccaagatactgcaacatctgtggaaactccagtcgctgcttcagaatctcccccagtggccggcactgaaacgattccttcagctggatggcgctctgcgcaacgccattgctcaaaatctccacttcgtgcaggaagttctgatttgtctggagacctctgctaatgatttcaagtggttcgagcttaaccagctaaaactcgaaaaggacgtttttttttgggagctgaaacagatgctggccaagaatgctgtgtgtcccaatggtaggttcagtgagaaggaggtgttcctgccacccggaaactcctcaatctgggggggacttcaaggactactgtgttattgcaattcaagcgagacttcagtgctgaataaactgcttggctccgtcgaggatgccgatcgcattctccaggaagtcattacatggcataagaatatgtccgtacttattcctgaagagtacctggattggcaggagctggaaatgcaacttagtgaggctagtctgagttgcacacggctgttcctcctgctcggtgcagatccttcacccgagaatgacgtcttttccagcgactgcaaacatcagctggtatccacggttatctttcacactctcgaaaaaactcagttttttctggaacaggcatattattggaaggcatttaaaaagttcatccgaaaaacttgcgaggtggcacagtatgtgaatatgcaggagtcctttcagaatagactcctggcatttcctgaagaaagcccatgcttcgaagaaaacatggattggaaaatgatcagcgataattacttccagttcctgaacaatctcctaaagtcccctacagctagcatttctagggcactgaattttacaaaacacttgctcatgatggagaaaaaactgcacactctggaggatgagcagatgaattttctgttgagttttgtggagtttttcgagaagcttctgcttccaaacctcttcgatagctctatagttccgtccttccacagtctgccatctctgacagaggacatcctcaatatatcttccctttggactaaccacctgaagagtcttaagcgcgatccatctgcaacggacgctcagaagctgctggagttcggaaatgaggtcatatggaagatgcagactctggggtcccactggattagaaaagaacctaagaaccttctgcgttttattgaactcattttgttcgagataaacccaaaattgctagagttgtgggcatatggcatatcaaaaggaaagcgggctaaactcgagaatttcttcacactgctgaatttttccgtgccagaaaacgagattttaagtacatcattcaatttctcacagctcttccactccgactggcccaagtcacctgccatgaatatagacttcgtgcgactgagcgaggcgattatcaccagcctgcatgagttcggattcttagagcaagaacagatctcagaggcgttgaatactgtctatgccatcagaaatgcttcagacctgttttcagccctctctgagccacaaaaacaggaagtagataagatactcactcatattcacctaaacgtcttccaggacaaagacagtgctttgttacttcagatctatagctccttctatcgatatatttatgaactgctgaatatccagtctagaggatcatcactaaccttcctgactcagatatctaaacacatactggacattatcaagcagtttaattttcagaacatctccaaagcgtttgcctttctattcaagacagcagaagttttaggtggaattagcaacgtgtcgtactgccagcagttactgagcatctttaattttctagagctgcaagcacagagcttcatgagtaccgagggacaggaattagaggtgatccacacaacacttaccggtctaaaacaactgctgatcatcgatgaagatttcagaattagcctgttccagtacatgagtcagttcttcaatagttctgtcgaagatttacttgacaacaaatgcctgatctccgataataagcacatcagcagcgttaactactctacctcggaagagagctccttcgtgtttcctttggctcagatcttttctaatttgagtgccaatgtgtctgtgttcaacaaattcatgagcatccattgcacagtgagttggctgcaaatgtggaccgagatatgggagacaatctcacagttattcaagttcgatatgaacgtctttacatccctgcatcacgggtttacgcagctattggacgaattggaggacgatgtgaaagtttccaaatcctgtcaggggatacttcccacgcacaatgtggcccgactgattctaaacctcttcaagaatgtgacacaggctaacgacttccataattgggaagactttttggatctgcgagatttcctagttgccctaggcaatgcccttgtctccgtgaagaagctgaacctcgagcaagtcgagaaatccctattcacaatggaggctgccctgcatcaactcaaaacatttcctttcaatgagtctacctctagggaatttttgaattctcttttagaggtgtttatcgaatttagtagtacttctgaatatattgtgcggaacctggacagtattaatgacttcttgagtaacaacctgaccaactacggagaaaagtttgaaaatatcataaccgagctccgggaggctatcgtattcctgagaaatgtgagccacgaccgcgaccttttcagctgtgccgacattttccagaatgtcaccgagtgtatacttgaggatggctttctgtacgtgaacacctctcagcgtatgctccgtatactcgataccctcaattcaactttttcaagcgagaatacaatctcaagtttgaaagggtgtatagtatggctcgacgttataaaccacctttacctcctttccaactcttcattctcacaggggcatctgcagaatattttggggaactttcgggacattgaaaataagatgaattccattctgaagatcgtgacgtgggttctcaatatcaaaaagcccttgtgcagctccaacggatcccacattaactgcgtgaacatctacctgaaagacgtaacggatttcctgaacatcgtcctcactacggtgtttgaaaaagagaagaagcccaagttcgagatattactcgctctcctcaacgatagcactaagcaggtgcgtatgagtattaacaatttaaccactgattttgactttgcttcccagtcgaattggcggtatttcacagaactaatcttgagaccaattgaaatgagtgacgaaattcccaaccagtttcagaacatctggctccatctgatcacactgggtaaagagtttcagaaactggtcaagggcatctattttaatatcttggaaaataattcgagttctaaaaccgaaaatttgctcaatatcttcgccacctctcccaaagaaaaggatgtgaattccgttggcaattccatctatcatttggccagctatttggcctttagtctgagccacgatctgcagaactcaccaaaaattatcatttcaccggagattatgaaagccaccggcctcggaatccagctcatccgagatgtgtttaactcgctcatgcctgtcgtccatcacacaagtccgcaaaacgccggatatatgcaggccctcaagaaagtgacatcagtgatgcgcacgctgaagaaggcagacattgatctgcttgtggatcagctggagcaggtgagcgtgaacctaatggattttttcaagaacatctcttctgtgggcacgggtaatctcgtagtcaatctgcttgtagggcttatggagaaattcgccgactcaagccactcctggaacgtcaatcatctcctgcagctcagccgcttgtttcctaaggacgtggtagatgccgtgatcgatgtctattacgtgctgcctcacgctgtgaggctgttacagggagtacccggaaaaaatataacagaaggactgaaagatgtctatagctttaccttacttcacggtattacgatcagcaatatcacaaaggaggatttcgccattgtgataaagattctgctcgatactatcgagctggtgagcgacaaacccgatatcatttccgaagcccttgcatgtttcccagtggtttggtgttggaatcatacaaattccggttttagacagaattccaagatcgatccttgcaatgttcacgggctcatgtccagttccttttacgggaaagtggccagcatcctggatcacttccacttatcacctcaaggagaagacagtccatgctcaaacgaatcttccaggatggaaatcactcggaaggtggtgtgtattatccacgaactggttgattggaattccattcttcttgagctgagtgaggtgtttcatgtgaacatttccctcgtgaagacagtccagaagttctggcacaaaatcctcccctttgtaccaccatctatcaaccagacaagggactctatctccgagctctgtccatcagggtctatcaaacaagtggcccttcagatcatcgagaagttgaaaaacgtcaacttcaccaaagtcaccagtggcgaaaatatcctggataaactctcctcactcaataagattctgaatatcaatgaggacacagaaacctctgttcagaacattatcagctccaatcttgagaggactgtccagttgataagcgaggattggagtctggagaagtccacccataacctgctctccctcttcatgatgctacagaacgccaatgtgaccggttcttcattagaggccctctcatcatttattgaaaaatccgagacaccctacaacttcgaagagctttggcccaagtttcaacagattatgaaagacctcacgcaggacttccggatcagacatctgctgtctgagatgaataaaggcattaaatccatcaacagtatggccctccagaagataaccctgcaattcgcccactttctagaaatcttagatagcccgtcccttaagactctcgagattatcgaggactttctcctggtgactaaaaactggctgcaggagtacgccaatgaagattattcacgcatgatcgaaaccttgttcatacccgtaaccaatgagtcttcgaccgaggacattgctctgttggcgaaagctattgcgactttttggggatccctcaagaacatatctagggcagggaacttcgatgttgctttcctgacccacctgctgaaccaggaacagctgactaacttttctgtcgtgcagttactgtttgagaacatcctgatcaaccttattaacaatctggcaggaaactcccaggaagcagcgtggaacctgaatgacaccgacctgcagattatgaactttatcaatctgatcctgaaccacatgcagagcgagacctcgagaaagactgtcctgagcctgcggtcaatagtcgacttcactgaacagttccttaagacgttcttctcactctttcttaaggaggattccgagaacaagatctctctcctactcaagtatttccataaggacgtcatagccgagatgagcttcgtgcctaaagataaaatattggagattctgaaactggaccagttcttaacgctgatgattcaggatcgcctgatgaatattttttcctctctcaaggaaacaatctatcacctgatgaagagttcttttattcttgataatggtgagttttacttcgacacccatcagggtctaaagttcatgcaggacttgtttaacgccctcctgagagagacatctatgaaaaataaaaccgaaaataacatcgattttttcaccgtcgtgagtcagctgttctttcatgtgaataaatcagaagacctctttaagctgaatcaggatctgggaagcgctttgcatctcgtccgggagtgttctactgagatggcgaggctgctggacacgattctccattcccctaacaaggacttctatgcactataccccacactccaggaggttattctcgcaaatctgacagatctcttgttttttattaataattcgtttcccctacgaaatcgcgctacgctggaaatcacgaagcgtctcgtgggggcaatctcccgtgcttctgaggagtctcacgttttgaagcccctgttggagatgagtggcacactggtgatgctgcttaatgactcagcggacctacgtgacttggctacttccatggattctatcgtgaagttacttaaactggtaaagaaagtgtccggaaagatgtcaaccgtgtttaagacacacttcatttctaataccaaggactccgtgaagttcttcgacacgttgtactcaataatgcagcaatccgtgcaaaacctcgtcaaggaaattgccacactgaagaaaatcgaccactttaccttcgaaaaaatcaatgacctcttggttcctttcctcgacctagcttttgaaatgatcggcgtggaaccgtatatttctagcaactccgacattttttcaatgagccctagtatcctcagttacatgaatcaaagcaaagattttagtgatatcctggaggaaatcgctgaatttttgaccagtgttaaaatgaatttagaagatatgagatccctggctgtcgccttcaacaacgaaacgcaaactttcagtatggactcggtcaatctgcgggaagaaatcctgggatgtttggtgcctatcaacaacatcaccaatcagatggactttttgtatcctaacccaatctcgactcatagtggcccacaggatatcaaatgggagatcatccatgaggtgattcccttcctggataaaattctgtcacagaacagcaccgaaattggttctttcctgaaaatggtcatctgcctgaccctagaagcactatggaagaacctgaagaaggataactggaacgtgagtaatgttctgatgaccttcacccagcaccctaacaaccttctgaaaaccatcgaaactgtattagaggctagctccggcattaaaagtgactacgagggggacctgaataaaagtctctatttcgatacaccgctgtcccagaatatcacccaccaccagctggagaaggctatccataacgtactttccagaatagcgctttggagaaaaggactactcttcaacaattctgagtggataacgtcgacaaggaccttatttcagccgcttttcgaaatctttattaaggccactacaggtaagaatgtgacttccgagaaggaagaaaggactaagaaggaaatgatcgatttcccctattcattcaaaccgttcttttgcctcgagaagtacctgggagggctattcgtgctcaccaagtattggcagcagatcccgttaacagatcagagcgttgtggagatttgcgaggtgtttcagcagacagtgaagcctagcgaggctatggagatgttgcagaaggtgaagatgatggtggtgcgagtgctaaccatcgttgctgagaatccttcttggactaaggatatcctgtgtgccactctctcctgcaaacaaaacgggattaggcatttaatactctctgccatccaaggggtgacactggcccaggatcactttcaggaaatcgaaaagatttggtcaagccccaatcagctgaattgcgagtcactgtcaaaaaacctgagctccaccttagagtcatttaaatctagcctggaaaatgcgaccggccaggattgcaccagccagcccaggctggagaccgtccagcagcatctttacatgttggcgaaatccctcgaggagacttggtctagcggcaacccaatcatgactttcctgtcaaacttcactgtgactgaggacgtcaaaattaaggacctgatgaaaaacatcacaaaactcacggaggaattacggagttccatacagataagcaacgaaactatccactcgattttggaagctaatatctctcattcaaaagtgctgttctccgccttaactgtggccttgagcggcaaatgtgatcaggaaattttgcacctgctcctgacatttcctaagggagagaagtcgtggatcgcggctgaggaactttgcagtctcccgggttcaaaagtatacagtttaattgttctccttagccgcaacctcgacgttcgtgcttttatctacaagaccctaatgccaagtgaggctaacggtctcctcaacagcctgctggacatcgtgtcttcactgagcgcgcttttagcaaaggcccagcatgtcttcgagtacctgcccgagttccttcatacttttaaaatcacggctctgttagaaacattagacttccaacaagtgtctcagaacgtccaggctaggagctccgcatttggtagtttccaatttgtcatgaagatggtctgcaaagatcaggcttcctttctgagtgactcaaacatgttcatcaacctgcctcgagtcaaagagttactggaagatgacaaagagaaattcaacattcctgaggactcaaccccattctgccttaagctctaccaggagatcctccaactgccgaatggcgcactcgtttggaccttcctcaagccgattctccatgggaaaattctgtatactccgaacacaccagagataaacaaagtgatacagaaggctaactacacattctacatcgttgataagctaaaaaccttgtccgagactctactggagatgagctctctgttccaacgatccgggagcggccagatgttcaaccaactgcaggaagcgctgaggaacaagtttgtgaggaactttgtggagaatcaactgcatattgatgtggacaagcttactgagaagctacagacctatgggggtctgctggacgagatgtttaaccatgccggagccggtcggtttcggtttctggggtccatcctggtgaatctgtcttcatgtgttgcgttaaatcgattccaggctcttcagtctgtagacattctggaaacaaaggcgcatgaactgctgcagcagaacagctttcttgcgtctataattttcagtaattctcttttcgataaaaacttccgcagcgaatccgtgaaattgccccctcatgtatcttataccattcgcacaaacgttctgtatagtgtccgaaccgatgtggtcaagaacccaagctggaagtttcaccctcagaacctgcccgcagacggatttaagtataactacgtgttcgcaccattacaggacatgatcgagagagctattatcctggtccagaccggccaggaagcgcttgagcccgctgcacagactcaggccgcaccctacccgtgccacacgtctgaccttttcctgaataacgtgggcttctttttccccctaattatgatgctgacctggatggtctccgtagcctctatggtccggaaactggtgtatgagcaggagattcaaatagaggaatatatgcgaatgatgggagtccatcccgtcattcatttcctagcttggtttttagaaaacatggctgtcctcacgatcagttccgcaacgcttgctattgtccttaaaactagcggcatcttcgcccatagcaatacctttatcgtttttctgtttctgctcgatttcggcatgtccgtagtgatgctgagttacctgctctcagcattcttcagtcaggccaatacagcagccctgtgcacgtccctcgtatatatgatctctttcctgccttatatcgttctgcttgtgttgcacaaccagctttcctttgttaatcaaactttcctttgcctgctttcgacaaccgcatttggacaaggagttttcttcataacttttttggagggccaggagactggaatccagtggaataacatgtatcaggcgctggaacaaggcggaatgaccttcggctgggtttgctggatgatcctcttcgatagctctctgtatttcctctgtgggtggtacttgagtaatctcatccccggtactttcggactcagaaaaccatggtatttccctttcacagcctcctattggaagtccgtggggttcctcgtggaaaagagacagtattttctcagcagctctctcttcttctttaacgagaacttcgataacaaaggcagcagcctgcagaatcgggaaggcgagctggagggttcagcgccaggtgtcacgttagttagcgtgaccaaagaatatgaaggacacaaagcagtggttcaggacctgagtctgaccttctatcgtgaccagataaccgccctcttgggcacaaacggtgccggtaaaactaccatcatctccatgttgactgggctgcacccccctaccagtggcacgataataatcaatggtaaaaatctgcagacagacctgtcccgagtcagaatggaactcggcgtttgcccacagcaggacatcctcttggacaacttaacagtcagggagcacttgctgctttttgctagcatcaaggcgcctcagtggacaaagaaagagctccatcagcaagtaaatcagacactccaggacgttgatctgactcaacaccagcacaagcagacccgcgcactcagcggtgggcttaagagaaaactttcgcttggtatagccttcatgggaatgagcagaaccgtggtgcttgatgaacctacgtccggcgtggacccctgcagtcgccacagtttgtgggacatcctgctgaagtatcgtgaggggaggacgattatttttaccacgcaccatctagacgaggctgaggcattgagcgaccgagttgccgtgctacagcacggcaggctgaggtgttgcggcccacctttttgcttaaaggaggcatacgggcaaggtttgcgcctcacacttactcggcagccaagtgtcttagaagcgcatgatttgaaggacatggcatgtgttacgtccttgattaagatttatatcccgcaggcctttttgaaggacagctctggttcagagctgacatacaccattcccaaggacactgacaaggcgtgtctcaaaggactctttcaggctctggatgagaacctgcatcagctccatttgacaggctatggtatttccgataccactctggaggaggtctttctcatgcttctccaggactctaataaaaaaagtcatattgcgcttgggaccgagagtgagctgcagaaccaccgcccaacaggacatttgtctgggtactgcgggtctctggcgagaccagccactgtccagggggtacaattgctgagagcacaggtggctgctatactcgccaggcggctgagacggaccttgagagcaggaaaatcgaccctggcagaccttcttctccctgtgttattcgtcgccctggccatgggtctgttcatggtaaggccactggcaaccgaatatccccctctacgactgaccccaggccattaccagagagccgagacatactttttttcatcaggcggagataatctggatcttacaagggtactcctccgcaagttcagagaccaagacctgccatgcgccgacctcaacccccgacagaagaatagctcctgctggagaacagatccatttagccatcccgagtttcaagactcttgtggctgcttgaagtgcccaaacagatcagccagtgccccatatctcacgaatcacctggggcacaccttgcttaacctgtccggattcaatatggaagaatatctgctggctccaagtgagaaacctcggctcggtggctggagctttggtctgaaaatcccctccgaagcaggcggagcgaacggcaatattagtaagccccctaccctggcaaaggtctggtataatcaaaaggggttccatagcttacccagctacctgaaccacctgaataacctgatcctgtggcagcacctgcccccaaccgtggattggcgtcagtacggtattaccttgtattcccacccatacgggggtgccctgctgaacaaagataaaatcctggaatcaatcagacaatgtggcgttgctctgtgcatcgtgctcggcttctctattttaagtgcaagtatcggcagctcagttgtgagagatcgcgtcattggggctaagcgcctccagcacatctctggccttggctacagaatgtactggtttacgaatttcctgtatgacatgctcttttacctcgtgtctgtatgcctttgtgtggccgtcatagtcgcgtttcagctgactgcctttacattccggaagaatttagctgccaccgccctgctgctctcactcttcggctacgccacactgccttggatgtaccttatgtctaggattttctcaagttccgatgtggcattcatctcctacgtctccctgaacttcatttttgggctgtgcaccatgctgataaccatcatgccccgactcctggccatcattagcaaggccaaaaatttgcaaaacatatatgacgtgctgaagtgggtgtttactattttcccgcagttttgtctcgggcaggggctcgtcgaactgtgttataatcagataaagtacgatttgacgcacaattttggaatcgacagctacgtctccccgtttgagatgaactttctgggttggatcttcgttcagctcgccagtcaggggactgtacttcttctgttgcgagtgctcctgcactgggatctcttgagatggcccaggggccactcaacactccagggcaccgtcaaatcatctaaagatactgatgttgagaaggaagagaaacgggtatttgaaggaaggacgaatggcgacatcctggtgctgtacaatttaagcaagcactatcggaggttcttccagaacattatagcagtacaagacattagccttggaattcctaaaggcgagtgcttcggcttacttggcgtcaatggtgctggcaaaagcacaacattcaaaatgctaaacggcgaagtgtctctcacgtcaggacacgccatcatcagaacaccaatgggggacgcagtggacctgtccagcgctggcaccgccggtgtgctcataggctactgcccccaacaggatgcactggatgagctcctgaccggctgggagcatctttactactattgcagcctcagaggaataccccgtcagtgcatccccgaggtggctggagacctgattagaagactccaccttgaggcccatgccgataagcccgttgctacatactcgggcggaacaaagcgcaagctgagcactgccttggcactcgttggcaaacccgatatcctccttctggacgagccttcgagtggcatggacccttgctcgaaacgctacctgtggcagaccataatgaaagaggtgagagaggggtgcgctgccgtcctgacgagccattctatggaggagtgcgaggcattatgcaccagactagccatcatggtgaatggttccttcaagtgtttgggctcgccgcagcacatcaagaatagattcggcgatgggtacaccgtgaaggtgtggctgtgcaaggaggccaatcagcattgcaccgtgtcagatcatcttaagttgtattttcctggaattcagttcaagggccagcatctcaacctgttggagtaccacgtccccaagcgttggggatgtctagccgacctcttcaaggttatcgagaacaacaagacctttctaaacatcaaacactattccataaaccagaccaccctcgaacaagtcttcatcaatttcgcctccgaacaacagcaaactctccagtcgacattggacccgtcaacagactctcaccatactcaccacctccccatctac

SEQ ID NO: 244355 - DNA, 17184 bp, Artificial Sequence
  derived and/or modified sequence
gactgagagcagggagcagcaggcatggggcatgccgggtgccagttcaaagccctgctgtggaagaattggctctgcagactcaggaacccggtccttttccttgctgaattcttctggccttgtatcctgtttgtaattctgacagttcttcgttttcaagaacctcccagatacagagacatttgttatttgcagccccgagatctacccagctgtggtgttatcccctttgttcaaagccttctttgtaacactggatcaaggtgtaggaacttcagctatgaagggtcaatggagcatcattttcgtttgtctaggttccaaactgcagctgaccccaagaaagtcaacaacctggcctttttaaaagagatacaagacctggcagaggaaattcatggaatgatggacaaggcaaaaaacttaaaaagactttgggtagaacgatccaacactccagattcttcttatggttccagtttttttacaatggatctcaataagaccgaggaggtaatattgaaactggaaagcctccatcagcagcctcatatctgggattttctacttttactgccgagactacacacaagccatgatcatgtggaagatggcatggatgttgcagtgaaccttctccagaccattttgaattccttaatatccctagaagatttagattggcttccactcaaccaaactttttcccaggtttctgaacttgtactgaatgtgaccatttcgacactgacatttctgcagcaacatggagtagcagtcaccgagccagtttaccacctgtccatgcagaatatagtgtgggatccacagaaagtccagtatgatctcaaatcccagtttggctttgatgatcttcacacggaacagatcctgaactcttcagctgaactgaaggagattcccacagacacttccttggagaagatggtgtgttcagtcttgtctagcacatcagaggatgaagctgagaaatggggccacgttggaggctgccaccctaagtggtcagaagccaaaaactatcttgtccatgcagtcagctggctgcgagtctaccaacaggtgtttgttcagtggcaacagggtagcctgcttcagaagacactcacaggcatgggccatagtctggaggctctcaggaatcagtttgaagaagagagcaagccctggaaggtggtggaagctctgcacactgcactgctcctgctgaatgacagcttgtcagcagatggcccaaaagataatcatacatttccaaagatattacagcatctgtggaaattgcaaagcttgctgcaaaacctgccccagtggccggcactgaagagatttcttcagcttgatggagctctcagaaatgcgatagctcagaatttacattttgtccaagaagtcctcatttgcctggagacatcagctaatgattttaaatggtttgaacttaaccaattgaaactggaaaaggatgtgttcttttgggagctgaaacagatgttggcgaagaatgctgtctgcccgaatggtcgtttctctgagaaggaggtctttttgccgcctggaaactccagcatatggggtggtctccagggactgttgtgctattgtaactcctctgagacgagtgttttaaacaagctacttggttcagtagaggatgctgatcgtattttgcaagaggtcattacttggcacaaaaatatgtcagttttaatacctgaagaatatttggactggcaggaacttgagatgcagctgtcagaagcaagcctttcctgtactcggctcttcctgctgctgggagctgatccctctcctgagaatgatgtcttttctagtgactgtaagcaccagcttgtctccacagtgatatttcatacacttgaaaaaacacaatttttcctggaacaagcatattattggaaagccttcaaaaagtttatcaggaagacttgcgaagtggcccaatatgtaaatatgcaagagagtttccagaacagactattggcttttcctgaggaatctccttgttttgaagaaaacatggattggaaaatgatcagtgataattattttcaatttttgaataacttactcaagtctccaacagcttccatatccagggctttaaatttcacaaagcaccttctaatgatggaaaagaagttgcacacccttgaggatgaacaaatgaactttcttttatcatttgtggaattttttgagaaattattgttgcctaatctttttgactcctccattgttcccagtttccacagcctcccatctctcacagaggatattctgaatataagttctctgtggacaaatcatttaaaaagtttaaagagagacccatctgccactgatgctcagaaactcttggaatttggcaacgaagtgatttggaaaatgcagactctcggaagtcactggataaggaaggaaccaaaaaatcttttgagattcatagaattaatactttttgaaattaatcccaaattactagaattatgggcctatggcatttcaaaaggaaaaagagctaaattggaaaacttctttacacttttaaatttttctgttccagaaaatgagattctgagtacaagttttaacttttcccagttgttccattcagattggcctaaatcaccagctatgaacatagattttgtacgtttaagtgaggctataataactagtctccatgaatttggatttttggagcaggaacagatctcagaagctctgaacacagtctacgctatcaggaatgcatctgatcttttctcagccctttctgaaccacaaaaacaagaagttgataaaattttgactcacatacacctaaatgtcttccaggacaaggattcagctttacttctgcaaatttattcttcattttaccgatatatttatgaattattgaatattcagagtagaggctcttcgttgactttccttacacaaatctcaaaacacattttggatatcataaaacaatttaatttccaaaacatcagtaaagcatttgcatttttatttaagacagcagaggttcttgggggaatttctaatgtatcttactgtcagcaattgctttcaatttttaactttttggagcttcaggcccaatccttcatgtctacagagggccaagaactggaagtgatccacactactttgacaggcctcaaacagctgctcataattgatgaagattttcgtatttctttatttcaatatatgagccaattcttcaacagttcagtagaagacctattggataataaatgcttgatttcggacaataaacacatttcttccgtaaattattcaacaagtgaggagtcttcatttgtttttccattggcacaaattttttcaaacctctcagcaaatgtcagtgtgttcaacaagtttatgtccattcactgtaccgtttcatggcttcaaatgtggactgaaatctgggaaaccatatctcaattatttaagtttgacatgaatgttttcacatctcttcatcatggtttcactcagcttttggatgaattggaagatgatgtgaaagtctctaaaagctgccagggtatacttcccacccataatgttgctagactcatattaaatttgtttaaaaatgtaactcaagccaatgacttccataattgggaggacttcctggatctcagggattttttggtagctttaggtaatgcattagtttcagtaaaaaaacttaacttggagcaagtggagaaatcccttttcaccatggaagctgccctgcatcagttgaagacatttccattcaacgaaagtacaagcagagagtttttaaattctctgcttgaagttttcattgagtttagcagtacctcagaatatatagtcagaaatctagattcaataaatgactttctttcaaataatctcacaaattatggagaaaaatttgaaaatatcatcactgagctaagagaagcaatagtatttcttagaaatgtatcacatgatcgagatttgttttcctgtgctgatattttccaaaatgttactgagtgtattttagaagatggctttttatatgtaaatacctcacagaggatgttacgtattctagacacgttaaattccacattttcctctgagaacacaattagcagtctgaaaggatgcattgtatggttagatgtcataaaccatttgtatttgttgtctaactccagtttttcacaaggtcatcttcaaaatattttggggaatttcagagatatagaaaacaaaatgaactctatattaaaaattgtaacttgggtgttaaatataaaaaaacctctttgttcatcaaatggctcacatataaattgtgtcaatatttacttgaaagatgtaactgactttctaaatattgtacttactacagtctttgaaaaagagaagaaacctaaatttgagattttattagctcttttaaatgattccacaaagcaagtaaggatgagtatcaacaacttaacaacagactttgattttgcatctcagtccaattggagatattttactgaattaattctaagaccaatagaaatgtcagatgaaattcctaatcagtttcaaaatatttggcttcatttaataacactggggaaggaatttcagaagcttgtaaaaggtatttactttaacatcctggaaaataattcctcttctaaaactgaaaacttgttaaacatatttgccaccagtccaaaagaaaaggatgtaaacagtgtaggcaattccatttatcacttagctagttaccttgccttcagcttatctcatgacctccaaaattcaccaaaaataataatttcacctgaaataatgaaagctacaggtcttggtattcaactgataagggatgtgttcaactccttaatgcctgtagttcatcacactagtccacaaaatgcaggttatatgcaagctttgaagaaggtaacttctgtcatgcgtacccttaagaaggcagacatagaccttttagtggatcagcttgaacaagttagtgtaaacctaatggatttctttaagaatatcagtagtgtgggaactggcaatttagtggtcaatttgcttgttggcttgatggaaaaatttgcagacagctcacattcttggaatgttaatcatctgctgcagctctcacgcctgtttcctaaagatgttgtggatgctgtgatagatgtgtactatgtgcttcctcatgctgtaaggctcctgcagggagtacctggtaaaaacatcactgaaggcctcaaggatgtctacagcttcacactccttcatggcataaccatttcaaatatcaccaaggaagacttcgcaattgtgataaaaattcttttggatacaattgaattagtatcagataagccagatattatttcagaggctttagcttgttttcctgtggtttggtgctggaatcacacaaattctggatttcggcagaattcaaagatagacccctgcaatgtccatgggctcatgtcttcttccttttatggcaaagtggccagtatacttgatcatttccacctgtctccccaaggtgaagattcaccatgttcaaatgaaagctcccgaatggaaataactaggaaagtggtctgcataattcatgaattagtggactggaattctattcttctggagctctctgaagtcttccatgttaacatttctcttgtgaaaactgtgcagaaattttggcataagatattaccgtttgtcccaccttcaataaatcaaactagggatagcatctctgaactctgtcctagtggttccataaagcaagttgctttgcaaatcatagaaaaacttaaaaatgtcaactttacaaaagttacatcaggtgaaaatattcttgacaaactaagtagtttaaacaagatccttaacattaatgaagacacagagacatctgttcaaaatattatttcctcaaatttggaaaggacagtacaattgatttctgaagactggagcctagaaaaaagtacgcataatctactctctttattcatgatgctccagaatgcaaatgtcacaggtagcagtttagaagcattatcaagttttattgaaaaaagtgaaacaccttacaactttgaagaactatggcccaagtttcaacaaatcatgaaagacctaacccaagattttagaatcagacacctgctttctgaaatgaacaaaggaatcaaaagtataaattcaatggctcttcaaaagataactttgcagtttgcccatttcctggaaatcctggattcaccgtcattgaagacattagaaattattgaagattttctattggtcacaaaaaactggcttcaggaatatgcaaatgaggattactccagaatgatagaaacattattcattcctgtgaccaatgagagttcaactgaagatatagctttgttagccaaagctattgctactttttggggctctttaaaaaatatatctagagcaggcaattttgatgttgcctttcttacccatctgctaaatcaagaacagctgactaatttctcagttgttcagctgctttttgaaaacatcctaattaatttgatcaataacttagctgggaattctcaggaagcagcttggaacttaaatgatactgaccttcaaataatgaatttcattaaccttatcttgaaccatatgcagtcagaaactagtaggaaaacagttctctctctgagaagcatagtagatttcacagaacagtttttgaaaacattcttctccctttttctaaaggaagattctgagaacaaaatatctcttctgctgaaatatttccacaaagatgttattgcagagatgagttttgtcccaaaagataaaattctagaaattctgaaactggatcaatttcttaccctgatgatacaagacagattgatgaacattttttcaagtttaaaggagactatatatcacctaatgaaaagttcatttatattagacaatggagaattttattttgatactcatcaaggactgaagttcatgcaagatttatttaatgcccttctcagggaaacttcaatgaaaaataagactgaaaataatatagactttttcacagtggtgagtcagttgtttttccatgtgaataagtctgaggacctcttcaaactcaatcaagatcttgggtcagctcttcaccttgtaagagaatgttcaacagagatggcaagacttctggatacaattttacactctcctaataaggacttctatgctttgtatcctaccctccaagaagttatacttgctaatctaacggatttgcttttctttataaataattcattccctctaagaaacagagcaacattagaaattactaagagattagttggtgctatttcaagagcaagtgaagaaagtcacgtcctgaaacccctcttagaaatgtctgggactctggtcatgctgttgaatgacagtgctgacctgagagatcttgccacatcaatggactccattgtgaaacttcttaagctggtcaagaaagtttcggggaagatgtccacagtttttaaaactcattttatctccaataccaaggacagtgtgaaattctttgacactctgtattccatcatgcaacaaagtgttcaaaatcttgtgaaagaaatagctactttaaaaaaaatagatcatttcacatttgaaaagataaatgatttgttggtgccatttcttgacttggcctttgaaatgattggggtagaaccttatatatcatcaaactctgatattttcagtatgtcacctagcatactctcatatatgaaccaatctaaggacttttctgatattttggaagaaattgctgaatttttaacatctgtgaaaatgaacttggaagatatgaggagtcttgcggtagcatttaacaatgagactcaaacattttctatggattctgtcaacttacgggaagaaattctgggttgcttagttcctataaataacatcaccaaccaaatggacttcttataccctaatccaatttccactcatagtggccctcaagatataaaatgggaaataattcatgaagtgatcccttttttggataaaatattatcacaaaacagcacagaaataggatctttcttgaaaatggtgatctgtctcaccttagaagctctttggaaaaacttaaagaaagataattggaatgtttctaatgtgttgatgacatttactcagcatccaaataaccttttgaaaaccatagaaacagttttagaggcctccagtggaattaaaagtgactatgaaggtgatttgaataaaagtttatattttgacacacctttgagtcagaatataactcatcatcaacttgaaaaagcaatccataatgttttaagtagaatagctctctggaggaaaggacttctgtttaacaactctgaatggataacttccacaagaactttgtttcagccactttttgagattttcattaaagcaaccaccggaaagaatgtcacatcagaaaaagaagagagaaccaagaaagagatgattgactttccttatagtttcaaaccatttttctgtttggagaaatacctgggaggattatttgtattgactaaatactggcaacaaatcccactaacagatcaaagtgttgttgagatttgtgaagttttccagcagactgtgaagccctcagaagccatggagatgctgcagaaagtgaagatgatggtcgtacgtgtgctcaccatcgttgcagaaaacccttcctggaccaaggacattttgtgtgctactctgagttgcaagcaaaatgggataaggcatctcattttatctgctatacaaggggtcactttggcgcaggaccacttccaggaaattgaaaagatatggtcctcgccgaatcagctaaattgtgaaagtcttagcaagaatctttctagcaccttggagagcttcaagagcagcttggaaaatgccactggccaggactgcacaagccagccgaggctggagacggtgcagcagcacttgtacatgttggccaaaagcctcgaggaaacttggtcatcagggaatcccatcatgacttttctcagcaatttcacagtaactgaggatgtaaaaataaaagatttgatgaagaatatcaccaagttgactgaggagcttcgctcttccatccaaatctcgaatgagactatccatagcattctagaagcaaatatttcccactccaaggttctcttcagtgccctcaccgtagctctgtctggaaagtgtgatcaggaaatccttcatctcctgctgacatttcccaaaggggaaaaatcttggatcgcagcggaggaactctgtagcctgccagggtcaaaagtgtattctctgattgtgttgctgagtcgaaacttggatgtgcgagctttcatttacaagactctgatgccttctgaagcaaatggcttgctcaactccttgctggatatagtttccagcctcagcgccttgcttgccaaagcccagcacgtctttgagtatcttcctgagtttcttcacacatttaaaatcactgccttgctagaaaccctggactttcaacaggtttcacaaaatgtccaggccagaagttcagcttttggttctttccagtttgtgatgaagatggtttgcaaggaccaagcatcattccttagcgattctaatatgtttattaatttgcccagagttaaggaactcttggaagatgacaaagaaaaattcaacattcctgaagattcaacaccgttttgcttgaagctttatcaggaaattctacaattgccaaatggtgctttggtgtggaccttcctaaaacccatattgcatggaaaaatactatacacaccaaacactccagaaattaacaaggtcattcaaaaggctaattacaccttttatattgtggacaaactaaaaactttatcagaaacactgctggaaatgtccagccttttccagagaagtggaagtggccagatgttcaaccagctgcaggaggccctgagaaacaaatttgtaagaaactttgtagaaaaccagttgcacattgatgtagacaaacttactgaaaaactccagacatacggagggctgctggatgagatgtttaaccatgcaggcgctggacgcttccgtttcttgggcagcatcttggtcaatctctcttcctgcgtggcactgaaccgtttccaggctctgcagtctgtcgacatcctggagactaaagcacatgaactcttgcagcagaacagcttcttggccagtatcattttcagcaattccttattcgacaagaacttcagatcagagtctgtcaaactgccaccccatgtctcatacacaatccggaccaatgtgttatacagcgtgcgaacagatgtggtaaaaaacccttcttggaagttccaccctcagaatctaccagctgatgggttcaaatataactacgtctttgccccactgcaagacatgatcgaaagagccatcattttggtgcagactgggcaggaagccctggaaccagcagcacagactcaggcggccccttacccctgccataccagcgacctattcctgaacaacgttggtttcttttttccactgataatgatgctgacgtggatggtgtctgtggccagcatggtcagaaagttggtgtatgagcaggagatacagatagaagagtatatgcggatgatgggagtgcatccagtgatccatttcctggcctggttcctggagaacatggctgtgttgaccataagcagtgctactctggccatcgttctgaaaacaagtggcatctttgcacacagcaatacctttattgttttcctctttctcttggattttgggatgtcagtcgtcatgctgagctacctcttgagtgcatttttcagccaagctaatacagcggccctttgtaccagcctggtgtacatgatcagctttctgccctacatagttctattggttctacataaccaattaagttttgttaatcagacatttctgtgccttctttcgacaaccgcctttggacaaggggtattttttattacattcctggaaggacaagagacagggattcaatggaataatatgtaccaggctctggaacaagggggcatgacatttggctgggtttgctggatgattctttttgattcaagcctttattttttgtgtggatggtacttgagcaacttgattcctggaacatttggtttacggaaaccatggtatttcccctttactgcctcatattggaagagtgtgggtttcttggtggagaaaaggcaatactttctaagttctagtctgttcttcttcaatgagaactttgacaataaagggtcatcactgcaaaacagggaaggagagcttgaaggaagtgccccgggagtcaccctggtgtctgtgaccaaggaatatgagggccacaaggctgtggtccaagacctcagcctgaccttctacagagaccaaatcaccgccctgctggggacaaacggtgccgggaaaaccactatcatatccatgttgacggggctccaccctcccacttctggaaccatcatcatcaatggcaagaacctacagacagacctgtcgagggtcagaatggagcttggtgtgtgtccgcagcaggacatcctgttggacaacctcaccgtccgggaacatttgctgctctttgcttccataaaggcgcctcagtggaccaagaaggagctgcatcagcaagtcaatcaaactcttcaggatgtggacttaactcagcatcagcacaaacagacccgagctctgtctggaggcctgaagaggaagctctcccttggcattgctttcatgggcatgtcgaggaccgtggttctggatgagcccaccagtggggtggacccttgctcccggcatagcctgtgggacattctgctcaagtaccgagaaggtcgtacgatcatcttcacaacccaccacctggatgaagctgaagcgctgagtgaccgcgtggccgtcctccagcatgggaggctcaggtgctgcggtcctcccttctgcctgaaggaggcatatggccaggggctccgcctgacactcacgaggcagccttctgttctggaggcccatgatctgaaagacatggcttgtgttacatccctgataaagatctatattccacaagcatttctcaaagacagcagtggaagtgagctgacctacaccattccaaaggacacagacaaggcctgcttgaaagggctcttccaggccctggatgagaacctgcatcagctgcacctgacgggctatgggatctcagacaccaccttagaagaggtgtttttgatgcttttgcaagattccaacaagaaatctcacattgccctggggactgagtcagagctgcagaaccacaggcctacaggacatctgtctggctactgtggctccctagcacggcccgcaactgtgcagggcgtccagctgctccgcgcacaagtggccgcgatcctggcccggaggctccgccgcacgctgcgcgccgggaagagcaccctcgccgacctgctgctgccagtcctcttcgtggccttggccatgggcttgttcatggtgagacccctggccaccgagtaccctcccctcagactcacacctggacattaccagcgggccgagacctactttttcagcagtgggggcgacaacttggacctcacccgtgtgcttctgcggaagtttagagatcaagatttgccctgtgcagatttaaacccacgccagaagaattcttcatgctggcgcacagatcccttttctcacccagaattccaggattcatgtggctgcctgaagtgtccaaatagaagtgctagtgctccctacctgaccaaccacctgggccacacactgttgaatctctcaggcttcaatatggaggagtacttgctggcaccatctgaaaaaccaaggcttggaggttggtcttttggattaaaaatccccagtgaagctggaggtgcaaatggaaacatatcaaaacccccaactctggcaaaggtgtggtataatcagaagggttttcattccctaccttcctacttaaatcatctaaacaaccttattttgtggcagcacctaccccctactgtggactggagacaatacggaataacactctacagccacccatatggaggggccttgctgaacaaggacaagatcctggagagcatccgtcagtgtggagtggccctctgcatcgtgctgggattctccatcctgtctgcatccatcggcagctctgtggtgagggacagggtgattggagccaaaaggttgcagcacataagtggccttggctacaggatgtactggttcacaaacttcctatatgacatgctcttttacttggtttccgtctgcctgtgtgttgccgttattgtcgccttccagttaacagcttttactttccgcaagaacttggcagccacggccctcctgctgtcacttttcggatatgcaactcttccatggatgtacctgatgtccagaatcttttccagttcggacgtggctttcatttcctatgtctcactaaacttcatctttggcctttgtaccatgctcataaccattatgccccggttgctagccatcatctccaaagctaagaatttacagaatatctatgatgtcctcaagtgggtctttactatttttcctcaattctgtcttggtcaaggactggtagaactctgctataatcagatcaaatatgacctgacccacaacttcggcattgattcctatgtgagtccctttgagatgaactttctgggctggatcttcgtgcaactggcctcgcagggcacagtacttctcctcttgagggttctgctacactgggaccttctgcgatggccaaggggtcattctactctccaaggcacagtcaaatcttctaaggatacagatgttgaaaaagaggaaaagagagtgtttgaaggaaggaccaatggagacattcttgtgttatacaaccttagtaaacattatcgacgctttttccagaatattattgctgtgcaagatattagtttgggcataccaaaaggagagtgctttggacttctaggggtgaatggagctgggaagagcacgactttcaaaatgctgaatggtgaagtttctctaacttcaggacatgctatcatcaggactcccatgggagacgccgtggacctgtcttctgctggcacggcaggcgtgctcattggctactgtccccagcaggatgccctggacgagcttctgactggttgggaacatctctattattactgtagcttacgcgggattccaaggcagtgcatccctgaggttgctggagacctcatcaggcgcttacacctcgaagcccacgcggacaaacctgtggccacctacagtgggggaaccaagcggaaactctctacagccctggccctggtggggaaacctgacattcttttattggatgagcccagctctgggatggatccctgctctaagcggtacctgtggcaaacaataatgaaggaggttcgggaaggctgtgctgcggtgctgacctcccacagcatggaggagtgtgaggctctttgcacaagactggccataatggttaacggcagcttcaaatgtcttggttctcctcagcacatcaaaaataggtttggtgatggttatacagtcaaagtttggctctgtaaggaagcaaatcaacattgcactgtttctgaccacttgaagctttattttccaggaattcagttcaagggacagcacctgaatttattagaatatcatgtgccaaaaagatggggatgcctagctgacttgttcaaagttatagagaacaataaaaccttcttgaatattaagcattattccattaaccaaaccactttggagcaggtatttattaattttgcttctgagcagcagcaaactctacaatctactcttgatccatccactgacagtcaccacacacatcacttgcccatctgagcactaaagaagtttccataaggaataaaaccttgtcttccattacaattaacagtcaaggataaaacaagcacgcgcacaatcaaggagctggaacacactctccaggccgtcaaattattctcttgttcattttctattttgaatctccttgttagttaataaccaccaaatggaaaggtcattctttctgcagacttttggggagctcctccaaaacatttgttctctttaccatgccagatggacaccagcttctttgtgacaaaggcatgaatgatttgacagtgtccaaactgagacattctggagctggaaagcctgtcacactagagtgtgtgtgacatgtccactctaaacatgtcacttttctgttaagaaaactgagccccctccccacaggttaaaaaactttagtaacttgtttgtatagaaaatagtaacaaggactattttctattgttgtcatctatttactagatacatgtttttaatgattttaatgtaagcttttattaatactgatgacattatatggtatgatatgaaaaaatcaccaattttttacatataaaagatacctttttaaaaaaataggttttaagagctcttttagtatacactttagcaaaattaattaaattgaactagttactctgtatcaattacagtagttctaccagaatctcccaggttataatttatgagggtagagaaataaaatgtagatgcattttctttttcttcatttggatgaataattactgttttttgttattctaagtcagtgtttttcaaagcgtagtggtccccatattagctgcattgccatcttctgggagcttgcaagaaatgtacattctcaggatccactccagacctattgaatctcaaattctggggcttaaacaagcacattccaagttaagaaccaatgacctaagggaatgtctggttacctcctagttatacaagcaaaatctgcatagtatgtagtcttttttatttatttattttttttttttgaggcggagtctcgctctgtcacccaggctggagtgcagtggcgcgatgtcggctcactgcaagctccgcctcctgggttcacgccattctcctgcctcagcctccccagcagctgggactacaggcacacatcgccacacccggctaatttttagtatttttagtagagacggggtttcaccgtgttagccaggatggtctctatctcctgaccttgtgatccgcccccctccacctcccaaagtgctgggattacaggcgtgagccaccgtgtccggccgtagtttattttaaaatatatttttaaaagctttgtaaaaattatgtcattctcagaattgttgtcttcaaagcattgtcagatgtagagtgctcagatgtggctcttaaagactatatacatctgaatttttcatcctatagttagtaagatgcataaaatcaatccactactgaaatagtttccagtcagacatttctgagttcagacatttctcaacattcttttaacaacatttttctgaatcctcaatagaaaatcacattaatcttattttaaaatttggcctttttcaacactaacgttgagtaccggtagcttgtgatcaaaggcatatacttccttatgagatttctttactaaagcaagatttcattaaatctctatttcctaaatatcattctatacaaaagatattttttaaacggtaaggattaagacaatcactgatagctttgttgtgagcaattttgattcccatgtatcacatgaattacacttccttaaataaattacagtttatggctgtatgatttattctctaattctaacatagtctagttgtcaaaaggaaatatgtaatctttttatgattgttgaatcaataaataccaatttgtgaaacatgaatgtgtttaaactgcagtgaataaatgagatgtgctttaatttaaccc

SEQ ID NO: 244356 - DNA, 15177 bp, Artificial Sequence
  derived and/or modified sequence
atgggccacgccggctgccagttcaaggccctgctgtggaagaactggctgtgcagactgagaaaccccgtgctgttcctggccgagttcttctggccctgcatcctgttcgtgatcctgaccgtgctgagattccaggagccccccagatacagagacatctgctacctgcagcccagagacctgcccagctgcggcgtgatccccttcgtgcagagcctgctgtgcaacaccggcagcagatgcagaaacttcagctacgagggcagcatggagcaccacttcagactgagcagattccagaccgccgccgaccccaagaaggtgaacaacctggccttcctgaaggagatccaggacctggccgaggagatccacggcatgatggacaaggccaagaacctgaagagactgtgggtggagagaagcaacacccccgacagcagctacggcagcagcttcttcaccatggacctgaacaagaccgaggaggtgatcctgaagctggagagcctgcaccagcagccccacatctgggacttcctgctgctgctgcccagactgcacaccagccacgaccacgtggaggacggcatggacgtggccgtgaacctgctgcagaccatcctgaacagcctgatcagcctggaggacctggactggctgcccctgaaccagaccttcagccaggtgagcgagctggtgctgaacgtgaccatcagcaccctgaccttcctgcagcagcacggcgtggccgtgaccgagcccgtgtaccacctgagcatgcagaacatcgtgtgggacccccagaaggtgcagtacgacctgaagagccagttcggcttcgacgacctgcacaccgagcagatcctgaacagcagcgccgagctgaaggagatccccaccgacaccagcctggagaagatggtgtgcagcgtgctgagcagcaccagcgaggacgaggccgagaagtggggccacgtgggcggctgccaccccaagtggagcgaggccaagaactacctggtgcacgccgtgagctggctgagagtgtaccagcaggtgttcgtgcagtggcagcagggcagcctgctgcagaagaccctgaccggcatgggccacagcctggaggccctgagaaaccagttcgaggaggagagcaagccctggaaggtggtggaggccctgcacaccgccctgctgctgctgaacgacagcctgagcgccgacggccccaaggacaaccacaccttccccaagatcctgcagcacctgtggaagctgcagagcctgctgcagaacctgccccagtggcccgccctgaagagattcctgcagctggacggcgccctgagaaacgccatcgcccagaacctgcacttcgtgcaggaggtgctgatctgcctggagaccagcgccaacgacttcaagtggttcgagctgaaccagctgaagctggagaaggacgtgttcttctgggagctgaagcagatgctggccaagaacgccgtgtgccccaacggcagattcagcgagaaggaggtgttcctgccccccggcaacagcagcatctggggcggcctgcagggcctgctgtgctactgcaacagcagcgagaccagcgtgctgaacaagctgctgggcagcgtggaggacgccgacagaatcctgcaggaggtgatcacctggcacaagaacatgagcgtgctgatccccgaggagtacctggactggcaggagctggagatgcagctgagcgaggccagcctgagctgcaccagactgttcctgctgctgggcgccgaccccagccccgagaacgacgtgttcagcagcgactgcaagcaccagctggtgagcaccgtgatcttccacaccctggagaagacccagttcttcctggagcaggcctactactggaaggccttcaagaagttcatcagaaagacctgcgaggtggcccagtacgtgaacatgcaggagagcttccagaacagactgctggccttccccgaggagagcccctgcttcgaggagaacatggactggaagatgatcagcgacaactacttccagttcctgaacaacctgctgaagagccccaccgccagcatcagcagagccctgaacttcaccaagcacctgctgatgatggagaagaagctgcacaccctggaggacgagcagatgaacttcctgctgagcttcgtggagttcttcgagaagctgctgctgcccaacctgttcgacagcagcatcgtgcccagcttccacagcctgcccagcctgaccgaggacatcctgaacatcagcagcctgtggaccaaccacctgaagagcctgaagagagaccccagcgccaccgacgcccagaagctgctggagttcggcaacgaggtgatctggaagatgcagaccctgggcagccactggatcagaaaggagcccaagaacctgctgagattcatcgagctgatcctgttcgagatcaaccccaagctgctggagctgtgggcctacggcatcagcaagggcaagagagccaagctggagaacttcttcaccctgctgaacttcagcgtgcccgagaacgagatcctgagcaccagcttcaacttcagccagctgttccacagcgactggcccaagagccccgccatgaacatcgacttcgtgagactgagcgaggccatcatcaccagcctgcacgagttcggcttcctggagcaggagcagatcagcgaggccctgaacaccgtgtacgccatcagaaacgccagcgacctgttcagcgccctgagcgagccccagaagcaggaggtggacaagatcctgacccacatccacctgaacgtgttccaggacaaggacagcgccctgctgctgcagatctacagcagcttctacagatacatctacgagctgctgaacatccagagcagaggcagcagcctgaccttcctgacccagatcagcaagcacatcctggacatcatcaagcagttcaacttccagaacatcagcaaggccttcgccttcctgttcaagaccgccgaggtgctgggcggcatcagcaacgtgagctactgccagcagctgctgagcatcttcaacttcctggagctgcaggcccagagcttcatgagcaccgagggccaggagctggaggtgatccacaccaccctgaccggcctgaagcagctgctgatcatcgacgaggacttcagaatcagcctgttccagtacatgagccagttcttcaacagcagcgtggaggacctgctggacaacaagtgcctgatcagcgacaacaagcacatcagcagcgtgaactacagcaccagcgaggagagcagcttcgtgttccccctggcccagatcttcagcaacctgagcgccaacgtgagcgtgttcaacaagttcatgagcatccactgcaccgtgagctggctgcagatgtggaccgagatctgggagaccatcagccagctgttcaagttcgacatgaacgtgttcaccagcctgcaccacggcttcacccagctgctggacgagctggaggacgacgtgaaggtgagcaagagctgccagggcatcctgcccacccacaacgtggccagactgatcctgaacctgttcaagaacgtgacccaggccaacgacttccacaactgggaggacttcctggacctgagagacttcctggtggccctgggcaacgccctggtgagcgtgaagaagctgaacctggagcaggtggagaagagcctgttcaccatggaggccgccctgcaccagctgaagaccttccccttcaacgagagcaccagcagagagttcctgaacagcctgctggaggtgttcatcgagttcagcagcaccagcgagtacatcgtgagaaacctggacagcatcaacgacttcctgagcaacaacctgaccaactacggcgagaagttcgagaacatcatcaccgagctgagagaggccatcgtgttcctgagaaacgtgagccacgacagagacctgttcagctgcgccgacatcttccagaacgtgaccgagtgcatcctggaggacggcttcctgtacgtgaacaccagccagagaatgctgagaatcctggacaccctgaacagcaccttcagcagcgagaacaccatcagcagcctgaagggctgcatcgtgtggctggacgtgatcaaccacctgtacctgctgagcaacagcagcttcagccagggccacctgcagaacatcctgggcaacttcagagacatcgagaacaagatgaacagcatcctgaagatcgtgacctgggtgctgaacatcaagaagcccctgtgcagcagcaacggcagccacatcaactgcgtgaacatctacctgaaggacgtgaccgacttcctgaacatcgtgctgaccaccgtgttcgagaaggagaagaagcccaagttcgagatcctgctggccctgctgaacgacagcaccaagcaggtgagaatgagcatcaacaacctgaccaccgacttcgacttcgccagccagagcaactggagatacttcaccgagctgatcctgagacccatcgagatgagcgacgagatccccaaccagttccagaacatctggctgcacctgatcaccctgggcaaggagttccagaagctggtgaagggcatctacttcaacatcctggagaacaacagcagcagcaagaccgagaacctgctgaacatcttcgccaccagccccaaggagaaggacgtgaacagcgtgggcaacagcatctaccacctggccagctacctggccttcagcctgagccacgacctgcagaacagccccaagatcatcatcagccccgagatcatgaaggccaccggcctgggcatccagctgatcagagacgtgttcaacagcctgatgcccgtggtgcaccacaccagcccccagaacgccggctacatgcaggccctgaagaaggtgaccagcgtgatgagaaccctgaagaaggccgacatcgacctgctggtggaccagctggagcaggtgagcgtgaacctgatggacttcttcaagaacatcagcagcgtgggcaccggcaacctggtggtgaacctgctggtgggcctgatggagaagttcgccgacagcagccacagctggaacgtgaaccacctgctgcagctgagcagactgttccccaaggacgtggtggacgccgtgatcgacgtgtactacgtgctgccccacgccgtgagactgctgcagggcgtgcccggcaagaacatcaccgagggcctgaaggacgtgtacagcttcaccctgctgcacggcatcaccatcagcaacatcaccaaggaggacttcgccatcgtgatcaagatcctgctggacaccatcgagctggtgagcgacaagcccgacatcatcagcgaggccctggcctgcttccccgtggtgtggtgctggaaccacaccaacagcggcttcagacagaacagcaagatcgacccctgcaacgtgcacggcctgatgagcagcagcttctacggcaaggtggccagcatcctggaccacttccacctgagcccccagggcgaggacagcccctgcagcaacgagagcagcagaatggagatcaccagaaaggtggtgtgcatcatccacgagctggtggactggaacagcatcctgctggagctgagcgaggtgttccacgtgaacatcagcctggtgaagaccgtgcagaagttctggcacaagatcctgcccttcgtgccccccagcatcaaccagaccagagacagcatcagcgagctgtgccccagcggcagcatcaagcaggtggccctgcagatcatcgagaagctgaagaacgtgaacttcaccaaggtgaccagcggcgagaacatcctggacaagctgagcagcctgaacaagatcctgaacatcaacgaggacaccgagaccagcgtgcagaacatcatcagcagcaacctggagagaaccgtgcagctgatcagcgaggactggagcctggagaagagcacccacaacctgctgagcctgttcatgatgctgcagaacgccaacgtgaccggcagcagcctggaggccctgagcagcttcatcgagaagagcgagaccccctacaacttcgaggagctgtggcccaagttccagcagatcatgaaggacctgacccaggacttcagaatcagacacctgctgagcgagatgaacaagggcatcaagagcatcaacagcatggccctgcagaagatcaccctgcagttcgcccacttcctggagatcctggacagccccagcctgaagaccctggagatcatcgaggacttcctgctggtgaccaagaactggctgcaggagtacgccaacgaggactacagcagaatgatcgagaccctgttcatccccgtgaccaacgagagcagcaccgaggacatcgccctgctggccaaggccatcgccaccttctggggcagcctgaagaacatcagcagagccggcaacttcgacgtggccttcctgacccacctgctgaaccaggagcagctgaccaacttcagcgtggtgcagctgctgttcgagaacatcctgatcaacctgatcaacaacctggccggcaacagccaggaggccgcctggaacctgaacgacaccgacctgcagatcatgaacttcatcaacctgatcctgaaccacatgcagagcgagaccagcagaaagaccgtgctgagcctgagaagcatcgtggacttcaccgagcagttcctgaagaccttcttcagcctgttcctgaaggaggacagcgagaacaagatcagcctgctgctgaagtacttccacaaggacgtgatcgccgagatgagcttcgtgcccaaggacaagatcctggagatcctgaagctggaccagttcctgaccctgatgatccaggacagactgatgaacatcttcagcagcctgaaggagaccatctaccacctgatgaagagcagcttcatcctggacaacggcgagttctacttcgacacccaccagggcctgaagttcatgcaggacctgttcaacgccctgctgagagagaccagcatgaagaacaagaccgagaacaacatcgacttcttcaccgtggtgagccagctgttcttccacgtgaacaagagcgaggacctgttcaagctgaaccaggacctgggcagcgccctgcacctggtgagagagtgcagcaccgagatggccagactgctggacaccatcctgcacagccccaacaaggacttctacgccctgtaccccaccctgcaggaggtgatcctggccaacctgaccgacctgctgttcttcatcaacaacagcttccccctgagaaacagagccaccctggagatcaccaagagactggtgggcgccatcagcagagccagcgaggagagccacgtgctgaagcccctgctggagatgagcggcaccctggtgatgctgctgaacgacagcgccgacctgagagacctggccaccagcatggacagcatcgtgaagctgctgaagctggtgaagaaggtgagcggcaagatgagcaccgtgttcaagacccacttcatcagcaacaccaaggacagcgtgaagttcttcgacaccctgtacagcatcatgcagcagagcgtgcagaacctggtgaaggagatcgccaccctgaagaagatcgaccacttcaccttcgagaagatcaacgacctgctggtgcccttcctggacctggccttcgagatgatcggcgtggagccctacatcagcagcaacagcgacatcttcagcatgagccccagcatcctgagctacatgaaccagagcaaggacttcagcgacatcctggaggagatcgccgagttcctgaccagcgtgaagatgaacctggaggacatgagaagcctggccgtggccttcaacaacgagacccagaccttcagcatggacagcgtgaacctgagagaggagatcctgggctgcctggtgcccatcaacaacatcaccaaccagatggacttcctgtaccccaaccccatcagcacccacagcggcccccaggacatcaagtgggagatcatccacgaggtgatccccttcctggacaagatcctgagccagaacagcaccgagatcggcagcttcctgaagatggtgatctgcctgaccctggaggccctgtggaagaacctgaagaaggacaactggaacgtgagcaacgtgctgatgaccttcacccagcaccccaacaacctgctgaagaccatcgagaccgtgctggaggccagcagcggcatcaagagcgactacgagggcgacctgaacaagagcctgtacttcgacacccccctgagccagaacatcacccaccaccagctggagaaggccatccacaacgtgctgagcagaatcgccctgtggagaaagggcctgctgttcaacaacagcgagtggatcaccagcaccagaaccctgttccagcccctgttcgagatcttcatcaaggccaccaccggcaagaacgtgaccagcgagaaggaggagagaaccaagaaggagatgatcgacttcccctacagcttcaagcccttcttctgcctggagaagtacctgggcggcctgttcgtgctgaccaagtactggcagcagatccccctgaccgaccagagcgtggtggagatctgcgaggtgttccagcagaccgtgaagcccagcgaggccatggagatgctgcagaaggtgaagatgatggtggtgagagtgctgaccatcgtggccgagaaccccagctggaccaaggacatcctgtgcgccaccctgagctgcaagcagaacggcatcagacacctgatcctgagcgccatccagggcgtgaccctggcccaggaccacttccaggagatcgagaagatctggagcagccccaaccagctgaactgcgagagcctgagcaagaacctgagcagcaccctggagagcttcaagagcagcctggagaacgccaccggccaggactgcaccagccagcccagactggagaccgtgcagcagcacctgtacatgctggccaagagcctggaggagacctggagcagcggcaaccccatcatgaccttcctgagcaacttcaccgtgaccgaggacgtgaagatcaaggacctgatgaagaacatcaccaagctgaccgaggagctgagaagcagcatccagatcagcaacgagaccatccacagcatcctggaggccaacatcagccacagcaaggtgctgttcagcgccctgaccgtggccctgagcggcaagtgcgaccaggagatcctgcacctgctgctgaccttccccaagggcgagaagagctggatcgccgccgaggagctgtgcagcctgcccggcagcaaggtgtacagcctgatcgtgctgctgagcagaaacctggacgtgagagccttcatctacaagaccctgatgcccagcgaggccaacggcctgctgaacagcctgctggacatcgtgagcagcctgagcgccctgctggccaaggcccagcacgtgttcgagtacctgcccgagttcctgcacaccttcaagatcaccgccctgctggagaccctggacttccagcaggtgagccagaacgtgcaggccagaagcagcgccttcggcagcttccagttcgtgatgaagatggtgtgcaaggaccaggccagcttcctgagcgacagcaacatgttcatcaacctgcccagagtgaaggagctgctggaggacgacaaggagaagttcaacatccccgaggacagcacccccttctgcctgaagctgtaccaggagatcctgcagctgcccaacggcgccctggtgtggaccttcctgaagcccatcctgcacggcaagatcctgtacacccccaacacccccgagatcaacaaggtgatccagaaggccaactacaccttctacatcgtggacaagctgaagaccctgagcgagaccctgctggagatgagcagcctgttccagagaagcggcagcggccagatgttcaaccagctgcaggaggccctgagaaacaagttcgtgagaaacttcgtggagaaccagctgcacatcgacgtggacaagctgaccgagaagctgcagacctacggcggcctgctggacgagatgttcaaccacgccggcgccggcagattcagattcctgggcagcatcctggtgaacctgagcagctgcgtggccctgaacagattccaggccctgcagagcgtggacatcctggagaccaaggcccacgagctgctgcagcagaacagcttcctggccagcatcatcttcagcaacagcctgttcgacaagaacttcagaagcgagagcgtgaagctgcccccccacgtgagctacaccatcagaaccaacgtgctgtacagcgtgagaaccgacgtggtgaagaaccccagctggaagttccacccccagaacctgcccgccgacggcttcaagtacaactacgtgttcgcccccctgcaggacatgatcgagagagccatcatcctggtgcagaccggccaggaggccctggagcccgccgcccagacccaggccgccccctacccctgccacaccagcgacctgttcctgaacaacgtgggcttcttcttccccctgatcatgatgctgacctggatggtgagcgtggccagcatggtgagaaagctggtgtacgagcaggagatccagatcgaggagtacatgagaatgatgggcgtgcaccccgtgatccacttcctggcctggttcctggagaacatggccgtgctgaccatcagcagcgccaccctggccatcgtgctgaagaccagcggcatcttcgcccacagcaacaccttcatcgtgttcctgttcctgctggacttcggcatgagcgtggtgatgctgagctacctgctgagcgccttcttcagccaggccaacaccgccgccctgtgcaccagcctggtgtacatgatcagcttcctgccctacatcgtgctgctggtgctgcacaaccagctgagcttcgtgaaccagaccttcctgtgcctgctgagcaccaccgccttcggccagggcgtgttcttcatcaccttcctggagggccaggagaccggcatccagtggaacaacatgtaccaggccctggagcagggcggcatgaccttcggctgggtgtgctggatgatcctgttcgacagcagcctgtacttcctgtgcggctggtacctgagcaacctgatccccggcaccttcggcctgagaaagccctggtacttccccttcaccgccagctactggaagagcgtgggcttcctggtggagaagagacagtacttcctgagcagcagcctgttcttcttcaacgagaacttcgacaacaagggcagcagcctgcagaacagagagggcgagctggagggcagcgcccccggcgtgaccctggtgagcgtgaccaaggagtacgagggccacaaggccgtggtgcaggacctgagcctgaccttctacagagaccagatcaccgccctgctgggcaccaacggcgccggcaagaccaccatcatcagcatgctgaccggcctgcacccccccaccagcggcaccatcatcatcaacggcaagaacctgcagaccgacctgagcagagtgagaatggagctgggcgtgtgcccccagcaggacatcctgctggacaacctgaccgtgagagagcacctgctgctgttcgccagcatcaaggccccccagtggaccaagaaggagctgcaccagcaggtgaaccagaccctgcaggacgtggacctgacccagcaccagcacaagcagaccagagccctgagcggcggcctgaagagaaagctgagcctgggcatcgccttcatgggcatgagcagaaccgtggtgctggacgagcccaccagcggcgtggacccctgcagcagacacagcctgtgggacatcctgctgaagtacagagagggcagaaccatcatcttcaccacccaccacctggacgaggccgaggccctgagcgacagagtggccgtgctgcagcacggcagactgagatgctgcggcccccccttctgcctgaaggaggcctacggccagggcctgagactgaccctgaccagacagcccagcgtgctggaggcccacgacctgaaggacatggcctgcgtgaccagcctgatcaagatctacatcccccaggccttcctgaaggacagcagcggcagcgagctgacctacaccatccccaaggacaccgacaaggcctgcctgaagggcctgttccaggccctggacgagaacctgcaccagctgcacctgaccggctacggcatcagcgacaccaccctggaggaggtgttcctgatgctgctgcaggacagcaacaagaagagccacatcgccctgggcaccgagagcgagctgcagaaccacagacccaccggccacctgagcggctactgcggcagcctggccagacccgccaccgtgcagggcgtgcagctgctgagagcccaggtggccgccatcctggccagaagactgagaagaaccctgagagccggcaagagcaccctggccgacctgctgctgcccgtgctgttcgtggccctggccatgggcctgttcatggtgagacccctggccaccgagtacccccccctgagactgacccccggccactaccagagagccgagacctacttcttcagcagcggcggcgacaacctggacctgaccagagtgctgctgagaaagttcagagaccaggacctgccctgcgccgacctgaaccccagacagaagaacagcagctgctggagaaccgaccccttcagccaccccgagttccaggacagctgcggctgcctgaagtgccccaacagaagcgccagcgccccctacctgaccaaccacctgggccacaccctgctgaacctgagcggcttcaacatggaggagtacctgctggcccccagcgagaagcccagactgggcggctggagcttcggcctgaagatccccagcgaggccggcggcgccaacggcaacatcagcaagccccccaccctggccaaggtgtggtacaaccagaagggcttccacagcctgcccagctacctgaaccacctgaacaacctgatcctgtggcagcacctgccccccaccgtggactggagacagtacggcatcaccctgtacagccacccctacggcggcgccctgctgaacaaggacaagatcctggagagcatcagacagtgcggcgtggccctgtgcatcgtgctgggcttcagcatcctgagcgccagcatcggcagcagcgtggtgagagacagagtgatcggcgccaagagactgcagcacatcagcggcctgggctacagaatgtactggttcaccaacttcctgtacgacatgctgttctacctggtgagcgtgtgcctgtgcgtggccgtgatcgtggccttccagctgaccgccttcaccttcagaaagaacctggccgccaccgccctgctgctgagcctgttcggctacgccaccctgccctggatgtacctgatgagcagaatcttcagcagcagcgacgtggccttcatcagctacgtgagcctgaacttcatcttcggcctgtgcaccatgctgatcaccatcatgcccagactgctggccatcatcagcaaggccaagaacctgcagaacatctacgacgtgctgaagtgggtgttcaccatcttcccccagttctgcctgggccagggcctggtggagctgtgctacaaccagatcaagtacgacctgacccacaacttcggcatcgacagctacgtgagccccttcgagatgaacttcctgggctggatcttcgtgcagctggccagccagggcaccgtgctgctgctgctgagagtgctgctgcactgggacctgctgagatggcccagaggccacagcaccctgcagggcaccgtgaagagcagcaaggacaccgacgtggagaaggaggagaagagagtgttcgagggcagaaccaacggcgacatcctggtgctgtacaacctgagcaagcactacagaagattcttccagaacatcatcgccgtgcaggacatcagcctgggcatccccaagggcgagtgcttcggcctgctgggcgtgaacggcgccggcaagagcaccaccttcaagatgctgaacggcgaggtgagcctgaccagcggccacgccatcatcagaacccccatgggcgacgccgtggacctgagcagcgccggcaccgccggcgtgctgatcggctactgcccccagcaggacgccctggacgagctgctgaccggctgggagcacctgtactactactgcagcctgagaggcatccccagacagtgcatccccgaggtggccggcgacctgatcagaagactgcacctggaggcccacgccgacaagcccgtggccacctacagcggcggcaccaagagaaagctgagcaccgccctggccctggtgggcaagcccgacatcctgctgctggacgagcccagcagcggcatggacccctgcagcaagagatacctgtggcagaccatcatgaaggaggtgagagagggctgcgccgccgtgctgaccagccacagcatggaggagtgcgaggccctgtgcaccagactggccatcatggtgaacggcagcttcaagtgcctgggcagcccccagcacatcaagaacagattcggcgacggctacaccgtgaaggtgtggctgtgcaaggaggccaaccagcactgcaccgtgagcgaccacctgaagctgtacttccccggcatccagttcaagggccagcacctgaacctgctggagtaccacgtgcccaagagatggggctgcctggccgacctgttcaaggtgatcgagaacaacaagaccttcctgaacatcaagcactacagcatcaaccagaccaccctggagcaggtgttcatcaacttcgccagcgagcagcagcagaccctgcagagcaccctggaccccagcaccgacagccaccacacccaccacctgcccatctag

SEQ ID NO: 244357 - protein, 671 aa, Artificial Sequence
  derived and/or modified sequence
METSRSRGGGGAVSERGGAGASVGVCRRKAEAGAGTGTLAADMDLHCDCAAETPAAEPPSGKINKAAFKLFKKRKSGGTMPSIFGVKNKGDGKSSGPTGLVRSRTHDGLAEVLVLESGRKEEPRGGGDSGGGGGGRPNPGPPRAAGPGGGSLASSSVAKSHSFFSLLKKNGRSENGKGEPVDASKAGGKQKRGLRGLFSGMRWHRKDKRAKAEAAEGRAPGGGLILPGSLTASLECVKEETPRAAREPEEPSQDAPRDPAGEPAGGEEVPAPADRAPARSCREAEGLAHPGDTGARGEDAAGHRRAEPGPGEVRTAEDASRTGAVPVKTVPLVDSEGGSGRAPAAPDPASVDPPSDPSADRICLMFSDVTSLKSFDSLTGCGDIIADQEEEAGPSCDKHVPGPGKPALSKKNPGVVAYQGGGEEMASPDEVDDTYLQEFWDMLSQTEEQGPEPQEGAAKVAAALETKVVPETPKDTRCVEAAKDASSVKRRRLNRIPIEPHPKEEPKHPEKEQQEGVPNSDEGYWDSTTPGPEEDSSSSGKKAGIPRDSYSGDALYDLYADPDGSPATLPGGKDNEETSSLSRLKPVSPGTITCPLRTPGSLLKDSKIPISIKHLTNLPSSHPVVHQQPSRSEMPRTKIPVSKVLVRRVSNRGLAGTTIRATACHDSAKKL

SEQ ID NO: 244358 - DNA, 2016 bp, Artificial Sequence
  derived and/or modified sequence
atggagaccagcagaagcagaggcggcggcggcgccgtgagcgagagaggcggcgccggcgccagcgtgggcgtgtgcagaagaaaggccgaggccggcgccggcaccggcaccctggccgccgacatggacctgcactgcgactgcgccgccgagacccccgccgccgagccccccagcggcaagatcaacaaggccgccttcaagctgttcaagaagagaaagagcggcggcaccatgcccagcatcttcggcgtgaagaacaagggcgacggcaagagcagcggccccaccggcctggtgagaagcagaacccacgacggcctggccgaggtgctggtgctggagagcggcagaaaggaggagcccagaggcggcggcgacagcggcggcggcggcggcggcagacccaaccccggcccccccagagccgccggccccggcggcggcagcctggccagcagcagcgtggccaagagccacagcttcttcagcctgctgaagaagaacggcagaagcgagaacggcaagggcgagcccgtggacgccagcaaggccggcggcaagcagaagagaggcctgagaggcctgttcagcggcatgagatggcacagaaaggacaagagagccaaggccgaggccgccgagggcagagcccccggcggcggcctgatcctgcccggcagcctgaccgccagcctggagtgcgtgaaggaggagacccccagagccgccagagagcccgaggagcccagccaggacgcccccagagaccccgccggcgagcccgccggcggcgaggaggtgcccgcccccgccgacagagcccccgccagaagctgcagagaggccgagggcctggcccaccccggcgacaccggcgccagaggcgaggacgccgccggccacagaagagccgagcccggccccggcgaggtgagaaccgccgaggacgccagcagaaccggcgccgtgcccgtgaagaccgtgcccctggtggacagcgagggcggcagcggcagagcccccgccgcccccgaccccgccagcgtggacccccccagcgaccccagcgccgacagaatctgcctgatgttcagcgacgtgaccagcctgaagagcttcgacagcctgaccggctgcggcgacatcatcgccgaccaggaggaggaggccggccccagctgcgacaagcacgtgcccggccccggcaagcccgccctgagcaagaagaaccccggcgtggtggcctaccagggcggcggcgaggagatggccagccccgacgaggtggacgacacctacctgcaggagttctgggacatgctgagccagaccgaggagcagggccccgagccccaggagggcgccgccaaggtggccgccgccctggagaccaaggtggtgcccgagacccccaaggacaccagatgcgtggaggccgccaaggacgccagcagcgtgaagagaagaagactgaacagaatccccatcgagccccaccccaaggaggagcccaagcaccccgagaaggagcagcaggagggcgtgcccaacagcgacgagggctactgggacagcaccacccccggccccgaggaggacagcagcagcagcggcaagaaggccggcatccccagagacagctacagcggcgacgccctgtacgacctgtacgccgaccccgacggcagccccgccaccctgcccggcggcaaggacaacgaggagaccagcagcctgagcagactgaagcccgtgagccccggcaccatcacctgccccctgagaacccccggcagcctgctgaaggacagcaagatccccatcagcatcaagcacctgaccaacctgcccagcagccaccccgtggtgcaccagcagcccagcagaagcgagatgcccagaaccaagatccccgtgagcaaggtgctggtgagaagagtgagcaacagaggcctggccggcaccaccatcagagccaccgcctgccacgacagcgccaagaagctgtag

SEQ ID NO: 244359 - DNA, 2016 bp, Artificial Sequence
  derived and/or modified sequence
atggaaacaagtcgctccaggggtggaggcggagctgtgtccgagaggggtggagcaggggctagcgtcggagtatgtagacgaaaggccgaagccggcgccggcaccggtacactggccgcagacatggacctgcattgcgactgcgctgctgaaactcccgccgctgaacctccatccggcaagatcaacaaagccgctttcaaactgttcaagaagcggaagagtggcggcaccatgccatccatatttggcgtcaaaaataagggcgatggtaagagttccggaccaacgggactcgtaaggtcccggacccacgatggtctcgcagaggtactcgtcttggagtcaggaagaaaggaggagccgcgcggggggggcgactctggaggtggcggaggaggacggcctaatcctggacccccccgagcagcaggacccggcggcgggagccttgcaagctcctccgttgcgaaatctcattcattcttcagcctgcttaaaaaaaatggaaggagtgagaatggtaaaggggaacctgtggatgcttctaaagctgggggaaagcagaaaagaggactgagaggacttttcagtggaatgaggtggcatcgcaaggacaagagggcaaaagccgaggctgctgagggcagagcgccaggaggaggactaatccttcccggtagcctgacagcatctctggagtgcgtgaaggaggagacgcccagggccgctagggagcctgaggaaccttctcaggatgccccgagggaccccgcaggcgagccagctggaggcgaggaggtgcctgcacctgcagaccgtgcgcctgcacggtcttgcagagaagccgaggggttggcacatccaggtgacacaggtgctcgcggagaggacgcggcaggccaccgccgcgccgaaccaggccccggagaggtccgaacagccgaggacgcaagcaggaccggggctgtacccgtgaagacagtcccactggtcgacagcgagggaggctcaggacgagccccagctgcacctgatcccgcttctgtggacccacctagtgacccgagcgctgatcggatttgcctgatgtttagtgacgtcacttccctgaagagtttcgactccctaactggctgcggtgacatcattgcagatcaggaagaggaggctggaccctcttgcgataagcacgtgcccggccctggaaagccagctctctctaaaaagaaccctggtgtggttgcatatcagggcggaggagaggaaatggccagtcccgatgaggtggacgacacctaccttcaggagttttgggatatgttgtcccagaccgaggaacagggtccggagcctcaggaaggtgctgcgaaggtggcggctgcactcgaaaccaaggtggtgcccgaaacacctaaagacaccaggtgcgtcgaggccgccaaggacgccagcagcgtcaaaagaagaagactgaaccggattcccatcgagccgcacccaaaagaagagccaaagcaccccgagaaagaacaacaggaaggagtgccaaattccgacgaaggatactgggactcaaccaccccaggccctgaggaagattcgagctctagcgggaagaaggcaggaattcctagagattcatactctggggatgccctctatgacctctacgctgaccccgacggctcgccagcaacactccccggcggtaaagacaatgaagagacaagctctttatcacgtttaaaacccgtaagtcctgggaccattacatgcccgctcagaacacccggcagcttactaaaagactctaagataccaatcagcataaaacaccttaccaatctcccttcatcacatccagttgtccaccagcaacccagcagatccgagatgccacggacgaaaattcccgtcagtaaagtcctggtgaggagagtttcaaacagaggccttgctgggacaacaatcagagccacagcttgccacgattcagctaaaaagctttag

SEQ ID NO: 244360 - DNA, 3197 bp, Artificial Sequence
  derived and/or modified sequence
ggcaaactccaccccggggagctgttgtgcttgcattgctgggctgctgatagactgattgagtggtggcgtgtacttttgtcacaagaaccataaccacaatgacagccacacagcatggacctagcgtgtgctcagctctggacaagacatggatgtaggcagacatgcttcctgcctgctgggcttagtgcaccaatgctaaggacagacatgaagggcttgggaaaggcatgaagatgcagggagtctaggagagaggataagaaaaacaagcattttgtggtgggttgaattgcgttgtcgtttttagaggcatttcgtgatccatggttgcgctcccgtgaagagcgagtctagagaaggaatccgaaggtgggtgagagttgagggaatttgaattccataattacgactcgaatttctgcaatcagctcgcggctgtgttgcctgctcctgccacaaaaacgccatgcagcgccgagccaagtcggatggaagtgggttagggtattatataagcccttgcgggagggaagatggtcttttatgtgtgtttcttttgcagcggcggcggcgagcgcggctcaggttgatttagaatacgggtgacagtggcctggcgcgagcccactgctgacgaaagcggcttatcccgcgcggtttccatggagacgagccggagccgcggcggcggcggggctgtcagcgagcgcggcggagctggcgcgtccgtgggggtctgcaggaggaaggcggaggccggggccgggaccgggaccctcgcggcagacatggacttgcattgtgactgtgccgccgaaacgccggccgccgagccgccgtcggggaagattaataaagctgccttcaaattattcaagaagaggaaatcgggtggcaccatgcccagcatttttggggtcaaaaacaaaggggacgggaaaagctcgggtccgacggggctggtgaggagcaggacccacgacggacttgccgaggtgctggtgctggagagcggcaggaaggaggagccgcgcggcgggggcgacagcggcgggggcggcggggggcggccgaacccggggccccccagagccgcagggcccggcgggggctccctcgccagcagctcggtggccaagtcgcacagcttcttctcgctgctgaagaagaacgggcgctcggaaaacggcaagggagagcctgtggacgcgagcaaggccggcggcaaacaaaagcgggggctgcgggggctgttcagcggcatgcgctggcacaggaaagacaagcgggccaaggcggaggccgcggaggggcgcgcgcccgggggcggcttgatcctacccggctcgctcaccgccagcctggagtgcgtcaaggaggagacgcccagagccgcgcgcgagccggaggagcccagccaggacgccccgcgagacccagcaggtgagcccgcagggggagaggaggtgcccgcccccgccgaccgcgccccagcgcggagctgccgagaggcagagggcctcgcgcaccccggcgacaccggcgcccggggagaggacgccgcggggcatcggcgcgccgagccggggcccggggaggtccgcacggcagaggacgcttccaggacgggggccgttcccgtaaagacggtcccccttgtcgactccgaaggcggcagcggccgggcgcccgccgccccagaccctgcctctgtcgatccaccctcagacccgtcggcagatcgtatttgtttgatgttttctgacgtgacttcactgaaaagctttgactctcttacaggctgtggagatattattgcagaccaagaggaagaggcaggtcccagctgtgacaagcatgtccccgggccaggcaagccggctctgtctaaaaagaaccccggcgtggtggcctaccaaggaggcggggaagagatggccagcccggacgaggtggacgacacctatctacaggagttctgggacatgctctcccagaccgaggagcagggacccgagccccaggagggcgcggctaaggtggcagctgcgctggaaaccaaggtggtgcccgagacccccaaagacaccaggtgtgtggaagcggccaaggacgcgtcctcggtcaagcgcaggaggctcaaccggattcccatcgagccccatcctaaggaggagcccaagcacccggagaaggagcagcaggaaggcgtccccaacagcgacgagggctactgggactccaccacgccaggcccagaggaagacagctcgagcagcgggaagaaggcgggcatcccccgggatagctacagcggggacgcgctctatgatctctatgctgacccggacggaagtccagcaacccttcctggagggaaggacaacgaggagacgtcctccctgtcccggttaaagcccgtatctccaggcaccatcacctgtccactgcgaacaccaggcagcttgctgaaggactctaagatccctattagcatcaagcacctgaccaaccttccatctagccatcccgtggtgcaccagcaaccctccaggagtgagatgcccagaacaaaaatcccggtttccaaagtgctggtccgcagagtcagcaaccggggcttggctgggaccaccatcagagcaacggcctgccacgacagtgccaaaaagttgtgaggtcttccaggccaaggtggatgggccccatgccaaggaatacaacttttccctggaaaccactaaagtaagttttgcttttcctaaagaaagtcttttaggacaccacccgtcccccgccctgctccagagcgtggaccgaggaggtctttgtgccctgagcagggaccggataacaccagaaagagggatgctacacgggggtttctcctctcaagataagtccctgagaattattttcaagcacttttttcttttttacctttaagtttttcttccttttgctttaatatactgaacacttggaagtcacctttacttgcctttgcagaaaacagaacttagccaaacctaagtaagagtcatgcctggatattgggataagccagtgtctagaggcctgaaggaaccgctgaagaaccagaggagatctcctcttccaagacacgtttccttccttcccttctttcctctttcctttccagttaaaaaaaaacaaaaacaaaaacaaaa

SEQ ID NO: 244361 - DNA, 2016 bp, Artificial Sequence
  derived and/or modified sequence
atggagaccagccgcagccggggcggcggcggcgctgtgtctgagcggggcggggccggggcctctgtgggcgtgtgcaggaggaaggccgaggccggggccggcaccggcaccctggccgctgacatggacctgcactgtgactgtgccgctgagaccccagctgctgagccccccagcggcaagatcaacaaggccgccttcaagctgttcaagaagaggaagagcggcggcaccatgcccagcatcttcggcgtgaagaacaagggagatggcaagagcagcggccccaccggcctggtgcgcagcaggacccatgatggcctggccgaggtgctggtgctggagagcggcaggaaggaggagccccggggcggcggggacagcggcggcggcggcggcggccggcccaaccctggcccccccagggctgctggccctgggggcggcagcctggccagcagctctgtggccaagagccacagcttcttcagcctgctgaagaagaatggccgctcagaaaatggaaaaggagagcctgtggatgccagcaaggccggcggcaagcagaagaggggcctgcggggcctcttcagcggcatgcgctggcacaggaaggacaagagggccaaggccgaggccgctgagggccgggcccctgggggcggcctcatcctgcccggcagcctgacagccagcctggagtgtgtgaaggaggagaccccccgggccgcccgggagcctgaggagcccagccaggatgccccccgggaccctgctggggagcctgctggaggagaggaggtgcctgccccagctgaccgggccccagcccggagctgccgggaggccgagggcctggcccaccctggggacacaggagcccggggggaggatgctgctggccaccggcgggcagagcccggccctggagaggtgaggacagcagaagatgccagcaggactggagctgtgcctgtgaagacagtgcccctggtggacagcgagggcggcagcggccgggccccagctgccccagaccctgcctctgtggaccccccaagtgaccccagcgctgaccgcatctgcctgatgttcagtgatgtgaccagcctgaagagctttgacagcctgaccggctgtggggacatcatcgctgaccaggaggaggaggccggccccagctgtgacaagcacgtgcccggccctgggaagccagccctgagcaagaagaaccctggggtggtggcctaccagggcggcggggaggagatggccagcccagatgaggtggatgacacctacctgcaggagttctgggacatgctgagccagacagaggagcagggccctgagccccaggagggcgccgccaaggtggccgccgccctggagaccaaggtggtgcctgagacccccaaggacacccgctgtgtggaggccgccaaggatgccagctctgtgaagagaagaaggctgaaccgcatccccatcgagccccaccccaaggaggagcccaagcaccctgagaaggagcagcaggagggcgtgcccaacagtgatgagggctactgggacagcaccaccccaggccctgaggaggacagcagcagcagcggcaagaaggccggcatcccccgggacagctacagcggagatgccctgtatgacctgtatgctgaccctgatggcagccctgccaccctgcccggcggcaaggacaatgaggagaccagcagcctgagccggctgaagcctgtgtccccaggcaccatcacctgccccctgcggaccccaggcagcctgctgaaggacagcaagatccccatcagcatcaagcacctgaccaacctgcccagcagccaccctgtggtgcaccagcagcccagccgctctgagatgcccaggaccaagatccctgtgtccaaggtgctggtgagaagagtgagcaacagaggcctggccggcaccaccatccgggccacagcctgccatgattctgccaagaagctgtag

SEQ ID NO: 244362 - DNA, 2016 bp, Artificial Sequence
  derived and/or modified sequence
atggagaccagccggagccggggcggcggcggcgccgtgagcgagagaggaggtgccggagcgtccgtcggggtctgccggcggaaagctgaggcaggcgccggaactggcactctggccgccgacatggatctgcactgcgattgtgcagcggaaacacccgccgctgagccacctagcgggaagattaacaaggccgctttcaaactgttcaagaagcgtaagtctggaggcacaatgccatctatttttggggttaagaataagggtgatgggaagagctcaggacccacaggcttggtaagatcacggacccacgacggactggctgaggtcctggtgctggagagtgggcgaaaagaagagcctcgaggagggggagactctggcggaggtggaggcggacgtccaaacccagggcctccaagagccgcaggtcccggtggtggcagcctggcatcgagttccgtggcaaagtcccattcttttttctcactgctgaaaaagaatggacgaagcgagaacggcaaaggcgagccggtggatgcctctaaagctggaggtaagcaaaagcggggcctacgaggactgtttagcggaatgcggtggcaccggaaagataagcgagcgaaggcagaagccgccgagggacgggccccaggaggcggccttattttgcccggttctctaactgcttcattggaatgcgtgaaggaagaaacaccccgggctgcacgcgagcctgaggagccaagccaggatgctcccagagatccggcaggagagcctgctggtggagaggaggtgcccgctccagccgatcgagcccccgcaaggagctgccgtgaggcagaggggctggcccatcccggtgacaccggagccagaggcgaggacgctgccggacataggagagccgagccgggcccaggtgaggtgcgaacagccgaagacgcttctagaaccggggccgtccccgtgaagactgtgccactggtagattccgaaggcggatccggcagagcacctgccgcccctgacccggcctcagtggaccccccttcagaccccagtgccgaccggatttgtctaatgttctccgatgtgacctccctgaagtcatttgatagtctgaccggctgcggggatattatcgccgatcaggaagaggaggccggaccctcatgcgacaaacacgtccccggacctggtaagccggctctgtccaaaaaaaatccaggagtggtggcctatcagggaggaggcgaagagatggcatcaccagacgaggtcgatgacacatatctccaggagttttgggatatgctgagtcagacagaggagcaggggcctgagcctcaagagggggctgccaaggtggctgcggccttagagaccaaggtggtaccagagacccccaaggacactcgatgcgtggaggctgcaaaagacgccagcagcgttaagcggcgccggcttaaccggattcctattgaaccgcaccctaaggaagaaccaaaacacccggagaaggaacagcaggagggcgtgcccaacagcgacgaaggctattgggacagcacaacacccggacctgaagaggactcctcctccagcggcaaaaaggctggaattcctcgcgactcttatagcggcgacgctttatatgacttatacgctgatccagacgggtctcctgcaaccttgcccggcggcaaggataatgaggagactagcagcctgagtagattgaaacctgtgtcaccagggaccattacgtgtccattacgaacccccggcagcctgctcaaagatagcaagattccaatttccattaaacatctgaccaatcttccaagctcacaccctgtggtgcatcagcagccatcaagatcagagatgccacggacaaaaatcccagtctcaaaagtgctagtacgacgggtgtctaatagagggctcgccgggactaccatcagggcgaccgcatgccacgactctgctaagaaactctag

SEQ ID NO: 244363 - DNA, 2016 bp, Artificial Sequence
  derived and/or modified sequence
atggagacttcaaggagccgaggagggggaggtgctgtctcagaaagaggtggagctggcgcttcagtaggcgtctgtcggaggaaagctgaggctggggcaggtaccggaactctggctgcagacatggacttacactgtgattgtgcggcagaaacaccagcagccgagcccccatccggcaaaatcaacaaggcagcctttaagctgtttaagaaacgtaagagcggaggtactatgccgagtattttcggggtaaaaaacaaaggagacggtaagtcgtcgggccctacaggtttggttaggtccaggacgcacgacggtctggcggaggtgctggtgctagagtccggacggaaggaagaacctcgcggtggcggagattcaggaggcggtggtggcggacggcctaaccctggccctcccagggctgccggaccagggggagggtctttggccagttcctcagtcgctaagtcacattcttttttctcgctcctgaagaagaatggccgtagtgagaatgggaaaggggagcccgtggatgccagtaaggccggaggcaagcagaagaggggtcttcgcggtctttttagcggaatgcgttggcatcggaaggataagcgggcaaaggcagaggccgctgaaggcagggcaccaggcggaggcttgattcttcctggttctctgacggccagcctggagtgtgttaaggaggaaactcccagggctgccagagagccggaggaaccgtcacaggacgctccacgggacccggcaggcgagcccgcaggcggagaagaagtgcctgctcccgctgatcgcgcacctgccaggtcttgcagggaagcagaggggttggcgcatcccggagacaccggcgcacgtggggaagacgctgctgggcaccggagagcagaacctggaccaggtgaggtgcggacggcagaagatgcgtcacgaactggggcagtcccggtgaaaacagtgcctcttgtggactcggagggaggatccgggagggcccctgccgctccggacccagccagtgtcgaccctcctagcgaccccagtgctgaccggatttgcctaatgttttctgacgtgacctccctgaaaagcttcgactccctcacaggatgcggagacatcatcgcagaccaggaggaagaggctggcccatcctgcgataagcacgtcccgggacctggaaaaccggctctgtcaaaaaagaacccgggagtggtcgcttatcagggcggaggcgaggaaatggcctctcccgatgaggtggacgacacgtacctgcaagagttttgggatatgctctcccagaccgaagaacaaggacctgaaccccaggagggcgcagccaaggtcgcagcagcactggagacgaaggtagtgcccgagacgccgaaagacactcggtgcgtggaagccgcaaaggacgcttcaagtgtgaaacgccgtaggctgaataggatccccattgaaccacatccaaaggaggaacctaaacatcccgagaaagagcaacaagagggcgtacccaacagcgatgaaggatattgggacagtacaacgccagggcctgaggaagactcgtcctcttcggggaaaaaagctggaattcctagagactcctactcaggggacgccttgtacgacctatacgctgatcccgatggatcccccgcaaccctgccagggggtaaggataacgaggaaaccagttcattatcccggctcaaaccagtttcccctggtacaataacttgcccccttcggaccccaggcagcctgctcaaggattccaagatcccaatttctataaagcacctgaccaacctgccctcgtcccatcctgttgtacatcagcagccatcccgttccgagatgccaagaactaaaattcctgtctctaaagtgttggttcgcagggtcagcaaccgaggtttagccggaacaacaatcagagccacagcctgccacgattccgccaaaaagttgtag

SEQ ID NO: 244364 - protein, 122 aa, Artificial Sequence
  derived and/or modified sequence
MEEDQELERKAIEELLKEAKRGKTRAETMGPMGWMKCPLASTNKRFLINTIKNTLPSHKEQDHEQKEGDKEPAKSQAQKEENPKKHRSHPYKHSFRARGSASYSPPRKRSSQDKYEKRSNRR

SEQ ID NO: 244365 - DNA, 369 bp, Artificial Sequence
  derived and/or modified sequence
atggaagaggatcaagagttggagaggaaagcaatcgaagagcttctgaaagaggctaaacgggggaaaactagagctgagacaatgggtccaatgggctggatgaagtgtccgctcgcttcaaccaacaaacgtttcctaattaacactatcaaaaatacactcccctcccacaaggaacaagatcacgaacaaaaagagggcgataaggaacccgcaaagtctcaggctcaaaaggaagaaaatccaaagaagcatcgatcgcacccctataaacacagtttccgcgcacgggggagtgccagctattcacccccaaggaagaggtcttcccaagataagtacgagaagcggtctaacagaaggtag

SEQ ID NO: 244366 - DNA, 369 bp, Artificial Sequence
  derived and/or modified sequence
atggaggaggaccaggagctggagaggaaggccatcgaggagctgctgaaggaggccaagaggggcaagaccagggctgagaccatgggccccatgggctggatgaagtgccccctggccagcaccaacaagcgcttcctgatcaacaccatcaagaacaccctgcccagccacaaggagcaggaccacgagcagaaggagggggacaaggagcccgccaagagccaggcccagaaggaggagaaccccaagaagcacaggagccacccctacaagcacagcttccgggcccggggcagcgccagctacagcccccccaggaagaggagcagccaggacaagtatgagaagaggagcaacagaagatag

SEQ ID NO: 244367 - DNA, 369 bp, Artificial Sequence
  derived and/or modified sequence
atggaggaggaccaggagctggagcggaaggccatcgaggagctgctgaaggaggccaagagagggaaaactcgtgcagaaaccatggggccaatgggttggatgaaatgccccctggctagcacaaataaaaggttcctgatcaacactataaagaataccctccccagccacaaagagcaagaccatgagcagaaagagggcgataaggagccggccaagtcccaagcccagaaggaggagaacccaaagaagcacaggtcgcatccatataaacattctttccgggcccgcggatccgcgtcctattctccgcctagaaagagatcgagccaagacaaatatgaaaagcgctccaacaggcgctag

SEQ ID NO: 244368 - DNA, 1945 bp, Artificial Sequence
  derived and/or modified sequence
gtcctccgcgccttccgtcggtcggtccttgcttcctgcttcgcctccgcgcctcgcgctatgggacagagcccccgatccgccagcaccacctgaggatccagaaaccgccccagcgatggaagaggatcaggagctggagaggaaagcaatagaagaactgcttaaggaggcaaaacgtgggaaaactagagctgaaacaatgggacccatgggttggatgaagtgtcctcttgctagcaccaataaaagatttctaattaacacaattaaaaacacattgccctctcataaagagcaagaccatgaacaaaaagagggcgataaggaaccagcgaagagccaggcccagaaagaagaaaacccgaagaaacacagaagccatccttacaagcacagcttccgcgctcgaggttccgccagttactccccgccacgaaagcggagcagccaggacaagtacgaaaagcggtccaaccggcggtgaggctggaaccagggccagccagccctgcgggcctccgtgctccttcggggtgcggtgtgcggagaaggcctgagctggcagggcaaacacctgagagtgactttgacattaggtcctttgttgtttttaaagaggctgctggccacaggcaaaaaaaatgacctagcaactcttgaggaaacaagtgcaaaggaggatgtcttggcaagtttaagctacttctgcagtgtagtagacttacatattgttgtttatcttgtttggaagtgtgtttcaaaataaacatgtctagaatttaaagttttcagagattgttaaaactggttccaattttttggtcatttctcagaaaaataaaatacttataaatcctatattttactttttgggggtattacatttaaaatttagaaatcatcagtccagtgaccatatttatgaaaagctgtagccctccaaggtctgggaatttatcgagaagctctttgatagctctgcatttgttttcccttaggtgaacaatgtaggaaatcctcaaagtggctttgaatttaatgctccacttcagttaccagaggttaaaaatgggttttgttgtttcctgtgcattctcaaactcatttattagatagaacaatctttctatatttaatttttttaatatataggtcttaagtggtgctttaaaaagaaccctcacaagttaaaaattaagagttgtttcagtgctagatcttaccagctaaagacttgtgataccactatatagtatagttgttccagaaatcttcattttaaatagaagtgtttacaatgccttttttcccccagtattggttttcaatacctgttttcatatacaattacaaacctttcaaacctgtattccttctttatactcaggaaaatgtcaccaagcaccctcctccccagttcacaaaaggaagaagatgaagattctgtctccctgttccccctccccagttttccaaagtgtctgagcatatgcctggctgtcctcagatcatcaccatgccacatccctgctccctacttcctggcagccaagaaaagccctttctacatgctagaaggaaatacatccaaaaagttagcattggagtgttagaaactagaatagacctctccgccaccgagctgctgtgtcacgccctcagcctgctagggagtgacaagcccaagtcattcttgatccaccccttctcccaccccagatcccagggactcatcctgtgactttgtaaccacactcattcctttcaaacacagaggaggaattattgcttcatctgactttattcaaatctagttatgtattggcctaaattatttgtgcaaaatttgaaatgttttttatttaaatattagaaatagcacaaagtcatggagtttttaaaaattgttataattaagtaaaaataaagctgaattgtgtca

SEQ ID NO: 244369 - DNA, 369 bp, Artificial Sequence
  derived and/or modified sequence
atggaggaggaccaggaactcgagagaaaggcaattgaagagcttctcaaagaagctaagcgaggtaaaacaagagccgagaccatgggcccaatgggctggatgaagtgcccacttgcctctacaaacaaaagattccttatcaacacaatcaaaaacaccctgccttcccataaggaacaggaccacgagcagaaggagggggataaagagcctgccaagagccaggcccagaaggaagaaaaccctaaaaagcatcggtctcatccttataagcactctttccgagcgaggggctccgcatcttactccccgcctcgcaaaaggagctcacaggataagtacgaaaaaagatccaaccgcagatag

SEQ ID NO: 244370 - DNA, 369 bp, Artificial Sequence
  derived and/or modified sequence
atggaggaggaccaggagctggagagaaaggccatcgaggagctgctgaaggaggccaagagaggcaagaccagagccgagaccatgggccccatgggctggatgaagtgccccctggccagcaccaacaagagattcctgatcaacaccatcaagaacaccctgcccagccacaaggagcaggaccacgagcagaaggagggcgacaaggagcccgccaagagccaggcccagaaggaggagaaccccaagaagcacagaagccacccctacaagcacagcttcagagccagaggcagcgccagctacagcccccccagaaagagaagcagccaggacaagtacgagaagagaagcaacagaagatag

SEQ ID NO: 244371 - protein, 955 aa, Artificial Sequence
  derived and/or modified sequence
MWAGLLLRAACVALLLPGAPARGYTGRKPPGHFAAERRRLGPHVCLSGFGSGCCPGWAPSMGGGHCTLPLCSFGCGSGICIAPNVCSCQDGEQGATCPETHGPCGEYGCDLTCNHGGCQEVARVCPVGFSMTETAVGIRCTDIDECVTSSCEGHCVNTEGGFVCECGPGMQLSADRHSCQDTDECLGTPCQQRCKNSIGSYKCSCRTGFHLHGNRHSCVDVNECRRPLERRVCHHSCHNTVGSFLCTCRPGFRLRADRVSCEAFPKAVLAPSAILQPRQHPSKMLLLLPEAGRPALSPGHSPPSGAPGPPAGVRTTRLPSPTPRLPTSSPSAPVWLLSTLLATPVPTASLLGNLRPPSLLQGEVMGTPSSPRGPESPRLAAGPSPCWHLGAMHESRSRWTEPGCSQCWCEDGKVTCEKVRCEAACSHPIPSRDGGCCPSCTGCFHSGVVRAEGDVFSPPNENCTVCVCLAGNVSCISPECPSGPCQTPPQTDCCTCVPVRCYFHGRWYADGAVFSGGGDECTTCVCQNGEVECSFMPCPELACPREEWRLGPGQCCFTCQEPTPSTGCSLDDNGVEFPIGQIWSPGDPCELCICQADGSVSCKRTDCVDSCPHPIRIPGQCCPDCSAGCTYTGRIFYNNETFPSVLDPCLSCICLLGSVACSPVDCPITCTYPFHPDGECCPVCRDCNYEGRKVANGQVFTLDDEPCTRCTCQLGEVSCEKVPCQRACADPALLPGDCCSSCPDSLSPLEEKQGLSPHGNVAFSKAGRSLHGDTEAPVNCSSCPGPPTASPSRPVLHLLQLLLRTNLMKTQTLPTSPAGAHGPHSLALGLTATFPGEPGASPRLSPGPSTPPGAPTLPLASPGAPQPPPVTPERSFSASGAQIVSRWPPLPGTLLTEASALSMMDPSPSKTPITLLGPRVLSPTTSRLSTALAATTHPGPQQPPVGASRGEESTM

SEQ ID NO: 244372 - DNA, 2868 bp, Artificial Sequence
  derived and/or modified sequence
atgtgggctgggctgctgcttagagctgcatgtgtcgccctgcttcttccaggagcccctgcaagggggtacaccggcagaaaacctcccggacatttcgccgctgaaagacggaggctcggccctcatgtgtgcctatctggtttcggaagtggttgttgtccgggttgggctccatcaatgggaggcggacactgcactctcccactttgttctttcggatgtgggagcggaatttgcatagctccaaatgtatgttcctgtcaggatggggagcagggtgccacttgcccggaaacccacggcccttgcggtgagtatggttgtgacctgacttgcaaccatgggggatgccaggaagtggctagagtttgcccagtcggtttttccatgaccgagacagccgtagggattagatgcaccgacatcgacgaatgtgtaacgtctagttgtgagggacactgtgtgaacactgaaggagggtttgtctgcgaatgtggccctggaatgcagctctccgctgaccggcattcttgccaggacaccgacgagtgcctgggtacaccttgtcagcaacgatgcaaaaactctattggaagctataagtgctcatgtagaacagggtttcatctccatggaaatcggcattcatgcgttgacgtgaacgagtgcaggagacccctcgagagaagggtgtgtcaccattcctgccataatactgtaggctctttcctgtgcacttgtcgcccagggttccgcctacgcgctgacagagtttcctgtgaagccttcccaaaggctgtgcttgcaccatcagccattctacagccacgacagcatccttcaaaaatgctgctcttgctccctgaagcgggtaggcccgcactgtcaccaggccactctcctcccagtggagcaccgggacccccagccggagttcgcaccacccggctgccgtccccaactcccaggctgccgacgagctccccctctgcacctgtatggctcctgagcacccttttagctaccccggtacccacggcttccctcctggggaatcttaggccaccaagtttattgcagggggaggtgatgggcaccccttcctcccctcgcggacccgaaagcccacgcttggccgcaggcccatcgccttgctggcatctgggtgccatgcatgaatcccggagccgctggaccgaaccgggatgctcccagtgctggtgcgaggacggaaaggtgacttgcgagaaagttagatgtgaagccgcatgcagccatccgattccctcaagagatggcggttgctgcccatcctgtacagggtgttttcatagtggtgtagttagagccgaaggcgatgtgttttcaccccctaacgaaaattgtactgtttgcgtctgcctcgctggaaacgtctcatgcatctctcctgaatgtccctccggcccatgccagacaccccctcagacggactgctgtacttgtgtgcccgtgcgctgctatttccacggacgatggtatgcagatggggcagtcttttctggcggaggcgatgaatgcaccacctgcgtatgccagaacggcgaggtcgagtgttcattcatgccatgccccgagctagcatgccctagggaggaatggcggctcggaccaggccagtgttgtttcacttgccaggagcctactccaagcacaggatgttctctggacgacaacggcgtagagtttccaattggccagatctggtctccgggagatccatgtgaactgtgcatatgtcaggcagatggttcagtgagctgcaagagaacagactgcgtagactcatgcccacatccaatccggatccccggacagtgctgtcccgactgttccgccggatgtacttataccggtagaattttctataataacgaaactttccccagtgtattagatccttgcttatcctgtatttgcctgctcgggtccgtggcttgctcacccgttgactgccccattacgtgcacataccccttccaccccgacggtgagtgctgtcccgtttgccgcgactgcaactacgaagggagaaaggtggcaaacgggcaggtttttaccctcgatgacgagccctgtacccggtgtacatgtcaacttggagaggtgtcgtgcgaaaaggtgccatgccagcgcgcatgcgcagacccagccctgcttcccggagactgttgttcgagctgccctgactccctgtctcctctcgaagaaaagcagggattatcacctcacggcaatgtcgctttttccaaagcgggacgctcattgcacggtgacacagaggccccagtaaattgctcatcgtgtccgggaccccctacagcaagcccctcgcgtcccgttctccacctcctgcagctgctcctccgcacaaatctcatgaagacccagaccctgcctacttctcctgccggtgcgcacggtccccattccctggcactgggactcaccgcaactttccccggtgagcctggcgcttccccacgcctgtccccgggaccttccacaccacctggggctccgaccctgcccctcgcctcacctggcgctccacagccgccacccgtgactccagagcgatccttcagtgcgagtggtgcccagattgtgtcacggtggcctcctctgccagggacccttctaacagaggcgtccgcgctgtcaatgatggacccgagccctagtaagacaccaataacgctgttagggccacgggtcttatctcctaccacttctagactgtcaactgcactggcggcaacaacccatcccggaccacagcagcccccagtgggagcttctcgcggagaagagtcaacaatgtag

SEQ ID NO: 244373 - DNA, 2868 bp, Artificial Sequence
  derived and/or modified sequence
atgtgggccggtctcctcttaagagctgcgtgtgtcgccttattactgcctggagctcccgcacgaggttacacaggcaggaaacctcccgggcactttgctgccgagcgtagacggctcggacctcatgtgtgtctaagcggctttgggagtggctgctgtccaggatgggcccccagcatgggaggaggacactgtacactgcctttgtgctcattcggatgcggatctggcatatgcatcgctccaaacgtttgcagctgccaagatggggaacagggcgccacctgtcctgaaacccacggcccctgcggcgaatacgggtgcgatctaacttgtaatcacggcggctgtcaagaagtggctagggtgtgtcccgtgggcttttctatgacggaaactgcagttggcattagatgcaccgatatcgacgagtgtgtcaccagctcctgtgagggccattgtgtgaacacagagggaggcttcgtttgcgaatgcggtcccggaatgcaacttagcgccgatcgccactcctgtcaggatacagacgagtgtctggggactccgtgtcagcagcgctgtaagaatagtattggttcatacaagtgcagctgtagaactggcttccatctccatggaaatcgtcattcctgtgtcgatgtcaatgagtgtagacggcccctagagcgtagggtgtgccatcacagctgccataacactgtgggctccttcctgtgcacctgcagacctggattccgcctcagagccgatagagtgtcttgtgaagccttcccaaaagctgtactcgccccaagtgccatcctacagccacggcagcatcccagtaagatgctcctgcttctccccgaggccggccgacccgccctctcacccggccactcccccccaagtggggcgccggggcccccagccggtgtgcgaaccaccaggctgcccagcccaacaccacgcttgcccacatcctcacccagtgcccccgtgtggttgctttccacgctccttgccaccccagtcccaacagcgagcctgcttggcaatctcaggccgccttctctcctacagggcgaagttatgggtacacccagctctccccgtggtcccgagtcacctcgtcttgctgcgggcccgtccccttgttggcatcttggcgccatgcacgagtctcgctccaggtggacagagcctggctgttctcagtgttggtgtgaagacggaaaagtcacatgcgagaaagtcagatgcgaggctgcatgctcacaccccattccgagtcgggatggaggttgttgtccgtcttgtacgggctgtttccactccggtgttgtgcgcgccgagggcgatgtgttcagtcccccgaacgagaactgtaccgtatgcgtttgcctcgctggaaacgtgagctgtatcagcccggagtgtccttcagggccgtgtcagacaccaccccagacagactgttgtacgtgcgttcctgtgagatgttattttcacggaaggtggtatgcagatggagccgtttttagtgggggcggggatgaatgcaccacttgcgtctgccagaatggcgaagtcgaatgtagcttcatgccttgtcccgagctagcatgtccccgagaggaatggcggctggggccgggacaatgctgttttacatgccaggaaccaacaccttctacaggttgttcacttgacgacaatggtgttgagtttcccatcggccagatttggtccccaggcgatccttgtgagctttgtatatgtcaagcagatggttctgtcagctgtaagagaactgattgtgtggacagttgtccccatcccatcagaatccctggacagtgctgtccagattgctccgctggttgcacctacactggccgtatattctataacaacgagacctttcccagtgttctcgacccatgtctgagttgcatctgtcttttgggaagcgtggcctgtagccctgttgattgtcccattacgtgtacctatccattccatcccgacggtgagtgttgccccgtgtgccgcgattgcaactacgaaggtaggaaggtggccaatggacaagtatttaccctcgacgacgagccttgcacgcgatgcacctgtcagctgggagaggtctcttgcgagaaggtcccatgtcagagagcctgcgcggatccagcgttgctccccggtgattgctgcagcagttgtcctgacagcctctcccccctggaagagaaacaaggacttagcccgcacggaaatgtggcgttttcaaaagccggcagaagtctccatggggataccgaggcacccgtcaattgctcaagctgccccggcccacccaccgcttctccatcgaggccagttttgcaccttctgcaactccttctgcggaccaacctcatgaaaactcagactctccctacgtcccccgcaggggcccatggccctcactctctggcactcggacttacggctactttccccggggagccaggggcttcaccccggttatctcctggaccaagcacacctccaggcgcccctaccctgccactggccagtccaggagcacctcagcccccgcctgttacacctgaaaggtctttcagcgccagcggcgcacaaatcgtgtcacggtggcctcccctgccaggtacacttcttacagaggctagcgccctgagcatgatggacccctccccgtccaagactccaataaccctcttggggcctcgggtgttgagtccaaccactagtcggctttctacagccctggccgccacaacgcaccctggtccacaacagccaccagtgggcgccagtcgaggcgaggagtctaccatgtag

SEQ ID NO: 244374 - DNA, 2868 bp, Artificial Sequence
  derived and/or modified sequence
atgtgggcgggtcttcttttgcgggcagcttgcgtcgcactgctgcttccaggggcacctgcaaggggttacactgggcgtaaaccacccggccactttgccgcggaaaggagaaggctgggacctcacgtttgcctaagcggattcggttcaggttgctgtccaggctgggctcctagtatggggggcgggcactgcactctgcccttatgctcatttggctgtggatccggaatctgcattgccccaaacgtctgcagctgtcaggatggagaacaaggtgccacatgccctgagacccacgggccctgtggagagtacggatgtgacctcacctgcaatcacggggggtgtcaggaggtcgcaagagtctgcccagtgggcttctccatgacagagaccgcagttggaattagatgtaccgatattgatgaatgcgtcacaagttcttgtgaggggcactgtgtgaataccgagggtggattcgtgtgcgagtgtgggccaggaatgcagctctccgcagacagacactcatgccaagacaccgacgaatgcttaggaacaccatgccagcagcgatgcaaaaatagtattggtagctacaaatgtagctgtcgaacaggcttccatttacatggaaataggcactcctgcgtggatgtcaacgagtgtcggcgccccctagagagaagagtttgtcatcattcttgtcacaacactgtcggttcttttctgtgtacatgtcgacccggattccgcctgcgcgctgatagagttagttgcgaagccttccctaaggccgtcctggcaccaagcgcaatcctccagccacgtcaacacccttctaaaatgctgctcctcttgcccgaggccggaagacctgcactgagtcctggccactcacctcccagtggcgccccagggcctcctgccggtgtcagaactacccgacttccctcaccaactccacggctgcctacttctagcccatctgcgcctgtttggctgctctcgacgttacttgccactcccgttcctaccgcctcactgctgggcaacctccgaccgccatccctcctccagggagaagttatgggcacgccgagttctcctagaggacctgaatcgccccggctagccgcgggaccctcaccctgttggcacctcggcgcaatgcacgagtcgcggtcccggtggactgaaccgggttgtagccagtgttggtgcgaagatggaaaggttacatgcgaaaaggtccgctgcgaagccgcttgttctcacccaataccatccagggacggcgggtgttgcccttcttgtaccggctgctttcacagtggggtagtgcgagctgaaggggacgtcttttctcctcccaacgaaaattgtacagtgtgcgtgtgtcttgcaggcaacgtgtcttgtatcagccctgaatgcccttcaggaccttgtcagaccccgcctcagacagattgttgtacatgcgtgccagttagatgctactttcatggacggtggtatgcggacggcgccgtgttcagcggaggtggggacgagtgcaccacatgcgtctgccagaacggggaggtcgaatgtagcttcatgccatgtccggaacttgcgtgtccacgggaagagtggcggctgggtccaggacagtgttgctttacgtgtcaggaacctacaccttcaacaggctgctctctagatgataacggggtggagtttcccatcggacaaatctggagcccaggggatccttgcgagctgtgtatatgtcaggctgacgggtcagtgagttgcaaaaggaccgactgcgttgactcatgtcctcaccctattagaattccaggacaatgttgccctgactgctctgctggatgcacttacacaggccgcattttctataataatgagaccttcccgtcggtgttagacccttgcttgtcttgcatctgcctcctcggcagtgtcgcctgttcccctgttgattgtccaattacctgtacgtatccatttcacccagacggagaatgttgccccgtttgtagagattgcaactacgagggcaggaaggtcgcaaatggccaggtattcacactggatgacgaaccgtgcactcgctgcacctgccagttgggggaagtcagttgcgagaaggtcccctgtcagcgagcatgcgctgatcccgcactgctccccggcgactgctgctcttcatgcccagattcactctcacccctagaagaaaaacagggactaagtccacacggcaatgtggcctttagtaaggccggacgttctctccacggtgatacagaagcaccagtgaattgtagctcgtgtccgggtccaccaaccgcttcaccctccagaccagtgctccacctgctgcagcttctgctaagaaccaacttgatgaaaacacaaacactgcccacctcccctgccggagcgcacggccctcattccctggcattggggctgactgccacgtttcccggcgaacccggcgcatctccaagactgtcccctggtccatctacccccccaggcgcacccactctgcccttagcctctcccggcgcaccacagcccccgcccgttacacccgagcggtccttctctgcctcaggtgctcagatcgtgtcacggtggcccccattacccggaacattgctaactgaggcttccgcactgtccatgatggacccaagcccaagtaagacacctatcaccctcctcgggcccagagtgctttcacctaccacaagtcgactttcaacagctctcgccgctaccactcatccgggacctcaacagcctccagtgggcgcctccagaggagaagaaagtaccatgtag

SEQ ID NO: 244375 - DNA, 2868 bp, Artificial Sequence
  derived and/or modified sequence
atgtgggccggcctgctgctgagagccgcctgcgtggccctgctgctgcccggcgcccccgccagaggctacaccggcagaaagccccccggccacttcgccgccgagagaagaagactgggcccccacgtgtgcctgagcggcttcggcagcggctgctgccccggctgggcccccagcatgggcggcggccactgcaccctgcccctgtgcagcttcggctgcggcagcggcatctgcatcgcccccaacgtgtgcagctgccaggacggcgagcagggcgccacctgccccgagacccacggcccctgcggcgagtacggctgcgacctgacctgcaaccacggcggctgccaggaggtggccagagtgtgccccgtgggcttcagcatgaccgagaccgccgtgggcatcagatgcaccgacatcgacgagtgcgtgaccagcagctgcgagggccactgcgtgaacaccgagggcggcttcgtgtgcgagtgcggccccggcatgcagctgagcgccgacagacacagctgccaggacaccgacgagtgcctgggcaccccctgccagcagagatgcaagaacagcatcggcagctacaagtgcagctgcagaaccggcttccacctgcacggcaacagacacagctgcgtggacgtgaacgagtgcagaagacccctggagagaagagtgtgccaccacagctgccacaacaccgtgggcagcttcctgtgcacctgcagacccggcttcagactgagagccgacagagtgagctgcgaggccttccccaaggccgtgctggcccccagcgccatcctgcagcccagacagcaccccagcaagatgctgctgctgctgcccgaggccggcagacccgccctgagccccggccacagcccccccagcggcgcccccggcccccccgccggcgtgagaaccaccagactgcccagccccacccccagactgcccaccagcagccccagcgcccccgtgtggctgctgagcaccctgctggccacccccgtgcccaccgccagcctgctgggcaacctgagaccccccagcctgctgcagggcgaggtgatgggcacccccagcagccccagaggccccgagagccccagactggccgccggccccagcccctgctggcacctgggcgccatgcacgagagcagaagcagatggaccgagcccggctgcagccagtgctggtgcgaggacggcaaggtgacctgcgagaaggtgagatgcgaggccgcctgcagccaccccatccccagcagagacggcggctgctgccccagctgcaccggctgcttccacagcggcgtggtgagagccgagggcgacgtgttcagcccccccaacgagaactgcaccgtgtgcgtgtgcctggccggcaacgtgagctgcatcagccccgagtgccccagcggcccctgccagacccccccccagaccgactgctgcacctgcgtgcccgtgagatgctacttccacggcagatggtacgccgacggcgccgtgttcagcggcggcggcgacgagtgcaccacctgcgtgtgccagaacggcgaggtggagtgcagcttcatgccctgccccgagctggcctgccccagagaggagtggagactgggccccggccagtgctgcttcacctgccaggagcccacccccagcaccggctgcagcctggacgacaacggcgtggagttccccatcggccagatctggagccccggcgacccctgcgagctgtgcatctgccaggccgacggcagcgtgagctgcaagagaaccgactgcgtggacagctgcccccaccccatcagaatccccggccagtgctgccccgactgcagcgccggctgcacctacaccggcagaatcttctacaacaacgagaccttccccagcgtgctggacccctgcctgagctgcatctgcctgctgggcagcgtggcctgcagccccgtggactgccccatcacctgcacctaccccttccaccccgacggcgagtgctgccccgtgtgcagagactgcaactacgagggcagaaaggtggccaacggccaggtgttcaccctggacgacgagccctgcaccagatgcacctgccagctgggcgaggtgagctgcgagaaggtgccctgccagagagcctgcgccgaccccgccctgctgcccggcgactgctgcagcagctgccccgacagcctgagccccctggaggagaagcagggcctgagcccccacggcaacgtggccttcagcaaggccggcagaagcctgcacggcgacaccgaggcccccgtgaactgcagcagctgccccggcccccccaccgccagccccagcagacccgtgctgcacctgctgcagctgctgctgagaaccaacctgatgaagacccagaccctgcccaccagccccgccggcgcccacggcccccacagcctggccctgggcctgaccgccaccttccccggcgagcccggcgccagccccagactgagccccggccccagcaccccccccggcgcccccaccctgcccctggccagccccggcgccccccagcccccccccgtgacccccgagagaagcttcagcgccagcggcgcccagatcgtgagcagatggccccccctgcccggcaccctgctgaccgaggccagcgccctgagcatgatggaccccagccccagcaagacccccatcaccctgctgggccccagagtgctgagccccaccaccagcagactgagcaccgccctggccgccaccacccaccccggcccccagcagccccccgtgggcgccagcagaggcgaggagagcaccatgtag

SEQ ID NO: 244376 - DNA, 3640 bp, Artificial Sequence
  derived and/or modified sequence
agtcagcgcttcgcaggaagccgactcccaaaccggggcagggggtgtgggccgagggcgaaaccccgcccccaggggtccctgatctttgcccccgccccgggctccgcgcctctcggagaggcatcagcaggcgggcggcgttgcctttgtgtgtttcgcttcgaggtgccagagaccctccccacaatcgtccgccgcgtcccctcgcggccctcggcccctcctctcggcgtcccaagcccccctgctcagctctgcgtgccatttcggggatcgctggttcgctccccacggcgccaggaggaggggcgagggccggcagccccctctcccgcgcgcggcgcaggagccgagcccagcccgggggacccgccgccgccggtcatgtgggccggactgctccttcgggccgcctgtgtcgcgctcctgctgccgggggcaccagcccgaggctacaccgggaggaagccgcccgggcacttcgcggccgagagacgccgactgggcccccacgtctgcctctctgggtttgggagtggctgctgccctggctgggcgccctctatgggtggtgggcactgcaccctgcccctctgctccttcggctgtgggagtggcatctgcatcgctcccaatgtctgctcctgccaggatggagagcaaggggccacctgcccagaaacccatggaccatgtggggagtacggctgtgaccttacctgcaaccatggaggctgtcaggaggtggcccgagtgtgccccgtgggcttctcgatgacggagacagctgttggcatcaggtgtacagacattgacgaatgtgtaacctcctcctgcgagggccactgtgtgaacacagaaggtgggtttgtgtgcgagtgtgggccgggcatgcagctgtctgccgaccgccacagctgccaagacactgacgaatgcctagggactccctgtcagcagagatgtaaaaacagcattggcagctacaagtgttcctgtcgaactggcttccaccttcatggcaaccggcactcctgtgtagatgtaaacgagtgtcggaggccattggagaggcgagtctgtcaccattcctgccacaacaccgtgggcagcttcctatgcacatgccgacctggcttcaggctccgagctgaccgcgtgtcctgtgaagctttcccgaaagccgtgctggccccatctgccatcctgcaaccccggcaacacccgtccaagatgcttctgttgcttcctgaggccggccggcctgccctgtccccaggacatagccctccttctggggctccagggcccccagccggagtcaggaccacccgcctgccatctcccaccccacgactacccacatcctccccttctgcccctgtgtggctgctgtccaccctgctggccaccccagtgcctactgcctccctgctggggaacctcagacccccctcactccttcagggggaggtgatggggaccccttcctcacccaggggccctgagtccccccgactggcagcagggccctctccctgctggcacctgggagccatgcatgaatcaaggagtcgctggacagagcctgggtgttcccagtgctggtgcgaggacgggaaggtgacctgtgaaaaggtgaggtgtgaagctgcttgttcccacccaattccctccagagatggtgggtgctgcccatcgtgcacaggctgttttcacagtggtgtcgtccgagctgaaggggatgtgttttcacctcccaatgagaactgcaccgtctgtgtctgtctggctggaaacgtgtcctgcatctctcctgagtgtccttctggcccctgtcagacccccccacagacggattgctgtacttgtgttccagtgagatgctatttccacggccggtggtacgcagacggggctgtgttcagtgggggtggtgacgagtgtaccacctgtgtttgccagaatggggaggtggagtgctccttcatgccctgccctgagctggcctgcccccgagaagagtggcggctgggccctgggcagtgttgcttcacctgccaggagcccacaccctcgacaggctgctctcttgacgacaacggggttgagtttccgattggacagatctggtcgcctggtgacccctgtgagttatgcatctgccaggcagatggctcggtgagctgcaagaggacagactgtgtggactcctgccctcacccgatccggatccctggacagtgctgcccagactgttcagcaggctgcacctacacaggcagaatcttctataacaacgagaccttcccgtctgtgctggacccatgtctgagctgcatctgcctgctgggctcagtggcctgttcccccgtggactgccccatcacctgtacctaccctttccaccctgacggggagtgctgccccgtgtgccgagactgcaactacgagggaaggaaggtggcgaatggccaggtgttcaccttggatgatgaaccctgcacccggtgcacgtgccagctgggagaggtgagctgtgagaaggttccctgccagcgggcctgtgccgaccctgccctgcttcctggggactgctgctcttcctgtccagattccctgtctcctctggaagaaaagcaggggctctcccctcacggaaatgtggcattcagcaaagctggtcggagcctgcatggagacactgaggcccctgtcaactgtagctcctgtcctgggcccccgacagcatcaccctcgaggccggtgcttcatctcctccagctccttttaagaacgaacttgatgaaaacacagactttacctacaagcccggcaggagctcatggtccacactcactcgctttggggctgacagccactttcccaggggagcctggggcctcccctcgactctcaccagggccttcgacccctccaggagcccccactctacctctagcttccccaggggctcctcagccacctcctgtgactccagagcgctcgttctcagcctctggggcccagatagtgtccaggtggcctcctctgcctggcaccctcctgacggaagcttcagcactttccatgatggaccccagcccctcgaagacccccatcaccctcctcgggcctcgcgtgctttctcccaccacctctagactctccacagcccttgcagccaccacccaccctggcccccagcagcccccagtgggggcttctcggggggaagagtccaccatgtaaggaggtcactgtgtccgggagactctggagagaggacctctgccagtggcccagggtgtgtgcagggcagctccaaggatgaacctggtggggatgcctgggctccctcctgcaggggccctggtgaggatggaagacccccaaggctggatgtaaccttgttcccaagaagtgtttggaatgtgctgtaagaatggaggaagtcgtttccactgtcagcatcctccctggaccgcgtggctggctcatcttttgagaagggttgggactgccaagttctcctggaggaagagttgcgtccggctgggattccactcactgggactgtaccgccaggtgtcatgcgtctctctgaggtttcctgattaaaggttgtctcggtttc

SEQ ID NO: 244377 - DNA, 2868 bp, Artificial Sequence
  derived and/or modified sequence
atgtgggccgggttgctcctgcgcgctgcttgcgtcgctcttctgctgccaggggctcccgcacgcggatatactggtcgcaaaccacctggccactttgcggccgagagaaggagactgggcccacatgtttgcctatccgggttcggcagcgggtgctgtcctggctgggcaccctcaatgggcggagggcactgcactctcccactatgtagtttcggttgcggcagtggcatttgtatcgctccgaacgtctgcagctgccaggacggggagcaaggggccacctgtcctgaaacccacggcccttgtggagaatatggatgtgacctcacttgtaaccatggcggctgtcaggaggtggctagagtgtgccccgtaggtttctctatgacagaaactgccgtcggtataagatgcactgatatcgatgaatgtgtcacatcctcatgcgagggccactgtgttaacactgaaggaggctttgtctgcgagtgtggacctggcatgcagttgtccgccgaccgccacagttgtcaagacacagatgaatgtctagggaccccttgtcagcagagatgtaagaattcgattggttcatacaagtgttcttgtcggaccggctttcacctgcatggcaacaggcactcttgtgttgacgtgaacgagtgccgccgacctctggaacgtcgggtctgtcatcatagttgccacaacactgtaggcagttttctctgtacctgtcggccggggtttcgcctcagggcggatcgcgtgtcctgtgaggcctttcccaaggctgtactcgcgccatccgctattcttcaaccccggcagcatccaagcaaaatgttgctgctgctgcccgaggccggtcgaccagctctaagcccaggtcacagccccccaagtggagcccctggccccccggctggcgtgcggacaacaaggctgccaagccctacccctcgtctgcctacatcctctccctcagcaccagtgtggctcctttccacacttctggcaacccccgtccctactgcatcgttgctgggaaatctgagaccgccaagcctacttcagggggaggttatgggtaccccgtcgagcccccgcgggccggagtcaccccggctggcagccggtccatctccatgttggcacttaggagccatgcacgagtctcgatctcgctggaccgagccaggctgttcccagtgttggtgcgaggatggtaaggtgacttgtgaaaaagtcaggtgtgaggcagcttgcagtcatccaataccctctcgagatggcgggtgttgcccttcatgcacagggtgttttcattcaggcgtcgtgcgtgctgaaggagatgtttttagtcctccaaatgagaactgcactgtttgcgtgtgtctagccggaaacgtgtcttgcatttcccccgaatgtccctccggcccctgccagaccccaccacagacagactgttgcacgtgcgtccctgtgcgctgctatttccacggcagatggtatgccgacggagctgtgttctccggtggcggagacgagtgcacaacctgtgtgtgccagaatggtgaggtagagtgcagtttcatgccttgtcccgagctggcctgtcctcgggaagaatggcggttaggacctgggcagtgttgctttacatgccaggaaccaactcctagcacaggttgcagcctagatgataatggtgtggagttcccaataggacagatctggtcgccaggtgacccttgcgagttatgtatctgtcaggcggatgggtccgtgtcctgcaagcgtactgattgcgtcgactcctgtccccacccgatacgtatcccaggacagtgctgccccgattgttcagccggctgcacttatacaggcaggattttctacaataatgagactttcccgtccgtactggatccttgcctgtcctgcatatgcctgttaggttctgtggcttgctcccctgttgattgccccattacttgcacctatccgtttcatcctgacggagaatgctgtcctgtgtgcagggactgtaactacgaggggaggaaagtagccaacgggcaggtctttaccctcgatgatgaaccctgtactaggtgtacttgccagctgggcgaggtgtcctgcgaaaaggtcccttgtcaaagagcctgtgccgatccggctttgctccctggcgactgctgttctagctgtccggacagtcttagccctctcgaagaaaagcagggattaagtcctcatggaaatgtggccttctccaaagctggcaggtctttgcatggagacaccgaggcccctgtgaattgctcatcctgtcctggcccacctaccgcaagcccaagccggccagtcctgcatctcctacaacttctgctcaggacaaatctgatgaaaacccagacattgccaacgtcccctgctggcgcccacggaccacatagcttagccctgggccttaccgcgacatttcctggggaacccggagctagccctaggctgtcccctggaccgagtacaccacctggtgccccaaccctgcctctggcttccccaggggctccccaaccgccgcccgttacaccagagaggagttttagcgcctctggtgctcagatcgtgtcaagatggcccccgttacctgggaccctgctgacagaggccagtgccctgtccatgatggatccctccccaagtaagactcccatcactctcctgggaccacgcgtgctctctcccaccactagtcgtctttcaaccgccctggccgccacaacacaccctggtccccaacagccccctgtcggggcttctcgtggtgaagagtccactatgtag

SEQ ID NO: 244378 - DNA, 2868 bp, Artificial Sequence
  derived and/or modified sequence
atgtgggccggcctgctgctgcgggccgcctgtgtggccctgctgctgcccggggccccagcccggggctacacaggcaggaagcccccaggccactttgctgctgagcggcggcggctgggcccccacgtgtgcctgagcggctttggaagtggctgctgccccggctgggcccccagcatgggcggcggccactgcaccctgcccctgtgcagctttggctgcggcagcggcatctgcatcgcccccaacgtgtgcagctgccaggatggagagcagggcgccacctgcccagagacccacggcccctgtggggagtatggctgtgacctgacctgcaaccacggcggctgccaggaggtggcccgggtgtgccctgtgggcttctccatgacagaaacagctgtgggcatccgctgcacagacattgatgaatgtgtgaccagcagctgtgagggccactgtgtgaacacagagggcggctttgtgtgtgaatgtggccctggcatgcagctgtctgctgacagacacagctgccaggacacagatgagtgcctgggcaccccctgccagcagcgctgcaagaacagcatcggcagctacaagtgcagctgcaggacaggcttccacctgcacggcaacagacacagctgtgtggatgtgaatgaatgtagaagacccctggagcggcgggtgtgccaccacagctgccacaacacagtgggcagcttcctgtgcacctgccggcccggcttccggctgcgggctgacagagtgtcctgtgaggccttccccaaggctgtgctggcccccagcgccatcctgcagccccggcagcaccccagcaagatgctgctgctgctgcctgaggccggccggcctgccctgagccctggccacagcccccccagcggggcccctggccccccagctggggtgaggaccacccggctgcccagccccaccccccggctgcccaccagcagccccagcgcccctgtgtggctgctgagcaccctgctggccacccctgtgcccacagccagcctgctgggcaacctgcggccccccagcctgctgcagggcgaggtgatgggcacccccagcagcccccggggccctgagagcccccggctggccgccggccccagcccctgctggcacctgggcgccatgcatgagagccgcagccgctggacagagcccggctgcagccagtgctggtgtgaagatggcaaggtgacctgtgagaaggtgcgctgtgaggccgcctgcagccaccccatccccagcagagatggcggctgctgccccagctgcaccggctgcttccacagcggcgtggtgcgggcagaaggagatgtgttcagccccccaaatgaaaactgcaccgtgtgtgtgtgcctggccggaaatgtgtcctgcatcagcccagaatgtcccagcggcccctgccagaccccaccccagacagactgctgcacctgtgtgcctgtgcgctgctacttccacggccgctggtatgcagatggagctgtgttttctggaggaggagatgagtgcaccacctgtgtgtgccagaatggagaggtggagtgcagcttcatgccctgcccagagctggcctgcccccgggaggagtggaggctgggccctggccagtgctgcttcacctgccaggagcccacccccagcacaggctgcagcctggatgacaatggagtggagttccccatcggccagatctggagccctggggacccctgtgagctgtgcatctgccaggctgatggctctgtgtcctgcaagaggacagactgtgtggacagctgcccccaccccatccgcatccctggccagtgctgcccagactgcagcgctggctgcacctacacaggccgcatcttctacaacaatgagaccttccccagcgtgctggacccctgcctgagctgcatctgcctgctgggctctgtggcctgcagccctgtggactgccccatcacctgcacctaccccttccacccagatggagagtgctgccctgtgtgccgggactgcaactatgagggcaggaaggtggccaacggccaggtgttcaccctggatgatgagccctgcacccgctgcacctgccagctgggggaggtgtcctgtgagaaggtgccctgccagagggcctgtgccgaccctgccctgctgcccggggactgctgcagcagctgcccagacagcctgagccccctggaggagaagcagggcctgagcccccacggcaatgtggccttcagcaaggccggccgcagcctgcatggagacacagaggcccctgtgaactgcagcagctgccccggccccccaacagccagccccagcaggcctgtgctgcacctgctgcagctgctgctgcggaccaacctgatgaagacccagaccctgcccaccagccctgctggggcccacggcccccacagcctggccctgggcctgacagccaccttccctggagagcccggggccagcccccggctgagccctggccccagcaccccacctggggcccccaccctgcccctggccagccctggggccccccagcccccacctgtgaccccagagaggagcttcagcgccagcggggcccagatcgtgagccgctggccacccctgcccggcaccctgctgacagaggccagcgccctgtccatgatggaccccagccccagcaagacccccatcaccctgctgggcccccgggtgctgagccccaccaccagccggctgagcacagccctggccgccaccacccaccctggcccccagcagccccctgtgggcgccagcagaggagaggagagcaccatgtag

SEQ ID NO: 244379 - DNA, 2868 bp, Artificial Sequence
  derived and/or modified sequence
atgtgggccggcctgctgctgcgggccgcctgcgtggccctgctgttgccaggtgcaccagcacgcggttatacgggtcggaaaccgcctggccactttgccgctgagagacggcgtttggggccccatgtctgcctgtccggtttcggaagtggctgctgtcccggctgggcaccaagcatgggaggaggccattgtacccttcctctttgttctttcgggtgtggctccggcatctgtattgctcccaacgtttgctcgtgccaagacggtgaacagggagctacatgtccggagacccatggaccatgtggggagtatggctgtgatcttacctgtaaccatggaggctgtcaggaggttgcccgggtctgcccagttggctttagtatgacagagactgctgtcgggatccgttgcactgacatcgatgaatgtgttacgtcatcttgtgaggggcactgcgtaaatacagagggtggtttcgtgtgtgaatgcgggccagggatgcagctgtcggcagacagacactcctgtcaagatacagacgagtgtctcggaactccatgtcaacagcggtgcaaaaacagtattggtagttacaagtgcagctgccggacagggtttcatctgcacgggaataggcatagctgcgtcgacgttaacgagtgcagacggcctcttgagcggcgagtatgtcaccactcatgccacaatactgtcggctcattcttgtgcacctgcagaccaggattccggctccgggctgaccgcgtgagctgcgaggctttccccaaagcagtgctggcgccttccgcaatactgcagccccggcagcatccaagtaaaatgcttttgcttcttccagaagcgggccgaccagcactaagcccaggccactcaccaccctccggcgcccctggacctccagccggggtacgcacaaccagactgccatctcctactcccagactccctactagctctccatccgcacccgtgtggctgttgtctactctgttggccactcctgtgccgactgcgagcctcctcggtaatctccggccacctagcctgctgcagggtgaggtgatgggcacgcccagctcaccacgggggccagagtcgccaagactcgcggccgggccctcgccatgctggcatctcggtgctatgcatgagagcaggtcaagatggaccgaacccggctgttcccagtgttggtgtgaggacggtaaagtgacttgcgaaaaagtccgatgtgaagccgcctgttctcatcctataccctccagggacggagggtgctgtccttcttgcactggctgcttccactctggcgtagtccgagctgaaggggatgtcttctctcctcctaacgaaaactgcaccgtgtgtgtctgcctggccggtaacgtgtcttgcatctcccccgaatgcccatccggaccatgccaaacccctcctcagacggactgttgtacctgtgtacccgtgcgctgctattttcatggtcgttggtacgcagatggagcggtgttttctggtggaggagacgaatgtacaacatgcgtgtgtcagaatggagaggttgaatgttccttcatgccatgtccagagcttgcatgcccacgggaagaatggcgcttgggccccggacaatgctgttttacctgccaggagccaactcctagcaccggctgtagtcttgatgacaacggggttgagttcccaatcggccagatatggagtccaggggacccctgcgagctttgtatctgccaagctgacggctccgtgtcatgtaaacgtactgattgtgtggacagctgtcctcatcctatacggattccggggcaatgctgccccgattgctccgccggatgtacttacactggccgcattttctacaacaatgaaacctttccctcagtcctggacccgtgcttgagctgcatttgcctcctgggttctgttgcttgttctcccgtggactgcccgattacgtgtacctacccctttcaccccgacggcgaatgctgccccgtgtgccgcgactgcaattatgagggtaggaaagtggctaacggccaggtattcaccctcgacgatgagccatgtacccgctgcacttgccagctgggggaagtgtcatgcgaaaaggtgccctgccagagagcctgcgccgacccagcgctcctgcctggtgattgctgtagtagttgtccggatagtctctctcccctggaagagaagcagggcttgagtccacacggaaatgttgccttctctaaggctggccgaagcttacacggcgacaccgaagctccagttaactgctcctcttgccccggaccacccacagcttctccaagccgccctgttctgcacctcttacagctcctactgcggaccaatctcatgaagacgcaaactctgcctacttctccagcaggggcccatggaccccatagccttgctctcggcttgaccgctacttttcctggcgaacccggcgcctcaccccgtttgagcccgggcccctccaccccgcctggcgcaccgactctgccattagctagtcccggggcaccccagccgccgccagtgacacccgagaggtcattttctgcatccggagctcagatcgtttctcgatggccaccactgcccgggacactcttgacagaagcttccgccttgtcaatgatggacccctccccgagcaaaacgcctattacactgttaggacctcgggtgctttctcccactacttctcgcttaagtaccgccctagctgctaccacacaccccggcccccagcagcctcctgtgggggcgtcgcgcggagaggagtctacaatgtag

SEQ ID NO: 244380 - RNA, 2868 nt, Artificial Sequence
  derived and/or modified sequence
augugggccggucuccucuuaagagcugcgugugucgccuuauuacugccuggagcucccgcacgagguuacacaggcaggaaaccucccgggcacuuugcugccgagcguagacggcucggaccucaugugugucuaagcggcuuugggaguggcugcuguccaggaugggcccccagcaugggaggaggacacuguacacugccuuugugcucauucggaugcggaucuggcauaugcaucgcuccaaacguuugcagcugccaagauggggaacagggcgccaccuguccugaaacccacggccccugcggcgaauacgggugcgaucuaacuuguaaucacggcggcugucaagaaguggcuagggugugucccgugggcuuuucuaugacggaaacugcaguuggcauuagaugcaccgauaucgacgagugugucaccagcuccugugagggccauugugugaacacagagggaggcuucguuugcgaaugcggucccggaaugcaacuuagcgccgaucgccacuccugucaggauacagacgagugucuggggacuccgugucagcagcgcuguaagaauaguauugguucauacaagugcagcuguagaacuggcuuccaucuccauggaaaucgucauuccugugucgaugucaaugaguguagacggccccuagagcguagggugugccaucacagcugccauaacacugugggcuccuuccugugcaccugcagaccuggauuccgccucagagccgauagagugucuugugaagccuucccaaaagcuguacucgccccaagugccauccuacagccacggcagcaucccaguaagaugcuccugcuucuccccgaggccggccgacccgcccucucacccggccacucccccccaaguggggcgccggggcccccagccggugugcgaaccaccaggcugcccagcccaacaccacgcuugcccacauccucacccagugcccccgugugguugcuuuccacgcuccuugccaccccagucccaacagcgagccugcuuggcaaucucaggccgccuucucuccuacagggcgaaguuauggguacacccagcucuccccguggucccgagucaccucgucuugcugcgggcccguccccuuguuggcaucuuggcgccaugcacgagucucgcuccagguggacagagccuggcuguucucaguguuggugugaagacggaaaagucacaugcgagaaagucagaugcgaggcugcaugcucacaccccauuccgagucgggauggagguuguuguccgucuuguacgggcuguuuccacuccgguguugugcgcgccgagggcgauguguucagucccccgaacgagaacuguaccguaugcguuugccucgcuggaaacgugagcuguaucagcccggaguguccuucagggccgugucagacaccaccccagacagacuguuguacgugcguuccugugagauguuauuuucacggaaggugguaugcagauggagccguuuuuagugggggcggggaugaaugcaccacuugcgucugccagaauggcgaagucgaauguagcuucaugccuugucccgagcuagcauguccccgagaggaauggcggcuggggccgggacaaugcuguuuuacaugccaggaaccaacaccuucuacagguuguucacuugacgacaaugguguugaguuucccaucggccagauuugguccccaggcgauccuugugagcuuuguauaugucaagcagaugguucugucagcuguaagagaacugauuguguggacaguuguccccaucccaucagaaucccuggacagugcuguccagauugcuccgcugguugcaccuacacuggccguauauucuauaacaacgagaccuuucccaguguucucgacccaugucugaguugcaucugucuuuugggaagcguggccuguagcccuguugauugucccauuacguguaccuauccauuccaucccgacggugaguguugccccgugugccgcgauugcaacuacgaagguaggaagguggccaauggacaaguauuuacccucgacgacgagccuugcacgcgaugcaccugucagcugggagaggucucuugcgagaaggucccaugucagagagccugcgcggauccagcguugcuccccggugauugcugcagcaguuguccugacagccucuccccccuggaagagaaacaaggacuuagcccgcacggaaauguggcguuuucaaaagccggcagaagucuccauggggauaccgaggcacccgucaauugcucaagcugccccggcccacccaccgcuucuccaucgaggccaguuuugcaccuucugcaacuccuucugcggaccaaccucaugaaaacucagacucucccuacgucccccgcaggggcccauggcccucacucucuggcacucggacuuacggcuacuuuccccggggagccaggggcuucaccccgguuaucuccuggaccaagcacaccuccaggcgccccuacccugccacuggccaguccaggagcaccucagcccccgccuguuacaccugaaaggucuuucagcgccagcggcgcacaaaucgugucacgguggccuccccugccagguacacuucuuacagaggcuagcgcccugagcaugauggaccccuccccguccaagacuccaauaacccucuuggggccucggguguugaguccaaccacuagucggcuuucuacagcccuggccgccacaacgcacccugguccacaacagccaccagugggcgccagucgaggcgaggagucuaccauguag

SEQ ID NO: 244381 - RNA, 2868 nt, Artificial Sequence
  derived and/or modified sequence
augugggcgggucuucuuuugcgggcagcuugcgucgcacugcugcuuccaggggcaccugcaagggguuacacugggcguaaaccacccggccacuuugccgcggaaaggagaaggcugggaccucacguuugccuaagcggauucgguucagguugcuguccaggcugggcuccuaguauggggggcgggcacugcacucugcccuuaugcucauuuggcuguggauccggaaucugcauugccccaaacgucugcagcugucaggauggagaacaaggugccacaugcccugagacccacgggcccuguggagaguacggaugugaccucaccugcaaucacggggggugucaggaggucgcaagagucugcccagugggcuucuccaugacagagaccgcaguuggaauuagauguaccgauauugaugaaugcgucacaaguucuugugaggggcacugugugaauaccgaggguggauucgugugcgagugugggccaggaaugcagcucuccgcagacagacacucaugccaagacaccgacgaaugcuuaggaacaccaugccagcagcgaugcaaaaauaguauugguagcuacaaauguagcugucgaacaggcuuccauuuacauggaaauaggcacuccugcguggaugucaacgagugucggcgcccccuagagagaagaguuugucaucauucuugucacaacacugucgguucuuuucuguguacaugucgacccggauuccgccugcgcgcugauagaguuaguugcgaagccuucccuaaggccguccuggcaccaagcgcaauccuccagccacgucaacacccuucuaaaaugcugcuccucuugcccgaggccggaagaccugcacugaguccuggccacucaccucccaguggcgccccagggccuccugccggugucagaacuacccgacuucccucaccaacuccacggcugccuacuucuagcccaucugcgccuguuuggcugcucucgacguuacuugccacucccguuccuaccgccucacugcugggcaaccuccgaccgccaucccuccuccagggagaaguuaugggcacgccgaguucuccuagaggaccugaaucgccccggcuagccgcgggacccucacccuguuggcaccucggcgcaaugcacgagucgcggucccgguggacugaaccggguuguagccaguguuggugcgaagauggaaagguuacaugcgaaaagguccgcugcgaagccgcuuguucucacccaauaccauccagggacggcggguguugcccuucuuguaccggcugcuuucacagugggguagugcgagcugaaggggacgucuuuucuccucccaacgaaaauuguacagugugcgugugucuugcaggcaacgugucuuguaucagcccugaaugcccuucaggaccuugucagaccccgccucagacagauuguuguacaugcgugccaguuagaugcuacuuucauggacggugguaugcggacggcgccguguucagcggagguggggacgagugcaccacaugcgucugccagaacggggaggucgaauguagcuucaugccauguccggaacuugcguguccacgggaagaguggcggcuggguccaggacaguguugcuuuacgugucaggaaccuacaccuucaacaggcugcucucuagaugauaacgggguggaguuucccaucggacaaaucuggagcccaggggauccuugcgagcuguguauaugucaggcugacgggucagugaguugcaaaaggaccgacugcguugacucauguccucacccuauuagaauuccaggacaauguugcccugacugcucugcuggaugcacuuacacaggccgcauuuucuauaauaaugagaccuucccgucgguguuagacccuugcuugucuugcaucugccuccucggcagugucgccuguuccccuguugauuguccaauuaccuguacguauccauuucacccagacggagaauguugccccguuuguagagauugcaacuacgagggcaggaaggucgcaaauggccagguauucacacuggaugacgaaccgugcacucgcugcaccugccaguugggggaagucaguugcgagaagguccccugucagcgagcaugcgcugaucccgcacugcuccccggcgacugcugcucuucaugcccagauucacucucaccccuagaagaaaaacagggacuaaguccacacggcaauguggccuuuaguaaggccggacguucucuccacggugauacagaagcaccagugaauuguagcucguguccggguccaccaaccgcuucacccuccagaccagugcuccaccugcugcagcuucugcuaagaaccaacuugaugaaaacacaaacacugcccaccuccccugccggagcgcacggcccucauucccuggcauuggggcugacugccacguuucccggcgaacccggcgcaucuccaagacuguccccugguccaucuacccccccaggcgcacccacucugcccuuagccucucccggcgcaccacagcccccgcccguuacacccgagcgguccuucucugccucaggugcucagaucgugucacgguggcccccauuacccggaacauugcuaacugaggcuuccgcacuguccaugauggacccaagcccaaguaagacaccuaucacccuccucgggcccagagugcuuucaccuaccacaagucgacuuucaacagcucucgccgcuaccacucauccgggaccucaacagccuccagugggcgccuccagaggagaagaaaguaccauguag

SEQ ID NO: 244382 - protein, 331 aa, Artificial Sequence
  derived and/or modified sequence
MASNFNDIVKQGYVKIRSRKLGIFRRCWLVFKKASSKGPRRLEKFPDEKAAYFRNFHKVTELHNIKNITRLPRETKKHAVAIIFHDETSKTFACESELEAEEWCKHLCMECLGTRLNDISLGEPDLLAAGVQREQNERFNVYLMPTPNLDIYGECTMQITHENIYLWDIHNAKVKLVMWPLSSLRRYGRDSTWFTFESGRMCDTGEGLFTFQTREGEMIYQKVHSATLAIAEQHERLMLEMEQKARLQTSLTEPMTLSKSISLPRSAYWHHITRQNSVGEIYSLQGHGFGSSKMSRAQTFPSYAPEQSEEAQQPLSRSSSYGFSYSSSLIQ

SEQ ID NO: 244383 - DNA, 996 bp, Artificial Sequence
  derived and/or modified sequence
atggccagcaacttcaacgacatcgtgaagcagggctacgtgaagatcagaagcagaaagctgggcatcttcagaagatgctggctggtgttcaagaaggccagcagcaagggccccagaagactggagaagttccccgacgagaaggccgcctacttcagaaacttccacaaggtgaccgagctgcacaacatcaagaacatcaccagactgcccagagagaccaagaagcacgccgtggccatcatcttccacgacgagaccagcaagaccttcgcctgcgagagcgagctggaggccgaggagtggtgcaagcacctgtgcatggagtgcctgggcaccagactgaacgacatcagcctgggcgagcccgacctgctggccgccggcgtgcagagagagcagaacgagagattcaacgtgtacctgatgcccacccccaacctggacatctacggcgagtgcaccatgcagatcacccacgagaacatctacctgtgggacatccacaacgccaaggtgaagctggtgatgtggcccctgagcagcctgagaagatacggcagagacagcacctggttcaccttcgagagcggcagaatgtgcgacaccggcgagggcctgttcaccttccagaccagagagggcgagatgatctaccagaaggtgcacagcgccaccctggccatcgccgagcagcacgagagactgatgctggagatggagcagaaggccagactgcagaccagcctgaccgagcccatgaccctgagcaagagcatcagcctgcccagaagcgcctactggcaccacatcaccagacagaacagcgtgggcgagatctacagcctgcagggccacggcttcggcagcagcaagatgagcagagcccagaccttccccagctacgcccccgagcagagcgaggaggcccagcagcccctgagcagaagcagcagctacggcttcagctacagcagcagcctgatccagtag

SEQ ID NO: 244384 - DNA, 996 bp, Artificial Sequence
  derived and/or modified sequence
atggcttccaatttcaatgacatcgtgaagcagggttacgtgaaaatcagaagcagaaagctcgggatcttccgaagatgttggcttgtttttaagaaagcatccagcaagggcccacgccgactcgaaaagtttcctgacgagaaggcggcatacttccgaaacttccataaggtgaccgagctgcacaatatcaaaaacattaccaggctgccgagggagaccaaaaagcacgctgtggccataatattccatgacgagactagcaaaacctttgcctgtgagtccgaactggaagcagaggagtggtgtaagcatttgtgcatggaatgtcttgggacacgccttaacgacatcagcctgggcgaacctgacctcctggctgcaggggtccagagggagcagaatgagcgattcaacgtgtatctcatgccaacacccaacttagacatctatggagagtgcaccatgcaaattacacatgaaaatatctacctgtgggatatccataacgccaaagtgaaactggttatgtggccactgtcgagcttgcggcgctatgggcgcgactcgacctggtttacattcgagagtggacggatgtgtgacacaggcgagggcctgttcactttccagactcgcgagggagagatgatttaccagaaagtgcattctgcgacgttggctatcgcggaacaacacgaaaggctgatgctcgaaatggaacagaaggccaggttgcagacctcactgacggagccaatgactctcagcaagagcatctcccttcctagatcagcctattggcaccacatcactcgccagaacagtgtgggagagatctatagcctgcagggccatgggtttggctcttccaaaatgtccagggctcagacctttccctcttacgcgcccgaacagtctgaggaggctcaacagccattaagccggtccagctcttacggattcagctactcttccagtttgatccagtag

SEQ ID NO: 244385 - DNA, 8897 bp, Artificial Sequence
  derived and/or modified sequence
gggccccgttccccgtccgcggcggccctgcaggcgaccccgcgtccccaccggcgggagctcggggaagagcgggcggcggcgctgctgctggcggcggccggctggatgcgagacccgcgcagacccggcggcggacggcggctctcgactccggagagcggatcgcggggcgcaggagcccgatcgcgctggccatggcctccaactttaacgacatagtcaagcagggctacgtgaaaatccgcagcaggaagcttgggattttcagacgatgctggttggttttcaagaaggcttctagcaaaggacccagaaggttagaaaaatttccagatgaaaaggcagcttatttcagaaactttcataaggtaactgaactgcacaatatcaaaaatataaccagactgccccgagagacaaagaagcatgcggtggcaatcatctttcacgatgaaacatcgaagacatttgcctgtgagtcagagctggaggccgaggagtggtgcaagcacctctgcatggagtgtctggggaccaggctcaatgatatcagccttggggagcccgaccttctggccgcaggagtgcagcgggaacagaatgagagattcaacgtgtatcttatgcctacaccaaacctggatatttatggtgaatgcacaatgcagatcactcatgaaaatatctatctctgggatatccacaatgccaaggtcaaactggtgatgtggcctctcagctcactgaggagatacggtcgggactcaacgtggttcacgtttgagtcaggaagaatgtgtgacacaggagaaggactattcacttttcaaacaagggaaggagaaatgatctatcagaaggttcattctgcgacactggccatagctgagcaacatgaaagattaatgctagaaatggaacagaaggcccggcttcagacaagcttgactgaaccaatgacattatccaaatcaatatctcttcctcgcagcgcgtactggcatcacatcactcgtcagaacagcgttggtgaaatctacagtttgcaaggtcatgggtttggttcgtcaaagatgtctcgtgcacagacatttcccagctacgccccagaacagagtgaagaggcccagcagccgttgtcgcggtccagcagctatggattcagctacagctccagcctcatccaatgacacacagagagccgctgttgactagagagacagtctgtcctggacccgtctgtggggtcattaccctctgcctcctggaagaccaattgcagtacaaattgaaatgggtcggctctagccccagtcccattggaaggttaaaaactggagttctgcttccttgattcagtggctaagtcctttatttattgaatttctttgggggaatctatgttttacataaatagaatccaaatcgtatgaacagttatttaaataaacaaaattctttgggtctgacagtaacagaaacctcagcactgggaaaagttgcccacactggggtatgcctgggtgatgggcacctctcactgacctcacagcgcagtccgcccatctgagcacagggtctgtccttagacataatggtgaccctccacaagctctgtggcttttaaagttctgacagggataaatacagtaagctctgcaaatgacatcgtagctgcatataaataaacccagtgacaattaaaggaacatgaaattcagaacacactattaagcagggccctgtagctctactcgtgtgtgtgtgtgcgtgtgtgtgtgtgtgtgtagacaaatggatattgctatatccatctatatataacaagtatatatcaaacatgtgctgagggtgacaggatatgctcacttaaattgttgaaaaccataatttggtgcattaaagttaagattgttatgttgaatagctatttttaaaatagtgctgtaaaaaaaaaaaaaaaaaaggcttcttattagcaaaagtatatgtaatccagtctgttcctaacaagtgtaagcaaaaatgtgagaaggggaacattcagaagcaaaagaaccagtctagctgtcctacacatcatgtcataccctgtctttctggtgagcgtttccttgttgctgacaatgttgctccctgtggccatccatctgagctacgtgaggaggattccatgtgaacgccgatcagcttccatttaaccttgagagaaaagagaggttctaaatgaagaactctttaagaaagaaagaatacacccataaagaactcagctattttgcagtaaagagaagaacaaaatgggtacaggattgtggatatcatagatgctgttctcacacaaccactgggggcttgtaatttactgtgtaaccagaacttgcagggctttattttttcttttactggacacaggttgtctgagattataagaaataaaatagatcaataattttcatcatccctgacactgattacaaacctacagtgtttaaagggaggtagtgaattccacggaaactgagtttggctaattcaggtcaacaaagatatatttgcccttaattctggagttaagtaaaaataaaaattatcctgcctgaatcatctgatgctttgtgcctaagatggttatctctcaaatactctagggtgggtttaaagaacagtgagctcaggtcacgcaagatgaaaacccaggttttttttttcttaataggaaaattttttaaactatccaaattagtctgttgaaagggtaccttttttgctgatctctgatgagttgtcttttcatccctatctgtagcttgagtgcagattgacaattcatttcagtgaattactaccgaataaaagtggttccggatccctcctagataaatgtgcacttacagcaactacctaggctctccaaatcactccactcggtatgaaaaccccatcaagatactaatcgtaagagttaatgtggctgcaaaaaataattatcctaagctttcagggataaaaagaaaattacccaggttctctgcactgtgaattttgctgacacagcggaggagcagatgactggttcctacaactgtacagccttccttgaaatcatagcttttggggttaaacacttgtgaatttcttttgcacatggcatttgcttttgaaatgcctttagtcaaatacaccagagcaactcccagctgagaccatttgagcacagttcctagtggggccacattcagagcaagcctctcgccggctcactcagttgagctgttgcttagacaccacaagtttctacaagggacttatggggaacggccctcaggggtcctggttcacatctcagctttattcatgtgctggaagcacaaacagcgagtccagggagggattctgctaatcagatgagtctgctcttgtgtctctttcttaggagacaaatacctgtatgtaattgcttcaagaactccatttggttctgatcattaccaatgaatataactgaaggagcaccaaagatcaggcataacctcgggccagttcattctgaaaatgatgtcgtaaaaagagtatgtgtgagagaaatctccttcccaagtttttaaccagatctcgtcacaatgaggagaatgctataatctatctcatggtacatttttggagcttaattctagcatactcctccaagtacactcacaattgtagctgagtcaagactgctaaatgaacagataggagaacttatattagactaatatccttgacacgaagcagggttcattgtaataaaaacggcaaacagataaatcttctaccaaaaccaaagatggaaagtcactgcaccagtctcctggaacttcataaaatcaatttcactggagcaaccagaagggtcatggagatgtataccactcgcttgggctcgtaggtttttgactggggatgcctctacactttgtaagtcatttctcccttcaaaaattgtattatatctttaatatatgtgtatttttcaatgcgagggaggaattactatgaaccaaagatatcttttggctccttctgaaagtgactcagtttgaattccattcagatttgtacagataaatagatggtcaccatttctgcatcaggttggaagagaccaatgataaaggaacccaacgtaaggaatagcagttctgaaaatagacaaagcctagaggaggtatctatttcactgagagattacacgaggggacttattttttatgttcccaattttttcttctgataatattaatcaatgtacacatgattgatgcatgatattacacttaaaatgcaggagagtacaaaacaaccttgatccaatagtttcctattctggggggtgggggcagaggcggaaaagaaaacacatctttcacttacttattgaacaaacaataagcactcagaactaatttatttatgcaggttgcaaatatgtatgaagcaataggttctggccactgccacaatttgaaatcaataaaataagaaatatatatttatatatgagggaagatgctgtttgatagagcatgtgaaatcaatggaaacatatttattaaaagtaaacctcacctttttcaccaaatagtaactagagaactagtcctagtatcttgcgtaattcttctctgtcttcattgggaaattatgtttgaaaatctttcatcacctataaaatggtgagcctcttgtactttctattcagtgtagaaagagtggactgataaataactttacattgttggtagtagtttctacagatccagtttattgcatgtcgtatctttattgtagatattaaaaacacatgataaaaattgatgtgtgcccctccttgtttggccagtatcacagaaaactttgtaaaaaagcatggggaccctactccctagattatttgagccatttactaaaattggccattagtgatacagtgaaaacaagctaaggaaatgatattctcctaaaaagttatattccagttttgattattataacacagcacaataaatgggcagtatacgtctaatggaactgagatttaaggctttaacaattcgtgttttaaaatattatattgaagactgcacaaagagaaaattatacatgtttctccaatcctgtgatcatgtctgtaaataccttgcaatttcaaattacttcatccgtcattaactatatgatctcccaaacacagccttctcaaaatcgataaaaatttgccactgaatatgcattaatagctataacaatgggtgacatgccacacaaatttagcttatgcaatttatggggtgtgtgtttgcagactatgaaatgtatgaagtgcagtctcccatggagagaatagagaggcaggatggcaactagtcatgaacgcaacaatttaggttaaatgataaagaatacaatgaaatgtccagagtaacacttggtctctacctttctaacattctaacccaaggccagtgtcatgggcttggctttcttccctgtcgcctcatactgagtatgcaatttacagaggacatctgttgctttatgtcttaaggccactagaggaagtcactacattcccaacaaagatgtgtctttcggcttagtgaaaaacatttaacaagaaacaatgtgtaaccaagtccccacagtaaaatgtgtcttcagaaacatgagaatcacttttatatagccaacctcatttgaattttatcatgaacataaattatcggtgagactggtgtgcggggctggatctgtgagacaagctcacactctcatgtgtgcattctctattaacatatttggaagattgcccacattttctctgcagacctgccacaaatccttaccttcttactgaagaatgtgactattgtagcattcgtgcaattatgccagcagaggaggcactagacagtttatagactcttatggaagttgggcacatttcccaggcaggtggaatgctagctagatctagaagcacccttaaaggtcatgtagaatcaaggtcccactttatgtttcccttgggagaaaactgaaacccatggatgctgtaatttgtttaacggcaaagaaagagccaagaattgtttctcgtagttccagggtcctgatctaggaatgtttccttggctccatggcatctcccagtttgacatagtgggagctgagaaatgccatatggcctcaaaataaataaacccttgtacatttaagtgttttcccagattttcagatgcctctactcttgctgaactcatcaccagctgtatcagtagagaggtgttatggggcaattcattagatttctggtaggtcatgaatggttggtataagctttatttactcatatattgtcatccagttctttgaaattcaatcttatcctaaagtggtagtcaaagtaaaacacattaagtaggtgtttgtgtttagcagtcctactaattcatcacaatcacatagtaattgtgattataatttttggaatctttatcactttctagcactttacggtgtcattatttatggcatttttaacaactttgttgcataattgataacatcagggctacatttttttcatgtgagcctcaagaagcttccattatcaacaagaattggggaaatgacttttttacattataataccttatatattaggtttttcctgataatcttcagtagacaatgatttaaattaactgaagtttaaataagaaatatgttaaaattactaaataatatgaaaaccacattatacttgtaattttcagacacttttctcctaccttaagattttaacatcttgtaaatattaatatttgaaggggagaggaaaaatacatttgtagtagaaatattccctctaacaattctgtttaactagtaagttttttttaagttatcttccatgcctgcttccctagtctgaactccacattccagttgtcagaagaatgaatggatttaaattttctaatcattattttgggcccatgttagcagttgaaacaattaagttcctcactctttcctgcttttaggatgattttagactgtgagcataaaatcaaccctttctgtcagcacagaattgaacatcgaatggagcaaggtctacactctcagcctgtagctgtgctaatgttaggattgaattgttctattaattccctcaagagacccacagcctcaaaagagttgcttattatcagatgtccgaaattcagaaacccaaagtcaggcaaagaaggaaactgagataatgatttaatttttttaagtcactgcaggatttctctcaaagaaaacatctgaaaatggttgagaaagtagttccagatcattaactattttacagagggactgaaagccagggaaaataaagaacagaatgatagtagtatcttgatattaaatttgcatcagaaatgagcaaaatatgtcaatatgaaataatttgaaatcaaattcagattcacatgtatagtgcatagttcaagaaataatgcttactcttgtaaaaaaaaaaaatatatatatatgtatcagcaggtagagtgtgggagctccaactttgttgtgaaagctgataacagagtatgattctttccagttacaaaatactgtattactttagttatagcaagcagtacataaatgacatcaacaactcaggctgctccctgacataaaagccagttccatctttactgcagatgacaggagactttccaagacctgcagaggccccctccaccccaaccttagtgcatgctcacacacacacacacacacacacacacacacacacacacacacatttttggcttttgacccactctgtgtgttccactgaagttatcttttccttaatagattcacacagaattaccccatcctgcaaaatccttatccctatgaatctctaaaatatattaaataatgtgttatatatttgctttttgtaaatctttatttaattaatttatatatactttgtgaagtcttatactgtacatcataaagcgatgtcatctgtagttggttcaatataatgtttatgatcattttgataagaaataactttggacattaggcccttgttaagaaataaaacacccattataaatttgcttctgttggaaaatacatgatttggcatacttcatttttagtaacaatctattctagataaatgataatttggggacatctgtacttaaaaactagctgaactacgttttgggatgagatgcaaagcaacagctgtccctggaactgaaatgtgaatttctagcagaacagaaaatattataataatgaggcaataataaaattaggaaattaaattatttttaaatctgtctgtgtgatttttccccttggtaaaaatacatgaaatacataattgaaaaattaccttcttctgaagtcgtagtttttaatcttaaccatcaataaataaacctattgttaacaatgtcttattcataattctaaaaaatttacaaatgatattgctatgaggttgtgcactattaaagtttgctccatcacttaaaggtaaagcagttcaaaaatactactttacatcacaactttgcatggctgagattttgaacaactaaattgatggttttacccacaagttatttcataaagctaacactgtaatattacttggttttcttatacttttgttatcatgtgatgaaatgtaactatgtaattaaacaaaattctgacaatcatattctgctaatgtttaaaatgttacttattccttcacttattagcttgctattttgaaaataaagtgaaagaaggccctttattaaatgaaa

SEQ ID NO: 244386 - DNA, 996 bp, Artificial Sequence
  derived and/or modified sequence
atggccagcaacttcaatgacatcgtgaagcagggctacgtgaagatccgcagcaggaagctgggcatcttccgccgctgctggctggtgttcaagaaggccagcagcaagggcccccggcggctggagaagttcccagatgagaaggccgcctacttcaggaacttccacaaggtgacagagctgcacaacatcaagaacatcacccggctgccccgggagaccaagaagcatgctgtggccatcatcttccatgatgagaccagcaagacctttgcctgtgagagcgagctggaggccgaggagtggtgcaagcacctgtgcatggagtgcctgggcacccggctgaatgacatcagcctgggggagccagacctgctggccgccggcgtgcagcgggagcagaatgaacgcttcaacgtgtacctgatgcccacccccaacctggacatctacggggagtgcaccatgcagatcacccatgagaacatctacctgtgggacatccacaatgccaaggtgaagctggtgatgtggcccctgagcagcctgcggcgctatggccgggacagcacctggttcacctttgagagcggccgcatgtgtgacaccggggagggcctcttcaccttccagacccgggagggggagatgatctaccagaaggtgcacagcgccaccctggccatcgccgagcagcacgagcggctgatgctggagatggagcagaaggcccggctgcagaccagcctgacagagcccatgaccctgagcaagagcatcagcctgcccaggtctgcctactggcaccacatcacccggcagaacagcgtgggggagatctacagcctgcagggccacggcttcggcagcagcaagatgagccgggcccagaccttccccagctatgcccctgagcagagcgaggaggcccagcagcccctgagccgcagcagcagctatggcttctcctacagcagcagcctcatccagtag

SEQ ID NO: 244387 - DNA, 996 bp, Artificial Sequence
  derived and/or modified sequence
atggccagcaacttcaacgacatcgtgaagcagggctacgtgaagattcggagccgtaagctgggcatattccggagatgttggctggtgtttaaaaaagcctcctccaaaggcccacggcgccttgaaaagtttcctgacgagaaagccgcgtattttagaaatttccacaaagtgactgagctgcacaacattaagaacattaccagacttccaagggagactaagaaacacgccgtggctatcatctttcacgacgaaaccagtaaaaccttcgcctgtgagagcgagcttgaggccgaagaatggtgcaagcacctgtgcatggagtgtttagggactaggctaaatgatatctccctgggggagccagacttgcttgctgccggcgtgcagagggagcagaatgaacgttttaacgtgtacctcatgccaacacctaacctggacatctatggggagtgtaccatgcaaatcacccatgagaatatctacctctgggatatacataacgctaaagttaaattagtgatgtggccgctgtcctctttgcggagatacggacgggacagtacatggtttaccttcgagtccgggagaatgtgtgacacaggcgaggggctctttacctttcagacacgggaaggcgaaatgatctaccagaaggttcactccgccacgcttgcaattgcagagcaacacgaacggctaatgcttgaaatggagcagaaagccaggctgcaaaccagcctgaccgagcccatgaccctcagtaagtcgatctctctcccgcggagcgcctattggcaccacattacacgtcagaacagcgttggagaaatttatagtttgcagggccacggttttggaagctctaagatgagcagggcccaaactttccccagctatgctcctgagcaatcagaagaagcccaacagcccctctcacgctcctctagttacggcttttcctactccagttcacttatccaatag

SEQ ID NO: 244388 - DNA, 996 bp, Artificial Sequence
  derived and/or modified sequence
atggctagcaatttcaatgatattgtcaagcaaggatacgttaaaatacggagcaggaagctaggcattttccgacgctgttggctcgtcttcaaaaaggccagcagcaagggtccaagacggcttgagaagtttcctgatgaaaaagcagcctatttcaggaactttcacaaggtgactgagttacataacataaagaatatcacacgcctgccaagagagactaagaagcacgctgtcgctatcatctttcatgacgaaacaagtaagacatttgcttgtgaaagcgaactggaagctgaagaatggtgtaagcacctgtgcatggaatgccttggcacccggctgaacgatatcagtttgggagagcccgacctgctcgcagccggagtccaaagggaacagaacgaaagattcaacgtgtatctcatgccgacacctaacctggatatctatggcgagtgtaccatgcaaataacccatgagaacatatacctttgggacatacacaatgcgaaggtgaagctggtaatgtggcctctttccagcctgcggagatacggaagggattccacttggttcacatttgaaagtggaaggatgtgcgatacgggcgagggcctgttcacatttcagactagggaaggggaaatgatctatcagaaggtgcacagcgctactctggctatcgcggaacagcatgaacgcttgatgctcgagatggaacagaaagctcgtctgcagaccagtctcaccgaaccaatgaccctgtccaaatcaatcagccttccacgatctgcatactggcaccatatcactagacagaatagtgtcggggagatttactcacttcaaggccatggatttggctcatccaagatgtctagagcacagactttcccaagctacgcaccagagcagagcgaggaagctcagcagcccctctcaagaagcagcagctatggcttctcgtactcgagcagtctcatccagtag

SEQ ID NO: 244389 - protein, 416 aa, Artificial Sequence
  derived and/or modified sequence
MKRERGALSRASRALRLAPFVYLLLIQTDPLEGVNITSPVRLIHGTVGKSALLSVQYSSTSSDRPVVKWQLKRDKPVTVVQSIGTEVIGTLRPDYRDRIRLFENGSLLLSDLQLADEGTYEVEISITDDTFTGEKTINLTVDVPISRPQVLVASTTVLELSEAFTLNCSHENGTKPSYTWLKDGKPLLNDSRMLLSPDQKVLTITRVLMEDDDLYSCMVENPISQGRSLPVKITVYRRSSLYIILSTGGIFLLVTLVTVCACWKPSKRKQKKLEKQNSLEYMDQNDDRLKPEADTLPRSGEQERKNPMALYILKDKDSPETEENPAPEPRSATEPGPPGYSVSPAVPGRSPGLPIRSARRYPRSPARSPATGRTHSSPPRAPSSPGRSRSASRTLRTAGVHIIREQDEAGPVEISA

SEQ ID NO: 244390 - DNA, 1251 bp, Artificial Sequence
  derived and/or modified sequence
atgaaacgagagcgcggggccttatcgcgagcaagcagagcgctgaggttggcgccatttgtatacctgcttctcatacagaccgatcctctggaaggtgtcaacattacctctccagttcgtctgatccacggaactgttggtaagagtgccctgctgtcagtccaatacagttctacaagcagcgatagacccgtggttaagtggcagctgaagagagacaagcccgtgacagtcgtacagagtattggaacagaagttatcggtactctcaggccagactaccgggacagaatccgactgtttgaaaatgggagcttgctcctctctgatctgcaactggcggatgaggggacctatgaagtcgagatctctataacagatgacacctttacaggtgagaagaccattaatttgacggtggacgtgccaatcagccgtccccaagtgttggtggcttcgacaacagttctggaactgtctgaagccttcaccctaaattgttctcacgagaatggcaccaagcccagctatacatggctcaaggatggcaagcccctgctcaatgacagccgcatgctgctctccccagatcagaaggtattaacgattacaagggttctgatggaagacgacgatctgtacagctgtatggtagaaaatcccattagccaaggcaggagtctgccggtgaagatcaccgtctaccgcaggagttcgctctatattattctatccactggcggcatatttctgctcgttaccttggtgacagtttgcgcctgttggaagccttccaagaggaaacagaagaaattggaaaaacagaacagcctggagtatatggaccagaacgacgacagattgaagccagaagccgacaccctgccacgaagcggagagcaagagcgaaaaaaccctatggctctgtacatcctgaaggacaaggactctccagagaccgaggagaacccggcccctgagccacgatccgctacagagccaggcccacctggttatagcgtttcccctgcagttccaggtcgaagtccaggactccccataagaagtgctagaagataccctcggagccccgctcggtctccagccaccggaagaacccacagtagtcctccccgcgccccttcatcccccgggagaagcagatcagccagtcgtacccttcgtactgccggtgtacacattatccgcgaacaggacgaggccggacccgtggaaatctcggcttag

SEQ ID NO: 244391 - DNA, 3602 bp, Artificial Sequence
  derived and/or modified sequence
gttaggtggagacagggtaggttgggacacaaagtccagttaagtgtgtgtcccagctcagtgctctgagcccagatcctcatctccctgggtagtgaggctcagcacagacaagcaaccaactgctgggctgccggtgccccccatgttggaacctgagttggagattatctcctaagcagatacctgcttccaaactggggatgtagggcttggaaactagaaaatgccaggtctgagggagaggaaagaacaagtccagcaatacacagagctctgtgtattcagagggaagttggcagggttgtgttcgggcagagaaactccgagtggtacaaaggggacgtgcccagagtggagaaatcatgctaattgtctgcactagagctggagaacgccacccaaaatgaagagagaaaggggagccctgtccagagcctccagggccctgcgccttgctccttttgtctaccttcttctgatccagacagaccccctggagggggtgaacatcaccagccccgtgcgcctgatccatggcaccgtggggaagtcggctctgctttctgtgcagtacagcagtaccagcagcgacaggcctgtagtgaagtggcagctgaagcgggacaagccagtgaccgtggtgcagtccattggcacagaggtcatcggcaccctgcggcctgactatcgagaccgtatccgactctttgaaaatggctccctgcttctcagcgacctgcagctggccgatgagggcacctatgaggtcgagatctccatcaccgacgacaccttcactggggagaagaccatcaaccttactgtagatgtgcccatttcgaggccacaggtgttggtggcttcaaccactgtgctggagctcagcgaggccttcaccttgaactgctcacatgagaatggcaccaagcccagctacacctggctgaaggatggcaagcccctcctcaatgactcgagaatgctcctgtcccccgaccaaaaggtgctcaccatcacccgcgtgctcatggaggatgacgacctgtacagctgcatggtggagaaccccatcagccagggccgcagcctgcctgtcaagatcaccgtatacagaagaagctccctttacatcatcttgtctacaggaggcatcttcctccttgtgaccttggtgacagtctgtgcctgctggaaaccctccaaaaggaaacagaagaagctagaaaagcaaaactccctggaatacatggatcagaatgatgaccgcctgaaaccagaagcagacaccctccctcgaagtggtgagcaggaacggaagaaccccatggcactctatatcctgaaggacaaggactccccggagaccgaggagaacccggccccggagcctcgaagcgcgacggagcccggcccgcccggctactccgtgtctcccgccgtgcccggccgctcgccggggctgcccatccgctctgcccgccgctacccgcgctccccagcgcgctccccagccaccggccggacacactcgtcgccgcccagggccccgagctcgcccggccgctcgcgcagcgcctcgcgcacactgcggactgcgggcgtgcacataatccgcgagcaagacgaggccggcccggtggagatcagcgcctgagccgcctcgggatcccctgagaggcgcccgcggtctgcggccagtggcccgggggaaagctggggctgggaagcccgggcgcggcgcgctggggacgaggggaggtcccgggggggcgctggtgtctcgggtgtgaacgtgtatgagcatgcgcagacggaggcgggtgcgcggaggcggcagtgttgatatggtgaaaccgggtcgcatttgcttccggtttactggctgtgtcctcacttggtataggttgtgccctcttaggaccacatagattattacatttctggcccaatacccaaaagggttttatggaaactaacatcagtaacctaacccccgtgactatcctgtgctcttcctagggagctgtgttgtttcccacccaccacccttccctctgaacaaatgcctgagtgctggggcactttttttttttttttttttttttttttttttgcaagttcagattagagaggccactttcccagaatccacagctgcactaagctaaggagaagccagatgccggttactgggtgtgcaggggctgttctgagctggggggatcattgtgaaggccttcttccctgggcacctggtacctggggacctacaaggtggtgagggaagggtacgagtacattccttttccctctgacctgggcgctagcaagggcaaagaacccgagcctgccagcttggcctcctcccacagcctccctcggaggcatgccatgccaagcactctttctgtctctgttcatgaataaaagagatggatgggcttattcttatagagaagtgaatttcacttactcccctggcccgaaaactagaccaaatgaggaactgttttagctcatcaaactcatatattcctcctggcttccttacaaaacaagcctttcaaacaatcattgtcctcaggaaagttgttgagcttcctccagctgtgagaataagtcctaatctccagagaaatggtggggggaggaggaggcttattgcttcccagcatttggggggaacatgatccaacccctggcctcctgccacccatctgccctgctcccacatgctcaggtcccagggcacagaaaaagggcagactccctaatcacactaacatcaaaataaagaggctgggccgctgtgtagccaggacatgcccatgccaccgcctattgaacagttcataggagtggcagtaatctactgtgtgaggagagagggcaattaaaaagctgaaagagaaggaggccctctgtgtattccattccctcctccttaatgcctccaagggtccttgcatccctagtctcctaaactccagctctgattcgccatcaacccatggagcaattccaaggccccagttacccatcacctccacaccaggtcaagttttgtctcagccccaaaggcactgacatttctagtttgccccctctgccctgaaccccacagcatgcctgtctcagctccctgtccctcggcacttccccaggctcatttgagcaggtgtgccttcgcagctcccctaaacttcccaggtgcctcatccataatgagataatgcatgtaggggaaaagtttctcaagaaggtggaagaggcagcaggacttggataaggagtacctgctggtcagccttgagatgcacaggtgaaggttagggtgagatgagaacatgccataccctggtgctgaatccctgaggggccagcttgccaggcttaagccaaatctgccttaaattgggggtggggaggggtaagtaaggaagtggggtttgtttttgtgttgttttcatcttcatctttgtattactagcatccagcagagtgcctagcacatactggatgctcaataaacttttgatgaaatgaaatgacaactttattccacataaacaagggtaacaaaacaagctgcttaaata

SEQ ID NO: 244392 - DNA, 1251 bp, Artificial Sequence
  derived and/or modified sequence
atgaagcgggagcggggggccctgagccgggccagccgggccctgcggctggccccctttgtgtacctgctgctgatccagacagaccccctggagggcgtgaacatcaccagccctgtgcggctcatccacggcaccgtgggcaagagcgccctgctgtctgtgcagtacagcagcaccagcagtgacaggcctgtggtgaagtggcagctgaagagggacaagcctgtgacagtggtgcagagcattggaacagaggtgattggcaccctgcggccagactacagagaccgcatccggctgtttgaaaatggcagcctgctgctgagtgacctgcagctggctgatgagggcacctatgaggtggagatcagcatcacagatgacaccttcaccggggagaagaccatcaacctgactgtggatgtgcccatcagccggccccaggtgctggtggccagcaccaccgtgctggagctgtctgaggccttcaccctgaactgcagccatgaaaatggcaccaagcccagctacacctggctgaaggatggcaagcccctgctgaatgacagcaggatgctgctgagcccagaccagaaggtgctgaccatcaccagggtgctgatggaggatgatgacctgtacagctgcatggtggagaaccccatcagccagggccgcagcctgcctgtgaagatcaccgtgtacagaagaagcagcctgtacatcatcctgagcactggaggcatcttcctgctggtgaccctggtgacagtgtgtgcctgctggaagcccagcaagaggaagcagaagaagctggagaagcagaacagcctggagtacatggaccagaatgatgaccggctgaagccagaggccgacaccctgcccaggtctggagagcaggagaggaagaaccccatggccctgtacatcctgaaggacaaggacagccctgagacagaagaaaatcctgcccctgagcccaggtctgccacagagcccggccccccaggctacagcgtgtccccagctgtgcccggccgcagccctggcctgcccatccgcagcgcccggcgctaccccaggagccctgcccggagccctgccactggaagaacccacagcagccccccccgggcccccagcagccctggccgcagccgcagcgccagcaggaccctgaggacagctggggtgcacatcatccgggagcaggatgaagctggccctgtggagatcagcgcctag

SEQ ID NO: 244393 - DNA, 1251 bp, Artificial Sequence
  derived and/or modified sequence
atgaagcgggagcggggcgccctgagccgggccagccgggccctgcgcctggcgccattcgtttatctgctcctgatccagacagacccactcgagggagtcaacatcacttcccctgttcgtcttattcatggtactgtgggcaagtcagctctgctgtctgtgcagtattcaagcacttctagcgatagacccgttgtaaagtggcagcttaagagggataaaccagtcacagtggtccagtctatcggcactgaggttatagggacgctcaggcctgactaccgagatcgaatccgcctgtttgagaacggtagtctccttttgagtgatctgcagctagccgacgagggcacttatgaggttgagatttcgatcaccgacgatacattcacaggcgagaagaccatcaacttgacagtggatgtgcccatctctcgtccacaggtattagttgcatctacaacagtgctcgagctgtcggaagcgttcacgctgaactgctcccacgaaaatggcactaagcctagctacacctggttaaaagacggcaagcctctcctaaatgacagccggatgttgctgagccctgatcagaaggtgctgaccattaccagagtgctgatggaagacgatgacctttattcctgcatggtggaaaaccctatctcccaggggcgctcattacctgtgaagatcactgtgtaccggcggtccagcctgtacatcattctgagtactggaggcatttttttgctcgtgaccctcgtaacagtctgtgcctgctggaagccatccaaacgcaagcaaaaaaagctggaaaagcagaacagtcttgagtatatggaccagaacgatgacagactgaaacccgaggcagacacactgccaagatctggggagcaggaacgcaaaaatcccatggccctgtacattcttaaggacaaggattcgcccgaaacagaagaaaatcctgctccagagccccggtctgccactgaacctggaccccccgggtatagtgtgagccccgctgtgcctggacgctccccaggactccccatcaggtccgccagacggtatccccggtctcctgcccgatccccggccactgggcggacccattcttctccccctagagctccaagcagccctggtcggagtcggagcgcaagtcgaacactgagaaccgctggggtgcatatcattagagagcaggacgaggctggaccggtggagatctccgcctag

SEQ ID NO: 244394 - DNA, 1251 bp, Artificial Sequence
  derived and/or modified sequence
atgaaaagagagcgtggtgccctgtcacgagcatctcgagctttgagactcgcaccctttgtgtacctgctcctcattcagactgaccccctggagggtgtgaacattacaagccctgtcaggttaatacacggaactgttggcaagtcagcactgttatcagtgcagtactcttccacctcttctgatcgccctgtcgtgaaatggcagctgaagcgggataagccggtgaccgtcgtgcaaagcatcgggactgaagtgatcgggactctgcggccagattatcgagatcggattcgtctgtttgaaaatgggtccctcctcctttctgacctgcagctggctgacgaaggtacttacgaagtggaaatttccatcaccgacgacaccttcacgggggagaaaaccattaatctgactgttgacgttcccatctctagaccccaggtactggttgcaagtaccacagtgttagaactgtcggaggcatttaccctcaactgcagccacgagaacgggactaagccctcatacacatggctcaaagacggtaaacctctcctgaacgactcccggatgctgttgtcgccggaccagaaggtgctgaccattacgcgcgtgctcatggaagacgacgacctgtattcctgcatggtcgagaaccctatctctcagggcaggtccctgcctgtgaaaataacagtgtacaggaggtccagtctctatattatcctcagcaccggcggtatattcttactggtaactttggtgactgtgtgcgcctgttggaagccaagtaagagaaagcaaaaaaaactggaaaaacaaaactcccttgagtatatggaccagaacgacgatcgactgaaacctgaggcagacactctgcccagatctggcgaacaggagcgcaaaaaccccatggctttgtacattttgaaagataaggattccccagaaacggaggagaatcctgcaccagagccgcgatcagccaccgaacctggcccacctggctacagtgtatcaccagcagtcccgggaagaagccctggactccctatccgttccgccaggcgttatcccaggtctcctgccagatccccagctactgggcgtacccattcctctcccccacgtgcacccagctctcctggcaggagcaggtcagccagccgaacacttcgcacggccggagtccatatcatcagggaacaggatgaagccggacctgtagagattagtgcctag

SEQ ID NO: 244395 - DNA, 1251 bp, Artificial Sequence
  derived and/or modified sequence
atgaagagagagagaggcgccctgagcagagccagcagagccctgagactggcccccttcgtgtacctgctgctgatccagaccgaccccctggagggcgtgaacatcaccagccccgtgagactgatccacggcaccgtgggcaagagcgccctgctgagcgtgcagtacagcagcaccagcagcgacagacccgtggtgaagtggcagctgaagagagacaagcccgtgaccgtggtgcagagcatcggcaccgaggtgatcggcaccctgagacccgactacagagacagaatcagactgttcgagaacggcagcctgctgctgagcgacctgcagctggccgacgagggcacctacgaggtggagatcagcatcaccgacgacaccttcaccggcgagaagaccatcaacctgaccgtggacgtgcccatcagcagaccccaggtgctggtggccagcaccaccgtgctggagctgagcgaggccttcaccctgaactgcagccacgagaacggcaccaagcccagctacacctggctgaaggacggcaagcccctgctgaacgacagcagaatgctgctgagccccgaccagaaggtgctgaccatcaccagagtgctgatggaggacgacgacctgtacagctgcatggtggagaaccccatcagccagggcagaagcctgcccgtgaagatcaccgtgtacagaagaagcagcctgtacatcatcctgagcaccggcggcatcttcctgctggtgaccctggtgaccgtgtgcgcctgctggaagcccagcaagagaaagcagaagaagctggagaagcagaacagcctggagtacatggaccagaacgacgacagactgaagcccgaggccgacaccctgcccagaagcggcgagcaggagagaaagaaccccatggccctgtacatcctgaaggacaaggacagccccgagaccgaggagaaccccgcccccgagcccagaagcgccaccgagcccggcccccccggctacagcgtgagccccgccgtgcccggcagaagccccggcctgcccatcagaagcgccagaagataccccagaagccccgccagaagccccgccaccggcagaacccacagcagcccccccagagcccccagcagccccggcagaagcagaagcgccagcagaaccctgagaaccgccggcgtgcacatcatcagagagcaggacgaggccggccccgtggagatcagcgcctag

SEQ ID NO: 244396 - DNA, 675 bp, Artificial Sequence
  derived and/or modified sequence
atggttccccccaatatcgcagaactgaaaaatctggaggttctgaacttctttaacaaccaaatcgaggaactccccacgcagatctcctcactgcagaaactcaaacacttgaacctgggcatgaaccgtttgaacactctccctaggggctttggctcactgcctgcactcgaagtgctcgacctcacgtacaataacctgtctgagaatagtctgcctggcaactttttctacctgaccactctaagagccctgtatctgtcagataacgacttcgagattctgcctcccgacataggtaaactgacgaaacttcagattctcagtctgagagacaacgatctcatctcgttgcccaaagagattggggaactgacccagctgaaagagctgcacatccaagggaatagattgactgttctacctcctgagttagggaacctagatctgacaggccaaaagcaagtattcaaagcagaaaacaatccttgggtgactcctatcgccgaccagttccagctgggcgtgagccacgtgttcgagtatatacggtcggagacgtacaaatacctttatgggcggcatatgcaggcgaaccctgagccgccgaagaaaaacaatgacaaatccaaaaagatttcacgcaagccccttgctgcaaaaaacaggtag

SEQ ID NO: 244397 - DNA, 675 bp, Artificial Sequence
  derived and/or modified sequence
atggtgccccccaacattgctgagctgaagaacctggaggtgctgaacttcttcaacaaccagatcgaggagctgcccacccagatcagcagcctgcagaagctgaagcacctgaacctgggcatgaaccggctgaacaccctgccccggggcttcggcagcctgcctgccctggaggtgctggacctgacctacaacaacctgtctgagaacagcctgcccggcaacttcttctacctgaccaccctgcgggccctgtacctgagtgacaatgactttgagatcctgcccccagacatcggcaagctgaccaagctgcagatcctgagcctgcgggacaatgacctgatcagcctgcccaaggagattggagagctgacccagctgaaggagctgcacatccagggcaaccggctgactgtgctgcccccagagctgggcaacctggacctgaccggccagaagcaggtgttcaaggccgagaacaacccctgggtgacccccatcgctgaccagttccagctgggcgtgagccacgtgtttgagtacatccgctctgagacctacaagtacctgtatggccgccacatgcaggccaaccctgagccccccaagaagaacaatgacaagagcaagaagatcagcaggaagcccctggccgccaagaacagatag

SEQ ID NO: 244398 - DNA, 675 bp, Artificial Sequence
  derived and/or modified sequence
atggtgccccccaacatcgccgagctgaagaacctggaggtgctgaattttttcaataaccagatcgaggaactcccaacccagatttccagcctccagaaactcaaacatttaaaccttggaatgaatagacttaatacattgcctcgtggatttggctcactgcccgcattagaggtgctggatcttacctacaataacctgtctgagaacagcctgcccgggaactttttctatctgaccaccttgagggcactgtatctgtccgacaatgatttcgagattctgcctccagatataggaaagctcaccaagctccagattctgagcctgagagacaatgatttgatctccctgcccaaggaaatcggcgaactcacacaactgaaagagctgcacatccagggtaaccggcttacagtcctgcccccagaacttggaaatttggacttgacaggccaaaagcaggttttcaaagccgagaataacccctgggtgaccccaatcgcagatcagttccaactgggagtctctcacgtgttcgagtatattaggtcagagacctataaatacttatacggacggcacatgcaggcaaaccccgagccgcctaagaagaataacgacaagagcaaaaaaatatcacggaagcctcttgccgccaagaatagatag

SEQ ID NO: 244399 - DNA, 675 bp, Artificial Sequence
  derived and/or modified sequence
atggtccccccaaatatcgcagagctcaaaaacctagaagtgcttaacttttttaacaatcagatcgaggagcttccaactcagatctcgtctctacagaaactgaaacacctgaatcttggaatgaaccggttgaatactctgcctcgcggattcggaagtcttcccgcactggaggtcctagacctgacctacaataacctttccgagaacagcctcccgggaaactttttctatcttaccactctgcgagctctctacttgtcagataatgacttcgaaattctgcctccagatatcggaaagctgacgaagctccagatcctgtctctgcgcgataatgacctgattagcctgccaaaggaaattggagaactgacacagctgaaggagctgcacatccagggcaacaggctcaccgtgctgcctcctgagcttggaaatctcgacctcaccggccagaagcaggtattcaaggcagagaacaacccttgggtgacgccgatagctgaccagttccaattgggggtgtcacacgtcttcgagtacattagatctgaaacatataagtacttgtacggacggcatatgcaagcgaatcccgagccacccaagaaaaataacgataagtccaaaaaaatttcccgaaagccattagctgcaaaaaaccggtag

SEQ ID NO: 244400 - DNA, 675 bp, Artificial Sequence
  derived and/or modified sequence
atggtgccccccaacatcgccgagctgaagaacctggaggtgctgaacttcttcaacaaccagatcgaggagctgcccacccagatcagcagcctgcagaagctgaagcacctgaacctgggcatgaacagactgaacaccctgcccagaggcttcggcagcctgcccgccctggaggtgctggacctgacctacaacaacctgagcgagaacagcctgcccggcaacttcttctacctgaccaccctgagagccctgtacctgagcgacaacgacttcgagatcctgccccccgacatcggcaagctgaccaagctgcagatcctgagcctgagagacaacgacctgatcagcctgcccaaggagatcggcgagctgacccagctgaaggagctgcacatccagggcaacagactgaccgtgctgccccccgagctgggcaacctggacctgaccggccagaagcaggtgttcaaggccgagaacaacccctgggtgacccccatcgccgaccagttccagctgggcgtgagccacgtgttcgagtacatcagaagcgagacctacaagtacctgtacggcagacacatgcaggccaaccccgagccccccaagaagaacaacgacaagagcaagaagatcagcagaaagcccctggccgccaagaacagatag

SEQ ID NO: 244401 - protein, 654 aa, Artificial Sequence
  derived and/or modified sequence
MCFRTKLSVSWVPLFLLLSRVFSTETDKPSAQDSRSRGSSGQPADLLQVLSAGDHPPHNHSRSLIKTLLEKTGCPRRRNGMQGDCNLCFEPDALLLIAGGNFEDQLREEVVQRVSLLLLYYIIHQEEICSSKLNMSNKEYKFYLHSLLSLRQDEDSSFLSQNETEDILAFTRQYFDTSQSQCMETKTLQKKSGIVSSEGANESTLPQLAAMIITLSLQGVCLGQGNLPSPDYFTEYIFSSLNRTNTLRLSELDQLLNTLWTRSTCIKNEKIHQFQRKQNNIITHDQDYSNFSSSMEKESEDGPVSWDQTCFSARQLVEIFLQKGLSLISKEDFKQMSPGIIQQLLSCSCHLPKDQQAKLPPTTLEKYGYSTVAVTLLTLGSMLGTALVLFHSCEENYRLILQLFVGLAVGTLSGDALLHLIPQVLGLHKQEAPEFGHFHESKGHIWKLMGLIGGIHGFFLIEKCFILLVSPNDKKSPEDSQAAEMPIGSMTASNRKCKAISLLAIMILVGDSLHNFADGLAIGAAFSSSSESGVTTTIAILCHEIPHEMGDFAVLLSSGLSMKTAILMNFISSLTAFMGLYIGLSVSADPCVQDWIFTVTAGMFLYLSLVEMLPEMTHVQTQRPWMMFLLQNFGLILGWLSLLLLAIYEQNIKI

SEQ ID NO: 244402 - DNA, 1965 bp, Artificial Sequence
  derived and/or modified sequence
atgtgcttcagaaccaagctgagcgtgagctgggtgcccctgttcctgctgctgagcagagtgttcagcaccgagaccgacaagcccagcgcccaggacagcagaagcagaggcagcagcggccagcccgccgacctgctgcaggtgctgagcgccggcgaccaccccccccacaaccacagcagaagcctgatcaagaccctgctggagaagaccggctgccccagaagaagaaacggcatgcagggcgactgcaacctgtgcttcgagcccgacgccctgctgctgatcgccggcggcaacttcgaggaccagctgagagaggaggtggtgcagagagtgagcctgctgctgctgtactacatcatccaccaggaggagatctgcagcagcaagctgaacatgagcaacaaggagtacaagttctacctgcacagcctgctgagcctgagacaggacgaggacagcagcttcctgagccagaacgagaccgaggacatcctggccttcaccagacagtacttcgacaccagccagagccagtgcatggagaccaagaccctgcagaagaagagcggcatcgtgagcagcgagggcgccaacgagagcaccctgccccagctggccgccatgatcatcaccctgagcctgcagggcgtgtgcctgggccagggcaacctgcccagccccgactacttcaccgagtacatcttcagcagcctgaacagaaccaacaccctgagactgagcgagctggaccagctgctgaacaccctgtggaccagaagcacctgcatcaagaacgagaagatccaccagttccagagaaagcagaacaacatcatcacccacgaccaggactacagcaacttcagcagcagcatggagaaggagagcgaggacggccccgtgagctgggaccagacctgcttcagcgccagacagctggtggagatcttcctgcagaagggcctgagcctgatcagcaaggaggacttcaagcagatgagccccggcatcatccagcagctgctgagctgcagctgccacctgcccaaggaccagcaggccaagctgccccccaccaccctggagaagtacggctacagcaccgtggccgtgaccctgctgaccctgggcagcatgctgggcaccgccctggtgctgttccacagctgcgaggagaactacagactgatcctgcagctgttcgtgggcctggccgtgggcaccctgagcggcgacgccctgctgcacctgatcccccaggtgctgggcctgcacaagcaggaggcccccgagttcggccacttccacgagagcaagggccacatctggaagctgatgggcctgatcggcggcatccacggcttcttcctgatcgagaagtgcttcatcctgctggtgagccccaacgacaagaagagccccgaggacagccaggccgccgagatgcccatcggcagcatgaccgccagcaacagaaagtgcaaggccatcagcctgctggccatcatgatcctggtgggcgacagcctgcacaacttcgccgacggcctggccatcggcgccgccttcagcagcagcagcgagagcggcgtgaccaccaccatcgccatcctgtgccacgagatcccccacgagatgggcgacttcgccgtgctgctgagcagcggcctgagcatgaagaccgccatcctgatgaacttcatcagcagcctgaccgccttcatgggcctgtacatcggcctgagcgtgagcgccgacccctgcgtgcaggactggatcttcaccgtgaccgccggcatgttcctgtacctgagcctggtggagatgctgcccgagatgacccacgtgcagacccagagaccctggatgatgttcctgctgcagaacttcggcctgatcctgggctggctgagcctgctgctgctggccatctacgagcagaacatcaagatctag

SEQ ID NO: 244403 - DNA, 1965 bp, Artificial Sequence
  derived and/or modified sequence
atgtgtttccgaaccaaactgagcgtgtcctgggtaccccttttcctcctcctgtcacgagtattctcaactgaaactgacaaaccctcagcacaagatagccgaagtcgcggctcttcaggacaacctgctgatctgctgcaggttctcagtgctggagaccacccccctcacaatcattctcggtccctgattaaaacactgctcgagaagactggttgcccccgccgcaggaacggtatgcaaggcgattgtaatctctgctttgagccagatgcactgttgcttatcgccggaggtaacttcgaggatcagctgcgcgaagaggtggtgcagagagttagcctgctgctcctttactatatcatccatcaagaagaaatttgctcctcaaagctgaatatgagtaacaaagaatataagttctacctgcactcgttattatccctgcgccaagacgaagattcctctttcctcagccagaacgagaccgaggacattttggcattcacaaggcagtatttcgacaccagccagtcccagtgcatggaaaccaaaactctccagaaaaagtctggcattgtatcctccgagggagctaacgagagcaccctcccccagctggctgcaatgattatcactctctccctgcagggtgtgtgcctcggtcaggggaatctgcccagcccagattatttcacagagtatattttcagttctcttaatagaaccaataccctgcgcctatctgaactggatcagttgctcaatacactgtggacccgctcaacttgtataaagaatgaaaagatccaccagtttcagcgaaagcagaacaatatcattactcatgaccaggactactccaatttctcgtcgtctatggaaaaagaatcagaggacggcccggtgtcctgggaccagacctgcttcagtgcacggcaactggttgagattttcctgcagaaaggcctgagtctcatctcaaaggaggattttaagcagatgagtcccggtatcatccagcagctactcagttgttcctgccacctcccaaaggaccagcaagcgaagctgcctcctacgaccttggaaaaatatgggtacagtaccgttgccgtgaccctgcttacactgggcagcatgctggggaccgccctcgtgctatttcattcatgcgaggaaaattatcgcctcatcctgcaactattcgtgggtttggccgtaggaaccctgagcggtgatgccctgctgcatctgatcccacaggtgctgggtctgcacaaacaggaagcccccgagttcggccactttcatgaaagtaaggggcatatttggaagctcatgggactcataggcggaatccatggctttttcctgattgagaaatgttttatattgctggtctctcccaacgacaaaaaatccccagaggactcacaagctgctgagatgccaattggttcaatgaccgcatccaaccgtaagtgtaaagccatatctctgctcgcgataatgatcctggtcggagactccttgcacaattttgcggacggactggctattggggcggcatttagctcttcgagtgagagtggcgtgactaccacaatagccattttgtgtcatgaaattccccacgagatgggcgacttcgccgtactattatctagtggcctgtctatgaagaccgcgatactcatgaatttcatctcgtccctgacggcgttcatgggtctgtacatcggcctgtccgtgagtgcagacccctgtgtgcaggattggatctttaccgtcacagccggaatgttcctgtatttaagtcttgtggagatgctccctgaaatgacacacgtgcagacccagaggccatggatgatgttcctactgcagaattttggcttgatcctggggtggctaagcctgctactgctcgctatctacgagcagaatataaaaatttag

SEQ ID NO: 244404 - DNA, 1965 bp, Artificial Sequence
  derived and/or modified sequence
atgtgcttccgcaccaagctgtctgtgtcctgggtgcccctcttcctgctgctgagcagggtcttcagcacagaaacagacaagcccagcgcccaggacagccgcagccggggcagcagcggccagcctgctgacctgctgcaggtgctgtctgctggggaccaccccccccacaaccacagccgcagcctcatcaagaccctgctggagaagacaggctgccccaggagaagaaatggcatgcagggcgactgcaacctgtgctttgagccagatgccctgctgctgattgctgggggcaactttgaggaccagctgcgggaggaggtggtgcagagggtgtccctgctgctgctgtactacatcatccaccaggaggagatctgcagcagcaagctgaacatgagcaacaaggagtacaagttctacctgcacagcctgctgagcctgcggcaggatgaggacagcagcttcctgagccagaatgaaacagaggacatcctggccttcacccggcagtactttgacaccagccagagccagtgcatggagaccaagaccctgcagaagaagagcggcatcgtgtcctctgagggcgccaatgaaagcaccctgccccagctggccgccatgatcatcaccctgagcctgcagggcgtgtgcctgggccagggcaacctgcccagcccagactacttcacagagtacatcttcagcagcctgaacagaaccaacaccctgcggctgtctgagctggaccagctgctgaacaccctgtggaccaggagcacctgcatcaagaatgagaagatccaccagttccagaggaagcagaacaacatcatcacccatgaccaggactacagcaacttcagcagctccatggagaaggagagtgaagatggccctgtgtcctgggaccagacctgcttcagcgcccggcagctggtggagatcttcctgcagaagggcctgagcctcatcagcaaagaagacttcaagcagatgagccctggcatcatccagcagctgctgagctgcagctgccacctgcccaaggaccagcaggccaagctgccccccaccaccctggagaagtatggctacagcacagtggccgtgaccctgctgaccctgggctccatgctgggcacagccctggtgctcttccacagctgtgaggagaactaccgcctcatcctgcagctgtttgtgggcctggccgtgggcaccctgtctggagatgccctgctgcacctgatcccccaggtgctgggcctgcacaagcaggaggcccctgagtttggccacttccacgagagcaagggccacatctggaagctgatgggcctcatcggcggcatccacggcttcttcctgattgagaagtgcttcatcctgctggtgagccccaatgacaagaagagccctgaggacagccaggccgctgagatgcccatcggctccatgacagccagcaacaggaagtgcaaggccatcagcctgctggccatcatgatcctggtgggggacagcctgcacaactttgctgatggcctggccatcggggccgccttcagcagcagcagcgagagcggcgtgaccaccaccatcgccatcctgtgccacgagatcccccatgagatgggagactttgctgtgctgctgagcagcggcctgtccatgaagacagccatcctgatgaacttcatcagcagcctgacagccttcatgggcctgtacatcggcctgtctgtgtctgctgacccctgtgtgcaggactggatcttcaccgtgacagctggcatgttcctgtacctgagcctggtggagatgctgcctgagatgacccacgtgcagacccagaggccctggatgatgttcctgctgcagaactttggcctcatcctgggctggctgagcctgctgctgctggccatctatgagcagaacatcaagatctag

SEQ ID NO: 244405 - DNA, 1965 bp, Artificial Sequence
  derived and/or modified sequence
atgtgcttccggaccaagctgagcgtgagctgggtgcccctgttccttttattgtcccgtgtgttttccacagaaactgataaaccatccgctcaagactctcggtctcgcggcagctcagggcagcctgccgatctgcttcaggtcctctcagccggcgatcatccaccacataatcactccagatccctgataaaaaccttgttagagaaaactggctgtccgcgcaggagaaacgggatgcagggtgattgtaatttatgtttcgagccggatgcactcctactcatcgccggcgggaatttcgaggaccagctgcgcgaggaggtggttcagcgggtgagccttctgcttctttactacatcattcatcaagaggaaatttgttcgagtaaactgaatatgtcgaacaaagagtataaattttaccttcatagcttactgagcttgcggcaagatgaggattcttcattcctaagccagaatgagacagaagatatccttgcattcacccggcagtatttcgatacatcccaatctcagtgcatggagacaaaaactttacaaaaaaagagcggcatcgtaagctcggaaggggcaaatgagtcaaccctacctcaactggccgcaatgatcatcacattgagcttacagggggtctgcctcggtcagggaaatcttccctccccagattacttcactgaatacatttttagcagccttaaccgcacgaacaccctgcgtctcagtgaacttgatcagttattaaacacgttatggactcgatccacttgcataaaaaatgaaaagattcatcagtttcagcgcaagcagaataacattatcacccatgaccaggactattctaacttttcttcctctatggagaaggaatccgaagacggaccagtaagttgggatcagacttgcttcagcgccagacagctggtggagattttcttgcagaagggcctgtctctcattagtaaagaagattttaaacagatgagtccgggaatcatccagcagttactgtcgtgctcgtgtcacttgccgaaagaccagcaggccaaactccctccgacaaccctagagaaatacggatatagtacggttgcagtcaccctccttacactagggagcatgttagggaccgctttggttctcttccacagctgcgaggagaattacaggttgattctccaattgtttgtggggctcgcggtcggcaccctgtcgggagatgctcttcttcatctgatacctcaggtgctgggcctgcataagcaggaggcccctgagttcggtcattttcacgagagtaagggccatatatggaagctgatggggttgattggcgggattcacggttttttcctgatagagaagtgcttcattttactggtaagtccaaatgacaagaaatctccagaagacagtcaagccgccgagatgccaataggatccatgactgcctccaacagaaagtgcaaggcaattagtctactcgcgatcatgattcttgtgggggatagcctccataacttcgcagatggactcgccatcggagccgccttttcctctagttccgagtcaggagtcaccacaaccattgcaattttgtgtcatgaaattccacacgagatgggcgactttgctgtcctcctttcctcaggactgtccatgaagactgccatccttatgaattttatttcttcactcacagcatttatgggcctctacatcggattatctgttagcgcagatccctgcgtccaagattggattttcaccgtaaccgccgggatgtttctctacctcagcctcgtggagatgctgccagagatgacgcacgtgcagactcagcgcccttggatgatgtttctgctgcaaaattttggtcttatattgggctggctaagtcttctgttattggccatctacgaacagaacattaagatttag

SEQ ID NO: 244406 - DNA, 1965 bp, Artificial Sequence
  derived and/or modified sequence
atgtgtttccgtacaaaactctctgtcagctgggttccacttttcctcctcttgtctagggtgttctccaccgaaaccgacaaaccttctgcccaagattcgaggagccgagggtcttccggccagcctgctgatttattgcaggtgttatcagcaggagatcaccctcctcataaccacagccggagtctaattaaaaccctgctcgaaaagaccggatgcccgcgtaggaggaacgggatgcagggcgactgtaacctgtgtttcgagcccgacgccctgctgctgatcgcaggcggtaatttcgaagatcaactgcgcgaggaggtggtgcagagagtttctctcctgctcctgtactatataatccaccaagaggagatctgcagctcgaagctgaatatgtcaaacaaggaatacaagttttatctccactcactgctctctctgcgtcaagatgaggatagcagctttctgtctcagaatgaaactgaggacattctcgctttcaccaggcagtatttcgacacaagccagagccagtgtatggagactaagaccctccaaaagaaatccggaatagtgtcatccgaaggcgcaaacgaatcaaccttgcctcaactcgctgcgatgattattacactgtcactgcagggagtctgtctaggccagggcaacctcccgagccccgactacttcaccgaatacatcttctcaagcttgaaccgcacgaacactcttcgcctctccgagcttgaccagctactcaataccctgtggacccgctcgacttgtattaaaaacgaaaagatccatcagtttcaaaggaaacagaacaatatcattacgcatgaccaggactactcaaacttttcctcctcaatggaaaaagagtcagaggacgggcctgttagctgggaccagacttgtttcagtgcaagacagctcgtagaaatctttctccagaaaggccttagtttaatttcgaaggaggattttaaacagatgagtcccggtatcatccaacaactgctgtcctgtagctgccaccttcccaaggaccaacaagcgaagctcccgccaaccaccctggagaaatacggttatagtactgttgcggttacactactgacgctgggatccatgcttggcaccgctctagtgctgtttcattcctgcgaagagaattatcgactgatccttcagctgtttgtcggcttagccgtgggaacgttgtcaggggacgcactcttacacttaattcctcaggttctgggcctgcacaaacaggaagcgcctgagtttgggcacttccacgaatctaaagggcatatttggaaattgatggggttaataggcggaattcatggattctttctgattgagaagtgcttcattctcctagtgagccccaacgacaagaagtctcctgaggactctcaggccgctgaaatgccgataggatcaatgactgcatcgaatcgcaagtgtaaggccatctcactgttggccatcatgatcctggtgggcgattcgctgcacaatttcgcagatggcctggctatcggcgcagcattctcttcctcctcggaatctggagtgaccaccacaatcgctattctgtgccacgagatacctcacgaaatgggcgactttgcagtgctgctttcatcaggtctttctatgaagaccgcaatcctcatgaatttcattagctcattgacagcattcatggggctgtatatagggctgtccgtatctgctgatccttgcgttcaagattggatcttcacggtcacggccggaatgttcctgtatctgtccctcgtcgaaatgttgcctgaaatgacacacgtccagacgcagcggccatggatgatgttcttactgcagaatttcggactgatcctgggttggctttctcttctgctgctcgccatatatgagcaaaatattaagatttag

SEQ ID NO: 244407 - DNA, 2639 bp, Artificial Sequence
  derived and/or modified sequence
aaataatcctctctagctcccagtgcacagtcaaagaattttaaaaacagggaactttgtaactgtgaaatactctccaggatttaaaaggctgtggagctccagataaagaatcgtttatctttcttctgaagaaattcctttggttacaagtttaccccataaacggcaacacactcacctccatccaagacagactcaaggtggaggaagcgtggaaatgtgcttccggacaaagctctcagtatcctgggtgccattgtttcttctactcagccgtgttttttctactgagacagacaaaccctcagcccaggatagcagaagccgtgggagttcaggccaaccggcagacctgctacaggttctctctgctggtgaccacccaccccacaaccactcaagaagcctcatcaaaacattgttggagaaaactgggtgcccacggaggagaaacggaatgcaaggagattgcaatctgtgctttgaaccagatgcactattactaatagctggaggaaattttgaagatcagcttagagaagaagtggtccagagagtttctcttctccttctctattacattattcatcaggaagagatctgttcttcaaagctcaacatgagtaataaagagtataaattttacctacacagcctactgagcctcaggcaggatgaagattcctctttcctttcacagaatgagacagaagatatcttggctttcaccaggcagtactttgacacttctcaaagccagtgtatggaaaccaaaacgctgcagaaaaaatctggaatagtgagcagtgaaggtgctaatgaaagtacgcttcctcagttggcagccatgatcattactttgtccctccagggtgtttgtctgggacaaggaaacttgccttccccagactactttacagaatatattttcagttccttgaatcgtacgaataccctccgcctatcagaactagaccaactcctcaacactctctggaccagaagtacttgtatcaaaaatgagaaaatccatcaatttcaaaggaaacaaaacaacataataacccatgatcaggactattctaatttctcttcatccatggaaaaagagtctgaggatggtccagtttcctgggatcagacctgcttctctgctaggcagctggtggagatatttctacagaagggcctctcactcatttctaaggaggactttaagcaaatgagtccagggatcatccagcagctcctcagctgctcctgccacttacccaaggaccaacaagcaaagctgccacctaccactctggagaaatacggctacagcacggtggctgtcacccttctcacactgggctccatgctggggacagcgctggtccttttccatagctgtgaggagaactacaggcttatcttacagctgtttgtgggcttggccgtcgggacactgtctggggacgctctgctccaccttatccctcaggttcttggtttacataagcaggaagccccagaatttgggcatttccatgaaagcaaaggtcatatttggaaactgatgggattaattggaggcatccatggatttttcttgatagaaaaatgttttattcttcttgtatcaccaaatgacaagaaaagcccagaagattcacaggcagctgaaatgcctataggcagtatgacagcctccaacagaaaatgtaaagccattagcttgttagcaatcatgattctggttggggacagcctgcataattttgcagatggcctagccataggagcagccttctcatcatcatccgagtcaggagtgaccactacgattgctatcttgtgtcatgaaatcccacatgaaatgggagactttgccgtgctcttaagctctggactttctatgaagactgccatcctgatgaattttataagctccctaactgccttcatgggattatacattggcctttccgtgtcagctgatccatgtgttcaagactggatcttcacagtcactgctgggatgttcttatatttatccttggttgaaatgcttcctgaaatgactcatgttcaaacacaacgaccctggatgatgtttctcctgcaaaactttggattgatcctaggttggctttctctcctgctcttggctatatatgagcaaaatattaaaatataagtgaggatcttcaacatctttcaaaaatgcatttatatagtcttactttgtttctttcattgcactctataatgatttttaaattaagaattttttatcttaggcaaagtgtgtctctttcaattcattaacttattaattttataatgcagttttatttttggaaacatataaatatcagactgtccttaattgaaattttgtctttggtttccaacaccatgatgaagctcttgctttttaaaaagtagttagtaaattctgcatgaattttagtaaactttaaaaaatagattttttccctaagaaagaatgtttgtagaatttaaagtggacagatgcctgttggagtaaaatcaactgcaactttttgatgttaatttttttccctgtgcaattataaactataagcaagttaagtgacaagcaaatgtaataaagactagttttaata

SEQ ID NO: 244408 - protein, 548 aa, Artificial Sequence
  derived and/or modified sequence
MAHIPSGGAPAAGAAPMGPQYCVCKVELSVSGQNLLDRDVTSKSDPFCVLFTENNGRWIEYDRTETAINNLNPAFSKKFVLDYHFEEVQKLKFALFDQDKSSMRLDEHDFLGQFSCSLGTIVSSKKITRPLLLLNDKPAGKGLITIAAQELSDNRVITLSLAGRRLDKKDLFGKSDPFLEFYKPGDDGKWMLVHRTEVIKYTLDPVWKPFTVPLVSLCDGDMEKPIQVMCYDYDNDGGHDFIGEFQTSVSQMCEARDSVPLEFECINPKKQRKKKNYKNSGIIILRSCKINRDYSFLDYILGGCQLMFTVGIDFTASNGNPLDPSSLHYINPMGTNEYLSAIWAVGQIIQDYDSDKMFPALGFGAQLPPDWKVSHEFAINFNPTNPFCSGVDGIAQAYSACLPHIRFYGPTNFSPIVNHVARFAAQATQQRTATQYFILLIITDGVISDMEETRHAVVQASKLPMSIIIVGVGNADFAAMEFLDGDSRMLRSHTGEEAARDIVQFVPFREFRNAAKETLAKAVLAELPQQVVQYFKHKNLPPTNSEPA

SEQ ID NO: 244409 - protein, 446 aa, Artificial Sequence
  derived and/or modified sequence
MRLDEHDFLGQFSCSLGTIVSSKKITRPLLLLNDKPAGKGLITIAAQELSDNRVITLSLAGRRLDKKDLFGKSDPFLEFYKPGDDGKWMLVHRTEVIKYTLDPVWKPFTVPLVSLCDGDMEKPIQVMCYDYDNDGGHDFIGEFQTSVSQMCEARDSVPLEFECINPKKQRKKKNYKNSGIIILRSCKINRDYSFLDYILGGCQLMFTVGIDFTASNGNPLDPSSLHYINPMGTNEYLSAIWAVGQIIQDYDSDKMFPALGFGAQLPPDWKVSHEFAINFNPTNPFCSGVDGIAQAYSACLPHIRFYGPTNFSPIVNHVARFAAQATQQRTATQYFILLIITDGVISDMEETRHAVVQASKLPMSIIIVGVGNADFAAMEFLDGDSRMLRSHTGEEAARDIVQFVPFREFRNAAKETLAKAVLAELPQQVVQYFKHKNLPPTNSEPA

SEQ ID NO: 244410 - DNA, 1647 bp, Artificial Sequence
  derived and/or modified sequence
atggcccacatccccagcggcggcgcccccgccgccggcgccgcccccatgggcccccagtactgcgtgtgcaaggtggagctgagcgtgagcggccagaacctgctggacagagacgtgaccagcaagagcgaccccttctgcgtgctgttcaccgagaacaacggcagatggatcgagtacgacagaaccgagaccgccatcaacaacctgaaccccgccttcagcaagaagttcgtgctggactaccacttcgaggaggtgcagaagctgaagttcgccctgttcgaccaggacaagagcagcatgagactggacgagcacgacttcctgggccagttcagctgcagcctgggcaccatcgtgagcagcaagaagatcaccagacccctgctgctgctgaacgacaagcccgccggcaagggcctgatcaccatcgccgcccaggagctgagcgacaacagagtgatcaccctgagcctggccggcagaagactggacaagaaggacctgttcggcaagagcgaccccttcctggagttctacaagcccggcgacgacggcaagtggatgctggtgcacagaaccgaggtgatcaagtacaccctggaccccgtgtggaagcccttcaccgtgcccctggtgagcctgtgcgacggcgacatggagaagcccatccaggtgatgtgctacgactacgacaacgacggcggccacgacttcatcggcgagttccagaccagcgtgagccagatgtgcgaggccagagacagcgtgcccctggagttcgagtgcatcaaccccaagaagcagagaaagaagaagaactacaagaacagcggcatcatcatcctgagaagctgcaagatcaacagagactacagcttcctggactacatcctgggcggctgccagctgatgttcaccgtgggcatcgacttcaccgccagcaacggcaaccccctggaccccagcagcctgcactacatcaaccccatgggcaccaacgagtacctgagcgccatctgggccgtgggccagatcatccaggactacgacagcgacaagatgttccccgccctgggcttcggcgcccagctgccccccgactggaaggtgagccacgagttcgccatcaacttcaaccccaccaaccccttctgcagcggcgtggacggcatcgcccaggcctacagcgcctgcctgccccacatcagattctacggccccaccaacttcagccccatcgtgaaccacgtggccagattcgccgcccaggccacccagcagagaaccgccacccagtacttcatcctgctgatcatcaccgacggcgtgatcagcgacatggaggagaccagacacgccgtggtgcaggccagcaagctgcccatgagcatcatcatcgtgggcgtgggcaacgccgacttcgccgccatggagttcctggacggcgacagcagaatgctgagaagccacaccggcgaggaggccgccagagacatcgtgcagttcgtgcccttcagagagttcagaaacgccgccaaggagaccctggccaaggccgtgctggccgagctgccccagcaggtggtgcagtacttcaagcacaagaacctgccccccaccaacagcgagcccgcctag

SEQ ID NO: 244411 - DNA, 1341 bp, Artificial Sequence
  derived and/or modified sequence
atgagactggacgagcacgacttcctgggccagttcagctgcagcctgggcaccatcgtgagcagcaagaagatcaccagacccctgctgctgctgaacgacaagcccgccggcaagggcctgatcaccatcgccgcccaggagctgagcgacaacagagtgatcaccctgagcctggccggcagaagactggacaagaaggacctgttcggcaagagcgaccccttcctggagttctacaagcccggcgacgacggcaagtggatgctggtgcacagaaccgaggtgatcaagtacaccctggaccccgtgtggaagcccttcaccgtgcccctggtgagcctgtgcgacggcgacatggagaagcccatccaggtgatgtgctacgactacgacaacgacggcggccacgacttcatcggcgagttccagaccagcgtgagccagatgtgcgaggccagagacagcgtgcccctggagttcgagtgcatcaaccccaagaagcagagaaagaagaagaactacaagaacagcggcatcatcatcctgagaagctgcaagatcaacagagactacagcttcctggactacatcctgggcggctgccagctgatgttcaccgtgggcatcgacttcaccgccagcaacggcaaccccctggaccccagcagcctgcactacatcaaccccatgggcaccaacgagtacctgagcgccatctgggccgtgggccagatcatccaggactacgacagcgacaagatgttccccgccctgggcttcggcgcccagctgccccccgactggaaggtgagccacgagttcgccatcaacttcaaccccaccaaccccttctgcagcggcgtggacggcatcgcccaggcctacagcgcctgcctgccccacatcagattctacggccccaccaacttcagccccatcgtgaaccacgtggccagattcgccgcccaggccacccagcagagaaccgccacccagtacttcatcctgctgatcatcaccgacggcgtgatcagcgacatggaggagaccagacacgccgtggtgcaggccagcaagctgcccatgagcatcatcatcgtgggcgtgggcaacgccgacttcgccgccatggagttcctggacggcgacagcagaatgctgagaagccacaccggcgaggaggccgccagagacatcgtgcagttcgtgcccttcagagagttcagaaacgccgccaaggagaccctggccaaggccgtgctggccgagctgccccagcaggtggtgcagtacttcaagcacaagaacctgccccccaccaacagcgagcccgcctag

SEQ ID NO: 244412 - DNA, 2187 bp, Artificial Sequence
  derived and/or modified sequence
cggcccgggaggaggaccggaccccgagcggctgggagcgcacgcgagcgggccgtggccgcgcgggcagcgccctgagcctgtcccgcgcccgcgggcccggccgagcaggagcagctcccggggatgcccgggcggctcggagcgcgggcagcggcagccgtgcggtgagggcggtggcgcccgcgggacctgcgactgccaggaactcctgccaccgccaccggctcccatggcccacatacccagtgggggtgccccagcagcgggggcagcccccatgggcccccagtattgcgtgtgcaaggtggagctgtcagtgagtggccagaacctactggaccgggatgttacctccaagtccgaccccttctgtgtcctctttacagagaacaatggcagatggatcgagtacgacaggacagaaaccgcgatcaacaacctcaaccccgccttctccaagaagttcgtgcttgactaccacttcgaggaggtacagaagctcaagttcgcgctctttgaccaggacaagtccagtatgcggctggacgagcatgacttcctgggccagttctcctgcagcctgggcacgatcgtctccagcaagaagatcactaggcctctgctgctgctgaatgacaagcctgcggggaagggcttgattacgatcgctgcccaggagctgtccgacaaccgcgtcatcacactaagcctggcgggcaggaggctggacaagaaggacctctttgggaagtcagacccctttctggagttttataagccaggagacgatggcaagtggatgctggtccacaggactgaggtgatcaagtacacactggaccctgtgtggaagccattcacagtgcccttggtgtccctgtgtgatggggacatggagaagcccatccaggtcatgtgctacgactatgacaatgacgggggccatgacttcatcggcgagttccagacctcagtgtcacagatgtgtgaggctcgagacagcgtcccgctggagttcgagtgcatcaaccccaagaagcagaggaagaagaagaactataaaaactcgggcatcatcatcctgcgatcctgcaagataaaccgagactactccttccttgactacatcctgggaggctgccagctcatgttcaccgttggaatagactttacagcctccaacgggaatcccctcgacccttcctctttgcactatatcaaccctatgggcaccaacgaatatctgtcggccatctgggctgttgggcagatcattcaggactacgacagtgataagatgtttccagctctgggattcggggcccagttacccccagactggaaggtctcccatgagtttgccatcaacttcaaccccaccaaccccttctgctcaggtgtggatggtattgcccaggcgtactcagcttgcctgccccacatccgcttctacggtcctaccaatttctcccccatcgtcaaccacgtggcccggtttgcggcccaggccacacaacagcggacggccacgcagtacttcatcctcctcatcatcacggacggggtcatcagtgacatggaggagacacggcatgccgtggtgcaggcttccaagctgcccatgtccatcatcatcgtgggcgtgggcaatgcggacttcgctgccatggagttcctggatggggacagccgcatgctgcgctcccacacgggggaggaggcagcccgcgatattgtgcagttcgttccctttcgagagttccgcaacgcagcaaaagagaccttggccaaagctgtgctggcggagctgccccaacaagttgtgcagtatttcaagcataaaaacctgccccccaccaactcggagcccgcctgagctccagtgcccagcagcagcatgtcagctgagcctcctgccctcccccaggaacatgcacgctcactctgcttccttgtgggtggcctttttttaccgatccccttttttattttttacaaccggacctccacccccaacttcctccagcccagctgggcttcctttgttggagtcaactgttgatgcttccaggccaaactggcttcctctcctcctctccccacctttgccattcttaagtattgaatgtactttgtataattttagtggaattgttattgagaataaaatttttacaatcataa

SEQ ID NO: 244413 - DNA, 2308 bp, Artificial Sequence
  derived and/or modified sequence
cggaccccgagcggctgggagcgcacgcgagcgggccgtggccgcgcgggcagcgccctgagcctgtcccgcgcccgcgggcccggccgagcaggagcagctcccggggatgcccgggcggctcggagcgcgggcagcggcagccgtgcggtgagggcggtggcgcccgcgggacctgcgggaacttggcccagaccctccccccctgtggccctctgggtcaccatctgtgaaatgggctgatgttccggggcctgcctcctggagaatggacacagcatgaaggcgtggttttatggcattccgcctggcataggtccagactgccaggaactcctgccaccgccaccggctcccatggcccacatacccagtgggggtgccccagcagcgggggcagcccccatgggcccccagtattgcgtgtgcaaggtggagctgtcagtgagtggccagaacctactggaccgggatgttacctccaagtccgaccccttctgtgtcctctttacagagaacaatggcagatggatcgagtacgacaggacagaaaccgcgatcaacaacctcaaccccgccttctccaagaagttcgtgcttgactaccacttcgaggaggtacagaagctcaagttcgcgctctttgaccaggacaagtccagtatgcggctggacgagcatgacttcctgggccagttctcctgcagcctgggcacgatcgtctccagcaagaagatcactaggcctctgctgctgctgaatgacaagcctgcggggaagggcttgattacgatcgctgcccaggagctgtccgacaaccgcgtcatcacactaagcctggcgggcaggaggctggacaagaaggacctctttgggaagtcagacccctttctggagttttataagccaggagacgatggcaagtggatgctggtccacaggactgaggtgatcaagtacacactggaccctgtgtggaagccattcacagtgcccttggtgtccctgtgtgatggggacatggagaagcccatccaggtcatgtgctacgactatgacaatgacgggggccatgacttcatcggcgagttccagacctcagtgtcacagatgtgtgaggctcgagacagcgtcccgctggagttcgagtgcatcaaccccaagaagcagaggaagaagaagaactataaaaactcgggcatcatcatcctgcgatcctgcaagataaaccgagactactccttccttgactacatcctgggaggctgccagctcatgttcaccgttggaatagactttacagcctccaacgggaatcccctcgacccttcctctttgcactatatcaaccctatgggcaccaacgaatatctgtcggccatctgggctgttgggcagatcattcaggactacgacagtgataagatgtttccagctctgggattcggggcccagttacccccagactggaaggtctcccatgagtttgccatcaacttcaaccccaccaaccccttctgctcaggtgtggatggtattgcccaggcgtactcagcttgcctgccccacatccgcttctacggtcctaccaatttctcccccatcgtcaaccacgtggcccggtttgcggcccaggccacacaacagcggacggccacgcagtacttcatcctcctcatcatcacggacggggtcatcagtgacatggaggagacacggcatgccgtggtgcaggcttccaagctgcccatgtccatcatcatcgtgggcgtgggcaatgcggacttcgctgccatggagttcctggatggggacagccgcatgctgcgctcccacacgggggaggaggcagcccgcgatattgtgcagttcgttccctttcgagagttccgcaacgcagcaaaagagaccttggccaaagctgtgctggcggagctgccccaacaagttgtgcagtatttcaagcataaaaacctgccccccaccaactcggagcccgcctgagctccagtgcccagcagcagcatgtcagctgagcctcctgccctcccccaggaacatgcacgctcactctgcttccttgtgggtggcctttttttaccgatccccttttttattttttacaaccggacctccacccccaacttcctccagcccagctgggcttcctttgttggagtcaactgttgatgcttccaggccaaactggcttcctctcctcctctccccacctttgccattcttaagtattgaatgtactttgtataattttagtggaattgttattgagaataaaatttttacaatc

SEQ ID NO: 244414 - DNA, 2185 bp, Artificial Sequence
  derived and/or modified sequence
cggcccgggaggaggaccggaccccgagcggctgggagcgcacgcgagcgggccgtggccgcgcgggcagcgccctgagcctgtcccgcgcccgcgggcccggccgagcaggagcagctcccggggatgcccgggcggctcggagcgcgggcagcggcagccgtgcggtgagggcggtggcgcccgcgggacctgcgactgccaggaactcctgccaccgccaccggctcccatggcccacatacccagtgggggtgccccagcagcgggggcagcccccatgggcccccagtattgcgtgtgcaaggtggagctgtcagtgagtggccagaacctactggaccgggatgttacctccaagtccgaccccttctgtgtcctctttacagagaacaatggcagatggatcgagtacgacaggacagaaaccgcgatcaacaacctcaaccccgccttctccaagaagttcgtgcttgactaccacttcgaggaggtacagaagctcaagttcgcgctctttgaccaggacaagtccagtatgcggctggacgagcatgacttcctgggccagttctcctgcagcctgggcacgatcgtctccagcaagaagatcactaggcctctgctgctgctgaatgacaagcctgcggggaagggcttgattacgatcgctgcccaggagctgtccgacaaccgcgtcatcacactaagcctggcgggcaggaggctggacaagaaggacctctttgggaagtcagacccctttctggagttttataagccaggagacgatggcaagtggatgctggtccacaggactgaggtgatcaagtacacactggaccctgtgtggaagccattcacagtgcccttggtgtccctgtgtgatggggacatggagaagcccatccaggtcatgtgctacgactatgacaatgacgggggccatgacttcatcggcgagttccagacctcagtgtcacagatgtgtgaggctcgagacagcgtcccgctggagttcgagtgcatcaaccccaagaagcagaggaagaagaagaactataaaaactcgggcatcatcatcctgcgatcctgcaagataaaccgagactactccttccttgactacatcctgggaggctgccagctcatgttcaccgttggaatagactttacagcctccaacgggaatcccctcgacccttcctctttgcactatatcaaccctatgggcaccaacgaatatctgtcggccatctgggctgttgggcagatcattcaggactacgacagtgataagatgtttccagctctgggattcggggcccagttacccccagactggaaggtctcccatgagtttgccatcaacttcaaccccaccaaccccttctgctcaggtgtggatggtattgcccaggcgtactcagcttgcctgccccacatccgcttctacggtcctaccaatttctcccccatcgtcaaccacgtggcccggtttgcggcccaggccacacaacagcggacggccacgcagtacttcatcctcctcatcatcacggacggggtcatcagtgacatggaggagacacggcatgccgtggtgcaggcttccaagctgcccatgtccatcatcatcgtgggcgtgggcaatgcggacttcgctgccatggagttcctggatggggacagccgcatgctgcgctcccacacgggggaggaggcagcccgcgatattgtgcagttcgttccctttcgagagttccgcaacgcagcaaaagagaccttggccaaagctgtgctggcggagctgccccaacaagttgtgcagtatttcaagcataaaaacctgccccccaccaactcggagcccgcctgagctccagtgcccagcagcagcatgtcagctgagcctcctgccctcccccaggaacatgcacgctcactctgcttccttgtgggtggcctttttttaccgatccccttttttattttttacaaccggacctccacccccaacttcctccagcccagctgggcttcctttgttggagtcaactgttgatgcttccaggccaaactggcttcctctcctcctctccccacctttgccattcttaagtattgaatgtactttgtataattttagtggaattgttattgagaataaaatttttacaatcat

SEQ ID NO: 244415 - DNA, 1647 bp, Artificial Sequence
  derived and/or modified sequence
atggctcacattccgtctggaggagctccagccgctggcgccgcacctatgggcccacagtactgcgtctgcaaagtagagttatccgtcagcggtcagaatctgctggacagggacgtgaccagtaaaagcgatcccttttgcgttttgtttactgagaacaatggcagatggatagagtatgaccgtactgaaactgccattaacaatctaaacccagcttttagtaagaaattcgttctggactaccactttgaggaagtccagaagctgaaattcgctctgttcgatcaggataagtcatctatgaggttggatgagcacgacttcctagggcagttcagttgctctctgggcacaatcgtgtcctccaaaaaaatcacccggcctttactgctgctgaatgacaagcccgccggaaaagggttaataacaattgctgcccaggagctgtcggataatcgcgtcatcaccctgagcttggccggcagacggttggataaaaaggacctttttggtaagtctgacccgttcctggaattctataaaccaggggacgacggaaagtggatgctcgtgcacagaactgaagtgattaagtataccttggaccccgtttggaaaccatttaccgtacccctggtgagtctttgtgacggtgatatggaaaagcctatccaagtgatgtgttacgattacgacaacgatggtggtcacgacttcattggggaattccagacgtctgtgtcccagatgtgtgaggcgagggatagcgttccactcgagttcgagtgtattaatccaaagaagcagagaaagaagaagaactacaagaactcagggattattatcctcagaagttgtaagataaacagagactacagctttttggactatatcctgggcggctgtcagctgatgttcaccgttggtatcgattttaccgctagcaacgggaacccactcgacccttcctccctccattacataaatccaatgggcaccaacgaatacctgagcgcgatttgggccgtggggcagataatccaagactatgattctgacaagatgttccccgccctcggattcggggctcaactacctcctgattggaaggtttcacacgaatttgccattaattttaatcccacaaatcctttttgtagcggggtggacggaattgcacaggcatacagtgcttgtctgccgcacattcgtttttacggcccaactaacttctcccctattgttaaccatgtagctaggttcgccgcacaggccacccaacagcggacggccacccagtatttcatcctgctaattataacagacggggttatctcagatatggaggagaccagacatgccgtggtccaagcttccaaacttccaatgtcgattatcattgttggggtgggtaacgctgatttcgccgcaatggagttcctcgatggagattctcggatgttacggagtcacaccggggaagaggccgcacgggatatcgttcaattcgtaccattccgtgagtttaggaacgccgccaaagaaaccctggccaaagcagtgttggctgagctaccacaacaggtggtccaatatttcaagcataagaaccttccccccactaattcagagcctgcttag

SEQ ID NO: 244416 - DNA, 1647 bp, Artificial Sequence
  derived and/or modified sequence
atggcacacatcccgtccgggggcgctcctgcagctggtgcggctcccatgggaccccaatactgtgtctgtaaggtcgagttatctgtttcggggcagaacctactcgaccgggacgtaacgagcaagagcgatcctttttgtgtcctgttcactgaaaacaatgggaggtggatcgagtacgataggactgagacagccatcaacaacttaaaccctgctttctcgaaaaaattcgtgctggattaccacttcgaggaagtgcagaaacttaagtttgccctattcgatcaggataaatcctcaatgaggctagatgagcacgattttcttgggcagtttagttgttccctgggaactattgtgtctagtaagaaaatcacacggcccctccttctgttgaacgataaaccagccggtaagggtcttattaccatcgcggcccaagaactgtccgataacagggtgattacgctgtcactcgcaggcaggcgcctggataagaaagacctgtttggcaaatccgatccctttctagaattttataagcccggcgatgacggtaaatggatgttggtgcatcgaacggaagtgataaaatatacacttgatcccgtgtggaaacctttcactgtgccgcttgtctccctgtgtgatggggacatggagaaacccatacaggtcatgtgctatgattacgacaacgacgggggacacgacttcattggcgagtttcagaccagcgtgtcccagatgtgcgaggccagagattccgtgccactcgagtttgagtgtataaaccccaagaagcagaggaaaaagaaaaactacaaaaattccggtatcattattttaaggtcctgtaagattaaccgggactattcctttctggattatatcctcggcgggtgccagctgatgttcaccgtgggtatagacttcaccgcgtccaacggcaacccacttgacccttcatccttgcactacataaaccccatgggcaccaacgaatacctaagcgccatttgggcagtaggacaaattattcaggattacgactcagacaagatgttccccgctttaggtttcggtgcgcagctcccaccggattggaaggtttctcacgagttcgccatcaactttaatcccaccaatccattttgttcaggggttgatggaattgcacaagcttatagcgcctgtcttccgcatattcggttctacggaccaacgaatttctctccgattgtgaatcacgtggcaagatttgcggcacaggcgactcagcaaaggactgcaacgcagtactttattctgctgattattactgatggcgtgatcagcgatatggaggagactaggcacgcggtggtccaggcttcaaaactccccatgtctatcatcatcgtcggagtgggcaatgctgatttcgccgccatggaattcctggatggcgacagtcgaatgctccggtcccataccggggaggaagccgcgagagacatagtgcagtttgtgccttttcgcgaattccgaaatgcggccaaggagaccctagctaaagcagtgttggcagaattacctcagcaagtagtccagtactttaagcataagaaccttcctcccaccaacagcgagcccgcatag

SEQ ID NO: 244417 - DNA, 1341 bp, Artificial Sequence
  derived and/or modified sequence
atgaggctggatgaacatgacttcttggggcagttctcttgctctctgggaacaatcgtgtctagtaaaaaaataacccgacctcttctgcttcttaatgataagcccgccggtaaaggcttgattaccatcgcagcccaggaactctccgataatcgcgttatcacactttccttagccgggcgccgtctggacaagaaggatctatttggaaagtctgatccgttcttggaattctacaaacctggcgatgacggcaaatggatgctggtacaccgtactgaggtcattaagtacaccctggacccagtgtggaagccattcaccgtcccccttgtctcactttgtgacggcgacatggagaaacccatacaggtcatgtgttacgactatgacaatgatggcggccatgatttcattggcgagtttcagacaagtgtatcacagatgtgcgaggcgcgagattctgtgccacttgagtttgagtgcattaacccaaagaaacaaaggaaaaagaaaaattataagaattccggcataattatactgcgtagctgtaagatcaatcgggactacagtttcctggactatatacttggagggtgccagcttatgtttactgttgggatcgattttactgctagtaacggcaaccctctagacccctcctccctccattacattaaccccatgggcaccaatgaatatctgtctgccatatgggccgtgggccagatcatccaagactatgattcagataagatgttccccgccctgggattcggagcacagctgcccccagactggaaggtatctcacgaattcgccataaatttcaaccccacaaacccgttttgttccggcgtggatggtattgcacaggcctattccgcctgtttgccacatatccgattctatggcccaacaaatttctctcctattgtgaaccacgtggcccggttcgctgcgcaagcaacccagcagcgaacagccacccaatactttatattactgataatcaccgacggcgtcatttcagacatggaagaaactcggcatgctgtggttcaggctagtaaactccccatgagcatcataattgttggggttggtaatgcagattttgcagcaatggagttccttgatggcgattctagaatgctgagatctcatacaggggaagaagccgcacgggacatcgtacaattcgtccccttccgtgagtttaggaatgctgccaaggagacactagcgaaggcagtgctggctgagctacctcagcaggtggtgcagtactttaagcataagaatctccctccaacgaatagcgagccagcttag

SEQ ID NO: 244418 - DNA, 1647 bp, Artificial Sequence
  derived and/or modified sequence
atggcccacatccccagcggcggggccccagctgctggggccgcccccatgggcccccagtactgtgtgtgcaaggtggagctgtctgtgtctggccagaacctgctggacagagatgtgaccagcaagagtgaccccttctgtgtgctcttcacagaaaataatggccgctggattgaatatgacagaacagaaacagccatcaacaacctgaacccagccttcagcaagaagtttgtgctggactaccactttgaggaggtgcagaagctgaagtttgccctgtttgaccaggacaagagctccatgaggctggatgaacatgacttcctgggccagttcagctgcagcctgggcaccatcgtgagcagcaagaagatcacccggcccctgctgctgctgaatgacaagccagctgggaagggcctcatcaccatcgccgcccaggagctgagtgacaacagagtcatcaccctgagcctggccggccggcggctggacaagaaggacctgtttgggaagagtgaccccttcctggagttctacaagccaggagatgatggcaagtggatgctggtgcacaggacagaggtgatcaagtacaccctggaccctgtgtggaagcccttcaccgtgcccctggtgtccctgtgtgatggagacatggagaagcccatccaggtgatgtgctatgactatgacaatgatggcggccatgacttcatcggggagttccagacctctgtgtcccagatgtgtgaggcccgggacagcgtgcccctggagtttgagtgcatcaaccccaagaagcagaggaagaagaagaactacaagaacagcggcatcatcatcctgcggagctgcaagatcaacagagactacagcttcctggactacatcctgggcggctgccagctgatgttcaccgtgggcatcgacttcaccgccagcaatggaaaccccctggaccccagcagcctgcactacatcaaccccatgggcaccaatgagtacctgagcgccatctgggccgtgggccagatcatccaggactatgacagcgacaagatgtttcctgccctgggctttggagcccagctgcccccagactggaaggtgtcccatgaatttgccatcaacttcaaccccaccaaccccttctgcagcggcgtggatggcatcgcccaggcctacagcgcctgcctgccccacatccgcttctacggccccaccaacttcagccccatcgtgaaccacgtggccaggtttgctgcccaggccacccagcagaggacagccacccagtacttcatcctgctgatcatcacagatggagtcatcagtgacatggaggagaccaggcatgctgtggtgcaggccagcaagctgcccatgagcatcatcatcgtgggcgtgggcaatgctgactttgctgccatggagttcctggatggagacagcaggatgctgcggagccacactggagaggaggccgcccgggacatcgtgcagtttgtgcccttccgggagttcagaaatgctgccaaggagaccctggccaaggctgtgctggccgagctgccccagcaggtggtgcagtacttcaagcacaagaacctgccccccaccaacagcgagcccgcctag

SEQ ID NO: 244419 - DNA, 1341 bp, Artificial Sequence
  derived and/or modified sequence
atgaggctggatgaacatgacttcctgggccagttcagctgcagcctgggcaccatcgtgagcagcaagaagatcacccggcccctgctgctgctgaatgacaagccagctgggaagggcctcatcaccatcgccgcccaggagctgagtgacaacagagtcatcaccctgagcctggccggccggcggctggacaagaaggacctgtttgggaagagtgaccccttcctggagttctacaagccaggagatgatggcaagtggatgctggtgcacaggacagaggtgatcaagtacaccctggaccctgtgtggaagcccttcaccgtgcccctggtgtccctgtgtgatggagacatggagaagcccatccaggtgatgtgctatgactatgacaatgatggcggccatgacttcatcggggagttccagacctctgtgtcccagatgtgtgaggcccgggacagcgtgcccctggagtttgagtgcatcaaccccaagaagcagaggaagaagaagaactacaagaacagcggcatcatcatcctgcggagctgcaagatcaacagagactacagcttcctggactacatcctgggcggctgccagctgatgttcaccgtgggcatcgacttcaccgccagcaatggaaaccccctggaccccagcagcctgcactacatcaaccccatgggcaccaatgagtacctgagcgccatctgggccgtgggccagatcatccaggactatgacagcgacaagatgtttcctgccctgggctttggagcccagctgcccccagactggaaggtgtcccatgaatttgccatcaacttcaaccccaccaaccccttctgcagcggcgtggatggcatcgcccaggcctacagcgcctgcctgccccacatccgcttctacggccccaccaacttcagccccatcgtgaaccacgtggccaggtttgctgcccaggccacccagcagaggacagccacccagtacttcatcctgctgatcatcacagatggagtcatcagtgacatggaggagaccaggcatgctgtggtgcaggccagcaagctgcccatgagcatcatcatcgtgggcgtgggcaatgctgactttgctgccatggagttcctggatggagacagcaggatgctgcggagccacactggagaggaggccgcccgggacatcgtgcagtttgtgcccttccgggagttcagaaatgctgccaaggagaccctggccaaggctgtgctggccgagctgccccagcaggtggtgcagtacttcaagcacaagaacctgccccccaccaacagcgagcccgcctag

SEQ ID NO: 244420 - DNA, 1647 bp, Artificial Sequence
  derived and/or modified sequence
atggcccacatccccagcggcggcgcccccgccgccggcgccgccccaatgggacctcagtattgcgtatgcaaggtcgaattgtcagtgtctgggcagaatcttttggaccgagacgtgacctctaaaagtgatcccttctgtgtgctctttactgaaaacaacggccgatggatagagtacgataggactgagaccgcgatcaacaatctgaaccccgccttctcaaaaaagttcgtgctagattatcacttcgaagaggtccagaagctgaagtttgcacttttcgatcaggataagtcctctatgcggcttgacgaacacgactttctgggacagtttagctgctctctcggcacgatcgtctccagcaagaagataacccgccctctactcctgctcaatgacaagcccgccggcaagggccttatcaccatcgccgcacaggagctgagtgacaacagggtaattaccctgagccttgccggacggcgattagacaaaaaagacctgttcggcaagtctgaccctttcctggaattctacaagcctggcgatgacgggaagtggatgctggtgcataggacagaggttataaagtatactttagacccggtgtggaaacccttcaccgtgcccctggtctcgctatgtgacggggacatggagaaacccattcaagtgatgtgctacgactatgataatgatggtggccacgattttattggcgaatttcagacaagcgtatcacagatgtgtgaagcgagagattccgtaccactggagttcgaatgtatcaatcccaaaaagcaaagaaagaagaagaattataagaattccggcataatcatccttagaagctgcaaaatcaaccgcgattattcattcctggactatatcctgggtggctgccaactcatgtttacagttggaatagactttaccgccagcaatggaaatccgctcgacccttcatccctgcattacattaaccctatgggaactaatgagtaccttagcgccatttgggccgtggggcagattatccaggactatgacagcgacaaaatgttccccgctctcggtttcggagcgcaactgccaccggattggaaggtctctcacgaattcgcaattaactttaaccctacaaaccccttctgctctggagtggacggtatcgcacaagcttattccgcttgcctaccacacatacgcttctacggccctactaatttcagtccaatcgtaaatcacgttgctcgatttgctgcccaagccacgcagcaacgaaccgctacccagtatttcatcctgctcatcataaccgatggcgtcatatccgacatggaggagacccgacatgcggttgttcaggcatccaaactgccgatgtcgattattatcgttggagtaggcaatgctgatttcgccgccatggaattccttgatggggactctaggatgttaagatcccacaccggggaggaggctgcaagagatatcgtgcaatttgttccgttccgggagttcaggaatgcagcaaaggagacactcgccaaggcagtgctagctgagttacctcagcaggttgtccaatatttcaagcacaaaaacctgccacctacaaattccgagcccgcctag

SEQ ID NO: 244421 - DNA, 1647 bp, Artificial Sequence
  derived and/or modified sequence
atggcccacatccccagcggcggcgcccccgccgccggcgccgcccctatgggcccacagtattgcgtttgtaaggtggagctgagcgtttctgggcagaatttgctagacagggatgttacttccaaatcagatcccttctgtgttcttttcactgaaaataatggccgctggatagagtatgatcgcacagagaccgccattaataaccttaacccagcatttagcaagaagttcgtcttggactatcattttgaggaggttcagaagctgaagttcgctctgtttgatcaggacaagagctccatgaggctcgatgagcatgattttttgggccagttttcttgttcactcgggacaatcgtctccagtaagaagatcactaggcccctgctgttgcttaacgacaagccagcgggtaaagggttgatcacgatcgccgcacaagaactgtctgacaatagggtaattactctgagtttagccgggcgccgcctcgataagaaggatctatttgggaagagcgatcccttcctggagttttacaagcctggtgatgatggcaaatggatgctcgtgcaccgtacagaggtcattaagtatactttggatccggtctggaaaccttttaccgtgccattggtgagcttatgtgacggagacatggaaaaaccaattcaggtaatgtgttatgattacgataacgatggcgggcacgatttcattggagaatttcaaactagcgtgtcccaaatgtgcgaagcaagagattctgtacccttggaattcgagtgcattaaccctaagaaacagagaaaaaagaagaactataaaaatagcggcatcatcattctgcgatcctgcaagattaacagggactactctttcctcgactacatactgggcgggtgtcagctaatgtttaccgtaggcattgatttcaccgcctcaaatgggaatcccctggacccaagctcactccattacattaaccccatgggtaccaacgagtatctgagtgccatttgggcagtcgggcagattatccaggactacgatagcgacaagatgtttcctgccctcgggttcggcgctcagctcccacctgactggaaggtctctcatgaatttgccatcaattttaacccgactaaccccttttgctcgggcgtggacggaattgctcaggcatattccgcctgtctccctcacattcgcttttatggtccaacaaatttttcccccatcgtcaaccatgtggcccgcttcgccgctcaggctacccagcagcggactgccacgcaatatttcatactcctgatcattaccgatggagtgatctctgacatggaagaaactcgacacgccgtggttcaagcctcaaagttgcctatgtcaatcattatcgtgggagttggaaacgcagactttgctgccatggaattcctagacggggacagccgaatgctacgctctcacaccggagaggaagccgcgcgagacatcgttcagtttgttcctttccgtgagtttcggaatgcagccaaagagacactcgcgaaagccgtgctggcggaattgcctcagcaagtggtgcagtacttcaaacacaagaatttaccccctaccaacagcgagccagcatag

SEQ ID NO: 244422 - DNA, 1341 bp, Artificial Sequence
  derived and/or modified sequence
atgcggctggacgagcacgacttcctgggccagttcagctgcagccttggcacaattgtatcttctaaaaaaataacgagacccttgttactcctcaacgataagcccgccgggaaaggattaatcaccattgcagcccaggaactgtctgacaacagggtcatcaccctgagcctagctggccggcgacttgacaagaaagatctgtttgggaagtcagaccccttccttgagttctataagccgggggatgatggaaaatggatgttagtacatagaaccgaagttatcaaatacactttagacccggtttggaagcccttcacagtgcctcttgtctctctgtgcgatggggatatggagaagcccattcaggtgatgtgttacgactacgacaatgacgggggtcatgacttcatcggggaatttcaaacctccgtgagccagatgtgcgaggctcgggactctgtccctttagagtttgagtgcatcaacccaaaaaaacagaggaagaaaaagaattacaagaactcaggaattatcattctacggtcttgtaagatcaaccgcgattatagcttcttggattacatcttaggcggctgccagctgatgtttacagtgggaattgactttactgcctcaaatgggaaccctctggacccctctagcttgcactatattaatccaatgggcacaaatgagtatttgagcgctatatgggctgtgggccaaatcatacaagactatgactccgacaaaatgtttcctgctctggggtttggcgctcaactcccgccagattggaaagtgtctcacgaatttgccatcaatttcaaccctaccaaccccttttgctccggagtcgatggcatcgcccaagcttatagtgcatgtttgccgcacattaggttttatggccccaccaacttttcaccgatcgttaatcatgtagccaggtttgctgcacaggccactcagcagcggaccgccactcagtacttcatccttcttatcatcaccgacggcgttattagcgacatggaggagacgcgccacgcagtcgttcaggcaagtaagctacccatgagcatcatcatcgtgggagtgggaaatgcggactttgcagcaatggagtttctcgatggggacagtagaatgctgcggtctcataccggtgaggaggcagctagagacattgtacagttcgtaccttttagagagtttaggaacgccgctaaggaaacattggctaaggccgtactcgcagaactccctcagcaggttgtgcagtactttaagcataagaatctaccccctaccaacagtgagccagcgtag

SEQ ID NO: 244423 - DNA, 1647 bp, Artificial Sequence
  derived and/or modified sequence
atggctcacattcccagtggcggtgcaccggcagccggagctgcgcctatgggccctcaatactgtgtttgcaaagttgagctgtccgtgtctggccagaatctgttggacagggacgtcacatccaagtctgaccctttttgtgtgttgtttactgagaacaacggccgttggatagaatatgaccggaccgaaactgcaattaacaatctgaatcctgcattctctaaaaaatttgtcctggactatcacttcgaggaagtgcagaagctcaaattcgctctcttcgatcaagacaagtcctcaatgcggctggatgaacacgacttcttaggacagttttcctgcagcctgggcacaatagtgagctcaaagaaaattacacggcctctgcttctcctcaacgataaacccgctggcaaaggcctgattaccatcgccgcacaggaactgtccgataacagagtgataactctgtctctcgctggcagaaggcttgacaaaaaagacctgttcggcaaatccgatccttttctagaattctataaacccggagacgacggcaagtggatgctagtgcatcggactgaagtgattaagtacaccctcgaccccgtctggaagccattcacagttcccctggtgtccctgtgtgatggcgatatggagaaacccatccaggtcatgtgttatgactatgacaatgacggcggacacgactttattggcgaattccagacatccgtaagccaaatgtgcgaggcccgagatagcgtgccactggagtttgagtgtatcaatcctaaaaagcagcgcaagaagaagaactataaaaattctggtatcataattctacgatcctgcaagattaaccgggattattctttcttggactacattctcggcggttgccaactgatgttcaccgtcggcattgacttcacagcgagtaacggtaatccgttggacccctcctcacttcattacataaatccaatgggaaccaatgagtatctgagcgccatttgggctgtgggacagatcatccaggactatgactctgacaagatgtttcccgcactcggcttcggtgcccagctgcccccagactggaaagtgtctcatgaattcgccattaattttaacccaacaaatcctttttgctccggagtcgacggcatcgcgcaagcatattcggcctgtctgcctcacattcggttctatggacctactaacttcagtcctatcgttaatcatgtcgctagattcgctgcgcaggctacccagcagcgtacggccacccaatattttatcctgctgataattaccgacggagtgatctcagacatggaggaaacacgacacgccgtggtccaggccagtaagctccccatgtccattattatcgttggtgtcggcaatgccgatttcgccgcaatggagtttctcgatggcgattccagaatgttgaggagccacactggggaagaggctgccagggacattgtgcagtttgtgccatttcgcgagttcagaaacgctgctaaggaaacattggccaaggcagtactcgccgaactgcctcaacaagttgtgcagtacttcaagcacaaaaacttgccaccgacgaacagcgagcctgcgtag

SEQ ID NO: 244424 - DNA, 1647 bp, Artificial Sequence
  derived and/or modified sequence
atggcccacattcccagcggcggagctcccgctgcaggcgctgctcccatgggaccacagtactgcgtgtgcaaggttgagctgagtgtctccggtcagaacctgctggatagagatgttacctccaaatccgatcctttttgtgttctcttcaccgagaataatgggagatggatagaatatgacagaaccgaaaccgctataaacaacctgaatcctgccttttcaaaaaagttcgtgttagactaccacttcgaggaagtacaaaaactgaagtttgcccttttcgaccaagacaagtcttctatgaggctcgacgaacacgatttcctaggtcagttttcctgtagcctgggaaccattgtctcaagcaagaagatcacacggcctctgctcctgctgaacgacaaaccggcaggcaagggtctcatcaccatagctgcgcaggaactcagcgacaacagagtcatcacgctcagtctagcagggaggcgtctggacaagaaagacctcttcggtaagagcgaccctttcctagagttctacaagcctggcgatgatggaaagtggatgttagtacacaggaccgaggtgatcaagtacactttggatcccgtttggaaaccattcactgtacccctggtttcgctgtgcgacggtgacatggaaaagccaatccaggtcatgtgttacgactacgataacgatggcggacacgacttcatcggagaatttcagacttctgttagccagatgtgcgaggccagggactctgtcccacttgagtttgaatgcattaacccaaagaagcagagaaagaagaagaattacaagaatagcgggatcataattttaaggagctgcaagatcaatagagattactcatttctggactatatcctgggcggatgtcagctaatgttcaccgtggggatagacttcactgcgtccaatgggaatcctttggatcctagctctttgcactatattaatcctatgggtactaatgagtacctcagcgcaatttgggctgtgggacagatcatccaagactacgacagtgacaagatgtttcccgctttgggcttcggggcacaactaccccctgactggaaagtgagtcacgaatttgcaatcaattttaatcccaccaatcctttctgttccggcgtagatgggatagcgcaggcatacagcgcgtgtttgcctcatatcaggttctatggacccacgaatttttctccaatagtgaaccacgtagctcggttcgccgctcaagccactcaacagcgaacggccactcagtactttattctgctcatcatcacggatggagtgatctcagacatggaggagacaaggcacgccgtagtgcaggcttcgaagttgcctatgtctatcatcattgtgggcgttgggaatgcagactttgcagcaatggagtttcttgatggagattctagaatgcttcgtagccacaccggcgaggaggccgctcgggatatagttcagtttgtgcctttccgcgaattcaggaacgctgccaaggaaacccttgctaaggctgtgttggcagagctgccacagcaggtcgtgcagtactttaagcataaaaatttgcctcctaccaattcagaaccagcatag

SEQ ID NO: 244425 - DNA, 1341 bp, Artificial Sequence
  derived and/or modified sequence
atgcggttggacgaacacgatttcctgggacaattctcctgctcactcggcaccatcgtctcgagtaagaaaattacgcggcctctactcctcctgaacgacaaacccgcagggaagggattgatcaccattgccgcacaggagcttagcgataatcgtgtcattacactctccttggcaggtcgcagactggacaaaaaggatctgttcggcaaaagtgaccccttcctggaattttacaaacctggggatgatgggaagtggatgttagtacatcgcactgaagtgattaaatacactcttgaccctgtctggaaaccctttactgttccactggtctctctatgtgacggagacatggaaaagcccatacaagtgatgtgctacgactatgacaatgatggtggtcatgattttattggcgaattccagacctcagtgagccagatgtgcgaggcaagggatagtgtgccattggagtttgaatgtatcaacccaaagaagcagcggaaaaagaaaaattacaaaaactccggtatcataattctgagatcctgtaaaatcaaccgcgactatagttttctggactatatcctagggggatgccaacttatgtttacagtggggatcgattttactgccagcaatggaaacccactcgacccgtcatctcttcactacatcaatcctatgggaacaaatgagtaccttagcgccatatgggcagtagggcagatcattcaagattacgattctgacaaaatgttccctgcattagggtttggcgcacaattaccacctgattggaaggtgtctcatgagttcgccatcaactttaaccccacgaaccctttttgctcaggggtggatgggattgctcaggcttactctgcctgccttccccatatccggttctatggccctacgaatttctccccaatagtgaatcatgtggcacgctttgcggcacaggctacccagcagcggacggccacccaatatttcatcctgctgattattacagatggcgttatcagcgatatggaggagactagacatgccgtcgtacaggcgtctaagttgcccatgtctattatcattgtaggggtgggtaatgcagactttgcagcaatggagttccttgacggcgacagtcgcatgctgagaagtcacactggagaagaagctgccagagacatagtgcagtttgtgcccttccgggaattccggaatgctgcaaaggaaactttggctaaggcagtgctggccgaactgcctcagcaggttgtgcagtactttaaacacaagaacttacccccaacgaacagcgagccagcatag

SEQ ID NO: 244426 - protein, 455 aa, Artificial Sequence
  derived and/or modified sequence
MAQHFSLAACDVVGFDLDHTLCRYNLPESAPLIYNSFAQFLVKEKGYDKELLNVTPEDWDFCCKGLALDLEDGNFLKLANNGTVLRASHGTKMMTPEVLAEAYGKKEWKHFLSDTGMACRSGKYYFYDNYFDLPGALLCARVVDYLTKLNNGQKTFDFWKDIVAAIQHNYKMSAFKENCGIYFPEIKRDPGRYLHSCPESVKKWLRQLKNAGKILLLITSSHSDYCRLLCEYILGNDFTDLFDIVITNALKPGFFSHLPSQRPFRTLENDEEQEALPSLDKPGWYSQGNAVHLYELLKKMTGKPEPKVVYFGDSMHSDIFPARHYSNWETVLILEELRGDEGTRSQRPEESEPLEKKGKYEGPKAKPLNTSSKKWGSFFIDSVLGLENTEDSLVYTWSCKRISTYSTIAIPSIEAIAELPLDYKFTRFSSSNSKTAGYYPNPPLVLSSDETLISK

SEQ ID NO: 244427 - protein, 195 aa, Artificial Sequence
  derived and/or modified sequence
MAQHFSLAACDVVGFDLDHTLCRYNLPESAPLIYNSFAQFLVKEKGYDKELLNVTPEDWDFCCKGLALDLEDGNFLKLANNGTVLRASHGTKMMTPEVLAEAYGKKEWKHFLSDTGMACRSGKYYFYDNYFDLPGALLCARVVDYLTKLNNGQKTFDFWKDIVAAIQHNYKMSAFKVRRLATSLLQDISTSFILI

SEQ ID NO: 244428 - protein, 111 aa, Artificial Sequence
  derived and/or modified sequence
  misc_feature (1)..(1): Xaa can be any naturally occurring amino acid
XSHGTKMMTPEVLAEAYGKKEWKHFLSDTGMACRSGKYYFYDNYFDLPGALLCARVVDYLTKLNNGQKTFDFWKDIVAAIQHNYKMSAFKGKYCEEGPSNTCLLSYVCLVN

SEQ ID NO: 244429 - DNA, 3118 bp, Artificial Sequence
  derived and/or modified sequence
cggtcctgtcccgcagcgtcccgccagccagctccttgcacccttcgcggccgaggcgctccctggtgctccccgcgcagccatggctcagcacttctccctggccgcctgcgacgtggtcggattcgacctggaccacactctgtgtcgctacaacctgcccgagagcgccccgctcatttataatagctttgcccagttcctagttaaggagaaagggtacgataaggaattgctcaatgtgaccccagaggattgggatttctgttgcaaaggtttggcattggatctagaagatgggaacttccttaaacttgcaaataatggcactgttctcagggcaagccatggcaccaagatgatgactccagaggtgctggcagaggcatatggcaagaaagagtggaagcacttcttgtcggacactggaatggcttgccgctcaggaaagtattacttttacgacaactactttgacctgccaggagctcttctgtgtgccagggtggtggactatttaacaaaactgaacaatggtcaaaaaacatttgatttttggaaggatatagttgctgctatacaacacaattataaaatgtcagcttttaaggaaaactgtggaatatattttccagaaataaaaagagatccaggcagatatttacatagttgtcctgaatctgtgaaaaaatggcttcgacagctaaagaatgctgggaaaattcttctgttaattaccagttctcacagtgattactgtagacttctctgcgaatatattcttgggaatgattttacagacctttttgacattgtgattacaaatgcattgaagcctggtttcttctcccacttaccaagtcagagacctttccggacactcgagaatgatgaggagcaggaggcactgccatctctggataaacctggctggtactcccaagggaacgctgtccacctctatgaacttctgaagaaaatgactggcaaacctgaacccaaggttgtttattttggtgacagcatgcattcagatattttcccagctcgtcactatagtaattgggagacagtcctcatcctggaagaactcagaggggatgaaggcacgaggagtcagaggcctgaggagtcagagcctctagagaagaaaggaaaatatgagggaccaaaagcaaaacctttaaatacttcatctaaaaaatggggctctttttttattgattcagttttgggactggaaaatacagaagactccttggtttatacatggtcttgtaagagaatcagtacttacagcactattgcaattccaagtattgaagcaatcgcagaattacctctggactacaaatttacaagattctcttcaagcaattcaaaaacagctggctactatccaaatcctccactggtcttatcaagtgatgagacactgatatccaaataagttgtctttactgaaaaatgaagtgaagacccatatatgcagttaaaaaaaagttaattttcaaaaaatactgtaaaagactttaaggaacaagttttattgaccaataagttgatatttgtccataggtctcctttctataaatcatcttgatgtttaacaactcttattatattaaaatctcagtatcctaaaacttagaaccttattgatattttctatacagtagttttgtgattagaattcacctggggacacacactcacacgcacagtcactcttacacatatgcctagtccagtggttctcaaagtgtgatccatagactaatagcatagcattacctgagaacttgataatgcatatttgcaggccccacgcaaaacctgctgaatcagaagctctgagagtaaggcctaccaatctggtttaacaagcccgtcaggtgattctgatttacagtacagtttgagacccactggctagaacatatcctccagagacttggcttaattggtctgggtaaatatggctgagcgttgttatcttttgttatcttttatatgccctaggaaagtacaaccagaattgaaaaccaactgatctataccagttctttcaattaatagtcaagaacattgagtccagtgagattaagtgatttttgcaggctatgaggttttatgctattcctgtgttctccaaaacaagaaaataaaaagacatgacttattctctgttcatacagcaagtatggaaaaaagatgatctagaagtcaactatctcaacctccattgttacccactaggtttttttctaataatgttaaaggctatttaatttatttaatcaactttaagcattacattctcaattggggacaaaaattggttcttggggtgaaaaaatattagatatggcttgtggacttccaatatcatcctatccaccaaaatcttattccttagtattaatttatctcattgggaagaaatttgtagttaaaactatttaatgtaatttgaatttaatttctgtaattgggaaggagggtaataatgaacaaaaagtttgagaaaaaaatgctttaatgggttttacaggcatgctacaatccaggactgtggtgttctatgtgccgtgtatggtcatattagtagctatttgttgcaagatacttgaagccaaatgtttgcagtataggttcctggctactgtttatgctgtgatttcactctgtctatcatgggcagtattagaaaacacactggttttcactatctggtttacaaacactatcattattttacctggattgaagtgcagaatttggcatatcgatgcatgcaatggaaagaaaaaaaatttgttaaaatttgtaaatgttcagctaaatctcagatatactgtgggatgagtatctcagggtaagtaacaaaaaaacaaacaaaaaaaatcactgaaatttttccctcacagtcagtagctttgtttgatatttaacaataagtatatggtgatatacttgaaatttatgtccagaatgtcactggaatattacaatgagcataaataatcaagcttaggactaaatgaaagatactatctcatgtatgctttaaatagagaatttatttcttttaaaaataaagctatctttccttatc

SEQ ID NO: 244430 - DNA, 1368 bp, Artificial Sequence
  derived and/or modified sequence
atggcccagcacttcagcctggccgcctgcgacgtggtgggcttcgacctggaccacaccctgtgcagatacaacctgcccgagagcgcccccctgatctacaacagcttcgcccagttcctggtgaaggagaagggctacgacaaggagctgctgaacgtgacccccgaggactgggacttctgctgcaagggcctggccctggacctggaggacggcaacttcctgaagctggccaacaacggcaccgtgctgagagccagccacggcaccaagatgatgacccccgaggtgctggccgaggcctacggcaagaaggagtggaagcacttcctgagcgacaccggcatggcctgcagaagcggcaagtactacttctacgacaactacttcgacctgcccggcgccctgctgtgcgccagagtggtggactacctgaccaagctgaacaacggccagaagaccttcgacttctggaaggacatcgtggccgccatccagcacaactacaagatgagcgccttcaaggagaactgcggcatctacttccccgagatcaagagagaccccggcagatacctgcacagctgccccgagagcgtgaagaagtggctgagacagctgaagaacgccggcaagatcctgctgctgatcaccagcagccacagcgactactgcagactgctgtgcgagtacatcctgggcaacgacttcaccgacctgttcgacatcgtgatcaccaacgccctgaagcccggcttcttcagccacctgcccagccagagacccttcagaaccctggagaacgacgaggagcaggaggccctgcccagcctggacaagcccggctggtacagccagggcaacgccgtgcacctgtacgagctgctgaagaagatgaccggcaagcccgagcccaaggtggtgtacttcggcgacagcatgcacagcgacatcttccccgccagacactacagcaactgggagaccgtgctgatcctggaggagctgagaggcgacgagggcaccagaagccagagacccgaggagagcgagcccctggagaagaagggcaagtacgagggccccaaggccaagcccctgaacaccagcagcaagaagtggggcagcttcttcatcgacagcgtgctgggcctggagaacaccgaggacagcctggtgtacacctggagctgcaagagaatcagcacctacagcaccatcgccatccccagcatcgaggccatcgccgagctgcccctggactacaagttcaccagattcagcagcagcaacagcaagaccgccggctactaccccaacccccccctggtgctgagcagcgacgagaccctgatcagcaagtag

SEQ ID NO: 244431 - DNA, 1368 bp, Artificial Sequence
  derived and/or modified sequence
atggcacagcacttctcattggcggcttgcgacgtggtggggttcgatttagaccatacgctctgtcgttacaatcttcctgagagcgctcccctaatctacaacagcttcgcgcaattcctggtgaaggagaaaggctacgataaagagctgctcaatgtgacgcccgaggactgggacttttgctgcaagggcttggcgctggacttggaggacggtaattttctgaaactggcgaacaatggtacagtgctgcgtgcatctcacggcacaaaaatgatgacccccgaagtactggctgaggcatacggcaaaaaggaatggaagcacttcttgagcgacaccggcatggcctgcaggtccggtaagtattacttttatgataactatttcgacttgcctggggctttactttgcgcaagagttgtcgattacctcaccaaactgaacaatggtcaaaaaaccttcgacttttggaaggatatcgtggccgcaatccagcataactacaagatgagcgccttcaaagaaaactgcggcatttacttccccgaaataaaaagggaccctgggagataccttcactcctgtccagaatcagtgaaaaagtggcttcgccagctcaagaacgcaggaaaaatcctgctgttgatcacctccagccactccgactattgcagactgttatgcgaatacattctgggaaatgatttcaccgatctctttgacattgtcatcactaatgcacttaagccaggatttttctcgcatctgccttcgcagcggccgttccgtacgttagagaacgacgaggaacaggaagcgttgcccagcttagataagccagggtggtacagtcagggaaacgccgttcacctgtatgagctcctgaaaaagatgaccggaaagcctgaacctaaggtcgtatatttcggcgactctatgcatagtgacatcttccccgcacgacattattctaattgggaaacagtgcttattttagaggagctgcggggggatgagggaacacggtcacaaagacccgaagagagcgagcctctcgaaaagaagggcaagtatgagggtccgaaagccaagcccctgaatacctcatctaagaagtggggttcattctttatcgactcagtcctcggtttagaaaatacagaagactccttggtctatacctggagctgtaaaagaatcagcacctattcaacaattgcgataccctctatagaggccatagctgagctgcccttagactataaattcaccagattctcatcatcaaatagtaaaaccgcagggtactaccctaatccaccactggtcctgagttctgacgaaaccctgatctcgaagtag

SEQ ID NO: 244432 - DNA, 1368 bp, Artificial Sequence
  derived and/or modified sequence
atggcccagcacttcagcctggccgcctgtgatgtggtgggctttgacctggaccacaccctgtgccgctacaacctgcctgagagcgcccccctcatctacaacagctttgcccagttcctggtgaaggagaagggctatgacaaggagctgctgaatgtgaccccagaggactgggacttctgctgcaagggcctggccctggacctggaggatggcaacttcctgaagctggccaacaatggaacagtgctgcgggccagccacggcaccaagatgatgaccccagaggtgctggccgaggcctacggcaagaaggagtggaagcacttcctgagtgacaccggcatggcctgccgcagcggcaagtactacttctatgacaactactttgacctgcccggggccctgctgtgtgcccgggtggtggactacctgaccaagctgaacaacggccagaagacctttgacttctggaaggacatcgtggccgccatccagcacaactacaagatgtctgccttcaaggagaactgtggcatctacttccctgagatcaagagggaccccggccgctacctgcacagctgcccagagagcgtgaagaagtggctgcggcagctgaagaatgccggcaagatcctgctgctgatcaccagcagccacagcgactactgccgcctgctgtgtgagtacatcctgggcaatgacttcacagacctgtttgacatcgtcatcaccaatgccctgaagccaggcttcttcagccacctgcccagccagaggcccttccgcaccctggagaatgatgaggagcaggaggccctgcccagcctggacaagccaggctggtacagccagggcaatgctgtgcacctgtatgagctgctgaagaagatgaccgggaagccagagcccaaggtggtgtactttggagacagcatgcacagcgacatcttccctgcccggcactacagcaactgggagaccgtgctgatcctggaggagctgcggggagatgagggcaccaggagccagaggcctgaggagagcgagcccctggagaagaagggcaagtatgagggccccaaggccaagcccctgaacaccagcagcaagaagtggggcagcttcttcatcgacagcgtgctgggcctggagaacacagaggacagcctggtgtacacctggagctgcaagaggatcagcacctacagcaccatcgccatccccagcattgaggccatcgccgagctgcccctggactacaagttcacccgcttcagcagcagcaacagcaagacagctggctactaccccaacccccccctggtgctgagcagtgatgagaccctcatcagcaagtag

SEQ ID NO: 244433 - DNA, 1368 bp, Artificial Sequence
  derived and/or modified sequence
atggcccagcacttcagcctggccgcctgcgacgtggtgggcttcgacttagaccacactctgtgtaggtataatctgccggagtctgcacctcttatctacaattcattcgctcaatttctggtgaaagagaagggatatgataaagagcttctcaatgtgacacctgaagactgggacttctgctgtaaggggctcgcgctggatctggaagacggaaacttcctgaagctagcgaacaacggcaccgtcttgcgagcctcacacgggactaaaatgatgacccctgaagtcctggccgaagcctacggaaaaaaagagtggaaacatttcctgtcagacaccggaatggcctgccggagtgggaaatactacttctacgataattactttgacctcccaggagctcttctgtgtgcccgggttgtagattacttgacaaaactgaacaacggacaaaagacattcgacttttggaaagatatcgttgcagccatccagcacaactataagatgtccgccttcaaagaaaattgtggcatatactttcccgagatcaagcgtgatcctggccgctatctgcacagctgccccgaatcggtgaagaagtggttgcgccaactgaaaaacgcaggaaagattctgctgctgatcaccagcagtcattctgactactgcaggctactttgtgaatatattctcgggaatgacttcactgatcttttcgatattgttattacaaatgctttgaagccaggcttcttttctcacctgcccagccagagacctttccggactttagagaatgatgaagagcaggaggccttgccctcattggataagcccgggtggtactctcagggcaacgctgtgcacctgtacgagctgctaaagaagatgacaggcaaacccgagcctaaggtggtgtactttggcgatagtatgcacagtgatatcttccccgccaggcactactccaattgggaaactgtgctgatcctggaggaattgaggggtgatgaaggaacgcgttcccagaggcctgaagaaagcgaacctctggagaaaaaaggtaaatatgagggaccaaaggcaaagccactgaatacaagttctaagaagtggggatcatttttcatcgattcagttcttggcttagagaacacagaggattcgttagtgtacacatggagctgtaagcggatcagtacctattccacaatcgcaatccccagcatcgaagcaatcgccgaactgccccttgactataaatttacccgcttctccagctccaacagtaagacagctgggtactatcctaatcctccccttgtgctcagctcagacgagactctgatctcaaagtag

SEQ ID NO: 244434 - DNA, 1368 bp, Artificial Sequence
  derived and/or modified sequence
atggctcaacacttctctttggctgcttgtgacgtggtgggctttgacctagaccacacattgtgtcgctacaaccttccggaatccgccccactgatatacaactcctttgcccagttccttgtcaaagaaaaggggtatgacaaggaactgctcaacgtgacccctgaagattgggacttttgctgtaagggcttggcgctcgatctagaggacggcaactttctcaaactggccaacaacgggacagtattgcgggcatcccatggaaccaagatgatgacccctgaggtgttagcagaagcatacgggaaaaaggagtggaaacacttcctgagcgataccggaatggcgtgtaggagtgggaaatattacttttatgacaactattttgatctgcccggtgccctgctgtgcgctagggtggtcgactacctgacgaaactgaacaacgggcaaaagaccttcgacttttggaaagatattgtcgccgcaatacagcacaattataaaatgtcagcctttaaagagaactgcgggatatactttccagagattaaaagagatccagggagatatcttcattcatgcccagaaagtgtgaagaaatggcttcgtcaactcaaaaacgctgggaagatcctccttctgataacttcgtcccattctgactattgcaggcttctgtgcgaatacattctgggaaatgattttacggacctgttcgacattgttataacaaatgctctgaagccaggatttttttcccacctcccatcacagcggcctttcaggacgctggagaacgacgaggagcaagaggccctgccttccctcgataagccaggctggtatagtcagggaaacgcagttcatttgtatgaactcctgaaaaaaatgaccggaaaacctgaaccaaaggtggtttactttggggatagtatgcattcagacattttccccgctagacattatagcaattgggaaacagtgttaatcctggaggaactccgaggggacgagggaaccaggtcgcagcggccagaagagagcgagccactcgagaaaaagggtaaatacgaaggtcccaaggccaaaccgctgaacacttcttcaaaaaagtgggggagcttcttcattgacagtgtgctgggactggagaataccgaagattcacttgtgtatacatggtcttgtaaacggatctccacttattccaccatcgctatcccatctattgaggctatcgctgaactgccattagattataaattcacccgattctcgtcatcgaattctaaaaccgcgggatattatccaaatcccccattggttctgtcctccgacgaaaccctgatctccaagtag

SEQ ID NO: 244435 - protein, 1257 aa, Artificial Sequence
  derived and/or modified sequence
MAHFSSEDQAMLQAMLRRLFQSVKEKITGAPSLECAEEILLHLEETDENFHNYEFVKYLRQHIGNTLGSMIEEEMEKCTSDRNQGEECGYDTVVQQVTKRTQESKEYKEMMHYLKNIMIAVVESMINKFEEDETRNQERQKKIQKEKSHSYRTDNCSDSDSSLNQSYKFCQGKLQLILDQLDPGQPKEVRYEALQTLCSAPPSDVLNCENWTTLCEKLTVSLSDPDPVFSDRILKFCAQTFLLSPLHMTKEIYTSLAKYLESYFLSRENHIPTLSAGVDITNPNMTRLLKKVRLLNEYQKEAPSFWIRHPEKYMEEIVESTLSLLTVKHNQSHVVSQKILDPIYFFALVDTKAVWFKKWMHAHYSRTTVLRLLETKYKSLVTTAIQQCVQYFEMCKTRKADETLGHSKHCRNKQKTFYYLGQELQYIYFIHSLCLLGRLLIYKQGRKLFPIKLKNKKGLVSLIDLLVLFTQLIYYSPSCPKMTSAAHSENYSPASMVTEVLWILSDQKECAVECLYNNIVIETLLQPIHNLMKGNEASPNCSETALIHIAGILARIASVEEGLILLLYGANMNSSEESPTGAHIIAQFSKKLLDEDISIFSGSEMLPVVKGAFISVCRHIYSTCEGLQVLITYNLHESIAKAWKKTSLLSERIPTPVEGSDSVSSVSQESQNIMAWEDNLLDDLLHFAATPKGLLLLQRTGAINECVTFIFNRYAKKLQVSRHKKFGYGVLVTRVASTAAGGIALKKSGFINELITELWSNLEYGRDDVRVTHPRTTPVDPIDRSCQKSFLALVNLLSYPAIYELVRNQDLPNKTEYSLREVPTCVIDIIDRLIILNSEAKIRSLFNYEQSHIFGLRDFIIDGLSVERNHVLVRINLVGGPLERILPPRLLEKSDNPYPWPMFSSYPLPNCYLSDITRNAGIKQDNDLDKLLLCLKISDKQTEWIENCQRQFCKMMKAKPDIISGEALIELLEKFVLHLTESPSECYFPSVEYTATDANVKNESLSSVQQLGIKMTVRYGKFLSLLKDGAENDLTWVLKHCERFLKQQQTSIKSSLLCLQGNYAGHDWFVSSLFMIMLGDKEKTFQFLHQFSRLLTSAFLWLPRLHISSYLPNDTVESGIHPVYFCSTHYIEMLLKAELPLVFSAFHMSGFAPSQICLQWITQCFWNYLDWIEICHYIATCVFLGPDYQVYICIAVFKHLQQDILQHTQTQDLQVFLKEEALHGFRVSDYFEYMEILEQNYRTVLLRDMRNIRLQST

SEQ ID NO: 244436 - DNA, 3774 bp, Artificial Sequence
  derived and/or modified sequence
atggcccacttcagcagcgaggaccaggccatgctgcaggccatgctgagaagactgttccagagcgtgaaggagaagatcaccggcgcccccagcctggagtgcgccgaggagatcctgctgcacctggaggagaccgacgagaacttccacaactacgagttcgtgaagtacctgagacagcacatcggcaacaccctgggcagcatgatcgaggaggagatggagaagtgcaccagcgacagaaaccagggcgaggagtgcggctacgacaccgtggtgcagcaggtgaccaagagaacccaggagagcaaggagtacaaggagatgatgcactacctgaagaacatcatgatcgccgtggtggagagcatgatcaacaagttcgaggaggacgagaccagaaaccaggagagacagaagaagatccagaaggagaagagccacagctacagaaccgacaactgcagcgacagcgacagcagcctgaaccagagctacaagttctgccagggcaagctgcagctgatcctggaccagctggaccccggccagcccaaggaggtgagatacgaggccctgcagaccctgtgcagcgccccccccagcgacgtgctgaactgcgagaactggaccaccctgtgcgagaagctgaccgtgagcctgagcgaccccgaccccgtgttcagcgacagaatcctgaagttctgcgcccagaccttcctgctgagccccctgcacatgaccaaggagatctacaccagcctggccaagtacctggagagctacttcctgagcagagagaaccacatccccaccctgagcgccggcgtggacatcaccaaccccaacatgaccagactgctgaagaaggtgagactgctgaacgagtaccagaaggaggcccccagcttctggatcagacaccccgagaagtacatggaggagatcgtggagagcaccctgagcctgctgaccgtgaagcacaaccagagccacgtggtgagccagaagatcctggaccccatctacttcttcgccctggtggacaccaaggccgtgtggttcaagaagtggatgcacgcccactacagcagaaccaccgtgctgagactgctggagaccaagtacaagagcctggtgaccaccgccatccagcagtgcgtgcagtacttcgagatgtgcaagaccagaaaggccgacgagaccctgggccacagcaagcactgcagaaacaagcagaagaccttctactacctgggccaggagctgcagtacatctacttcatccacagcctgtgcctgctgggcagactgctgatctacaagcagggcagaaagctgttccccatcaagctgaagaacaagaagggcctggtgagcctgatcgacctgctggtgctgttcacccagctgatctactacagccccagctgccccaagatgaccagcgccgcccacagcgagaactacagccccgccagcatggtgaccgaggtgctgtggatcctgagcgaccagaaggagtgcgccgtggagtgcctgtacaacaacatcgtgatcgagaccctgctgcagcccatccacaacctgatgaagggcaacgaggccagccccaactgcagcgagaccgccctgatccacatcgccggcatcctggccagaatcgccagcgtggaggagggcctgatcctgctgctgtacggcgccaacatgaacagcagcgaggagagccccaccggcgcccacatcatcgcccagttcagcaagaagctgctggacgaggacatcagcatcttcagcggcagcgagatgctgcccgtggtgaagggcgccttcatcagcgtgtgcagacacatctacagcacctgcgagggcctgcaggtgctgatcacctacaacctgcacgagagcatcgccaaggcctggaagaagaccagcctgctgagcgagagaatccccacccccgtggagggcagcgacagcgtgagcagcgtgagccaggagagccagaacatcatggcctgggaggacaacctgctggacgacctgctgcacttcgccgccacccccaagggcctgctgctgctgcagagaaccggcgccatcaacgagtgcgtgaccttcatcttcaacagatacgccaagaagctgcaggtgagcagacacaagaagttcggctacggcgtgctggtgaccagagtggccagcaccgccgccggcggcatcgccctgaagaagagcggcttcatcaacgagctgatcaccgagctgtggagcaacctggagtacggcagagacgacgtgagagtgacccaccccagaaccacccccgtggaccccatcgacagaagctgccagaagagcttcctggccctggtgaacctgctgagctaccccgccatctacgagctggtgagaaaccaggacctgcccaacaagaccgagtacagcctgagagaggtgcccacctgcgtgatcgacatcatcgacagactgatcatcctgaacagcgaggccaagatcagaagcctgttcaactacgagcagagccacatcttcggcctgagagacttcatcatcgacggcctgagcgtggagagaaaccacgtgctggtgagaatcaacctggtgggcggccccctggagagaatcctgccccccagactgctggagaagagcgacaacccctacccctggcccatgttcagcagctaccccctgcccaactgctacctgagcgacatcaccagaaacgccggcatcaagcaggacaacgacctggacaagctgctgctgtgcctgaagatcagcgacaagcagaccgagtggatcgagaactgccagagacagttctgcaagatgatgaaggccaagcccgacatcatcagcggcgaggccctgatcgagctgctggagaagttcgtgctgcacctgaccgagagccccagcgagtgctacttccccagcgtggagtacaccgccaccgacgccaacgtgaagaacgagagcctgagcagcgtgcagcagctgggcatcaagatgaccgtgagatacggcaagttcctgagcctgctgaaggacggcgccgagaacgacctgacctgggtgctgaagcactgcgagagattcctgaagcagcagcagaccagcatcaagagcagcctgctgtgcctgcagggcaactacgccggccacgactggttcgtgagcagcctgttcatgatcatgctgggcgacaaggagaagaccttccagttcctgcaccagttcagcagactgctgaccagcgccttcctgtggctgcccagactgcacatcagcagctacctgcccaacgacaccgtggagagcggcatccaccccgtgtacttctgcagcacccactacatcgagatgctgctgaaggccgagctgcccctggtgttcagcgccttccacatgagcggcttcgcccccagccagatctgcctgcagtggatcacccagtgcttctggaactacctggactggatcgagatctgccactacatcgccacctgcgtgttcctgggccccgactaccaggtgtacatctgcatcgccgtgttcaagcacctgcagcaggacatcctgcagcacacccagacccaggacctgcaggtgttcctgaaggaggaggccctgcacggcttcagagtgagcgactacttcgagtacatggagatcctggagcagaactacagaaccgtgctgctgagagacatgagaaacatcagactgcagagcacctag

SEQ ID NO: 244437 - DNA, 3774 bp, Artificial Sequence
  derived and/or modified sequence
atggcgcacttttcctctgaggaccaggccatgctccaggcgatgttgcgcaggttgttccagtccgttaaagagaagattaccggagcaccatcccttgaatgcgccgaagaaattctactccaccttgaggaaaccgacgaaaacttccataattatgaattcgtgaagtacttaagacaacacattgggaacaccctcggtagcatgatcgaagaagaaatggaaaagtgtacctccgatcggaaccaaggtgaagagtgcggatacgacactgtggtgcaacaggtcacaaagcggactcaagaaagcaaagagtataaagagatgatgcactacctcaaaaatatcatgatcgcggtggtggagagtatgataaataaatttgaggaagacgaaactaggaatcaggagcggcaaaaaaagatacagaaagagaagtcccattcctacagaacggataactgtagcgactccgactcttctctgaaccagtcttacaaattttgccaggggaagctgcagctgatacttgaccaacttgaccccggacagccaaaggaggtacgctacgaagccttgcaaacattatgctccgcccccccgagcgacgttctcaactgtgagaactggactactctgtgtgagaaactgacagtaagcctctctgaccctgaccctgttttctctgaccgaatacttaagttctgtgcgcaaacctttctactttctcccctgcacatgactaaagagatttacacttccctggccaaatatctggaatcatacttcttgtcccgcgagaaccacatccctactctgtctgccggggtagatatcacgaacccaaacatgaccaggctcctcaagaaggtaagactactgaacgaataccagaaggaggctccctctttctggatcagacatcccgaaaagtatatggaggagatcgttgagagtacgctatctctactcacagtaaagcataatcaaagtcacgtggtgtcgcagaaaattctggaccccatctacttcttcgcactagtcgacaccaaagcggtgtggttcaaaaagtggatgcacgctcattactccaggactactgttctgagactgttagaaacaaaatataagtctctggtgaccaccgccatccagcagtgcgtccaatacttcgaaatgtgcaagacaaggaaagctgacgaaacactcggccattctaagcactgccgcaacaagcagaaaacgttttactatctaggtcaggagctccagtacatttactttatccactctttgtgtctgttaggcagacttctgatttacaaacagggccggaaactgttcccaatcaagttgaagaacaagaaaggcctggtgtctctgatcgacctgctcgtgctctttacacagctgatatattactccccttcatgcccaaaaatgaccagcgccgctcattccgaaaactatagtcccgcatcaatggtcacagaagtgctgtggatcctttctgatcagaaagagtgtgccgtcgaatgtttgtacaataatatagttatcgagaccctgctgcagcccatacataacctcatgaaagggaatgaggcctctccaaactgcagcgaaactgcactaatccatatcgcaggcattctggcccggatcgcctctgtcgaagagggcctaatcctgctactgtacggggcaaacatgaatagcagtgaggaatcgcccacaggcgctcacataatcgcccaattttcgaaaaagctccttgacgaagatatttccattttcagtggctcagagatgctgcccgtggtcaagggagcctttattagtgtgtgcagacacatatactcaacttgcgagggactccaggtactgatcacttataacctgcatgagtcgattgcaaaggcttggaaaaaaacatcactcctgtccgagaggattcctaccccagtggaggggagcgatagtgtctccagtgtgagtcaggaatctcagaacattatggcgtgggaagacaatctgctcgacgatctccttcacttcgccgctacacctaaggggctcctgctgttgcagcggactggcgcgatcaatgaatgcgtgacctttatttttaaccggtatgcaaagaagctccaggtgtccaggcataagaagtttgggtacggggtccttgtgacaagagtagccagcacagccgcaggaggcattgctctgaagaagtctggcttcatcaatgagctgattacagagttatggagtaacctcgaatatggacgcgacgatgtgagggtgacacatcctaggaccactccggtcgatcccattgaccgcagctgtcaaaagagttttctcgccctggtcaatctgctcagctatcctgcgatttacgaactcgtcagaaatcaggacctgccaaacaaaacagagtatagcctcagagaggtgcccacatgtgtcatcgatattatcgatcggctaatcatcctcaactctgaggcaaagataagatccctctttaattacgaacaaagccacatattcgggctgcgtgacttcattatcgatggcttatcagtagaacgcaatcatgtattggttcgcatcaacctagtaggcgggccgctagagcggatattaccaccgcgcctcctggagaagtcagataatccatacccctggccaatgttcagttcttacccccttcccaattgctatctatcagatattactcgcaacgctggcattaaacaagacaatgatttggataagttgctcctttgcctgaaaatctcagataaacagactgagtggattgaaaactgccaaagacaattttgtaagatgatgaaggctaagccagacattatcagcggggaggccttgattgagttgctggaaaagtttgtactacaccttactgagtccccgtccgaatgttattttccgtctgtcgagtacactgcgaccgatgcaaatgtgaaaaatgaatccttgtcctctgtacagcagctcggcatcaaaatgactgtccgttacggcaaattcctaagcctcctcaaggacggagccgagaatgatctgacctgggtcttgaagcactgtgaacgcttccttaaacaacagcagacatcaattaagtcttcccttctttgccttcagggaaattacgccggacacgattggttcgtgtcatctctcttcatgataatgctaggtgacaaggagaagacctttcagtttctgcaccaattcagccgtctcctgacctccgccttcctgtggctgccacgcctgcacatcagctcgtacctgcccaatgacacggtggagtcaggcattcaccccgtctatttttgttccacccactacatcgaaatgcttctgaaggcggagctgccgttagtctttagcgccttccacatgagtgggtttgcccccagccaaatttgtctccagtggatcacacaatgcttctggaattatctagactggatcgagatatgtcactacatagccacgtgcgtgttcctgggtccagattaccaggtctacatttgcattgctgttttcaagcacttgcaacaggacatcttacagcatacacagacgcaggatctccaggtcttcctgaaggaagaagccttgcatgggtttagagtcagtgactatttcgaatacatggagatcctcgaacagaattaccggacagtgcttctacgggacatgaggaatataaggttgcagagcacatag

SEQ ID NO: 244438 - DNA, 3774 bp, Artificial Sequence
  derived and/or modified sequence
atggcccacttcagcagcgaggaccaggccatgctgcaggccatgctgcggcggctcttccagagcgtgaaggagaagatcaccggggcccccagcctggagtgtgccgaggagatcctgctgcacctggaggagacagatgagaacttccacaactatgaatttgtgaagtacctgcggcagcacatcggcaacaccctgggctccatgattgaggaggagatggagaagtgcaccagtgacaggaaccagggcgaggagtgtggctatgacacagtggtgcagcaggtgaccaagaggacccaggagagcaaggagtacaaggagatgatgcactacctgaagaacatcatgattgctgtggtggagagcatgatcaacaagtttgaagaagatgagaccaggaaccaggagcggcagaagaagatccagaaggagaagagccacagctacagaacagacaactgcagcgacagcgacagcagcctgaaccagagctacaagttctgccagggcaagctgcagctgatcctggaccagctggaccccggccagcccaaggaggtgcgctatgaggccctgcagaccctgtgcagcgcccccccatctgatgtgctgaactgtgagaactggaccaccctgtgtgagaagctgactgtgtccctgagtgaccctgaccctgtgttcagtgaccgcatcctgaagttctgtgcccagaccttcctgctgagccccctgcacatgaccaaggagatctacaccagcctggccaagtacctggagagctacttcctgagccgggagaaccacatccccaccctgtctgctggggtggacatcaccaaccccaacatgacccggctgctgaagaaggtgcggctgctgaatgagtaccagaaggaggcccccagcttctggatccgccaccctgagaagtacatggaggagatcgtggagagcaccctgagcctgctgactgtgaagcacaaccagagccacgtggtgtcccagaagatcctggaccccatctacttctttgccctggtggacaccaaggctgtgtggttcaagaagtggatgcacgcccactacagcaggaccaccgtgctgcggctgctggagaccaagtacaagagcctggtgaccacagccatccagcagtgtgtgcagtactttgagatgtgcaagaccaggaaggcagatgagaccctgggccacagcaagcactgcaggaacaagcagaagaccttctactacctgggccaggagctgcagtacatctacttcatccacagcctgtgcctgctgggccgcctgctgatctacaagcagggcaggaagctgttccccatcaagctgaagaacaagaagggcctggtgtccctgattgacctgctggtgctcttcacccagctgatctactacagccccagctgccccaagatgaccagcgctgcccacagcgagaactacagccctgcctccatggtgacagaggtgctgtggatcctgagtgaccagaaggaatgtgctgtggagtgcctgtacaacaacatcgtgattgagaccctgctgcagcccatccacaacctgatgaagggaaatgaggccagccccaactgcagcgagacagccctgatccacatcgccggcatcctggcccgcatcgcctctgtggaggagggcctcatcctgctgctgtatggagccaacatgaacagcagcgaggagagccccaccggggcccacatcatcgcccagttcagcaagaagctgctggatgaggacatcagcatcttcagcggcagcgagatgctgcctgtggtgaagggggccttcatctctgtgtgccgccacatctacagcacctgtgagggcctgcaggtgctgatcacctacaacctgcacgagagcatcgccaaggcctggaagaagaccagcctgctgtctgagcgcatccccacccctgtggagggcagtgacagcgtgtcctctgtgtcccaggagagccagaacatcatggcctgggaggacaacctgctggatgacctgctgcactttgctgccacccccaagggcctgctgctgctgcagaggactggagccatcaatgaatgtgtgaccttcatcttcaacagatatgccaagaagctgcaggtgagccgccacaagaagtttggctacggcgtgctggtgaccagggtggccagcacagctgctgggggcatcgccctgaagaagagcggcttcatcaatgagctgatcacagagctgtggagcaacctggagtatggaagagatgatgtgcgggtgacccaccccaggaccacccctgtggaccccatcgacaggagctgccagaagagcttcctggccctggtgaacctgctgagctacccagccatctatgagctggtgaggaaccaggacctgcccaacaagacagagtacagcctgcgggaggtgcccacctgtgtgattgacatcatcgacaggctcatcatcctgaacagcgaggccaagatccgcagcctcttcaactatgagcagagccacatcttcggcctgcgggacttcatcattgatggcctgtctgtggagaggaaccacgtgctggtgcgcatcaacctggtgggcggccccctggagcgcatcctgcccccccggctgctggagaagagtgacaacccctacccctggcccatgttcagcagctaccccctgcccaactgctacctgagtgacatcaccagaaatgccggcatcaagcaggacaatgacctggacaagctgctgctgtgcctgaagatcagtgacaagcagacagagtggattgagaactgccagaggcagttctgcaagatgatgaaggccaagccagacatcatcagcggggaggccctgattgagctgctggagaagtttgtgctgcacctgacagagagccccagcgagtgctacttccccagcgtggagtacacagccacagatgccaacgtgaagaatgaaagcctgagctctgtgcagcagctgggcatcaagatgacagtgcgctatggcaagttcctgagcctgctgaaggatggagcagaaaatgacctgacctgggtgctgaagcactgtgagcgcttcctgaagcagcagcagaccagcatcaagagcagcctgctgtgcctgcagggcaactatgccggccatgactggtttgtgagcagcctcttcatgatcatgctgggggacaaggagaagaccttccagttcctgcaccagttcagccggctgctgaccagcgccttcctgtggctgccccggctgcacatcagcagctacctgcccaatgacacagtggagagcggcatccaccctgtgtacttctgcagcacccactacatcgagatgctgctgaaggccgagctgcccctggtgttcagcgccttccacatgagcggctttgcccccagccagatctgcctgcagtggatcacccagtgcttctggaactacctggactggattgagatctgccactacatcgccacctgtgtgttcctgggccctgactaccaggtgtacatctgcatcgctgtgttcaagcacctgcagcaggacatcctgcagcacacccagacccaggacctgcaggtgttcctgaaggaggaggccctgcacggcttccgggtgtctgactactttgagtacatggagatcctggagcagaactacagaacagtgctgctgcgggacatgaggaacatccggctgcagagcacctag

SEQ ID NO: 244439 - DNA, 3824 bp, Artificial Sequence
  derived and/or modified sequence
gcttttgctcggacctggagtaatgagagtggacgtttgattccaacaggatggcccatttctccagcgaggaccaggcgatgctgcaggcgatgctgaggcggttgttccagagcgtgaaggagaaaatcacgggtgccccttccctggagtgtgccgaagagattcttttacatctggaggaaactgatgaaaattttcacaactatgaatttgtgaaatacctcaggcagcatataggcaacactttgggttctatgattgaagaagaaatggaaaaatgcacatctgatcggaatcagggtgaagaatgcggctatgatacagttgtacagcaggtcactaaaagaactcaagaatctaaagagtacaaagaaatgatgcattacctgaagaacattatgatagctgtggtcgagtctatgattaacaagtttgaagaagatgagacacgaaatcaagaaaggcagaaaaaaatccaaaaggagaaaagccatagttaccgcacagacaattgctctgatagtgattcatcattgaatcagagttacaaattttgtcaaggaaaattacaattgattttagaccagttggatcctgggcaacctaaagaggtgagatatgaagccttgcaaacattatgttcagctcctccatctgatgtcctcaactgtgaaaattggactactctctgcgaaaaactgaccgtgtctctttcagatcctgatcctgtgtttagtgaccggattttaaaattctgtgcacagacatttttgctttctccattacatatgaccaaggaaatttatacaagcttagctaagtatttggagtcatactttctttctagggaaaatcatattcctactctttcagctggtgtagatataactaatcctaatatgactcgcttacttaaaaaggttcgtcttctaaatgaatatcagaaagaagctccatctttctggattcgtcatccagagaagtatatggaagaaattgtggagagtactttgtccttgttaacagttaaacataatcaaagccatgttgtctcacaaaagattttggatccgatctacttttttgcattagttgataccaaggctgtgtggttcaaaaagtggatgcatgcacattatagcagaactacagtattaagacttcttgaaacgaaatataagtctctggtaactacagccattcaacagtgtgttcagtactttgaaatgtgtaagactaggaaagctgatgaaactttgggacattcaaagcattgcagaaacaagcagaaaactttctactacttaggacaagaattacaatatatttatttcattcactcactgtgccttttaggaagattattgatctataaacaaggcagaaaactatttcctattaagctgaagaataaaaaaggtttggtatccctcatagatctgcttgttctttttacccaacttatctattactcaccaagttgtccaaagatgacatcagctgcccattcagagaattactctcctgcaagtatggtgactgaagttctgtggatactcagtgatcaaaaagaatgtgcagtggaatgcttatataacaacattgtaatagagacacttcttcagcctattcacaatttaatgaaaggaaatgaggcatctccaaattgctctgagacagctttaattcatatagctggtattttggcaagaattgcatctgtagaagaagggcttattttactcctttatggagcaaatatgaactcttctgaagaaagtcctacaggtgctcatataattgcccagttttcgaaaaaacttctcgatgaagatatttctatattttctggatcagaaatgttgcctgtggttaaaggagcttttatttctgtgtgtcgtcacatatatagtacatgtgaaggtttgcaggtgttaatcacttataatttgcatgaatctatagcaaaggcatggaaaaagacaagtttgctatcagaaagaattcctactccagtagagggttctgattctgtttcttcagtaagccaggaatcccaaaacattatggcttgggaagataatttgttagatgatttactacattttgctgccacccccaaaggattactacttcttcaaagaacaggtgctatcaatgaatgtgtgacatttatattcaatcgatatgcaaaaaaattacaggtcagcaggcataaaaaatttggctatggagttttggttacacgagtggcatcaacagcagcaggtggcattgcactaaaaaagtcagggtttattaatgaacttataactgaattatggtccaatctggaatatggaagagatgatgttagggtaacccatcccagaactactccagtggatcctattgaccgaagctgtcaaaagtcttttttagcactggtgaacttgttatcctatcctgctatttatgagcttgtaaggaatcaagatcttcctaataaaacagaatattctcttcgtgaagtcccaacatgtgttattgatattattgatagacttataattttgaattctgaagctaagattcgttctttattcaactatgaacaatcacatatctttggtctaagggactttataattgatggcttatcagtggagagaaatcatgttcttgttagaataaatcttgttggtgggccattggaacggattttgcctccgaggttactcgaaaagagtgataatccatatccttggccaatgttttcatcatatccattgccaaactgctatctgtcagacattacaagaaatgctggtataaaacaagacaatgatcttgacaagcttttattatgcctcaaaatatctgataaacaaactgaatggatagaaaactgccaaagacaattttgcaaaatgatgaaagccaaacctgatataatcagtggagaggccttaatagaattacttgaaaaatttgtgcttcatctcactgaaagcccatctgaatgctacttcccttcagtggagtatacagctactgatgcaaatgtgaagaatgaaagtctttcatctgtgcagcagcttggcattaaaatgactgtcaggtatggcaaattcctcagtctcttaaaagatggtgcagaaaatgatcttacctgggttttaaagcattgtgagagattcctgaaacagcagcaaacttccataaaatcttctcttctctgcctgcaagggaattatgctggccatgactggtttgtatcttctctgttcatgataatgttgggagacaaagaaaaaacattccaatttcttcatcaattctccaggcttctgacttctgcttttctttggttgccaaggctacatatttctagttaccttcctaatgacactgtagaatctggcatccatccagtatatttttgcagcacccattatattgaaatgctactgaaggctgagttgcctcttgtgttttcagcttttcacatgtctggttttgcaccatcacagatttgcctgcaatggataacccagtgtttttggaattacttagattggatagaaatctgccattatattgctacttgtgttttccttggtcctgattatcaagtgtatatctgtatagctgtattcaaacatttacagcaagacattctacagcacactcagactcaagatctgcaagttttcctaaaagaagaagcactgcatgggtttcgagtgagtgattattttgaatacatggaaattttggaacaaaactaccgaacagtgctgctgagagacatgcggaacattagactgcagagcacatag

SEQ ID NO: 244440 - DNA, 3774 bp, Artificial Sequence
  derived and/or modified sequence
atggcccacttcagcagcgaggaccaggccatgctgcaggccatgctccgacggctgtttcaaagtgttaaggagaaaataaccggcgccccaagtctggagtgtgccgaggaaatccttctccatctcgaagaaaccgacgaaaacttccacaactacgagtttgtaaagtatctccgccagcatatcgggaacactttgggtagcatgatagaggaggaaatggagaagtgtacgtctgatcggaaccagggagaggaatgcggttatgacactgtagtgcagcaggttacgaaaaggacccaggaatctaaggaatataaggagatgatgcactacctaaaaaacatcatgatagcagtggtcgagtctatgatcaacaaattcgaagaagacgagactagaaaccaagagcgccagaagaagatacaaaaggaaaaatcacattcctaccgtactgacaactgcagcgatagtgattcatccctgaaccaatcttacaagttctgtcagggcaagctccagctaatcctggaccagcttgacccgggacagcctaaagaagtaagatatgaggcccttcagactctgtgttcagcccctccgagcgacgtgttgaattgtgaaaactggactacactatgcgagaaacttacagtttcactttcagaccccgaccctgttttctccgacaggattctgaagttctgtgcacagaccttcttgctgagccccctgcacatgactaaggagatctacacctctctggctaaatatctggagtcctactttctctcgagagagaatcacattcccactctgagcgctggggtggatataacaaatcctaacatgaccaggttgctgaagaaagtccgactgttaaacgagtatcagaaagaagcaccaagtttctggattcgccatcccgagaagtacatggaagagatcgtcgaaagcacactttccctgttaactgtgaaacataaccagagtcatgttgttagtcagaagatattggacccaatatatttcttcgccttggttgacacaaaggccgtctggttcaagaagtggatgcatgcacactactcaagaactacagtccttaggctattggagaccaagtataagtctctggttaccactgccatccagcagtgcgtacaatatttcgagatgtgcaaaactcgaaaggccgacgaaactctgggtcacagtaagcattgcagaaacaagcagaaaaccttctattacctcggccaggagctgcaatatatctatttcattcactcattgtgcctgctcggtcgattactgatctataagcagggaaggaaactgttccctatcaaactaaaaaacaaaaaaggcctagtaagcctcatcgacctcctagtgctgtttacccagctgatttattattctccctcttgccccaaaatgacttctgctgcacatagcgagaattatagtccagctagcatggtgactgaagtgctgtggattctatctgatcaaaaggagtgtgctgttgagtgtctctacaataacatagttatcgagacactgctccagcccatccataatcttatgaagggcaatgaagcttccccgaactgtagcgagacagccctcatccacatcgccgggatcctcgctcgcattgcctcagtggaggagggcctgatcttgctgctatatggggctaatatgaacagctccgaggagagccctaccggagcacatattattgcgcaatttagtaaaaaactgttagacgaggacatctcaatattctccggttcggagatgctcccagtagtgaagggggcatttattagcgtctgtaggcacatctatagtacatgcgagggacttcaggtgctcatcacatataatcttcacgagtctatcgccaaagcctggaagaaaacctcccttctctcagagcgcatccctacacctgtggagggctctgacagcgtcagctccgtatctcaggagtcccagaatattatggcttgggaggacaacctgctcgatgacctgttgcacttcgctgcaacacctaagggcctcctactccttcagcgaactggtgccattaatgagtgcgtcactttcatatttaacagatacgctaaaaagctccaggtctccaggcacaaaaagtttgggtacggcgtgttagtaacccgagtggcctccactgcagcagggggaatagccctgaaaaagagtggttttattaatgagttaataactgaactttggtcaaacctcgaatacggccgagacgatgttagggtgacacatccaagaaccacccctgtggaccctatcgatcgctcatgtcagaagagttttctggcgctggttaacttactttcgtaccctgcgatctacgagctggtgcgcaatcaagacctgccaaacaaaactgagtacagcttacgtgaagtcccaacctgcgtgatagacattattgatcgcctaatcattttgaactcagaggccaaaatcagatccctgttcaactatgaacagagtcacatttttgggcttcgtgacttcatcatcgacggactatctgttgaacgcaatcatgtgctcgtcaggatcaatctcgtcgggggacctctggagcgtattctcccaccacgcctgttagagaagtcagataatccttacccctggcccatgttctccagttatcccctgcccaattgttatctgtccgacatcacccgcaatgcggggatcaagcaggataacgatctggataaactcctcttatgcctgaagatttcggataagcaaactgagtggatcgaaaattgccagaggcagttttgcaagatgatgaaagccaagccagacataatctccggagaagccctgattgagcttctggagaagtttgtattgcacttaaccgaatctccatccgaatgctactttccgtccgtagagtatacggccacagacgccaatgtgaagaatgaatctctgtccagtgtgcagcagctagggatcaaaatgaccgtgcgatacggtaagtttctgtctctcctgaaggatggtgccgaaaatgatctgacatgggtgttgaaacattgtgaacgcttcctgaagcagcaacaaacatctattaagtctagcctgctttgcttacagggtaactatgcggggcatgattggttcgtctccagcctttttatgattatgttgggcgacaaagaaaagacattccagtttttacatcagttcagtcgattgctgacatccgctttcctgtggctgccccggttgcatatcagctcttacctcccaaacgataccgtcgaaagtggaatccatccagtatacttttgtagcacacattatattgagatgctgttaaaggccgagctaccattggtgttcagcgctttccacatgagcgggtttgcaccttctcaaatctgcctccaatggattacccagtgcttctggaactatctggattggattgaaatctgccactatatcgccacatgcgtgttcctgggtcctgactatcaggtgtacatctgcatagcagtttttaagcacctgcagcaggatatcctgcagcacacccaaacacaggacctccaagtctttctgaaagaagaggccttacatggattccgggtgtccgactatttcgagtacatggagatcttggaacaaaactaccgaacagtgttgttgcgggacatgcggaacataaggcttcagtcaacgtag

SEQ ID NO: 244441 - DNA, 3774 bp, Artificial Sequence
  derived and/or modified sequence
atggcccacttcagcagtgaggatcaagctatgttacaagccatgttgcgtcggttgtttcagtctgtgaaggaaaaaattacgggggctccaagtctggaatgtgcggaagaaatcctgctccacctggaagagactgacgagaacttccataactacgagttcgtcaagtatctcaggcagcacataggtaacaccctgggttccatgatagaggaagagatggaaaaatgcactagcgacagaaaccaaggcgaagagtgtggctacgataccgtagtccagcaggttactaaaaggacacaggaatctaaggaatacaaagaaatgatgcattacctcaagaatatcatgattgctgttgtcgagtctatgatcaataaattcgaggaagatgagacacggaatcaggagcgccagaagaagatccagaaagaaaaaagccatagctaccgaactgacaactgtagcgactccgattcttcacttaaccaatcttataagttctgccaggggaagctacagctgatactagaccagctggaccccggacagcccaaggaagttagatacgaagcgttgcaaaccctttgttcagctcccccttccgacgtgctcaattgcgagaattggacgacactgtgtgaaaagttaacagtatcattgagtgatccagatcccgtgttctccgacagaattctgaagttctgtgctcagacctttctgctttcccctttgcacatgactaaagaaatttatacaagtctggctaaatacctcgagtcatacttcctgagcagagagaaccacattcccacactcagcgcaggtgtggatatcaccaaccccaatatgactcgactcctcaaaaaagtcagattgcttaatgaataccaaaaggaggccccatcattctggatccgccaccccgaaaagtatatggaagagatagttgaatcaaccctttcccttttgaccgtaaagcataatcaaagtcacgtggtgtcacagaagatactagatccgatctactttttcgcgttagtggatacgaaagctgtgtggttcaaaaagtggatgcacgcccactattcaagaactacagttctaagactcctggagaccaaatataagtccttagtgactacagcaatccagcaatgcgtgcaatatttcgaaatgtgtaaaactagaaaggccgatgagaccctgggacactccaaacattgcagaaacaaacagaagactttctattacctgggccaagaactgcaatatatttatttcatccactctctctgcctgttgggtcggctgctgatttacaaacagggaagaaagcttttccccatcaagctcaagaataaaaaagggctagtatcactaattgaccttctggtcctgtttacacagttgatttattacagcccaagctgtcctaagatgacttctgccgctcacagtgaaaactacagtcctgcgtcaatggttaccgaggttttgtggatcctgtctgaccaaaaggagtgcgctgttgagtgcttgtataacaatatagtgatagagactctcttacagcctattcataatctcatgaaaggaaacgaggcctccccaaactgctcggagactgccctcatccacatcgccggaatccttgcccgaatcgcctctgtggaggagggtctcattttactgctgtacggagccaatatgaactcctcggaggaaagcccgacaggtgcccatataattgcacagttcagcaagaagctcctggatgaagatatctccatcttctccggtagtgaaatgttgcctgtggtgaagggagcatttattagcgtgtgccggcatatatacagcacctgcgaaggactgcaagtcctgattacatataacctgcacgaatcaatcgctaaggcctggaagaaaacctccctgctcagcgagcggattcccacccctgtggagggtagtgattccgtctctagcgtctcccaggaatctcaaaacatcatggcatgggaagacaaccttctcgatgacctcctccattttgcagctacacccaaggggctgctactattacagcgcaccggggcaattaacgaatgcgtaaccttcatattcaaccgctacgccaaaaaattacaggtgtcaaggcataaaaaatttggttatggagtgctggttactcgcgtggccagtactgctgccggagggatagctcttaagaagtcaggcttcatcaacgagttaattactgaactgtggagcaatcttgagtatgggcgtgacgatgtgagggtgacacatcccagaacaacaccagtcgatccaatcgaccggtcttgtcaaaaatcatttcttgccctggtcaacttactttcctatcccgcaatctatgaactggtgagaaaccaggatctacccaacaaaactgagtacagcctccgcgaggtgcccacatgcgtgattgacattatagaccgcctgattatattaaactcagaagctaaaataaggtcattattcaactatgagcagagtcacatctttggcctgcgggactttatcattgatgggttgtccgtggaaagaaatcacgtgcttgtcaggataaacttagtgggcggacccctggaaagaattctgcctcctagattgctggagaagagcgacaatccctacccttggcccatgttttccagttatccgctgccgaactgttacttgtcagacattacacggaatgctgggatcaaacaggataacgacctggataagttattactgtgtctgaagatctccgacaaacagacggagtggattgagaactgccaaagacagttttgtaagatgatgaaggctaagcctgacattatctcaggcgaggcgctaattgaactgctagagaagttcgttctgcacctgacggagtcaccatctgaatgctacttcccctcagtggagtatacggccaccgatgccaatgtgaagaacgagtcactctcatctgtacaacaattgggtatcaagatgacagtacgctatgggaagttcttaagtttactaaaggacggagccgagaacgacctgacctgggtacttaaacactgtgaacgatttctaaaacagcagcaaaccagcatcaaaagcagtctgctttgcctccaggggaattatgcaggccatgattggtttgtaagttctttgtttatgataatgttaggggataaggaaaagactttccagttcctgcaccaattctcacgattactcacatccgctttcctatggctccctcgactccatatatccagctacctccctaacgacacggtggaatccggtatccacccagtgtatttctgtagtacacactacatcgaaatgctgcttaaagcggaactgcccctggtgtttagtgctttccatatgtcgggttttgcaccctcccagatatgtctccagtggattactcagtgtttctggaattacctggattggattgagatttgccactacattgccacctgcgtgtttctgggccctgattaccaggtttacatatgtatcgccgtctttaaacatctgcaacaagacatactgcagcatacccagacacaggatctgcaggtttttctgaaggaggaagctctgcatggctttcgagtttcagactactttgaatatatggagatactggagcagaactaccgcaccgtcttgcttagagacatgagaaacataagactgcaaagcacctag

SEQ ID NO: 244442 - protein, 276 aa, Artificial Sequence
  derived and/or modified sequence
MDADSLLLSLELASGSGQGLSPDRRASLLTSLMLVKRDYRYDRVLFWGRILGLVADYYIAQGLSEDQLAPRKTLYSLNCTEWSLLPPATEEMVAQSSVVKGRFMGDPSYEYEHTELQKVNEGEKVFEEEIVVQIKEETRLVSVIDQIDKAVAIIPRGALFKTPFGPTHVNRTFEGLSLSEAKKLSSYFHFREPVELKNKTLLEKADLDPSLDFMDSLEHDIPKGSWSIQMERGNALVVLRSLLWPGLTFYHAPRTKNYGYVYVGTGEKNMDLPFML

SEQ ID NO: 244443 - DNA, 831 bp, Artificial Sequence
  derived and/or modified sequence
atggacgcagattccctgcttctatcgctggagctggcaagtggatctggccagggactaagccccgatcgaagagcgtccctactgacctccctgatgctggtgaagcgggactacaggtacgatagagtattgttctgggggcgaatcctcggtctcgtcgccgattactatatcgcccaggggctgagtgaggaccagctcgccccaaggaagacactctattccctcaattgcactgagtggtctctcctcccgccagccacagaggaaatggtggcgcaatcatcagtggtcaaagggcgctttatgggagacccaagctacgagtacgagcacacagagttgcagaaagtgaacgagggtgagaaggtctttgaagaggagatagtcgtgcagattaaggaagaaacacgtttagtaagcgtgattgaccagatagataaggcagttgcgattatacccaggggtgccctcttcaaaactccgtttggacccacacatgtaaaccgtaccttcgaagggctatcgttgagcgaagccaaaaagctcagctcctattttcatttccgcgagcccgttgaattaaagaataagactctgctcgaaaaggccgatctggacccctctttggacttcatggactccctggaacacgatataccaaagggctcatggtcaatccagatggagcggggtaacgcgctggttgtactgcgctcccttctgtggcccggactgaccttttatcacgcccctagaaccaaaaattacggctatgtctacgttggtacaggagaaaagaatatggatctcccctttatgctgtag

SEQ ID NO: 244444 - DNA, 831 bp, Artificial Sequence
  derived and/or modified sequence
atggatgctgacagcctgctgctgagcctggagctggccagcggcagcggccagggcctgagcccagaccggcgggccagcctgctgaccagcctgatgctggtgaagagggactaccgctatgacagagtgctcttctggggccgcatcctgggcctggtggccgactactacatcgcccagggcctgtctgaggaccagctggcccccaggaagaccctgtacagcctgaactgcacagagtggagcctgctgcccccagccacagaggagatggtggcccagagctctgtggtgaagggccgcttcatgggagaccccagctatgaatatgagcacacagagctgcagaaggtgaatgaaggagagaaggtgtttgaggaggagatcgtggtgcagatcaaggaggagacccggctggtgtctgtcatcgaccagattgacaaggctgtggccatcatccccaggggggccctcttcaagacccccttcggccccacccacgtgaacagaacatttgagggcctgagcctgtctgaggccaagaagctgagcagctacttccacttccgggagcctgtggagctgaagaacaagaccctgctggagaaggctgacctggaccccagcctggacttcatggacagcctggagcatgacatccccaagggctcctggagcatccagatggagagaggaaatgccctggtggtgctgcggagcctgctgtggccaggcctgaccttctaccacgcccccaggaccaagaactacggctacgtgtatgtgggcactggagagaagaacatggacctgcccttcatgctgtag

SEQ ID NO: 244445 - DNA, 831 bp, Artificial Sequence
  derived and/or modified sequence
atggacgccgacagcctgctgctgagcctggagctggccagcggcagcgggcagggtttgagccctgacagaagagcatcccttctgacaagcctcatgctggtgaagagagactacagatacgaccgggtgttgttctggggccgcattttgggcctggtggccgactattacattgcccaggggctgagcgaggaccagctggcaccccgcaaaacgctctacagcctgaattgcacagagtggtcgctcctgcctccagcaacggaagaaatggtggctcaatcatccgtcgtgaaaggaaggtttatgggcgatccatcctacgagtatgaacatactgaattacagaaggtcaacgagggggagaaggtgttcgaagaagaaatagttgttcaaattaaagaggaaactaggttggtctctgtgattgaccagatcgacaaggctgtagctataattcctaggggagctttgtttaaaacaccatttggcccaactcacgtgaacaggacctttgaaggactcagcctgagcgaggctaagaaactaagcagctactttcatttccgtgagcccgtggagctcaaaaataagactctcctagaaaaagcagacctggatccttctcttgactttatggattctctggaacatgacatacctaaggggagctggagcatccagatggagcggggcaatgctctggtggtgcttagaagtttactttggcccggactaaccttctatcacgcccctcggacaaaaaactacgggtatgtgtacgtgggtaccggcgaaaaaaacatggatttgccctttatgctgtag

SEQ ID NO: 244446 - DNA, 831 bp, Artificial Sequence
  derived and/or modified sequence
atggacgctgattctctgttgctgtccctcgagctcgccagtggctccggacaaggactgagccccgaccgcagggcctctctcttaacatctttgatgctcgtcaagcgcgactacaggtatgatcgcgttctattttgggggagaatcttgggtctcgtcgcagattattatattgcgcaagggttgtccgaagaccagctggccccacggaaaactctctacagtcttaactgtacagaatggtccctgctaccgcctgccaccgaagagatggtggcccaaagctcggtggtgaagggcagatttatgggcgatccctcatacgagtacgagcatacggagctgcagaaggtcaatgaaggcgagaaagtcttcgaagaggagattgtggtgcaaattaaagaagaaactagactagtgagtgtaattgaccaaatagacaaggccgttgccatcattccccgaggtgcgctgtttaaaacccctttcgggccaacccacgtaaatcggacttttgagggcctgagcctgagtgaggcaaagaagctgtccagttacttccactttcgggagcctgttgagctcaagaacaagacactgctggaaaaggcggatctcgaccctagcctggatttcatggacagcctggagcatgatattcccaaaggtagttggtccatccagatggaacggggtaatgctctcgttgtactgcggtctcttctgtggcccggtttgaccttttaccatgccccaaggaccaagaactacggctacgtgtatgtgggcaccggtgagaaaaacatggacctgcccttcatgttgtag

SEQ ID NO: 244447 - DNA, 2534 bp, Artificial Sequence
  derived and/or modified sequence
ggaggcggcttctcctagcaactcgacgggcgttgagcggagccgctgacctgatggacgccgacagcctcctgctgtctctggagctggcgtccggcagtgggcagggcctcagcccggaccgtcgggcctcgctgctcacgtctcttatgctggttaagcgcgactaccgctatgatcgggttctcttctggggccgcatccttggcctcgtcgccgattactacatcgcgcagggcctgagtgaggaccagctcgcaccgcgcaagacgctctatagcctgaactgcacagagtggagcctcttgccccctgccacagaggagatggtggcgcagtcgtctgtggtgaagggccgcttcatgggggacccatcatacgaatatgaacacactgagctgcagaaggtgaatgaaggtgaaaaagtctttgaagaagaaatagtggtccagatcaaggaagagacccgcttggtgtctgtcattgaccagattgacaaggctgtggccatcatcccccgaggcgccctcttcaagaccccttttggacccacccatgtcaatcggacctttgaaggactgtccttgtctgaggccaagaagctcagctcctacttccatttcagggagcctgttgagctaaagaataagaccttgcttgagaaggctgacctggacccctccctggatttcatggactccttggagcatgacattcccaaagggtcctggagcatccagatggagaggggcaatgccctggtggtgctgcgcagcctgctctggccgggcctcaccttctaccatgctccccgcaccaagaactatggctacgtctacgtgggcactggcgagaagaacatggacttgcccttcatgctatagaatgggagccagcctggatgtttttaaacagagtctaaacatgattttcttaagcttcagtgaacttggcctgcctgttctgtcctatcttcttaactccacctccgtctggttccagattctgaaaggcccactgagccagggagctcatttctaaaccaagtggcagaggggttggaatgtgctaatgaaagagattctagacaacgatgggtggaaatggctgtgggagaaggtgacaaccagggcccctttgaggaacgcagtttcttggattcacacgagagcggcaagtgtgtcaggcagcccaccttggctccctgcagctctcccacagtaaggagctcacagctgtcatgaagaggatgggacctgtttggcccatgaattcaattgactcattggccccatcacaagagatcagtgactcaatgctcagcacccagctggcaatgtgcccaggaccccctgcacttcccaagcagtgagcgcacacccaatgggtaagcccatgaacccagtttatgacactgcgttgggcaaaactcctgtccccagcactgagcatggcctaagccccatagcagctggcaagggacccaactgccctgcctgcctctagctcccagcattgctactgtgcaggccaagggtactgaagttagtcccactgtcccctgtccatgcatgttggagggaccaggccatcgtggtggggtgggacaggagtatagttgtggccaagggcttgtgagtgggcctcctactccccagcacaggtgcaggaggaactctggaagcactgctctctgtcagtgatacagcttccaaggtgttcttgagtagcagacattgtccctcagaaggggtgaccccacgggcatgcgcaccctgttccagcgggggccttttttgtagatgggcttgacggagccaggagcccagcgcgtcaggtacctgtggagggagaacaaagaggtgcctgtgagggctgggggcccaagctggacgtgggagagtggagcactacctcctcaggccaggccacggttgggcaagcaaatcctttcaccagtttccctttcctgaagtgcagggattttcctgggagtaactgctgagcgtcctgtaaacagatgggctgggctcttgctgccgcaagcctgtgtggccaggttcaggcagcccagggccacaagctcccttgatctttgtaaatgtcaatgttggtgtgtgtttgctgaggaaaaggtggcgaagaggctgcctgaagagcagatcattcctctctggcctcagccatggggcgagaagagctgatgtaaggctctggaggaacccattgctcttccccatttggctcactcagctaccccaaccttcagggaactccccagggtactataactggtataagacccctgcccctcacccaacctgtgatgggaatcaaggggtaagggcccgtgggcgcagccctagcctaggaaggttcctgtaaataggaggggggtggggaaagatggctgccgcccatggacctttggcctcctttggggatggccagggccctgatagttcccagaaaagtggctcatgccggctaggattgggttttactctgtccagaataaaacttggatcctgtcc

SEQ ID NO: 244448 - DNA, 831 bp, Artificial Sequence
  derived and/or modified sequence
atggacgccgacagcctgctgctgagcctggagctggccagcggcagcggccagggcctgagccccgacagaagagccagcctgctgaccagcctgatgctggtgaagagagactacagatacgacagagtgctgttctggggcagaatcctgggcctggtggccgactactacatcgcccagggcctgagcgaggaccagctggcccccagaaagaccctgtacagcctgaactgcaccgagtggagcctgctgccccccgccaccgaggagatggtggcccagagcagcgtggtgaagggcagattcatgggcgaccccagctacgagtacgagcacaccgagctgcagaaggtgaacgagggcgagaaggtgttcgaggaggagatcgtggtgcagatcaaggaggagaccagactggtgagcgtgatcgaccagatcgacaaggccgtggccatcatccccagaggcgccctgttcaagacccccttcggccccacccacgtgaacagaaccttcgagggcctgagcctgagcgaggccaagaagctgagcagctacttccacttcagagagcccgtggagctgaagaacaagaccctgctggagaaggccgacctggaccccagcctggacttcatggacagcctggagcacgacatccccaagggcagctggagcatccagatggagagaggcaacgccctggtggtgctgagaagcctgctgtggcccggcctgaccttctaccacgcccccagaaccaagaactacggctacgtgtacgtgggcaccggcgagaagaacatggacctgcccttcatgctgtag

SEQ ID NO: 244449 - protein, 544 aa, Artificial Sequence
  derived and/or modified sequence
MRESQPEAEIPLQDTTAEAFTMLLKYIYTGRATLTDEKEEVLLDFLSLAHKYGFPELEDSTSEYLCTILNIQNVCMTFDVASLYSLPKLTCMCCMFMDRNAQEVLSSEGFLSLSKTALLNIVLRDSFAAPEKDIFLALLNWCKHNSKENHAEIMQAVRLPLMSLTELLNVVRPSGLLSPDAILDAIKVRSESRDMDLNYRGMLIPEENIATMKYGAQVVKGELKSALLDGDTQNYDLDHGFSRHPIDDDCRSGIEIKLGQPSIINHIRILLWDRDSRSYSYFIEVSMDELDWVRVIDHSQYLCRSWQKLYFPARVCRYIRIVGTHNTVNKIFHIVAFECMFTNKTFTLEKGLIVPMENVATIADCASVIEGVSRSRNALLNGDTKNYDWDSGYTCHQLGSGAIVVQLAQPYMIGSIRLLLWDCDDRSYSYYVEVSTNQQQWTMVADRTKVSCKSWQSVTFERQPASFIRIVGTHNTANEVFHCVHFECPEQQSSQKEENSEESGTGDTSLAGQQLDSHALRAPSGSSLPSSPGSNSRSPNRQHQ

SEQ ID NO: 244450 - protein, 354 aa, Artificial Sequence
  derived and/or modified sequence
MDFILEDMDLAANEISIYDKLSETVDLVRQTGHQCGMSEKAIEKFIRQLLEKNEPQRPPPQYPLLIVVYKVLATLGLILLTAYFVIQPFSPLAPEPVLSGAHTWRSLIHHIRLMSLPIAKKYMSENKGVPLHGGDEDRPFPDFDPWWTNDCEQNESEPIPANCTGCAQKHLKVMLLEDAPRKFERLHPLVIKTGKPLLEEEIQHFLCQYPEATEGFSEGFFAKWWRCFPERWFPFPYPWRRPLNRSQMLRELFPVFTHLPFPKDASLNKCSFLHPEPVVGSKMHKMPDLFIIGSGEAMLQLIPPFQCRRHCQSVAMPIEPGDIGYVDTTHWKVYVIARGVQPLVICDGTAFSEL

SEQ ID NO: 244451 - protein, 347 aa, Artificial Sequence
  derived and/or modified sequence
MDLAANEISIYDKLSETVDLVRQTGHQCGMSEKAIEKFIRQLLEKNEPQRPPPQYPLLIVVYKVLATLGLILLTAYFVIQPFSPLAPEPVLSGAHTWRSLIHHIRLMSLPIAKKYMSENKGVPLHGGDEDRPFPDFDPWWTNDCEQNESEPIPANCTGCAQKHLKVMLLEDAPRKFERLHPLVIKTGKPLLEEEIQHFLCQYPEATEGFSEGFFAKWWRCFPERWFPFPYPWRRPLNRSQMLRELFPVFTHLPFPKDASLNKCSFLHPEPVVGSKMHKMPDLFIIGSGEAMLQLIPPFQCRRHCQSVAMPIEPGDIGYVDTTHWKVYVIARGVQPLVICDGTAFSEL

SEQ ID NO: 244452 - protein, 235 aa, Artificial Sequence
  derived and/or modified sequence
MDFILEDMDLAANEISIYDKLSETVDLVRQTGHQCGMSEKAIEKFIRQLLEKNEPQRPPPQYPLLIVVYKVLATLGLILLTAYFVIQPFSPLAPEPVLSGAHTWRSLIHHIRLMSLPIAKKYMSENKGVPLHGGDEDRPFPDFDPWWTNDCEQNESEPIPANCTGCAQKHLKVMLLEDAPRKFERLHPLVIKEIELCTGTASRAENQVERGKIKTKTMKLLSGGWLLSYLPFACM

SEQ ID NO: 244453 - protein, 234 aa, Artificial Sequence
  derived and/or modified sequence
DFILEDMDLAANEISIYDKLSETVDLVRQTGHQCGMSEKAIEKFIRQLLEKNEPQRPPPQYPLLIVVYKVLATLGLILLTAYFVIQPFSPLAPEPVLSGAHTWRSLIHHIRLMSLPIAKKYMSENKGVPLHGGDEDRPFPDFDPWWTNDCEQNESEPIPANCTGCAQKHLKVMLLEDAPRKFERLHPLVIKEIELCTGTASRAENQVERGKIKTKTMKLLSGGWLLSYLPFACM

SEQ ID NO: 244454 - DNA, 1309 bp, Artificial Sequence
  derived and/or modified sequence
gaagcgctggacgagaggaggaattactctagggtacaaggcctcgcccaggagtggggggttgcttccgggtcgcgctcccggaaacaggaagttgcccatcctcctcgcccggcggcagctgtccccgaggcgggaggagcccgaggggcgcgagccccgcatggattttatattggaagacatggatcttgctgccaacgagatcagcatttatgacaaactttcagagactgttgatttggtgagacagaccggccatcagtgtggcatgtcagagaaggcaattgaaaaatttatcagacagctgctggaaaagaatgaacctcagagaccccccccgcagtatcctctccttatagttgtgtataaggttctcgcaaccttgggattaatcttgctcactgcctactttgtgattcaacctttcagcccattagcacctgagccagtgctttctggagctcacacctggcgctcactcatccatcacattaggctgatgtccttgcccattgccaagaagtacatgtcagaaaataagggagttcctctgcatgggggtgatgaagacagaccctttccagactttgacccctggtggacaaacgactgtgagcagaatgagtcagagcccattcctgccaactgcactggctgtgcccagaaacacctgaaggtgatgctcctggaagacgccccaaggaaatttgagaggctccatccactggtgatcaagacgggaaagcccctgttggaggaagagattcagcattttttgtgccagtaccctgaggcgacagaaggcttctctgaagggtttttcgccaagtggtggcgctgctttcctgagcggtggttcccatttccttatccatggaggagacctctgaacagatcacaaatgttacgtgagctttttcctgttttcactcacctgccatttccaaaagatgcctctttaaacaagtgctcctttcttcacccagaacctgttgtggggagtaagatgcataagatgcctgacctatttatcattggcagcggtgaggccatgttgcagctcatccctcccttccagtgccgaagacattgtcagtctgtggccatgccaatagagccaggggatatcggctatgtcgacaccacccactggaaggtctacgttatagccagaggggtccagcctttggtcatctgcgatggaaccgctttctcagaactgtaggaaatagaactgtgcacaggaacagcttccagagccgaaaaccaggttgaaaggggaaaaataaaaacaaaaacgatgaaa

SEQ ID NO: 244455 - DNA, 2565 bp, Artificial Sequence
  derived and/or modified sequence
atgctgcagagggagaggacaacagctccagtaaacaaaaaggtcagggcagacaggagtattatggaactgctccaggactcttgattttcaagcttatggtgtcaggaatgggatctaaagtggagcttctagcgacccccaggagcactgagtgaacatgcaaggtacctgcaggatccacttgtgtctattgatctctcacagcagctggggatcacagaacctgcagattggatcgtctgagaacaccagagaaagagaaagactgtccttgccatccacactacagcaaaactttggagctttaaaccttgggttcataatctcacagctgagaagggtccctccacactcctggaactgtacatccattggaacccttaagggattttatattggaagacatggatcttgctgccaacgagatcagcatttatgacaaactttcagagactgttgatttggtgagacagaccggccatcagtgtggcatgtcagagaaggcaattgaaaaatttatcagacagctgctggaaaagaatgaacctcagagaccccccccgcagtatcctctccttatagttgtgtataaggttctcgcaaccttgggattaatcttgctcactgcctactttgtgattcaacctttcagcccattagcacctgagccagtgctttctggagctcacacctggcgctcactcatccatcacattaggctgatgtccttgcccattgccaagaagtacatgtcagaaaataagggagttcctctgcatgggggtgatgaagacagaccctttccagactttgacccctggtggacaaacgactgtgagcagaatgagtcagagcccattcctgccaactgcactggctgtgcccagaaacacctgaaggtgatgctcctggaagacgccccaaggaaatttgagaggctccatccactggtgatcaagacgggaaagcccctgttggaggaagagattcagcattttttgtgccagtaccctgaggcgacagaaggcttctctgaagggtttttcgccaagtggtggcgctgctttcctgagcggtggttcccatttccttatccatggaggagacctctgaacagatcacaaatgttacgtgagctttttcctgttttcactcacctgccatttccaaaagatgcctctttaaacaagtgctcctttcttcacccagaacctgttgtggggagtaagatgcataagatgcctgacctatttatcattggcagcggtgaggccatgttgcagctcatccctcccttccagtgccgaagacattgtcagtctgtggccatgccaatagagccaggggatatcggctatgtcgacaccacccactggaaggtctacgttatagccagaggggtccagcctttggtcatctgcgatggaaccgctttctcagaactgtaggaaatagaactgtgcacaggaacagcttccagagccgaaaaccaggttgaaaggggaaaaataaaaacaaaaacgatgaaactgctttctgggggttggttacttagttacctgccctttgcatgcatgtgtgaaccagctgtgagctgcaaggcagtggccagagcctcgccctcctgactcttcctgcaggtggctcaggaaggattcagcctggccacttggctaggactctgccagcacccatctgagactgacctcttccgggcctttggacactatgaccttgatgctgcccttcaggcaggaaacagggctggtgcctttcttcacctgcatggccagcttccttccctggcagtggagagggcagccaacaggttctaatgtcagagccatcctttaccaggtgggcctgcttgtccctgtcttgcctgccacatcactctactttttggaaggccatggctgattaaagaagttcttgtagtttcccaagcaaagtggaatctagaaacagtgaaaaaagttcagataactttgaattgcattcaagaagtacacttctttcccattgtccgtggctcttggagtctccgtgatgccaggctagagtctgattatataataattcaaaatggtaactcccaaggtaatgctttcttccatttcatcaggttcttttatccccactgcaccccctccccttctcccttgcctatctggatggcttctcagaagctcggccctagtcctccctgccttggcggggccagagcccactactgctgaggcagcactgctctcgtcagctgtgttgcctttaccaagtgtcttcagagggttatgagttagagtagctggcctggggagagggtgcctccctgggtttgatctttagggtctgactttctgcagagaagatgttttacagatgtgtcaaagctgatgtaatgtggttgggggaggaaatccagacccaaagtgtttgtcagctgggtgtacaactgcctatgtgatcctctgtcttaaaatgatttctgtctgtgctgcgaaacaaagacaaggtgaggtgtttttcttttttgtaataatataaagctgtgtgtttctg

SEQ ID NO: 244456 - DNA, 1400 bp, Artificial Sequence
  derived and/or modified sequence
gaagcgctggacgagaggaggaattactctagggtacaaggcctcgcccaggagtggggggttgcttccgggtcgcgctcccggaaacaggaagttgcccatcctcctcgcccggcggcagctgtccccgaggcgggaggagcccgaggggcgcgagccccgcatgtctatgccactgttagaatcaggctaactcttcagaacttccccctgtagcaaagctcactttggccagagttggaactactttctgcagggattttatattggaagacatggatcttgctgccaacgagatcagcatttatgacaaactttcagagactgttgatttggtgagacagaccggccatcagtgtggcatgtcagagaaggcaattgaaaaatttatcagacagctgctggaaaagaatgaacctcagagaccccccccgcagtatcctctccttatagttgtgtataaggttctcgcaaccttgggattaatcttgctcactgcctactttgtgattcaacctttcagcccattagcacctgagccagtgctttctggagctcacacctggcgctcactcatccatcacattaggctgatgtccttgcccattgccaagaagtacatgtcagaaaataagggagttcctctgcatgggggtgatgaagacagaccctttccagactttgacccctggtggacaaacgactgtgagcagaatgagtcagagcccattcctgccaactgcactggctgtgcccagaaacacctgaaggtgatgctcctggaagacgccccaaggaaatttgagaggctccatccactggtgatcaagacgggaaagcccctgttggaggaagagattcagcattttttgtgccagtaccctgaggcgacagaaggcttctctgaagggtttttcgccaagtggtggcgctgctttcctgagcggtggttcccatttccttatccatggaggagacctctgaacagatcacaaatgttacgtgagctttttcctgttttcactcacctgccatttccaaaagatgcctctttaaacaagtgctcctttcttcacccagaacctgttgtggggagtaagatgcataagatgcctgacctatttatcattggcagcggtgaggccatgttgcagctcatccctcccttccagtgccgaagacattgtcagtctgtggccatgccaatagagccaggggatatcggctatgtcgacaccacccactggaaggtctacgttatagccagaggggtccagcctttggtcatctgcgatggaaccgctttctcagaactgtaggaaatagaactgtgcacaggaacagcttccagagccgaaaaccaggttgaaaggggaaaaataaaaacaaaaacgatgaaa

SEQ ID NO: 244457 - DNA, 821 bp, Artificial Sequence
  derived and/or modified sequence
aggagtggggggttgcttccgggtcgcgctcccggaaacaggaagttgcccatcctcctcgcccggcggcagctgtccccgaggcgggaggagcccgaggggcgcgagccccgcatggattttatattggaagacatggatcttgctgccaacgagatcagcatttatgacaaactttcagagactgttgatttggtgagacagaccggccatcagtgtggcatgtcagagaaggcaattgaaaaatttatcagacagctgctggaaaagaatgaacctcagagaccccccccgcagtatcctctccttatagttgtgtataaggttctcgcaaccttgggattaatcttgctcactgcctactttgtgattcaacctttcagcccattagcacctgagccagtgctttctggagctcacacctggcgctcactcatccatcacattaggctgatgtccttgcccattgccaagaagtacatgtcagaaaataagggagttcctctgcatgggggtgatgaagacagaccctttccagactttgacccctggtggacaaacgactgtgagcagaatgagtcagagcccattcctgccaactgcactggctgtgcccagaaacacctgaaggtgatgctcctggaagacgccccaaggaaatttgagaggctccatccactggtgatcaaggaaatagaactgtgcacaggaacagcttccagagccgaaaaccaggttgaaaggggaaaaataaaaacaaaaacgatgaaactgctttctgggggttggttacttagttacctgccctttgcatgcatgtg

SEQ ID NO: 244458 - DNA, 839 bp, Artificial Sequence
  derived and/or modified sequence
gaggcgggaggagcccgaggggcgcgagccccgcatgaatcattgtagtcaatcattttccagttctcagccgctcagttgtgatcaagggacacgtggtttccgaactgccagctcagaataggaaaataacttgggattttatattggaagacatggatcttgctgccaacgagatcagcatttatgacaaactttcagagactgttgatttggtgagacagaccggccatcagtgtggcatgtcagagaaggcaattgaaaaatttatcagacagctgctggaaaagaatgaacctcagagaccccccccgcagtatcctctccttatagttgtgtataaggttctcgcaaccttgggattaatcttgctcactgcctactttgtgattcaacctttcagcccattagcacctgagccagtgctttctggagctcacacctggcgctcactcatccatcacattaggctgatgtccttgcccattgccaagaagtacatgtcagaaaataagggagttcctctgcatgggggtgatgaagacagaccctttccagactttgacccctggtggacaaacgactgtgagcagaatgagtcagagcccattcctgccaactgcactggctgtgcccagaaacacctgaaggtgatgctcctggaagacgccccaaggaaatttgagaggctccatccactggtgatcaaggaaatagaactgtgcacaggaacagcttccagagccgaaaaccaggttgaaaggggaaaaataaaaacaaaaacgatgaaactgctttctgggggttggttacttagttacctgccctttgcatgcatg

SEQ ID NO: 244459 - DNA, 1065 bp, Artificial Sequence
  derived and/or modified sequence
atggacttcatcctggaggacatggacctggccgccaacgagatcagcatctacgacaagctgagcgagaccgtggacctggtgagacagaccggccaccagtgcggcatgagcgagaaggccatcgagaagttcatcagacagctgctggagaagaacgagccccagagaccccccccccagtaccccctgctgatcgtggtgtacaaggtgctggccaccctgggcctgatcctgctgaccgcctacttcgtgatccagcccttcagccccctggcccccgagcccgtgctgagcggcgcccacacctggagaagcctgatccaccacatcagactgatgagcctgcccatcgccaagaagtacatgagcgagaacaagggcgtgcccctgcacggcggcgacgaggacagacccttccccgacttcgacccctggtggaccaacgactgcgagcagaacgagagcgagcccatccccgccaactgcaccggctgcgcccagaagcacctgaaggtgatgctgctggaggacgcccccagaaagttcgagagactgcaccccctggtgatcaagaccggcaagcccctgctggaggaggagatccagcacttcctgtgccagtaccccgaggccaccgagggcttcagcgagggcttcttcgccaagtggtggagatgcttccccgagagatggttccccttcccctacccctggagaagacccctgaacagaagccagatgctgagagagctgttccccgtgttcacccacctgcccttccccaaggacgccagcctgaacaagtgcagcttcctgcaccccgagcccgtggtgggcagcaagatgcacaagatgcccgacctgttcatcatcggcagcggcgaggccatgctgcagctgatcccccccttccagtgcagaagacactgccagagcgtggccatgcccatcgagcccggcgacatcggctacgtggacaccacccactggaaggtgtacgtgatcgccagaggcgtgcagcccctggtgatctgcgacggcaccgccttcagcgagctgtag

SEQ ID NO: 244460 - DNA, 708 bp, Artificial Sequence
  derived and/or modified sequence
atggacttcatcctggaggacatggacctggccgccaacgagatcagcatctacgacaagctgagcgagaccgtggacctggtgagacagaccggccaccagtgcggcatgagcgagaaggccatcgagaagttcatcagacagctgctggagaagaacgagccccagagaccccccccccagtaccccctgctgatcgtggtgtacaaggtgctggccaccctgggcctgatcctgctgaccgcctacttcgtgatccagcccttcagccccctggcccccgagcccgtgctgagcggcgcccacacctggagaagcctgatccaccacatcagactgatgagcctgcccatcgccaagaagtacatgagcgagaacaagggcgtgcccctgcacggcggcgacgaggacagacccttccccgacttcgacccctggtggaccaacgactgcgagcagaacgagagcgagcccatccccgccaactgcaccggctgcgcccagaagcacctgaaggtgatgctgctggaggacgcccccagaaagttcgagagactgcaccccctggtgatcaaggagatcgagctgtgcaccggcaccgccagcagagccgagaaccaggtggagagaggcaagatcaagaccaagaccatgaagctgctgagcggcggctggctgctgagctacctgcccttcgcctgcatgtag

SEQ ID NO: 244461 - DNA, 705 bp, Artificial Sequence
  derived and/or modified sequence
gacttcatcctggaggacatggacctggccgccaacgagatcagcatctacgacaagctgagcgagaccgtggacctggtgagacagaccggccaccagtgcggcatgagcgagaaggccatcgagaagttcatcagacagctgctggagaagaacgagccccagagaccccccccccagtaccccctgctgatcgtggtgtacaaggtgctggccaccctgggcctgatcctgctgaccgcctacttcgtgatccagcccttcagccccctggcccccgagcccgtgctgagcggcgcccacacctggagaagcctgatccaccacatcagactgatgagcctgcccatcgccaagaagtacatgagcgagaacaagggcgtgcccctgcacggcggcgacgaggacagacccttccccgacttcgacccctggtggaccaacgactgcgagcagaacgagagcgagcccatccccgccaactgcaccggctgcgcccagaagcacctgaaggtgatgctgctggaggacgcccccagaaagttcgagagactgcaccccctggtgatcaaggagatcgagctgtgcaccggcaccgccagcagagccgagaaccaggtggagagaggcaagatcaagaccaagaccatgaagctgctgagcggcggctggctgctgagctacctgcccttcgcctgcatgtag

SEQ ID NO: 244462 - DNA, 1065 bp, Artificial Sequence
  derived and/or modified sequence
atggacttcatattagaagatatggatctggcggctaacgagatctccatttatgataagctgagcgaaacagttgatcttgtgaggcaaaccgggcatcaatgtggtatgtctgagaaggccattgagaaattcattaggcagctactggagaagaacgagccccaacggccaccaccacagtacccgttgttaatcgtggtctacaaggtgctcgccactctcgggttgatcttgctgactgcctactttgtgatccagcctttcagccccctcgcacccgagccagtgctgtctggggcacatacatggcggtccctcatccatcacatccgactcatgtccctgcctatcgctaagaagtatatgagcgagaacaagggcgtgcctctccacggcggtgacgaagaccgaccttttcctgactttgacccctggtggactaacgactgtgaacagaacgaaagcgaaccgatccccgccaactgcacaggatgcgcccagaagcatttaaaagttatgctactcgaggacgcacctagaaagttcgagagactccacccgcttgttatcaaaaccggtaaacccctcctggaagaggagatccagcacttcctgtgtcaatacccggaagccaccgaagggttctcggaaggtttcttcgccaaatggtggagatgctttcccgaacgctggtttccatttccttacccttggagacggccactcaaccgaagccagatgctccgcgaacttttcccagtgtttactcaccttcccttcccaaaggatgcctccttgaacaagtgctcttttcttcatcccgagccagtggtcgggtcaaaaatgcataaaatgccggacctgtttatcatcggatctggagaggccatgctgcaactcatcccaccttttcagtgtaggcgacattgtcagtccgtcgccatgccaattgagcccggagatatcggctacgtggacacgactcattggaaggtgtacgtgattgccagaggagttcagcccttggtcatctgtgatgggacagctttttctgagctctag

SEQ ID NO: 244463 - DNA, 708 bp, Artificial Sequence
  derived and/or modified sequence
atggactttatcctggaggatatggatctcgccgccaacgagatttctatctacgacaaactgagtgagaccgtcgacctcgtgagacagacaggccaccaatgtggtatgtcggaaaaggccatcgagaagtttatcagacagctgttggagaagaatgagccacaacgtcctcctcctcagtatcctttgctcattgtggtttataaagttttggcaactttaggcctcattctgttaaccgcatactttgtgattcagcctttcagccccctcgccccagagcctgttctctctggagcccatacatggcgatccctgattcaccacatcaggttgatgtccctgccaattgccaagaaatacatgagtgaaaacaaaggggtccctttacacggcggggacgaggaccggccatttcccgactttgatccctggtggactaatgactgcgaacaaaatgaaagtgagccaatccctgcaaactgtaccggttgtgcacaaaagcatctgaaagttatgttactggaagacgccccccggaaattcgagcgattgcaccccctcgttattaaagagatcgaactgtgtactggcacggcttcccgggctgagaaccaggtggagcgcggcaagatcaagaccaagaccatgaaactgttgtcaggtggctggcttctctcctatcttcctttcgcttgtatgtag

SEQ ID NO: 244464 - DNA, 705 bp, Artificial Sequence
  derived and/or modified sequence
gactttatcctggaagatatggacttggccgccaatgagatatcaatttacgataagctcagtgagactgtcgacctcgtcaggcagaccggccatcaatgtgggatgtctgagaaagccattgaaaaattcatccgacagcttctcgaaaagaacgagccccaacggccccccccgcaataccccttgctgattgtcgtctataaagtactggccactctcggcctgattctgctgaccgcgtactttgtaatccagcctttttcacccctggccccagaacctgtgctgtcgggagcccatacatggaggagccttattcatcatatccgcctgatgagtctgcctattgctaagaaatacatgagcgaaaacaagggggtgcccctgcacggaggcgacgaggatagaccgttcccagattttgatccatggtggacaaatgactgtgagcaaaacgagtccgagcccatccccgccaactgtaccggttgtgctcagaagcacttgaaggtcatgttgttagaggacgctcctaggaagtttgagagactgcaccccctcgtgattaaggagattgagctttgcacgggtaccgcctcccgagctgagaatcaagtggaacgcgggaagatcaaaacaaaaaccatgaaactgctgtcgggcggctggttactgagttatctcccgttcgcgtgcatgtag

SEQ ID NO: 244465 - DNA, 1065 bp, Artificial Sequence
  derived and/or modified sequence
atggacttcatcctggaggacatggacctggccgccaatgagatcagcatctatgacaagctgtctgagaccgtggacctggtgcggcagacaggccaccagtgtggcatgtctgagaaggccatcgagaagttcatccggcagctgctggagaagaatgagccccagaggcccccaccccagtaccccctgctgattgtggtgtacaaggtgctggccaccctgggcctcatcctgctgacagcctacttcgtcatccagcccttcagccccctggcccctgagcctgtgctgagcggggcccacacctggaggagcctcatccaccacatccggctgatgagcctgcccatcgccaagaagtacatgtctgaaaataaaggagtgcccctgcacggcggagatgaggaccggcccttcccagactttgacccctggtggaccaatgactgtgagcagaatgaaagtgagcccatcccagccaactgcaccggctgtgcccagaagcacctgaaggtgatgctgctggaggatgcccccaggaagtttgagcggctgcaccccctggtgatcaagacaggcaagcccctgctggaggaggagatccagcacttcctgtgccagtacccagaggccacagagggcttcagcgagggcttctttgccaagtggtggcgctgcttccctgagcgctggttccccttcccctacccctggaggcggcccctgaacagaagccagatgctgcgggagctgtttcctgtgttcacccacctgcccttccccaaggatgccagcctgaacaagtgcagcttcctgcaccctgagcctgtggtgggcagcaagatgcacaagatgccagacctcttcatcatcggcagcggggaggccatgctgcagctgatcccccccttccagtgccgccgccactgccagagcgtggccatgcccatcgagcccggggacatcggctacgtggacaccacccactggaaggtgtatgtgattgcccggggcgtgcagcccctggtgatctgtgatggaacagccttcagcgagctgtag

SEQ ID NO: 244466 - DNA, 708 bp, Artificial Sequence
  derived and/or modified sequence
atggacttcatcctggaggacatggacctggccgccaatgagatcagcatctatgacaagctgtctgagaccgtggacctggtgcggcagacaggccaccagtgtggcatgtctgagaaggccatcgagaagttcatccggcagctgctggagaagaatgagccccagaggcccccaccccagtaccccctgctgattgtggtgtacaaggtgctggccaccctgggcctcatcctgctgacagcctacttcgtcatccagcccttcagccccctggcccctgagcctgtgctgagcggggcccacacctggaggagcctcatccaccacatccggctgatgagcctgcccatcgccaagaagtacatgtctgaaaataaaggagtgcccctgcacggcggagatgaggaccggcccttcccagactttgacccctggtggaccaatgactgtgagcagaatgaaagtgagcccatcccagccaactgcaccggctgtgcccagaagcacctgaaggtgatgctgctggaggatgcccccaggaagtttgagcggctgcaccccctggtgatcaaggagattgagctgtgcaccggcacagccagcagagctgagaaccaggtggagcggggcaagatcaagaccaagaccatgaagctgctgagcggcggctggctgctgagctacctgccctttgcctgcatgtag

SEQ ID NO: 244467 - DNA, 705 bp, Artificial Sequence
  derived and/or modified sequence
gacttcatcctggaggacatggacctggccgccaatgagatcagcatctatgacaagctgtctgaaacagtggacctggtgcggcagacaggccaccagtgtggcatgtctgagaaggccatcgagaagttcatccggcagctgctggagaagaatgagccccagaggcccccaccccagtaccccctgctgattgtggtgtacaaggtgctggccaccctgggcctcatcctgctgacagcctactttgtgatccagcccttcagccccctggcccctgagcctgtgctgagcggggcccacacctggaggagcctcatccaccacatccggctgatgagcctgcccatcgccaagaagtacatgtctgagaacaagggcgtgcccctgcatggaggagatgaagatcggcccttcccagactttgacccctggtggaccaatgactgtgagcagaatgaaagtgagcccatcccagccaactgcaccggctgtgcccagaagcacctgaaggtgatgctgctggaggatgcccccaggaagtttgagcggctgcaccccctggtgatcaaggagattgagctgtgcacaggaacagccagcagagctgagaaccaggtggagcggggcaagatcaagaccaagaccatgaagctgctgagcggcggctggctgctgagctacctgccctttgcctgcatgtag

SEQ ID NO: 244468 - DNA, 1065 bp, Artificial Sequence
  derived and/or modified sequence
atggacttcatcctggaggacatggacctggccgccaacgagatctctatctacgacaaacttagtgagacagtagatttggtccgtcagacaggtcatcaatgtggcatgtcagagaaagccattgagaaatttattaggcagctcctggagaagaacgagccacagagacctccaccccagtaccccctgctgatcgtggtgtacaaggttctggccacactggggctgatccttctgactgcatactttgtgatacagccttttagcccgttagctccggagcctgtgctttcaggagcccacacctggcgcagtctcattcaccacatcagactcatgagtctccccatagcaaagaagtatatgtccgaaaataaaggtgtccccctgcatggcggagatgaggatcggcccttccctgactttgacccctggtggaccaacgactgtgagcagaacgaatcagagcctattcctgccaattgtactggttgtgcacaaaagcatctgaaggtgatgctgcttgaggacgcccctcggaagttcgagaggttgcaccccttggtcataaagactggaaaacctttgctggaggaagaaatccagcactttctttgccagtatcccgaggccacggagggcttttccgaggggttttttgccaagtggtggagatgtttcccagaaaggtggtttcccttcccttatccatggcgcagacccctcaatcggtcacagatgctccgggagctgtttcccgtcttcacccacctgccatttcccaaggacgcttccctgaacaagtgttcatttctacatccagagcccgtagtgggatcaaaaatgcacaagatgcctgacctgtttatcattggttcgggagaggccatgcttcagctgattccaccattccaatgtaggagacactgccaaagcgtggccatgcccatagaaccaggagatatcgggtacgtcgacactacgcattggaaagtttacgtgattgcaagaggggtccagccactcgtgatttgtgacggtaccgctttttccgagttatag

SEQ ID NO: 244469 - DNA, 708 bp, Artificial Sequence
  derived and/or modified sequence
atggacttcatcctggaggacatggacctggccgccaacgagatctccatctacgacaagttatccgagactgtagatcttgtacggcagaccggacatcagtgcggaatgagcgaaaaggctattgagaagttcataaggcagctgctagaaaaaaatgagccacagcgcccccccccccagtaccctttgttgatcgttgtctacaaggtcttagccacgctgggcttgatattgctcaccgcctattttgtcatccagcccttttccccacttgcccctgagcctgtcctgtcaggtgctcatacctggagatcactgatacaccatataaggctcatgtccctgccaattgctaaaaagtatatgtcagagaacaagggggttcctctgcacggcggcgatgaggacaggcccttccctgacttcgacccatggtggaccaacgattgcgagcagaatgaatctgagcccatccccgccaactgcaccggatgcgcccagaagcaccttaaggtgatgctgttagaggatgcgccacgcaagtttgagaggttgcatccactcgtgatcaaggagatcgagctttgtactggaaccgcatctcgcgcagagaaccaggtcgagaggggaaagatcaagactaagaccatgaaactcctctcaggcggctggttgctgtcgtatttgcccttcgcatgtatgtag

SEQ ID NO: 244470 - DNA, 705 bp, Artificial Sequence
  derived and/or modified sequence
gacttcatcctggaggacatggacctggccgccaacgagatcagcatttatgacaaacttagcgaaacggtggatcttgtcaggcagacgggtcatcaatgtgggatgtccgaaaaggcaattgagaagtttataagacagctgctcgagaagaacgaaccccaaaggcctccacctcagtatcctcttctgattgtcgtgtacaaagtgctcgccactcttggtctaattctactgactgcatatttcgttattcagccatttagtcccctggcccctgaaccagttctgagcggcgcccacacttggcgatcactcatccatcacatccggctcatgtccctgccgatcgctaaaaaatacatgagtgaaaataaaggcgtgccgttgcacgggggagatgaagataggccatttccggacttcgatccctggtggactaacgactgtgagcagaatgagtctgagcctatcccagctaattgtaccggctgtgcccaaaagcacctcaaagtcatgttgctagaagatgccccgcggaaattcgagcgcctgcatcctctggtgatcaaggagatcgagctctgtaccgggacagcttccagggcggagaatcaagtcgagagaggaaagattaagactaagactatgaaactgctcagcggggggtggctactttcctacttgccttttgcctgcatgtag

SEQ ID NO: 244471 - DNA, 1065 bp, Artificial Sequence
  derived and/or modified sequence
atggatttcattctggaggacatggatctcgctgctaatgagatctcaatctacgataagttgagcgagaccgtggatctagtgagacagactggccatcagtgtggtatgtctgagaaggctatcgagaagtttattaggcagctgctggagaagaatgaacctcaacggccaccacctcagtatcccctccttatcgtggtctataaagttctagctacgctcggactgatcttactgactgcctatttcgtgatccagccatttagtcccctggccccagaacctgtactctctggggctcacacttggcgttcactgattcaccacataagacttatgtccctgccaatcgccaagaaatacatgtctgagaataagggcgtaccccttcacggtggcgatgaggatcgtccattccccgactttgacccctggtggactaatgactgtgagcagaacgagtctgagcctatcccagcaaactgcaccggctgtgcgcagaagcacttgaaagtgatgctcctggaagacgcgcctaggaagttcgaacggctgcatcctttagtaattaagaccggcaagccccttttagaagaggagatccagcatttcctgtgtcagtaccccgaagccacagagggcttctctgagggattcttcgctaagtggtggcgttgctttcccgagcgatggtttccatttccctacccttggagacgaccgcttaacagatcacagatgcttcgcgagctatttcctgtatttacacatttgccatttcctaaggacgcgtccttgaacaagtgttccttcctccacccagaaccagtggtgggatcgaagatgcacaagatgcccgacctttttatcattggctctggggaggcaatgctgcagcttatacctccgttccaatgcaggcgccattgccagagcgtggcgatgcctatagaaccgggtgacataggttacgtagacaccacgcactggaaggtgtacgtgatagccaggggcgtacagcctctggtcatttgtgacgggaccgccttttcagagttgtag

SEQ ID NO: 244472 - DNA, 708 bp, Artificial Sequence
  derived and/or modified sequence
atggactttatcctcgaggacatggatttggccgcaaacgaaatcagcatctatgataagctaagcgagactgtcgatctggtgcggcagaccggccatcagtgtggcatgagtgagaaggccattgaaaagtttatcagacagctgttggaaaaaaacgagccgcagaggcccccacctcaatacccactcctcattgtggtctacaaggtgctcgccaccctcggcttaatattactgaccgcctactttgtgatccagccctttagccctctggccccagagcctgttctttccggtgctcacacctggaggagcctgatacaccatatcaggttgatgagcctgcctattgcaaaaaagtacatgagtgagaacaaaggtgtgcctcttcacggcggagatgaagaccgtccttttccggactttgacccctggtggacaaacgattgtgaacagaatgagtccgaacctattccagccaactgcacgggatgcgcccagaaacatctgaaggttatgctcctggaggacgcaccccgaaagttcgagcggctacaccctttggtaatcaaggagattgagctctgtaccggaacggcaagtagagccgagaatcaggttgaaaggggcaagattaagaccaagactatgaaactactgagcggtggctggctgctttcctacctgcccttcgcgtgcatgtag

SEQ ID NO: 244473 - DNA, 705 bp, Artificial Sequence
  derived and/or modified sequence
gactttattctggaggacatggatcttgctgctaatgaaatttcgatctacgataagctgtcagagacagtggacctggtccggcagaccggccaccaatgtggcatgagcgagaaggcgatcgaaaagttcatacgccagctgttagaaaagaacgaacctcaacggccaccccctcaataccctctccttatcgtggtctacaaggttttagcgacgctgggtctgattctcctcactgcttacttcgtcattcagcccttttcccccctcgcacctgagccagtattgtccggtgctcacacttggcgctcgctgattcatcatataagactgatgtctttacctattgcgaagaaatatatgagtgaaaataaaggcgtgcctctgcacgggggagacgaggacagacccttccccgattttgacccgtggtggactaatgactgtgagcagaacgaaagcgaaccgattcccgcaaattgcacagggtgcgcacagaagcatctgaaagtcatgttattagaagatgctccaagaaagtttgagcggctgcatccattggtgattaaggagatagagctgtgcactggcacggcctctagggccgagaaccaagttgagcgcggtaagattaaaacaaagacaatgaaattactgtcaggtgggtggctgctgtcgtacctgcctttcgcatgtatgtag

SEQ ID NO: 244474 - protein, 473 aa, Artificial Sequence
  derived and/or modified sequence
METPTPLPPVPASPTCNPAPRTIQIEFPQHSSSLLESLNRHRLEGKFCDVSLLVQGRELRAHKAVLAAASPYFHDKLLLGDAPRLTLPSVIEADAFEGLLQLIYSGRLRLPLDALPAHLLVASGLQMWQVVDQCSEILRELETSGGGISARGGNSYHALLSTTSSTGGWCIRSSPFQTPVQSSASTESPASTESPVGGEGSELGEVLQIQVEEEEEEEEDDDDEDQGSATLSQTPQPQRVSGVFPRPHGPHPLPMTATPRKLPEGESAPLELPAPPALPPKIFYIKQEPFEPKEEISGSGTQPGGAKEETKVFSGGDTEGNGELGFLLPSGPGPTSGGGGPSWKPVDLHGNEILSGGGGPGGAGQAVHGPVKLGGTPPADGKRFGCLCGKRFAVKPKRDRHIMLTFSLRPFGCGICNKRFKLKHHLTEHMKTHAGALHACPHCGRRFRVHACFLRHRDLCKGQGWATAHWTYK

SEQ ID NO: 244475 - DNA, 1422 bp, Artificial Sequence
  derived and/or modified sequence
atggagacccccacccccctgccccccgtgcccgccagccccacctgcaaccccgcccccagaaccatccagatcgagttcccccagcacagcagcagcctgctggagagcctgaacagacacagactggagggcaagttctgcgacgtgagcctgctggtgcagggcagagagctgagagcccacaaggccgtgctggccgccgccagcccctacttccacgacaagctgctgctgggcgacgcccccagactgaccctgcccagcgtgatcgaggccgacgccttcgagggcctgctgcagctgatctacagcggcagactgagactgcccctggacgccctgcccgcccacctgctggtggccagcggcctgcagatgtggcaggtggtggaccagtgcagcgagatcctgagagagctggagaccagcggcggcggcatcagcgccagaggcggcaacagctaccacgccctgctgagcaccaccagcagcaccggcggctggtgcatcagaagcagccccttccagacccccgtgcagagcagcgccagcaccgagagccccgccagcaccgagagccccgtgggcggcgagggcagcgagctgggcgaggtgctgcagatccaggtggaggaggaggaggaggaggaggaggacgacgacgacgaggaccagggcagcgccaccctgagccagaccccccagccccagagagtgagcggcgtgttccccagaccccacggcccccaccccctgcccatgaccgccacccccagaaagctgcccgagggcgagagcgcccccctggagctgcccgccccccccgccctgccccccaagatcttctacatcaagcaggagcccttcgagcccaaggaggagatcagcggcagcggcacccagcccggcggcgccaaggaggagaccaaggtgttcagcggcggcgacaccgagggcaacggcgagctgggcttcctgctgcccagcggccccggccccaccagcggcggcggcggccccagctggaagcccgtggacctgcacggcaacgagatcctgagcggcggcggcggccccggcggcgccggccaggccgtgcacggccccgtgaagctgggcggcaccccccccgccgacggcaagagattcggctgcctgtgcggcaagagattcgccgtgaagcccaagagagacagacacatcatgctgaccttcagcctgagacccttcggctgcggcatctgcaacaagagattcaagctgaagcaccacctgaccgagcacatgaagacccacgccggcgccctgcacgcctgcccccactgcggcagaagattcagagtgcacgcctgcttcctgagacacagagacctgtgcaagggccagggctgggccaccgcccactggacctacaagtag

SEQ ID NO: 244476 - DNA, 1422 bp, Artificial Sequence
  derived and/or modified sequence
atggagactcccacacccctgccccccgtaccagcttctccaacatgtaatcccgctccccgcaccatccagatagaattccctcagcactcttcctcgctcctggagtccctgaatcgtcatcggctggaaggaaagttttgcgacgtgtcactgctcgttcagggcagagagttgcgagctcataaggccgtgttagcagcagcctcaccatattttcacgacaagttgctgctgggtgatgctccccgcctgactctgccttcggtgatcgaagctgacgcattcgagggcctcctccagctgatttatagcggacggctccgattgcctctggatgccttgcctgcccacctcctcgtagcaagcgggctacagatgtggcaggtcgttgaccagtgttctgaaatcttgagggaattagagactagcggtggcgggatctcagcacgaggcgggaactcttaccacgctctcctgagcacaacaagctcaacagggggctggtgtatcagatcctccccattccagaccccagtccagagtagcgcatctacagaaagcccggcttccacagagagtcccgtcggaggcgaggggtcagagctgggtgaagtgctgcaaatacaggtagaggaggaggaagaggaggaggaggatgatgatgacgaggaccaaggctccgcgactctgagtcagactcctcaaccccaacgagtctccggagtcttcccacgacctcatggccctcacccgctgccgatgaccgccacccctagaaaactacccgagggtgagtctgcacccctagagctaccagccccccctgcacttccccccaagattttttatatcaagcaggaacctttcgagcctaaggaagaaattagtggttccggcacccaaccaggaggggccaaggaagagacgaaggtgtttagtggaggagacacagagggcaatggggagctgggctttttgctcccgtccggacctggaccgacatctggcggcggcggaccttcctggaagccagtcgatcttcatggcaatgaaatactctctggaggaggaggtcctggcggggcaggacaagccgtccacgggcccgttaaactcgggggaacaccaccggcggacggcaaacgctttggctgcctttgtggcaaacgcttcgctgtgaagcccaagcgcgatagacacattatgctaacattctctttgaggcctttcggctgcggaatctgtaacaagaggttcaaactgaagcaccacttaaccgaacacatgaagacgcacgcaggagcgttgcatgcgtgccctcactgcgggcgccgatttcgggtccacgcctgctttctacgtcatcgggatctctgtaaaggacagggatgggccactgcccactggacatataaatag

SEQ ID NO: 244477 - DNA, 1422 bp, Artificial Sequence
  derived and/or modified sequence
atggagaccccaaccccattaccgccagtgcccgccagtccaacgtgcaaccccgcacctagaaccatccagatagagttccctcaacattccagctctctgctggaaagccttaatagacataggctagagggcaagttctgtgatgtttccctcttggtacaaggacgtgagctcagggcacacaaggcggtgttggccgccgccagcccatacttccatgacaagttgctcctgggtgatgcaccaaggctgacacttccttctgtgatagaggcagacgcctttgaggggctcttgcagctgatatatagcggccggctgagactgcccttggacgcactgccagcacatctgctggttgcatccggtttgcagatgtggcaggtggtagatcagtgttccgaaatcctcagggagttagaaacttccggcggtggcattagcgctaggggcggcaacagttatcatgcgttgcttagcactacctctagtactggcggttggtgcatcagatcatcgccctttcagactccagtccaaagttccgcctccacagaaagcccggctagcacagagtctcccgtgggtggggagggaagcgaactcggcgaagtgcttcagatacaggtcgaggaggaggaagaagaagaggaggacgatgacgatgaagaccaaggttccgcgacactgtcacagaccccacagccgcagagggtaagcggcgtcttccctcggccacatgggccgcacccccttcccatgacagctactccgagaaaactgccagagggcgaatccgctcccctcgagttgcccgcccctcctgctctcccccccaaaatcttctacatcaagcaggaaccatttgagcccaaggaagagattagcggttccgggactcagcctggtggcgccaaggaagagaccaaggtgttctcaggcggcgacacggagggaaacggggagctcggcttcttattgccatccggcccaggacccacctctggcggggggggaccctcctggaaacccgtggatctccatgggaacgagattctcagtgggggcggaggtccagggggtgccgggcaggccgttcacgggccagtgaagctgggagggacaccacccgccgatggaaaacgtttcggatgcttgtgcggtaagcgatttgctgtgaaacccaaaagggacagacacattatgttaactttcagcctgcgtccttttggctgtggaatatgcaataaacggttcaaactgaaacatcatctcaccgagcacatgaaaacccatgcgggggcactgcatgcatgtccccactgcggccgaagatttcgggttcatgcgtgctttctgcggcacagggatctctgtaagggtcagggttgggccactgcacattggacctacaagtag

SEQ ID NO: 244478 - DNA, 1422 bp, Artificial Sequence
  derived and/or modified sequence
atggagacccccacccccctgccccctgtgcctgccagccccacctgcaacccagcccccaggaccatccagatcgagttcccccagcacagcagcagcctgctggagagcctgaacagacaccggctggagggcaagttctgtgatgtgtccctgctggtgcagggccgggagctgcgggcccacaaggctgtgctggccgccgccagcccctacttccatgacaagctgctgctgggagatgccccccggctgaccctgcccagcgtgattgaagcagatgcctttgagggcctgctgcagctgatctacagcggccgcctgcggctgcccctggatgccctgcctgcccacctgctggtggccagcggcctgcagatgtggcaggtggtggaccagtgcagcgagatcctgcgggagctggagaccagcggcggcggcatcagcgcccggggcggcaacagctaccacgccctgctgagcaccaccagcagcactggaggctggtgcatccgcagcagccccttccagacccctgtgcagagcagcgccagcacagagagccctgccagcacagagagccctgtgggcggggagggcagcgagctgggggaggtgctgcagatccaggtggaggaggaggaggaggaggaggaggatgatgatgatgaggaccagggcagcgccaccctgagccagaccccccagccccagagggtgtctggagtcttcccccggccccacggcccccaccccctgcccatgacagccacccccaggaagctgcctgagggggagagcgcccccctggagctgcctgcccccccagccctgccccccaagatcttctacatcaagcaggagccctttgagcccaaggaggagatcagcggcagcggcacccagcctggaggagccaaggaggagaccaaggtgttcagcggcggggacacagagggcaatggagagctgggcttcctgctgcccagcggccctggccccaccagcggcggcggcggccccagctggaagcctgtggacctgcatggaaatgagatcctgagcggcggcggcggccctgggggcgccggccaggccgtgcacggccctgtgaagctgggcggcaccccaccagcagatggcaagcgcttcggctgcctgtgtgggaagagatttgctgtgaagcccaagagggacagacacatcatgctgaccttcagcctgcggcccttcggctgcggcatctgcaacaagcgcttcaagctgaagcaccacctgacagagcacatgaagacccacgccggggccctgcacgcctgcccccactgcggccgccgcttccgggtgcacgcctgcttcctgcggcaccgggacctgtgcaagggccagggctgggccacagcccactggacctacaagtag

SEQ ID NO: 244479 - DNA, 1422 bp, Artificial Sequence
  derived and/or modified sequence
atggagacccccacccccctgccccccgtgcccgccagccccacctgtaatcccgcaccacgtaccatccagattgagttccctcagcattcctctagcctgcttgagagtctgaatcgacatcggctcgaaggtaagttctgtgacgtttcactgctagtgcagggcagggaactgcgcgcccacaaggcagtgctggcagcagcatcaccctacttccacgataaactgctcctgggcgacgcacccagactgacactgccctccgtgattgaggcggacgccttcgagggattactgcagttgatttattctgggcgtctaagactgcccctagatgcattgccggcccacctgctggtcgcaagtggacttcagatgtggcaggtggtcgatcaatgcagtgagattctgcgcgagctggagaccagcggcgggggtatttcggctcgcgggggcaactcttaccatgcgctgctgtccacgacatccagtaccggcgggtggtgcatccggtcctcaccttttcagacacctgtgcagtcctcggcgtctaccgagtcacctgcaagcactgagtcccctgtaggcggcgagggatctgaactgggagaggtgttgcagattcaggtggaggaagaagaggaggaggaggaagatgacgatgatgaggatcaagggtccgccactctctcacagactccccaaccgcaaagagtatctggcgttttcccacggccacacggaccccatcccctgccaatgacagcgacacccagaaagctgcctgagggtgagtccgcccccctagagctccccgctccccccgccttgcctccgaagatcttctatatcaagcaagagccattcgagcccaaggaggagatctctggtagcgggacacagccgggcggtgccaaggaggagactaaagtgtttagcggtggcgacaccgagggcaatggagaactggggtttctgctaccctcgggacccgggcctacgagtggcggggggggacccagctggaaaccagtcgacctgcacgggaacgagattctgagcggcggaggaggacccgggggcgctgggcaagcggtccatggacctgtcaagctcggcggaaccccaccggctgatggtaagcgtttcggctgtttgtgtgggaagcgattcgcagtgaaacctaaaagggatcgccatatcatgctgacattttcactgaggccttttggctgtggcatttgtaataagcggtttaagctgaagcatcaccttaccgaacatatgaagacccacgcgggcgccctgcacgcttgcccgcactgcggccggcgattcagagtacatgcctgctttctccggcatcgagatttgtgtaagggacaaggctgggcaactgcacactggacttataagtag

SEQ ID NO: 244480 - DNA, 1422 bp, Artificial Sequence
  derived and/or modified sequence
atggagacccccacccccctgccccccgtgcccgccagccccacctgcaatccggccccgcgaacaatccagatcgagttcccccagcactcatcttctctgctggaatccctgaaccgccaccgcctggagggcaagttctgcgatgtatcattgctcgtgcaggggagagagttgagagcccacaaagccgtgctggccgctgcctcgccctacttccatgacaaactgctgctcggcgacgcccctcggctgaccttgcctagcgtgatcgaggcagacgcctttgaagggcttctccagctgatctacagcggccgcctccgcttaccccttgatgctttacccgcccacctgctcgtagccagcgggctgcagatgtggcaggtcgtggaccagtgtagcgagatcttaagggaactcgagaccagcggcggaggcatctccgcccgggggggaaactcctatcacgccctcctttcaactacatcttctaccggggggtggtgtatccgctccagcccctttcagactccggtgcagagctccgcgtccacggagagtcctgcgagcacagaatccccagtcggaggggagggatcagaactgggggaggtcctgcaaatccaggtggaagaagaagaggaggaggaggaagacgacgatgacgaggaccagggatccgctacattatcccaaaccccacaaccccagagggtgtcgggggtgtttccgagacctcatgggccccacccccttcctatgaccgcaaccccaaggaaactgcccgagggggagtctgcaccgctggagctgcctgccccaccagctctgcccccgaagattttttatattaagcaggaaccatttgagcctaaagaagagatcagcgggtcagggacacagccagggggcgcgaaggaggagacaaaggttttttccgggggcgacacagagggaaacggggagctgggcttcctccttccatcggggccaggtccaacaagtggcggtggtggccccagctggaaaccagtggatctccatgggaacgagatccttagtgggggcgggggacccggcggggccggacaagcggttcacggccctgtgaagctgggaggtaccccaccggcagacgggaaaaggttcggctgcctgtgcgggaaacggtttgccgttaagccaaagcgcgaccgacatatcatgctgaccttctcccttagaccattcgggtgcgggatctgtaacaagaggttcaagctgaagcaccatcttactgagcacatgaagactcatgctggggcgctgcacgcttgtccccactgcggtcgcagattcagggttcacgcttgtttcctgcgtcaccgggacctgtgtaagggacagggatgggccacagcacactggacatataagtag

SEQ ID NO: 244481 - DNA, 1422 bp, Artificial Sequence
  derived and/or modified sequence
atggagacgcccacccctctgcctcccgtccctgcgtcacctacatgtaacccagctccacggacaatccagatagagttcccacagcattcttcgtctcttcttgagtccctaaatcgccatcgactggagggtaaattttgcgatgtgtcattgcttgtgcagggacgagaactaagggcccataaggccgttctggctgctgcctcgccttactttcacgacaagctactgcttggcgatgccccacgtctaaccctgcccagtgtgattgaggctgatgcctttgagggcctgctccaactcatatactccgggaggctgcgtctgccgttagacgcccttcctgctcatctattggtagccagcggattgcaaatgtggcaggtagttgatcagtgttctgagatcctgcgagagctggaaactagcggtggcggaataagcgctcgcggaggaaatagctaccatgccctgctctccaccacaagttccactggagggtggtgcattcggagcagtccgttccagacaccagtacagagttcagctagtacggaaagcccggcaagtacagaatctcccgtcgggggagagggatctgagctgggagaagttttgcagattcaggtcgaggaggaagaggaagaagaagaagatgacgacgatgaggatcaaggttctgctaccctcagccagacaccgcaaccccagcgcgtgtctggtgttttcccacggcctcatggccctcatccgctcccaatgactgccactccacggaaactgcccgagggcgaatctgcgcctttggagctcccggctcctccggcactgcctcccaagatattctatatcaagcaggaaccgtttgagcctaaagaggagattagcggcagtggtacacagccaggaggcgctaaagaagagactaaagtattcagcggcggagatactgaagggaatggggagctgggctttctgctgccatctggacccggacctacgagcggtggagggggaccctcgtggaaacctgtcgatctgcacgggaacgaaatcctaagtgggggaggcggaccagggggagccggacaggccgttcatggccctgtgaaactgggcggaacacctcccgctgatggcaagcgctttggatgtctgtgcggcaagagattcgccgtcaagccaaagcgcgacagacacatcatgttgacattttcacttaggccttttgggtgtggcatttgcaacaagaggttcaagctcaagcaccatctaacagaacatatgaaaacccacgccggagcactgcatgcgtgcccacattgcggcagacgtttcagagtgcacgcgtgctttttgaggcaccgcgatctgtgtaaagggcaaggatgggctacggcccattggacatacaaatag

SEQ ID NO: 244482 - DNA, 1422 bp, Artificial Sequence
  derived and/or modified sequence
atggaaaccccaaccccccttccacctgtgcccgcatccccaacatgtaacccggcaccccgaaccatccaaattgaattccctcaacactcatcttccttgctggagtctcttaatagacatcgcctagaggggaagttctgtgatgtcagcctgctcgtgcagggaagagaactcagggctcacaaggcagtactggcggctgcctcaccctactttcatgacaaattgcttctgggcgatgcccctcggttaacactcccaagtgtcattgaagccgatgccttcgaggggttgcttcagttgatatacagcggccgtttacggttgccattggacgcattgcctgcccatttgttggtagcttcggggttgcagatgtggcaggttgtggatcagtgcagtgagatactgcgggaattggagacctccggcggtggcattagcgcccgaggcggaaactcataccatgctttgctttctaccaccagcagtacaggtggctggtgcatccgctccagtcccttccagacccccgtgcagtctagtgcaagtacggagagccctgcctctactgagagcccagtgggcggagagggatctgagctcggtgaggttctgcagattcaggtagaggaggaagaagaagaggaggaggacgatgatgatgaggaccagggaagcgcaacgctctcgcaaacaccacagccgcagcgagtctcaggcgtatttccaaggccacacggacctcatcctctccctatgacagctacccctcggaagctacccgagggtgaatcagcacctttggaactgccagccccaccggcattaccaccaaaaatcttctatatcaaacaggagccttttgaaccaaaagaggaaattagcgggagtggcacccagccagggggtgccaaggaagagactaaggtattctctgggggagacactgagggaaacggtgagctcggtttcctcctgccttcaggtccaggccctacgtccggagggggaggcccaagctggaagcctgtggacctccacggaaacgagattttgagcggcggaggcggtccaggaggcgctgggcaggcggttcacggacctgtgaaacttggcggaaccccacctgccgacgggaagagattcggctgtctgtgcggtaaaagatttgcggttaagccaaagagggacagacacattatgttaacattcagccttcgcccttttggctgcggcatctgcaacaagaggttcaaactaaagcaccacctgacagaacacatgaagacacatgccggagctctccacgcttgtcctcattgtggccgaaggtttcgggtgcatgcctgtttccttaggcacagggacctctgcaaggggcaaggatgggcaactgctcactggacatacaagtag

SEQ ID NO: 244483 - DNA, 2716 bp, Artificial Sequence
  derived and/or modified sequence
ttccggtctgggacggagctgtagcggcactgtaactgcgagggcagcgccgcgtgtgtaacggcgggggcgtgtcggcgggaaggacaatcgggccgggactcgcggtgtccgggtgaccgcggcttcccgggagcagacctctgtgggcactgtgaggcggaacggagcggcggggcaggagctgttctgggcagccttcatcccgcgtggagtctacccccaagcccttctcctcttcccaattcttgtcaccttcgaggaggccatggaaaccccaacacctttgccgcctgtacccgcctccccgacctgcaacccagccccacggacaatccagatcgagttcccacagcatagctcgtctctgctggaatctctgaaccgccacaggctagagggaaagttctgtgatgtgtccctcctggtgcagggccgggaacttagggctcataaagcagtgttagctgctgcctctccttacttccatgacaagctgcttctgggggatgcgcctcgtctcactctaccgagtgtcattgaagccgatgccttcgaggggctgctccagctcatttattcagggcgtctccgcctgccactggatgctcttcctgctcatctccttgtggccagtggccttcaaatgtggcaggtagtagatcagtgctcagaaattcttagagaattagaaacttcaggtggtggaatttcagcccgtggaggaaactcctaccatgcccttctttccactacatcctctacaggaggctggtgcattcgctcttcgcctttccagaccccagtacagtcctctgcttctactgaaagccctgcttccactgagagccctgtgggaggggagggaagtgaactgggagaagtgctgcaaattcaggtggaagaagaagaggaggaggaggaagatgatgatgatgaggaccaggggtcagccacactctctcagactcctcagccccagagagtatcaggggtttttccccgtcctcatggaccccacccactgcccatgactgctactccccgaaagcttccagagggtgagagtgcaccacttgagcttcctgcccctcctgcactgccccccaaaatcttctacattaagcaggaacccttcgagcctaaggaggagatatcaggaagcggaactcagcctggaggagcaaaggaggaaaccaaagtgttttctggaggggacactgaagggaatggggagctagggttcttgttgccttcagggccagggccaacatctgggggagggggtccatcctggaaaccagtggatcttcatgggaatgaaatcctgtcagggggtggaggacctgggggagcaggccaggccgtgcatgggcctgtgaagctaggggggacaccccctgcagatggaaaacgctttggttgcctgtgtgggaagcggtttgcagtgaagccaaagcgtgaccggcacatcatgctgaccttcagccttcggccttttggctgtggcatctgcaacaagcgcttcaagctgaagcaccatctgacagagcacatgaagacccatgctggagccctgcatgcctgtccccactgtggccgtcggttccgagtccatgcctgttttctccgccaccgggacctatgcaagggccagggctgggccactgcccactggacttacaagtgactgctgaggctatacactagcttctagaacaagataaccactgctgctgatggatacttttccctcactgccatggcacaccagtcatggatcttgtaatcatgccaagagaatagatacattatggacctcttgttcttagatatgggcctctcagcctggcagatgtggaaactcaaatttctcgtcccactccaggttttggctagccaaccctgcaggaaagtggtttataggccattcatacttaagttgatcacttgcccatggtggacatttttgtggtggtgatgtccattaaggaaaccagattttcaattatttagtgagagaagagttagagcaaaagacagtggtaaatgttttattccgtctccatgaggaattgaaggagttggtctccacctagagatacatttgatttacagcttaagtaattcagaggctaagctctaagcttttttctctcattgctggaatgatttaagcagaagtccttttgtgtacttttaaaattgtatctttccaggagcccctcagattgtaccttgctttctcaccaatagacaccttcccgacacttttttaatgttgtagctgagcactttaacaagttgagcattccatgtttcattcttagaaccttctttaatagagggtcttccctcaacagcctgtgcctctggtctacctttgaccaccactgataactaatatattggtcacaatgactggaatgtgactagtgatctcaggagatggcactgtcctaaagtgctgtcagggtggcaccactgctctctgaacaacttaccttggtcagagggactcaggtttgggacagcacaagctgaaggctggagagtaacttgcatagtaggaccatacctcttcctttcccatcccacccacatatgatagacagcccctctgttgagatatggaggggacagatactggaatcgggggtgggacttgcagttacttaaaattttttaataaactgtgccctgaaacctaaactga

SEQ ID NO: 244484 - DNA, 2716 bp, Artificial Sequence
  derived and/or modified sequence
ttccggtctgggacggagctgtagcggcactgtaactgcgagggcagcgccgcgtgtgtaacggcgggggcgtgtcggcgggaaggacaatcgggccgggactcgcggtgtccgggtgaccgcggcttcccgggagcagacctctgtgggcactgtgaggcggaacggagcggcggggcaggagctgttctgggcagccttcatcccgcgtggagtctacccccaagcccttctcctcttcccaattcttgtcaccttcgaggaggccatggaaaccccaacacctttgccgcctgtacccgcctccccgacctgcaacccagccccacggacaatccagatcgagttcccacagcatagctcgtcgctgctggaatctctgaaccgccacaggctagagggaaagttctgtgatgtgtccctcctggtgcagggccgggaacttagggctcataaagcagtgttagctgctgcctctccttacttccatgacaagctgcttctgggggatgcgcctcgtctcactctaccgagtgtcattgaagccgatgccttcgaggggctgctccagctcatttattcagggcgtctccgcctgccactggatgctcttcctgctcatctccttgtggccagtggccttcaaatgtggcaggtagtagatcagtgctcagaaattcttagagaattagaaacttcaggtggtggaatttcagcccgtggaggaaactcctaccatgcccttctttccactacatcctctacaggaggctggtgcattcgctcttcgcctttccagaccccagtacagtcctctgcttctactgaaagccctgcttccactgagagccctgtgggaggggagggaagtgaactgggagaagtgctgcaaattcaggtggaagaagaagaggaggaggaggaagatgatgatgatgaggaccaggggtcagccacactctctcagactcctcagccccagagagtatcaggggtttttccccgtcctcatggaccccacccactgcccatgactgctactccccgaaagcttccagagggtgagagtgcaccacttgagcttcctgcccctcctgcactgccccccaaaatcttctacattaagcaggaacccttcgagcctaaggaggagatatcaggaagcggaactcagcctggaggagcaaaggaggaaaccaaagtgttttctggaggggacactgaagggaatggggagctagggttcttgttgccttcagggccagggccaacatctgggggagggggtccatcctggaaaccagtggatcttcatgggaatgaaatcctgtcagggggtggaggacctgggggagcaggccaggccgtgcatgggcctgtgaagctaggggggacaccccctgcagatggaaaacgctttggttgcctgtgtgggaagcggtttgcagtgaagccaaagcgtgaccggcacatcatgctgaccttcagccttcggccttttggctgtggcatctgcaacaagcgcttcaagctgaagcaccatctgacagagcacatgaagacccatgctggagccctgcatgcctgtccccactgtggccgtcggttccgagtccatgcctgttttctccgccaccgggacctatgcaagggccagggctgggccactgcccactggacttacaagtgactgctgaggctatacactagcttctagaacaagataaccactgctgctgatggatacttttccctcactgccatggcacaccagtcatggatcttgtaatcatgccaagagaatagatacattatggacctcttgttcttagatatgggcctctcagcctggcagatgtggaaactcaaatttctcgtcccactccaggttttggctagccaaccctgcaggaaagtggtttataggccattcatacttaagttgatcacttgcccatggtggacatttttgtggtggtgatgtccattaaggaaaccagattttcaattatttagtgagagaagagttagagcaaaagacagtggtaaatgttttattccgtctccatgaggaattgaaggagttggtctccacctagagatacatttgatttacagcttaagtaattcagaggctaagctctaagcttttttctctcattgctggaatgatttaagcagaagtccttttgtgtacttttaaaattgtatctttccaggagcccctcagattgtaccttgctttctcaccaatagacaccttcccgacacttttttaatgttgtagctgagcactttaacaagttgagcattccatgtttcattcttagaaccttctttaatagagggtcttccctcaacagcctgtgcctctggtctacctttgaccaccactgataactaatatattggtcacaatgactggaatgtgactagtgatctcaggagatggcactgtcctaaagtgctgtcagggtggcaccactgctctctgaacaacttaccttggtcagagggactcaggtttgggacagcacaagctgaaggctggagagtaacttgcatagtaggaccatacctcttcctttcccatcccacccacatatgatagacagcccctctgttgagatatggaggggacagatactggaatcgggggtgggacttgcagttacttaaaattttttaataaactgtgccctgaaacctaaactga

SEQ ID NO: 244485 - protein, 263 aa, Artificial Sequence
  derived and/or modified sequence
HHWGGNYYVDSFLLGADAADELSVGMRRGPWPPRQAATLAEHPDFSPCSFQSKATVFGASWNPVHRAPTLYPVYHHHHHHPYVHPQAPVAAAAPDGRYMRSWLEPTPGALSFAGLPSSRPYGIKPEPLSARRGDCPTLDTHTLSLTDYACGSPPVDREKQPSEGAFSENNAENESGGDKPPIDPNNPAANWLHARSTRKKRCPYTKHQTLELEKEFLFNMYLTRDRRYEVARLLNLTERQVKIWFQNRRMKMKKINKDRAKDE

SEQ ID NO: 244486 - protein, 272 aa, Artificial Sequence
  derived and/or modified sequence
MATTGALGNYYVDSFLLGADAADELSVGRYAPGTLGQPPRQAATLAEHPDFSPCSFQSKATVFGASWNPVHAAGANAVPAAVYHHHHHHPYVHPQAPVAAAAPDGRYMRSWLEPTPGALSFAGLPSSRPYGIKPEPLSARRGDCPTLDTHTLSLTDYACGSPPVDREKQPSEGAFSENNAENESGGDKPPIDPNNPAANWLHARSTRKKRCPYTKHQTLELEKEFLFNMYLTRDRRYEVARLLNLTERQVKIWFQNRRMKMKKINKDRAKDE

SEQ ID NO: 244487 - protein, 196 aa, Artificial Sequence
  derived and/or modified sequence
MAGFSPWRRRQRRRRRRRRARQSRAAPELVGDLGSFLLLGSTFLSTARHCFITSVEIVSRYLCARGSGRAGHHGPGRARPAVATSAFPAQEPRVFLRSALPAGRLSPSTTHLHLVTADNPAANWLHARSTRKKRCPYTKHQTLELEKEFLFNMYLTRDRRYEVARLLNLTERQVKIWFQNRRMKMKKINKDRAKDE

SEQ ID NO: 244488 - DNA, 792 bp, Artificial Sequence
  derived and/or modified sequence
caccactgggggggtaattattacgtagactcttttctgctgggcgccgatgcagcagatgaattatcagtgggcatgcgacgagggccctggccgcctagacaggccgccacgctggccgagcatcccgatttttctccttgctcctttcaatccaaggccaccgtgtttggcgcaagctggaatcccgtgcaccgagccccgaccctctaccctgtctaccaccatcatcaccatcatccctacgtacatccgcaggcccccgtcgccgccgctgcgccagacggccgatacatgcgatcttggctcgagccaacccctggcgctcttagtttcgcggggctacccagcagccggccatatggcattaagcctgaacccctgtccgcacggcgcggagactgtcctaccctggatacccatacactgagcctcaccgactatgcctgtggctccccacccgtggaccgtgaaaaacagccgtccgaaggggcgttcagcgaaaataatgccgaaaacgaaagcggaggcgacaagccacccattgaccccaacaaccccgccgccaattggctccatgctcggtccactagaaagaaaaggtgcccctataccaagcatcagacgctggagctcgagaaagagttcttattcaacatgtacctgacgcgagataggcgttacgaagtggcacgactgctcaatctaaccgagcggcaagtcaaaatttggttccagaaccgccgtatgaagatgaagaaaattaataaggaccgcgcgaaggacgaatag

SEQ ID NO: 244489 - DNA, 819 bp, Artificial Sequence
  derived and/or modified sequence
atggcgacaacaggagcgctgggtaactattatgtcgatagcttcttattaggagctgacgccgcagacgaactgagtgtcggtagatatgctcccggcactttggggcagcccccacgacaagccgccaccctggctgagcatccagatttttctccctgctcctttcagagtaaggccactgtttttggtgcatcgtggaaccccgtgcacgctgcgggtgccaatgccgttcctgctgcagtctatcaccaccaccaccaccacccctacgtgcacccccaggctcccgtagcggcagccgcgcccgacgggagatatatgcgctcgtggctggagcctacccctggagcactgagtttcgcgggattgccctcttcacgcccttacggcataaagccggaaccactctcggcacgccggggagattgtcctacacttgacacccacaccctgagtcttaccgactatgcatgtggctctcctccagtggacagagaaaagcaacccagtgagggcgccttttcagagaacaacgccgagaacgaatctggcggtgacaagcctccaattgaccccaacaaccctgctgccaactggctgcatgctcggagcacacgcaaaaaacggtgtccttacaccaaacatcagactctagagttagaaaaggagttcttgtttaatatgtacctgacccgtgataggaggtatgaagtggcccgccttctcaacctgactgagagacaagttaagatatggttccagaatcgccggatgaaaatgaagaagattaataaggacagggctaaggacgagtag

SEQ ID NO: 244490 - DNA, 591 bp, Artificial Sequence
  derived and/or modified sequence
atggcaggattctccccttggagacggagacaacgtagaagaagacggcgccgaagggcacgccagtcaagagccgcaccagaacttgtgggagacttggggtcctttctcctgctgggcagcacgtttctatctactgctcggcactgcttcattacgtcagtcgagatcgtatcccgatatctgtgtgcacggggttccggtcgtgctggccatcacggtcccggacgcgctagacccgctgttgcaacatccgccttccccgcgcaggaacctcgcgtgtttctcagatcagctctacctgccgggagactgagcccctccaccactcatttacacctggttaccgctgataaccccgccgcgaattggctccacgctcgctctactagaaaaaaaagatgcccttacactaagcaccagactttggagttggaaaaagaattcctgtttaacatgtacctgacaagagacaggcggtatgaagtagccaggctcttgaacttaaccgagcggcaggtgaaaatatggtttcagaatagaagaatgaagatgaagaagatcaacaaagatcgggctaaggacgagtag

SEQ ID NO: 244491 - DNA, 1956 bp, Artificial Sequence
  derived and/or modified sequence
caccactggggcggcaactactacgtggactcgttcctgctgggcgccgacgccgcggatgagctgagcgttggcatgcgccggggaccctggcctccccggcaggcggcgacgctggccgagcaccccgacttcagcccgtgcagcttccagtccaaggcgacggtgtttggcgcctcgtggaacccagtgcaccgggcgccaacgctgtacccggtgtaccaccaccatcaccaccacccctacgtgcacccccaggcgcccgtggcggcggcggcgccggacggcaggtacatgcgctcctggctggagcccacgcccggtgcgctctccttcgcgggcttgccctccagccggccttatggcattaaacctgaaccgctgtcggccagaaggggtgactgtcccacgcttgacactcacactttgtccctgactgactatgcttgtggttctcctccagttgatagagaaaaacaacccagcgaaggcgccttctctgaaaacaatgctgagaatgagagcggcggagacaagccccccatcgatcccaataacccagcagccaactggcttcatgcgcgctccactcggaaaaagcggtgcccctatacaaaacaccagaccctggaactggagaaagagtttctgttcaacatgtacctcaccagggaccgcaggtacgaggtggctcgactgctcaacctcaccgagaggcaggtcaagatctggttccagaaccgcaggatgaaaatgaagaaaatcaacaaagaccgagcaaaagacgagtgatgccatttgggcttatttagaaaaaagggtaagctagagagaaaaagaaagaactgtccgtcccccttccgccttctcccttctctcacccccaccctagcctccaccatccccgcacaaagcggctctaaacctcaggccacatcttttccaaggcaaaccctgttcaggctggctcgtaggcctgccgctttgatggaggaggtattgtaagctttccattttctataagaaaaaggaaaagttgaggggggggcattagtgctgatagctgtgtgtgttagcttgtatatatatttttaaaaatctacctgttcctgacttaaaacaaaaggaaagaaactacctttttataatgcacaactgttgatggtaggctgtatagtttttagtctgtgtagttaatttaatttgcagtttgtgcggcagattgctctgccaagatacttgaacactgtgttttattgtggtaattatgttttgtgattcaaacttctgtgtactgggtgatgcacccattgtgattgtggaagatagaattcaatttgaactcaggttgtttatgaggggaaaaaaacagttgcatagagtatagctctgtagtggaatatgtcttctgtataactaggctgttaacctatgattgtaaagtagctgtaagaatttcccagtgaaataaaaaaaaattttaagtgttctcggggatgcatagattcatcattttctccaccttaaaaatgcgggcatttaagtctgtccattatctatatagtcctgtcttgtctattgtatatataatctatatgattaaagaaaatatgcataatcagacaagcttgaatattgtttttgcaccagacgaacagtgaggaaattcggagctatacatatgtgcagaaggttactacctagggtttatgcttaattttaattggaggaaatgaatgctgattgtaacggagttaattttattgataataaattatacactatgaaaccgccattgggctactgtagatttgtatccttgatgaatctggggtttccatcagactgaacttacactgtatattttgcaatagttacctcaaggcctactgaccaaattgttgtgttgagatgatatttaactttttgccaaataaaatatattgattcttttct

SEQ ID NO: 244492 - DNA, 2037 bp, Artificial Sequence
  derived and/or modified sequence
agtttcataatttccgtgggtcgggccgggcgggccaggcgctgggcacggtgatggccaccactggggccctgggcaactactacgtggactcgttcctgctgggcgccgacgccgcggatgagctgagcgttggccgctatgcgccggggaccctgggccagcctccccggcaggcggcgacgctggccgagcaccccgacttcagcccgtgcagcttccagtccaaggcgacggtgtttggcgcctcgtggaacccagtgcacgcggcgggcgccaacgctgtacccgctgcggtgtaccaccaccatcaccaccacccctacgtgcacccccaggcgcccgtggcggcggcggcgccggacggcaggtacatgcgctcctggctggagcccacgcccggtgcgctctccttcgcgggcttgccctccagccggccttatggcattaaacctgaaccgctgtcggccagaaggggtgactgtcccacgcttgacactcacactttgtccctgactgactatgcttgtggttctcctccagttgatagagaaaaacaacccagcgaaggcgccttctctgaaaacaatgctgagaatgagagcggcggagacaagccccccatcgatcccaataacccagcagccaactggcttcatgcgcgctccactcggaaaaagcggtgcccctatacaaaacaccagaccctggaactggagaaagagtttctgttcaacatgtacctcaccagggaccgcaggtacgaggtggctcgactgctcaacctcaccgagaggcaggtcaagatctggttccagaaccgcaggatgaaaatgaagaaaatcaacaaagaccgagcaaaagacgagtgatgccatttgggcttatttagaaaaaagggtaagctagagagaaaaagaaagaactgtccgtcccccttccgccttctcccttctctcacccccaccctagcctccaccatccccgcacaaagcggctctaaacctcaggccacatcttttccaaggcaaaccctgttcaggctggctcgtaggcctgccgctttgatggaggaggtattgtaagctttccattttctataagaaaaaggaaaagttgaggggggggcattagtgctgatagctgtgtgtgttagcttgtatatatatttttaaaaatctacctgttcctgacttaaaacaaaaggaaagaaactacctttttataatgcacaactgttgatggtaggctgtatagtttttagtctgtgtagttaatttaatttgcagtttgtgcggcagattgctctgccaagatacttgaacactgtgttttattgtggtaattatgttttgtgattcaaacttctgtgtactgggtgatgcacccattgtgattgtggaagatagaattcaatttgaactcaggttgtttatgaggggaaaaaaacagttgcatagagtatagctctgtagtggaatatgtcttctgtataactaggctgttaacctatgattgtaaagtagctgtaagaatttcccagtgaaataaaaaaaaattttaagtgttctcggggatgcatagattcatcattttctccaccttaaaaatgcgggcatttaagtctgtccattatctatatagtcctgtcttgtctattgtatatataatctatatgattaaagaaaatatgcataatcagacaagcttgaatattgtttttgcaccagacgaacagtgaggaaattcggagctatacatatgtgcagaaggttactacctagggtttatgcttaattttaattggaggaaatgaatgctgattgtaacggagttaattttattgataataaattatacactatgaaaccgccattgggctactgtagatttgtatccttgatgaatctggggtttccatcagactgaacttacactgtatattttgcaatagttacctcaaggcctactgaccaaattgttgtgttgagatgatatttaactttttgccaaataaaatatattgattcttttcta

SEQ ID NO: 244493 - DNA, 1755 bp, Artificial Sequence
  derived and/or modified sequence
atggcagggttctctccttggcggcggcggcagcggcggaggcggcggcggcggcgggcgaggcagtcgcgggcagcaccagaactggtcggtgatttaggtagtttcctgttgttgggatccacctttctctcgacagcacgacactgcttcattacttcagttgaaatcgtctccaggtacctctgcgcgcgggggtcgggccgggcggggcatcacggccctggtcgtgccaggcctgcggtggcaacctcggctttccctgctcaggagcctcgtgtctttctccgcagcgctttgccagccggccggctttccccttccaccacacacctccacctggtcacagcagataacccagcagccaactggcttcatgcgcgctccactcggaaaaagcggtgcccctatacaaaacaccagaccctggaactggagaaagagtttctgttcaacatgtacctcaccagggaccgcaggtacgaggtggctcgactgctcaacctcaccgagaggcaggtcaagatctggttccagaaccgcaggatgaaaatgaagaaaatcaacaaagaccgagcaaaagacgagtgatgccatttgggcttatttagaaaaaagggtaagctagagagaaaaagaaagaactgtccgtcccccttccgccttctcccttctctcacccccaccctagcctccaccatccccgcacaaagcggctctaaacctcaggccacatcttttccaaggcaaaccctgttcaggctggctcgtaggcctgccgctttgatggaggaggtattgtaagctttccattttctataagaaaaaggaaaagttgaggggggggcattagtgctgatagctgtgtgtgttagcttgtatatatatttttaaaaatctacctgttcctgacttaaaacaaaaggaaagaaactacctttttataatgcacaactgttgatggtaggctgtatagtttttagtctgtgtagttaatttaatttgcagtttgtgcggcagattgctctgccaagatacttgaacactgtgttttattgtggtaattatgttttgtgattcaaacttctgtgtactgggtgatgcacccattgtgattgtggaagatagaattcaatttgaactcaggttgtttatgaggggaaaaaaacagttgcatagagtatagctctgtagtggaatatgtcttctgtataactaggctgttaacctatgattgtaaagtagctgtaagaatttcccagtgaaataaaaaaaaattttaagtgttctcggggatgcatagattcatcattttctccaccttaaaaatgcgggcatttaagtctgtccattatctatatagtcctgtcttgtctattgtatatataatctatatgattaaagaaaatatgcataatcagacaagcttgaatattgtttttgcaccagacgaacagtgaggaaattcggagctatacatatgtgcagaaggttactacctagggtttatgcttaattttaattggaggaaatgaatgctgattgtaacggagttaattttattgataataaattatacactatgaaaccgccattgggctactgtagatttgtatccttgatgaatctggggtttccatcagactgaacttacactgtatattttgcaatagttacctcaaggcctactgaccaaattgttgtgttgagatgatatttaactttttgccaaataaaatatattgattcttttct

SEQ ID NO: 244494 - DNA, 792 bp, Artificial Sequence
  derived and/or modified sequence
caccactggggcggcaactactacgtggacagcttcctgctgggcgcagatgctgctgatgagctgtctgtgggcatgagaagaggcccctggccaccccggcaggccgccaccctggccgagcacccagacttcagcccctgcagcttccagagcaaggccaccgtgtttggagcctcctggaaccctgtgcaccgggcccccaccctgtaccctgtgtaccaccaccaccaccaccacccctacgtgcacccccaggcccctgtggccgccgccgccccagatggccgctacatgaggtcctggctggagcccacccctggggccctgagctttgctggcctgcccagcagccggccctacggcatcaagccagagcccctgagcgccaggagaggagactgccccaccctggacacccacaccctgagcctgacagattatgcctgtggcagcccccctgtggaccgggagaagcagcccagcgagggcgccttcagcgagaacaatgcagaaaatgaaagtggaggagacaagccacccatcgaccccaacaacccagctgccaactggctgcacgcccggagcaccaggaagaagcgctgcccctacaccaagcaccagaccctggagctggagaaggagttcctgttcaacatgtacctgacccgggaccggcgctatgaggtggcccggctgctgaacctgacagagcggcaggtgaagatctggttccagaacagaaggatgaagatgaagaagatcaacaaggaccgggccaaggatgaatag

SEQ ID NO: 244495 - DNA, 819 bp, Artificial Sequence
  derived and/or modified sequence
atggccaccaccggggccctgggcaactactacgtggacagcttcctgctgggcgcagatgctgctgatgagctgtctgtgggccgctatgcccctggcaccctgggccagcccccccggcaggccgccaccctggccgagcacccagacttcagcccctgcagcttccagagcaaggccaccgtgtttggagcctcctggaaccctgtgcacgccgccggggccaatgctgtgcctgctgctgtgtaccaccaccaccaccaccacccctacgtgcacccccaggcccctgtggccgctgctgccccagatggccgctacatgaggtcctggctggagcccacccctggggccctgagctttgctggcctgcccagcagccggccctacggcatcaagccagagcccctgagcgcccggcggggggactgccccaccctggacacccacaccctgagcctgacagattatgcctgtggcagcccccctgtggaccgggagaagcagcccagcgagggcgccttctctgaaaataatgcagaaaatgaaagtggaggagacaagccacccatcgaccccaacaacccagctgccaactggctgcacgcccggagcaccaggaagaagcgctgcccctacaccaagcaccagaccctggagctggagaaggagttcctgttcaacatgtacctgacccgggacagaagatatgaggtggcccggctgctgaacctgacagagcggcaggtgaagatctggttccagaacagaaggatgaagatgaagaagatcaacaaggaccgggccaaggatgaatag

SEQ ID NO: 244496 - DNA, 591 bp, Artificial Sequence
  derived and/or modified sequence
atggccggcttcagcccctggaggcggcggcagaggagaagaagaagaagaagaagagcccggcagagcagagctgcccctgagctggtgggggacctgggcagcttcctgctgctgggcagcaccttcctgagcacagcccggcactgcttcatcacctctgtggagatcgtgagccgctacctgtgtgcccggggcagcggccgggccggccaccacggccctggccgggcccggcctgctgtggccaccagcgccttccctgcccaggagcccagggtcttcctgcggagcgccctgcctgctggccgcctgagccccagcaccacccacctgcacctggtgacagctgacaacccagctgccaactggctgcacgcccggagcaccaggaagaagcgctgcccctacaccaagcaccagaccctggagctggagaaggagttcctgttcaacatgtacctgacccgggacagaagatatgaggtggcccggctgctgaacctgacagagcggcaggtgaagatctggttccagaacagaaggatgaagatgaagaagatcaacaaggaccgggccaaggatgaatag

SEQ ID NO: 244497 - DNA, 792 bp, Artificial Sequence
  derived and/or modified sequence
caccactggggcggcaactactacgtggacagcttcctgctgggcgcagatgccgctgatgagctttctgtgggcatgaggagaggaccttggccccccaggcaggccgcaacattagcagagcacccggacttcagtccatgctctttccagagtaaagctaccgtatttggggcctcctggaacccagtccatagagcgccaacgctgtatcccgtttaccaccaccatcatcaccatccttatgtgcacccccaagccccggtggcggccgcagcccctgacggccgttacatgagatcttggcttgaacctacccccggtgcattgtccttcgcaggcctcccatcctctaggccatacgggattaagccagagcccctgtcagctcggcggggagactgccccactttggacactcatacgctctccctaaccgattacgcctgcggatccccacccgtagaccgcgagaaacaaccctccgaaggagcgttctccgaaaacaatgctgaaaatgagtctgggggcgacaagccccccattgaccccaacaatccagcagcgaattggcttcatgccaggtccacccgaaagaagaggtgtccatacactaaacatcagacattggaactcgagaaggaatttcttttcaacatgtacctgacgagagacaggcgatacgaggtcgcaaggcttctgaacctgaccgaaaggcaggtcaagatttggttccagaaccgaaggatgaaaatgaaaaaaattaataaggatcgcgccaaggacgagtag

SEQ ID NO: 244498 - DNA, 819 bp, Artificial Sequence
  derived and/or modified sequence
atggccaccaccggcgccctgggcaactactacgtggacagcttcctactgggagctgatgccgccgatgaactgtctgtgggacgctacgcccctggaacgctggggcaaccaccacgacaggcagccaccctggcagagcatcccgacttctcaccctgctccttccaatcaaaggccactgttttcggggcctcctggaatcctgtacatgccgctggcgctaacgctgttcctgctgcggtctaccatcaccatcatcatcatccatacgtgcacccccaggcacctgttgctgcagcggctccagacggaagatacatgagaagctggttggagccaacaccgggagcactatcctttgcagggctgccatccagcagaccctatggaataaagcccgaacccttatccgcccggcgcggagactgtccaaccctcgatacccataccctttcactgaccgattacgcctgtggaagcccacctgtcgaccgggaaaagcagcctagcgagggtgctttctctgagaataatgccgagaatgagtcagggggcgataagcctcctatagatcctaataacccggccgcaaactggctgcacgccaggtcgactaggaagaaacggtgtccctacacaaaacatcagactcttgaactggagaaagagtttctgtttaacatgtatctgacccgcgacaggagatacgaggtcgcgagactgttgaaccttacagagagacaggtcaaaatttggttccagaatcgacgcatgaagatgaagaagattaataaagatcgggccaaggacgagtag

SEQ ID NO: 244499 - DNA, 591 bp, Artificial Sequence
  derived and/or modified sequence
atggccggcttcagcccctggcggcggcggcagcggcggcggcggcgaaggcgacgcgccaggcagtcgcgcgcagctccggaactcgtaggggatctgggcagctttttactcctcggaagcacctttcttagcacagcaaggcactgtttcattacctccgttgagattgtgagtaggtacctttgtgcacgcgggtcaggtcgagctggacatcacggacccgggcgcgcccggccagccgtggccacgagcgcttttccagctcaggagcccagagtctttctgagaagtgccctgccagccggccgcctctcacctagcactacacatctgcacctcgtgaccgctgataatccagcagccaactggctgcatgctcggagcacccgcaagaagcgttgcccatacaccaagcatcagacgctggagctggagaaggagttcctgttcaatatgtatttaactcgtgacagaaggtatgaggttgcacgtttgctaaaccttactgagcggcaggtaaagatatggtttcagaatcgaagaatgaagatgaaaaagatcaataaggatagggctaaggatgaatag

SEQ ID NO: 244500 - DNA, 792 bp, Artificial Sequence
  derived and/or modified sequence
catcattggggaggcaactactacgttgactcatttcttctgggcgctgatgccgctgacgaactcagcgtgggaatgcgccgaggtccatggcctcccagacaagccgcaaccttggccgaacatcccgacttttccccgtgtagttttcaatcaaaagctacagtgtttggcgcaagctggaacccagtacatagagcccctaccttatatccggtgtaccatcaccaccaccatcacccctacgtacacccacaggcacctgttgcagccgcagctcccgacggtcgatatatgcgaagttggcttgagcctacccctggggctttgtccttcgcgggattgcctagctctcgcccttacggtattaaacccgagcccctgtccgctcgcaggggagattgcccgaccctcgacacccatactctgtctctgacagactatgcttgcgggagcccaccggtggatcgcgaaaagcagccctccgagggggctttctctgaaaacaatgcagaaaacgagtctggaggagacaagccccctattgaccctaacaatcccgcagccaactggctccatgctagaagtactcgtaaaaagcggtgcccatacactaagcatcagaccttggaactggagaaggaattcctgttcaacatgtatttgacccgcgacaggcgctatgaagtggcgcgactgcttaatctgacagaacggcaagttaagatctggtttcagaatagacggatgaagatgaagaaaatcaacaaagacagggctaaggatgagtag

SEQ ID NO: 244501 - DNA, 819 bp, Artificial Sequence
  derived and/or modified sequence
atggcgacaactggcgctcttggaaattactacgtagacagcttcctgctcggagcagacgccgctgatgagttgagtgtggggaggtacgctcctggtactctgggacagcccccacgacaggccgctaccctggcggagcaccctgattttagcccctgctcgttccagtctaaagccacagtcttcggagcctcatggaaccctgtgcacgccgcaggggctaatgccgttcctgccgcagtgtatcaccaccaccaccatcatccttacgtgcaccctcaggccccagtagcggcagctgcccctgacggccgatacatgcgctcttggctggaaccaacacctggagctctgagctttgccggattgccctcttctcgaccatatggtattaaacctgaaccactgtctgcacggaggggtgattgtcccacgctcgacacccacacgctgagtttgaccgattacgcctgcggaagtcctcctgtggatcgggaaaaacagcctagcgaaggggctttttcggagaataatgccgaaaatgagtcaggcggagacaagcctccaattgatccaaataaccctgctgctaactggttgcacgctaggtcaactaggaagaaaagatgcccctatacgaagcatcaaacacttgaattggaaaaggagtttctgttcaatatgtacctgactagggaccggagatacgaagtggcacggctcctgaacttgaccgagcggcaggttaagatatggtttcaaaaccgacgtatgaaaatgaagaagataaataaggatcgagccaaggatgagtag

SEQ ID NO: 244502 - DNA, 591 bp, Artificial Sequence
  derived and/or modified sequence
atggccggattcagtccctggcggcgtaggcagcgtcgtcggagacggagacggagagcccgacagagccgggcagcacccgaactcgtcggggatctgggtagtttcctgctcctggggtcaacattcctgagtaccgccagacattgcttcattacttcagtggagattgtgtccaggtatctgtgcgctcgtggcagcggtcgggcagggcatcatggcccaggacgtgcacgccctgccgtggccacttctgcttttccagcccaagagccacgtgtctttctccgatctgcactgcctgcgggacggttaagcccctcaacaacacacctacatcttgttaccgcagataacccggctgccaactggctgcacgcgaggagtacccgcaaaaaacggtgtccttatacaaagcatcagacactggagctggagaaggaatttctcttcaatatgtacctgacgcgggaccgacgatacgaggtcgccagattgctcaacctgacggagcgccaggttaaaatctggtttcagaaccgcaggatgaagatgaaaaaaatcaacaaggatagggccaaggatgaatag

SEQ ID NO: 244503 - DNA, 792 bp, Artificial Sequence
  derived and/or modified sequence
caccactggggcggcaactactacgtggacagcttcctgctgggcgccgacgccgccgacgagctgagcgtgggcatgagaagaggcccctggccccccagacaggccgccaccctggccgagcaccccgacttcagcccctgcagcttccagagcaaggccaccgtgttcggcgccagctggaaccccgtgcacagagcccccaccctgtaccccgtgtaccaccaccaccaccaccacccctacgtgcacccccaggcccccgtggccgccgccgcccccgacggcagatacatgagaagctggctggagcccacccccggcgccctgagcttcgccggcctgcccagcagcagaccctacggcatcaagcccgagcccctgagcgccagaagaggcgactgccccaccctggacacccacaccctgagcctgaccgactacgcctgcggcagcccccccgtggacagagagaagcagcccagcgagggcgccttcagcgagaacaacgccgagaacgagagcggcggcgacaagccccccatcgaccccaacaaccccgccgccaactggctgcacgccagaagcaccagaaagaagagatgcccctacaccaagcaccagaccctggagctggagaaggagttcctgttcaacatgtacctgaccagagacagaagatacgaggtggccagactgctgaacctgaccgagagacaggtgaagatctggttccagaacagaagaatgaagatgaagaagatcaacaaggacagagccaaggacgagtag

SEQ ID NO: 244504 - DNA, 819 bp, Artificial Sequence
  derived and/or modified sequence
atggccaccaccggcgccctgggcaactactacgtggacagcttcctgctgggcgccgacgccgccgacgagctgagcgtgggcagatacgcccccggcaccctgggccagccccccagacaggccgccaccctggccgagcaccccgacttcagcccctgcagcttccagagcaaggccaccgtgttcggcgccagctggaaccccgtgcacgccgccggcgccaacgccgtgcccgccgccgtgtaccaccaccaccaccaccacccctacgtgcacccccaggcccccgtggccgccgccgcccccgacggcagatacatgagaagctggctggagcccacccccggcgccctgagcttcgccggcctgcccagcagcagaccctacggcatcaagcccgagcccctgagcgccagaagaggcgactgccccaccctggacacccacaccctgagcctgaccgactacgcctgcggcagcccccccgtggacagagagaagcagcccagcgagggcgccttcagcgagaacaacgccgagaacgagagcggcggcgacaagccccccatcgaccccaacaaccccgccgccaactggctgcacgccagaagcaccagaaagaagagatgcccctacaccaagcaccagaccctggagctggagaaggagttcctgttcaacatgtacctgaccagagacagaagatacgaggtggccagactgctgaacctgaccgagagacaggtgaagatctggttccagaacagaagaatgaagatgaagaagatcaacaaggacagagccaaggacgagtag

SEQ ID NO: 244505 - DNA, 591 bp, Artificial Sequence
  derived and/or modified sequence
atggccggcttcagcccctggagaagaagacagagaagaagaagaagaagaagaagagccagacagagcagagccgcccccgagctggtgggcgacctgggcagcttcctgctgctgggcagcaccttcctgagcaccgccagacactgcttcatcaccagcgtggagatcgtgagcagatacctgtgcgccagaggcagcggcagagccggccaccacggccccggcagagccagacccgccgtggccaccagcgccttccccgcccaggagcccagagtgttcctgagaagcgccctgcccgccggcagactgagccccagcaccacccacctgcacctggtgaccgccgacaaccccgccgccaactggctgcacgccagaagcaccagaaagaagagatgcccctacaccaagcaccagaccctggagctggagaaggagttcctgttcaacatgtacctgaccagagacagaagatacgaggtggccagactgctgaacctgaccgagagacaggtgaagatctggttccagaacagaagaatgaagatgaagaagatcaacaaggacagagccaaggacgagtag

SEQ ID NO: 244506 - protein, 336 aa, Artificial Sequence
  derived and/or modified sequence
MAASLRLLGAASGLRYWSRRLRPAAGSFAAVCSRSVASKTPVGFIGLGNMGNPMAKNLMKHGYPLIIYDVFPDACKEFQDAGEQVVSSPADVAEKADRIITMLPTSINAIEAYSGANGILKKVKKGSLLIDSSTIDPAVSKELAKEVEKMGAVFMDAPVSGGVGAARSGNLTFMVGGVEDEFAAAQELLGCMGSNVVYCGAVGTGQAAKICNNMLLAISMIGTAEAMNLGIRLGLDPKLLAKILNMSSGRCWSSDTYNPVPGVMDGVPSANNYQGGFGTTLMAKDLGLAQDSATSTKSPILLGSLAHQIYRMMCAKGYSKKDFSSVFQFLREEETF

SEQ ID NO: 244507 - DNA, 1011 bp, Artificial Sequence
  derived and/or modified sequence
atggccgccagcctgagactgctgggcgccgccagcggcctgagatactggagcagaagactgagacccgccgccggcagcttcgccgccgtgtgcagcagaagcgtggccagcaagacccccgtgggcttcatcggcctgggcaacatgggcaaccccatggccaagaacctgatgaagcacggctaccccctgatcatctacgacgtgttccccgacgcctgcaaggagttccaggacgccggcgagcaggtggtgagcagccccgccgacgtggccgagaaggccgacagaatcatcaccatgctgcccaccagcatcaacgccatcgaggcctacagcggcgccaacggcatcctgaagaaggtgaagaagggcagcctgctgatcgacagcagcaccatcgaccccgccgtgagcaaggagctggccaaggaggtggagaagatgggcgccgtgttcatggacgcccccgtgagcggcggcgtgggcgccgccagaagcggcaacctgaccttcatggtgggcggcgtggaggacgagttcgccgccgcccaggagctgctgggctgcatgggcagcaacgtggtgtactgcggcgccgtgggcaccggccaggccgccaagatctgcaacaacatgctgctggccatcagcatgatcggcaccgccgaggccatgaacctgggcatcagactgggcctggaccccaagctgctggccaagatcctgaacatgagcagcggcagatgctggagcagcgacacctacaaccccgtgcccggcgtgatggacggcgtgcccagcgccaacaactaccagggcggcttcggcaccaccctgatggccaaggacctgggcctggcccaggacagcgccaccagcaccaagagccccatcctgctgggcagcctggcccaccagatctacagaatgatgtgcgccaagggctacagcaagaaggacttcagcagcgtgttccagttcctgagagaggaggagaccttctag

SEQ ID NO: 244508 - DNA, 1990 bp, Artificial Sequence
  derived and/or modified sequence
ggattgacaggccctgccgcgtcaggccgctcctctcggctccgcgctccttccctcgcgcgtgggcacccgcccccgagcggtgagagcgcgtgcgcgcgcgcccttctccgtgggcgagccagccagtcccgctgcacacgctcgcagtctgtgggccctccgggaggcggcggaggtcaccgcggggagaggggcgggcgcagcatggcagcctccttacggctcctcggagctgcctccggtctccggtactggagccggcggctgcggccggcagccggcagctttgcagcggtgtgttctaggtcagtggcttcaaagactccagttggattcattggactgggcaacatggggaatccaatggcaaaaaatctcatgaaacatggctatccacttattatttatgatgtgttccctgatgcctgcaaagagtttcaagatgcaggtgaacaggtagtatcttccccagcagatgttgctgaaaaagctgacagaattattacaatgctgcccaccagtatcaatgcaatagaagcttattccggagcaaatgggattctaaaaaaagtgaagaagggctcattattaatagattccagcactattgatcctgcagtttcaaaagaattggccaaagaagttgagaaaatgggagcagttttcatggatgcccctgtttctggtggtgtaggagctgcacgatctgggaacctcacgtttatggtgggaggagttgaagatgaatttgctgctgcccaagagttgctggggtgcatgggctccaacgtggtgtactgtggagctgttgggactgggcaggcggcaaagatctgcaacaacatgctgttagctattagtatgattggaactgctgaagctatgaatcttggaatcaggttagggcttgacccaaaactactggctaaaatcctaaatatgagctcaggacggtgttggtcaagtgacacttataatcctgtacctggagtgatggatggcgttccctcggctaataactatcagggtggatttggaacaacactcatggctaaggatctgggattggcacaagactctgctaccagcacaaagagcccaatccttcttggcagtctggcccatcagatctacaggatgatgtgtgcaaagggctactcaaagaaagacttctcatccgtgttccagttcctacgagaggaggagaccttctgagtgtgccctttggccacggacactgttgggaaccaaactctgtcttggagcctccttttagctcactccacaagtaaatggatttaatcaaaggtcacctatctgcttttgattgtctaggtcacagtaatccctaggatttttcaccgcttattctttttgtctttttaacaaacatattatccgaattttttttctgcaagccactgatagtctctgctaactagcttaattgacctttttacaaagtttgatccccaagcatcctcaactaaatcattgaatacttcaatcaggatattatctgctttactttacaaataaaaccaaatcttttgtcaacaggatgaaacccatcttaaaggaaagaaaaggaattggtgtgaagagagaagttagagaagggaaatgcagtgaattactatctgtgtccatcaggaagtttgtcctgttaaccaaatggttactgcactaccagggttactggtttattttccagggagctgataaagcaggagaactgttgctgcatgttttctatttggactccgtcacaatatggtaggatatccctcaccaactcccgacactcagcagacttgtttttatatttttttctttcttgttcattcttactacgtattttttgacttaagaatgacatctttagatgcatttcagagccaatgatgatatttgctttagataattattatattattataaatatagccatattattttgaattcaaataaatttctatactggtaa

SEQ ID NO: 244509 - DNA, 1011 bp, Artificial Sequence
  derived and/or modified sequence
atggccgcctcactccggcttctgggtgctgcctccggactgcgatactggtcccggaggctccggccagctgctgggtcctttgctgccgtgtgttctcgctctgtagcttccaagacgcctgttggcttcattggtttggggaatatgggcaatccgatggcgaaaaatctcatgaaacatggctacccactgattatctatgatgtgttccctgatgcttgcaaagagttccaggacgccggagaacaggtggtcagctcaccagctgatgtggccgaaaaggccgataggattattactatgctgccaacatcaatcaacgctatcgaagcgtacagcggcgcgaatggtattctcaaaaaggtgaaaaagggcagcttactcattgattccagcactattgaccccgcggtctccaaagaactggcaaaggaggtggagaaaatgggggctgttttcatggatgcccccgtgagtggcggcgtaggagcggcccggtccggcaacctcacattcatggttggcggagtggaagatgagttcgcagcagcccaggagctgctgggctgcatggggtctaacgtagtgtattgtggtgctgttgggaccggtcaggccgcaaagatttgcaacaacatgttgttagcaataagtatgatcgggacggcggaggccatgaacctaggaattaggcttggcctcgaccccaaactcctcgccaaaatactgaacatgtcaagcggcagatgttggtcgtcagatacctacaatcctgtgcctggagtaatggacggagtgccatccgcaaataactaccagggtggctttggtacaacactgatggcaaaggacttaggtctcgcccaggatagcgctacaagcactaagtcccctattctgctgggcagtctggcacaccagatctatagaatgatgtgcgctaagggttatagcaagaaggatttttcctccgtattccaattcttgagggaagaagaaacattctag

SEQ ID NO: 244510 - DNA, 1011 bp, Artificial Sequence
  derived and/or modified sequence
atggccgccagcctgcggctgctgggcgccgccagcggcctgcgctactggagccggcggctgcggcctgctgctggcagctttgctgctgtgtgcagccgctctgtggccagcaagacccctgtgggcttcatcggcctgggcaacatgggcaaccccatggccaagaacctgatgaagcacggctaccccctcatcatctatgatgtgtttcctgatgcctgcaaggagttccaggatgctggggagcaggtggtgagcagccctgcagatgtggccgagaaggctgaccgcatcatcaccatgctgcccaccagcatcaatgccatcgaggcctacagcggggccaacggcatcctgaagaaggtgaagaagggcagcctgctgattgacagcagcaccattgatcctgctgtgtccaaggagctggccaaggaggtggagaagatgggcgctgtgttcatggatgcccctgtgtctgggggcgtgggcgccgcccggagcggcaacctgaccttcatggtgggcggcgtggaggatgaatttgctgctgcccaggagctgctgggctgcatgggcagcaatgtggtgtactgtggggctgtgggcaccggccaggccgccaagatctgcaacaacatgctgctggccatctccatgattggaacagctgaggccatgaacctgggcatccggctgggcctggaccccaagctgctggccaagatcctgaacatgagcagcggccgctgctggagcagtgacacctacaaccctgtgcctggggtgatggatggagtgcccagcgccaacaactaccagggcggcttcggcaccaccctgatggccaaggacctgggcctggcccaggacagcgccaccagcaccaagagccccatcctgctgggcagcctggcccaccagatctacaggatgatgtgtgccaagggctacagcaagaaggacttcagctctgtgttccagttcctgcgggaggaggagaccttctag

SEQ ID NO: 244511 - DNA, 1011 bp, Artificial Sequence
  derived and/or modified sequence
atggccgccagcctgcggctgctgggcgccgccagcggcctgcggtattggtcaagacggttgcgcccagctgctggctccttcgccgctgtctgctcaagaagcgtggcttcgaagacacctgttgggtttattggactcggcaatatggggaatcctatggcaaaaaacttaatgaaacacggttacccgctgatcatctacgatgttttccccgacgcttgcaaagagttccaagacgctggagagcaggtcgtttccagccccgcagatgtggctgagaaggccgacaggatcattaccatgctgcccacgtccattaatgctatcgaggcgtattctggggcgaacggtatcttgaagaaagttaagaagggatcacttcttatcgactcatcaacgatcgatcccgccgtgtccaaggagctggccaaagaagtcgagaaaatgggcgctgtgtttatggatgcacctgtatccggaggagtaggcgccgcaagatccggcaacctcacattcatggttggtggcgtcgaagacgaattcgccgcagcacaagagctcctcgggtgtatgggatccaacgtcgtctattgtggagcagtcggtactggacaggccgctaagatttgtaataatatgctgctcgccatcagtatgataggaaccgctgaggctatgaacttgggaattcgactcggtctagaccccaagctcttggccaaaatcctgaacatgagtagcgggaggtgttggtcgtccgatacatataacccagtgcccggggtgatggatggagtaccctcggcaaataattaccagggtgggttcggaacgaccctgatggcaaaggatctgggcttagcccaggactccgccaccagtaccaagtctcccatccttctgggctccttagcccaccagatttatcgaatgatgtgcgcaaagggctattccaaaaaggatttctctagtgtcttccagtttctgagagaggaagagaccttctag

SEQ ID NO: 244512 - DNA, 1011 bp, Artificial Sequence
  derived and/or modified sequence
atggcagcgtcattgcgactgctgggcgctgcttctgggctgaggtattggtcacggaggttgcggccagccgcaggaagtttcgcagcggtgtgttccagaagtgtggccagcaaaactccggtcggctttatcggtctgggcaatatgggaaacccgatggccaaaaaccttatgaaacatggatacccactaatcatatacgacgtatttccagatgcctgcaaagagtttcaggacgccggtgagcaggtggtgtcatctcccgcagatgtggccgaaaaagcagacagaattatcactatgctcccaacatcaattaacgctatcgaggcctattctggtgcaaatgggatcctcaaaaaagtgaagaaaggctccctcctcatcgattcgtcaacgattgaccccgcagtcagcaaggagctcgccaaggaggtggagaagatgggcgctgttttcatggacgcacctgtcagcgggggagtgggtgcggcaagatcaggaaatctcacgtttatggtcggaggggttgaagacgaattcgcagccgcacaggaattgttgggctgtatgggatcgaatgttgtgtattgcggagcggttggaacaggccaagccgcaaaaatttgtaacaatatgttgctggcgatcagtatgatcggaacagccgaggcaatgaatctggggatccggcttgggctagaccctaaacttctggccaaaattttgaatatgtcatcaggcaggtgctggagcagcgatacatacaaccccgtgccgggagtaatggatggagtccccagcgcaaacaactaccagggcggattcggaactaccttgatggcaaaagacctaggtttggctcaagactctgctacatctactaagtcgcccatcctcttaggcagcctcgctcaccagatatacaggatgatgtgtgcaaaagggtattcaaaaaaggacttctcctcagttttccagttcctgcgggaggaggaaacattctag

SEQ ID NO: 244513 - protein, 579 aa, Artificial Sequence
  derived and/or modified sequence
MSALRPLLLLLLPLCPGPGPGPGSEAKVTRSCAETRQVLGARGYSLNLIPPALISGEHLRVCPQEYTCCSSETEQRLIRETEATFRGLVEDSGSFLVHTLAARHRKFDEFFLEMLSVAQHSLTQLFSHSYGRLYAQHALIFNGLFSRLRDFYGESGEGLDDTLADFWAQLLERVFPLLHPQYSFPPDYLLCLSRLASSTDGSLQPFGDSPRRLRLQITRTLVAARAFVQGLETGRNVVSEALKVPVSEGCSQALMRLIGCPLCRGVPSLMPCQGFCLNVVRGCLSSRGLEPDWGNYLDGLLILADKLQGPFSFELTAESIGVKISEGLMYLQENSAKVSAQVFQECGPPDPVPARNRRAPPPREEAGRLWSMVTEEERPTTAAGTNLHRLVWELRERLARMRGFWARLSLTVCGDSRMAADASLEAAPCWTGAGRGRYLPPVVGGSPAEQVNNPELKVDASGPDVPTRRRRLQLRAATARMKTAALGHDLDGQDADEDASGSGGGQQYADDWMAGAVAPPARPPRPPYPPRRDGSGGKGGGGSARYNQGRSRSGGASIGFHTQTILILSLSALALLGPR

SEQ ID NO: 244514 - DNA, 1740 bp, Artificial Sequence
  derived and/or modified sequence
atgtccgctttgcggcctctgctgctgcttctgttgccactttgtccaggcccaggccctggacctgggagcgaggctaaagtgacgaggtcttgtgctgaaacccgccaggtcttaggcgcaagaggatattccttgaatctgatccctcccgctctcatctccggagagcatctaagggtgtgtcctcaggagtatacatgctgtagcagtgaaacagaacagaggctgatccgagaaactgaggccacctttagggggttggtggaggacagtggttctttcttagttcatactctcgccgcacgccataggaaattcgacgaattctttttagaaatgctgtccgtcgctcagcattcgcttactcagcttttttctcactcatacggtagactgtatgcccaacacgcactgatcttcaatggactattcagtcggctgagagatttctacggggagtctggggaaggcctggacgacaccctggctgacttctgggcccagctcctcgaaagagtctttccactcctgcacccccagtactctttcccccctgactacttgctgtgtctgtcacgcttagctagtagtacggacggaagcctgcagcctttcggagatagtccacgcaggctgagactgcaaatcaccagaaccctcgtggctgctcgcgcatttgttcagggcttggagactgggaggaacgttgtgtctgaagcccttaaagtgccggtctctgagggttgttctcaagccctgatgcgacttattggatgccctctgtgtcgcggagtcccctctctcatgccttgccaaggcttctgcctgaacgtggtgaggggttgtctgtcatctcggggactggagccagattggggcaactaccttgatggccttctcatcttagccgataaactgcagggacccttctcattcgaactcacagccgagagcatcggagttaaaatctcagagggcctgatgtatctgcaggagaactccgccaaagtgagtgcccaggtctttcaggagtgtggccctcctgatcccgtgcccgcaaggaaccggcgagccccaccacccagagaagaagccggaaggctgtggtctatggtgacagaagaggagcgccctacaaccgccgctggcacaaatctgcaccggctggtctgggagctgcgggagagactggctcggatgcgaggtttctgggcgagactgtctttgacggtctgcggggattctcgaatggctgcggacgcctcactagaggccgcaccttgttggaccggagccggtagaggacgttacctgccacccgtggtcggcggtagtccggctgaacaagtgaataatcctgagctaaaagtggatgcttccggcccagatgttcctacccggaggagacggctgcagctcagagccgcaacggcgagaatgaagacagccgcactcggtcatgatctggacggtcaggatgcagatgaggacgcaagcggctctgggggtgggcagcagtatgcagacgactggatggcaggcgctgtggccccacctgcaagaccccctagaccaccgtaccccccaaggagagacggctccgggggtaagggaggcggaggttctgccagatataaccaaggccgttcccggtccggtggggcttctatcgggtttcacacacagaccatcctgatccttagcctcagcgcgctggccttgctgggcccacgttag

SEQ ID NO: 244515 - DNA, 1740 bp, Artificial Sequence
  derived and/or modified sequence
atgtcggctctcagacccttgctgctgttactactccctctgtgcccagggccagggcccggccccgggagtgaggccaaagtgactcgctcctgcgctgagaccaggcaggtcctaggagcaagaggatattcactgaatctgattccacctgctctgattagcggtgagcacctgagagtctgtccccaagagtacacttgctgtagctccgagaccgaacagaggttaatccgagaaactgaagccacgttccgcggcctggtcgaagattctggttcctttcttgttcacacgctcgccgccaggcatagaaaatttgatgagttctttctggaaatgctatcggtcgcacaacattcgctcacccagctctttagccactcatatggtcgtctctacgcccagcacgctctgatctttaacgggttgttctcacggctccgggatttttatggggagtctggagagggcctcgacgacactttggctgacttttgggcccagctgctcgaacgcgtttttcccctcctccatccccaatactccttccccccagactatctgttgtgtctgagccgactggcgagttctaccgacgggtccctccagccgttcggcgactccccccgtaggctacggctgcaaattacacgcacactggttgcagcccgagcctttgttcaaggcctcgagaccgggagaaatgtggtgtccgaggctctgaaggtccccgtgtctgaggggtgtagtcaggccctgatgcgactgatcggatgtcctctctgtagaggcgtgccatccttgatgccatgtcaggggttctgccttaatgtcgtccgaggctgcctttcctcccggggcttggagcctgattggggtaattacctggacggccttctaattctcgctgataaactccaggggcccttttcttttgaactgacagctgagtccatcggggtgaagatctccgaaggcctgatgtatttgcaggaaaattctgctaaggtaagcgcccaggtatttcaggaatgcggaccacctgaccctgtgccagcgaggaaccgtcgagcccctccccctcgcgaagaggccggacgactttggtccatggttacagaagaggagcggccaacaacagcagcaggcaccaatttgcaccgcctagtgtgggagttaagagagcgactggcacgcatgagagggttttgggcaagactcagtctgacggtgtgcggcgactctagaatggccgccgacgctagcctcgaagctgccccatgctggactggcgcaggacgaggacgctatctaccgcccgtcgttgggggctcaccagccgagcaggttaacaatccggaattgaaggttgatgcctcgggcccagacgtgccgacgagacgacggagactccagttgcgagctgctactgctcgtatgaagacggctgctctaggccacgatctcgacggccaggacgctgatgaagacgcctccggcagtgggggagggcagcagtacgccgatgattggatggcaggggcagtcgctcctcctgcgcgtcctccaaggccaccctatccgcccaggagggacggctccgggggaaagggagggggtggcagcgcacgttataatcagggcagatcccggagcggaggcgcaagcattggctttcacacccagacaatccttatcctgtctttatctgcacttgcattgctggggcctaggtag

SEQ ID NO: 244516 - DNA, 1740 bp, Artificial Sequence
  derived and/or modified sequence
atgtcagcattaagaccgcttcttcttcttttgcttccactctgtccgggtcccggccccggtccaggcagcgaagctaaagtgacacgctcgtgcgccgagacaagacaggtgctcggagcccggggatattctttgaacttgataccaccagccctgatatcgggcgagcacctgcgggtctgcccccaagagtatacctgttgttcctctgagactgaacaaagacttatacgagagacggaggcaacttttcgcggccttgttgaggattctggaagtttccttgtacacacactagcagcacggcataggaaattcgacgaattttttctcgagatgctgtcggttgcccaacacagtcttacacagctatttagtcattcatacggccgtctttacgcacagcacgccctaatattcaacgggttatttagcaggctccgagacttctacggcgagtcaggcgagggtctggacgacacactggcagacttctgggcccagctgttggagcgcgtttttcccctacttcacccacaatactcattcccaccggactatcttctttgcctaagccgcctggcatccagtacagatggttcactgcagccctttggcgacagcccaaggcggttacgattgcagattacccggacgctggtcgctgcccgagcctttgtacagggactggaaaccggccggaacgtcgttagcgaagctctgaaggttcccgtgagtgagggatgtagtcaggcccttatgcgcttaattggttgtccgctgtgcaggggagttccttcacttatgccatgccaaggcttttgtcttaatgtcgtacggggatgcttgagctccagaggtctcgagcctgattggggtaactacctggacggtctgcttatccttgctgacaaactccaaggtccgttttctttcgaactgacggccgagtcgataggcgttaaaatttccgagggcctcatgtacctgcaagaaaactccgctaaggtctcagcccaggtgttccaggaatgcggtcctccagaccccgtgccagccagaaatcgcagggccccccctccaagagaagaagctggacgactctggtccatggtgaccgaggaagaaagacctacaacggccgcaggcacaaatctccatcgtcttgtgtgggaactcagagagcgcctggccagaatgcgcgggttttgggcacgccttagcttaaccgtgtgcggcgatagccgcatggcagcagacgcatccttggaagccgctccctgctggacaggggcgggccggggccgatatctgcctcccgtcgtaggaggatcccctgcagaacaagtaaacaatcctgaattgaaggtggacgcatcagggccagacgtacctactaggcgaagaagactccagttacgcgccgcgaccgctcgtatgaaaacagccgcactcggacacgatctggacggacaggacgccgacgaggacgcttccggctccggagggggacagcagtacgccgacgactggatggccggtgcagttgctccacctgctcgcccacctcgtcccccctacccacctcgacgcgacggcagcggaggcaaaggcgggggaggatctgctagatacaaccaaggccggtcccgatcaggcggagcttccattggcttccacacgcagaccattctgatattatcactttccgctctggctctgctgggtccaaggtag

SEQ ID NO: 244517 - DNA, 2532 bp, Artificial Sequence
  derived and/or modified sequence
ggcagatgccgcctggtccagctatcgtgctcggtattcagttttccggagcagcgctctttctctggcccgcggagcggtcccgcggccgagtaccggattcccgagtttgggaggctctgctttcctccttaggacccactttgccgtcctggggtggctgcagttatgtccgcgctgcgacctctcctgcttctgctgctgcctctgtgtcccggtcctggtcccggacccgggagcgaggcaaaggtcacccggagttgtgcagagacccggcaggtgctgggggcccggggatatagcttaaacctaatccctcccgccctgatctcaggtgagcacctccgggtctgtccccaggagtacacctgctgttccagtgagacagagcagaggctgatcagggagactgaggccaccttccgaggcctggtggaggacagcggctcctttctggttcacacactggctgccaggcacagaaaatttgatgagttttttctggagatgctctcagtagcccagcactctctgacccagctcttctcccactcctacggccgcctgtatgcccagcacgccctcatattcaatggcctgttctctcggctgcgagacttctatggggaatctggtgaggggttggatgacaccctggcggatttctgggcacagctcctggagagagtgttcccgctgctgcacccacagtacagcttcccccctgactacctgctctgcctctcacgcttggcctcatctaccgatggctctctgcagccctttggggactcaccccgccgcctccgcctgcagataacccggaccctggtggctgcccgagcctttgtgcagggcctggagactggaagaaatgtggtcagcgaagcgcttaaggtgccggtgtctgaaggctgcagccaggctctgatgcgtctcatcggctgtcccctgtgccggggggtcccctcacttatgccctgccagggcttctgcctcaacgtggttcgtggctgtctcagcagcaggggactggagcctgactggggcaactatctggatggtctcctgatcctggctgataagctccagggccccttttcctttgagctgacggccgagtccattggggtgaagatctcggagggtttgatgtacctgcaggaaaacagtgcgaaggtgtccgcccaggtgtttcaggagtgcggcccccccgacccggtgcctgcccgcaaccgtcgagccccgccgccccgggaagaggcgggccggctgtggtcgatggtgaccgaggaggagcggcccacgacggccgcaggcaccaacctgcaccggctggtgtgggagctccgcgagcgtctggcccggatgcggggcttctgggcccggctgtccctgacggtgtgcggagactctcgcatggcagcggacgcctcgctggaggcggcgccctgctggaccggagccgggcggggccggtacttgccgccagtggtcgggggctccccggccgagcaggtcaacaaccccgagctcaaggtggacgcctcgggccccgatgtcccgacacggcggcgtcggctacagctccgggcggccacggccagaatgaaaacggccgcactgggacacgacctggacgggcaggacgcggatgaggatgccagcggctctggagggggacagcagtatgcagatgactggatggctggggctgtggctcccccagcccggcctcctcggcctccataccctcctagaagggatggttctgggggcaaaggaggaggtggcagtgcccgctacaaccagggccggagcaggagtgggggggcatctattggttttcacacccaaaccatcctcattctctccctctcagccctggccctgcttggacctcgataacgggggaggggtgccctagcatcagaagggttcatggccctttcccctcctcccccctcagctgggcctggggaggagtcgaagggggctgcagagagggtagagaagggactttgcaggtgaatggctggggccccaaatccaggagattttcatcagaggtgggtgggtgttcacaatatttattttttcatttggtaatgggaggggggcctgggggtatttatttaggagggagtgtggtttccttagaaggtatagtctctagccctctaaggctggggctggtgatcagccccaacagagaaaatgaggagtttagagttgcagctggggaaggggtttgaaggaagttggaagtggggaggggtgggggcatctggtctcagaaatggaccagctggatgcagggcaggggactgagggtgcttgagtaggatgtgagacttcatgggcctgggttctgttgagttttttcagtatcaatttcttaaaccaaattttaaaaaaaacaaggtgggggggtgctcatctcgtgacctctgccacccacatccttcacaaactccatgtttcagtgtttgagtccatgtttattctgcaaataaatggtaatgtattgga

SEQ ID NO: 244518 - DNA, 1740 bp, Artificial Sequence
  derived and/or modified sequence
atgagcgccctgagacccctgctgctgctgctgctgcccctgtgccccggccccggccccggccccggcagcgaggccaaggtgaccagaagctgcgccgagaccagacaggtgctgggcgccagaggctacagcctgaacctgatcccccccgccctgatcagcggcgagcacctgagagtgtgcccccaggagtacacctgctgcagcagcgagaccgagcagagactgatcagagagaccgaggccaccttcagaggcctggtggaggacagcggcagcttcctggtgcacaccctggccgccagacacagaaagttcgacgagttcttcctggagatgctgagcgtggcccagcacagcctgacccagctgttcagccacagctacggcagactgtacgcccagcacgccctgatcttcaacggcctgttcagcagactgagagacttctacggcgagagcggcgagggcctggacgacaccctggccgacttctgggcccagctgctggagagagtgttccccctgctgcacccccagtacagcttcccccccgactacctgctgtgcctgagcagactggccagcagcaccgacggcagcctgcagcccttcggcgacagccccagaagactgagactgcagatcaccagaaccctggtggccgccagagccttcgtgcagggcctggagaccggcagaaacgtggtgagcgaggccctgaaggtgcccgtgagcgagggctgcagccaggccctgatgagactgatcggctgccccctgtgcagaggcgtgcccagcctgatgccctgccagggcttctgcctgaacgtggtgagaggctgcctgagcagcagaggcctggagcccgactggggcaactacctggacggcctgctgatcctggccgacaagctgcagggccccttcagcttcgagctgaccgccgagagcatcggcgtgaagatcagcgagggcctgatgtacctgcaggagaacagcgccaaggtgagcgcccaggtgttccaggagtgcggcccccccgaccccgtgcccgccagaaacagaagagcccccccccccagagaggaggccggcagactgtggagcatggtgaccgaggaggagagacccaccaccgccgccggcaccaacctgcacagactggtgtgggagctgagagagagactggccagaatgagaggcttctgggccagactgagcctgaccgtgtgcggcgacagcagaatggccgccgacgccagcctggaggccgccccctgctggaccggcgccggcagaggcagatacctgccccccgtggtgggcggcagccccgccgagcaggtgaacaaccccgagctgaaggtggacgccagcggccccgacgtgcccaccagaagaagaagactgcagctgagagccgccaccgccagaatgaagaccgccgccctgggccacgacctggacggccaggacgccgacgaggacgccagcggcagcggcggcggccagcagtacgccgacgactggatggccggcgccgtggccccccccgccagaccccccagacccccctacccccccagaagagacggcagcggcggcaagggcggcggcggcagcgccagatacaaccagggcagaagcagaagcggcggcgccagcatcggcttccacacccagaccatcctgatcctgagcctgagcgccctggccctgctgggccccagatag

SEQ ID NO: 244519 - DNA, 1740 bp, Artificial Sequence
  derived and/or modified sequence
atgtctgcattgagacctctcctgcttctcctcctccctctttgtcctggccctgggccaggtccaggctcagaggcaaaagtcactaggagttgcgccgagacacgacaggttctgggcgcacgagggtacagcctgaatctgataccgccggccctgattagtggagaacatctccgcgtttgtccgcaagagtacacttgctgttcttctgagactgaacagagactgataagggagaccgaggccacctttcgggggctcgtggaggatagtgggtcttttttagttcatactctcgctgctaggcaccggaagttcgacgaattttttctagaaatgctctccgtcgcccaacacagtctgacccagctgttctctcattcctacgggcgactgtacgcacagcacgcgcttattttcaatggtcttttttcacgattacgcgatttctatggcgagagtggtgaaggattggatgacacgttggcggatttctgggcacagctgttggaacgcgtgtttccgcttttacacccccagtactcctttccacccgattacttactgtgtctctctcggctcgcctccagcaccgacggttccttgcagccctttggagacagtccccgccgcctgagactgcagatcacaagaaccctggttgctgctagggccttcgttcagggactcgaaaccggccgtaacgtggtttcggaagccctcaaagtgccagtgagtgagggttgttcacaggccctgatgcgccttattggttgccctctgtgtcggggagttccgagccttatgccatgccagggcttctgtttgaacgttgtccgcggctgtttgagcagccgtggattggagcctgactgggggaactacttggacggccttctgattctcgcagacaaactccaggggccattcagtttcgaattgactgctgagagtatcggggttaaaatctctgaggggctgatgtacctgcaagagaatagcgctaaagtttccgcccaggtgtttcaggagtgtgggccacccgatcccgtgcctgccaggaatcgcagggccccacccccgagggaggaggcggggagactgtggtcaatggtgaccgaagaggaacggccaaccacagccgccggaactaacctccatcgcctggtgtgggagctgcgggagcgactggcccggatgagaggcttttgggctaggctcagtctaaccgtgtgtggcgactctcggatggccgccgatgcgtcactggaagccgccccttgctggactggcgccggacggggcaggtacttaccacctgtggtaggtggctcacctgcagaacaggtgaacaacccagagctgaaagtggacgcctcaggtccagacgtgcctacccgccggcgcaggctccagcttcgcgctgctactgccaggatgaaaacagccgcattgggtcacgacctggacggtcaggacgctgacgaagacgcgtccggatccgggggtggacagcagtacgcagacgattggatggccggggcagtggcgcccccagcccgaccccctaggcccccttacccaccacgacgcgatggtagcggaggcaagggcggaggtggatctgcacggtataaccaggggcgttctcgaagcggcggagcctccataggatttcacacacagacaatcttgattctcagtctatccgcgctggctctacttggaccacgttag

SEQ ID NO: 244520 - DNA, 1740 bp, Artificial Sequence
  derived and/or modified sequence
atgtctgccctgcggcccctgctgctgctgctgctgcccctgtgccccggccctggccctggccctggcagcgaggccaaggtgaccaggagctgtgccgagacccggcaggtgctgggcgcccggggctacagcctgaacctgatccccccagccctgatctctggagagcacctgcgggtgtgcccccaggagtacacctgctgcagcagcgagacagagcagaggctcatccgggagacagaggccaccttccggggcctggtggaggacagcggcagcttcctggtgcacaccctggccgcccggcacaggaagtttgatgagttcttcctggagatgctgtctgtggcccagcacagcctgacccagctgttcagccacagctatggccgcctgtatgcccagcacgccctgatcttcaacggcctcttcagccggctgcgggacttctacggggagagcggggagggcctggatgacaccctggccgacttctgggcccagctgctggagagggtcttccccctgctgcacccccagtacagcttccccccagactacctgctgtgcctgagccggctggccagcagcacagatggcagcctgcagccctttggagacagcccccggcggctgcggctgcagatcaccaggaccctggtggccgcccgggcctttgtgcagggcctggagactggaagaaatgtggtgtctgaggccctgaaggtgcctgtgtctgagggctgcagccaggccctgatgaggctcatcggctgccccctgtgccggggcgtgcccagcctgatgccctgccagggcttctgcctgaatgtggtgcggggctgcctgagcagccggggcctggagccagactggggcaactacctggatggcctgctgatcctggccgacaagctgcagggccccttctcctttgagctgacagctgagagcattggagtgaagatcagcgagggcctgatgtacctgcaggagaacagcgccaaggtgtctgcccaggtgttccaggagtgtggccccccagaccctgtgcctgccaggaacagaagagcccccccaccccgggaggaggccggccgcctgtggagcatggtgacagaggaggagcggcccaccacagctgctggcaccaacctgcaccggctggtgtgggagctgcgggagcggctggccaggatgaggggcttctgggcccggctgagcctgactgtgtgtggggacagcaggatggccgcagatgccagcctggaggccgccccctgctggacaggagctggccggggccgctacctgccccctgtggtgggcggcagccctgctgagcaggtgaacaaccctgagctgaaggtggatgccagcggcccagatgtgcccaccaggagaagaaggctgcagctgcgggccgccacagccaggatgaagacagctgccctgggccatgacctggatggccaggatgctgatgaagatgccagcggcagcggcggcggccagcagtatgcagatgactggatggccggggctgtggcccccccagcccggcccccccggcccccctaccccccaagaagagatggcagcggcggcaagggcggcggcggcagcgcccgctacaaccagggccgcagccgctctggaggagccagcatcggcttccacacccagaccatcctgatcctgagcctgagcgccctggccctgctgggccccaggtag

SEQ ID NO: 244521 - DNA, 1740 bp, Artificial Sequence
  derived and/or modified sequence
atgagcgccctgcggcccctgctgctgctgctgctgcccctgtgccccgggccaggacctgggccaggctctgaagcaaaggtgacccgctcctgcgctgaaacgcgccaggttctgggcgccagagggtattcgctgaatctaattccaccggcactgattagcggggaacatctcagggtatgccctcaagagtacacttgttgctccagcgagaccgaacagcggcttatccgcgagactgaagctacctttcgcggtctagttgaagactccggtagtttcctggtgcacaccctggcagcacggcataggaagtttgacgaattttttctggagatgctctcagtcgcgcagcactccctgactcagctgttcagccatagctatgggcgcctgtatgctcagcacgcattgatttttaacgggctcttcagcaggttgcgtgacttctatggagaaagcggggaagggttggacgacactctcgcggacttttgggcccaactgttggaaagagtcttccccttgctgcacccacagtactccttcccacctgactacctactctgtctgagccggctggcttctagcacagacggttccctccagccttttggcgatagtccaaggaggctgcgactccaaatcactaggaccctggtagccgcccgggccttcgtgcagggattggagacaggacgtaacgtggtgtccgaggctctcaaggtgccggtctccgagggctgttctcaggctcttatgcgccttatcggttgccccctgtgtaggggcgtaccgtcccttatgccctgtcagggtttctgtctgaacgtcgtccgcggctgcctcagttccagaggactggaacccgattggggcaactatctggacggcctcctgatcctcgcagataaactgcagggcccattctctttcgaactgacagccgagtctatcggagtgaaaatcagtgaggggctgatgtacctgcaggagaactcagccaaagtgtctgcccaggtctttcaagaatgcggccctccggaccccgtgcctgccaggaacagacgcgcccctcccccccgggaagaggcagggcgcttatggtcaatggtgaccgaggaggaaaggcctacaaccgctgcaggaacaaacctgcatcgtctggtgtgggagcttcgggaacgcttagcccggatgaggggcttttgggctcggctcagtctgacagtttgcggtgactcacggatggcggccgacgctagtctggaggcagcaccttgttggacaggtgcaggccgcggccgatatcttcctccagtggtgggagggagccccgcagagcaagtcaataatccagaacttaaggttgacgccagcggccctgatgttcctacgagaaggaggcgcctgcaattgcgggctgccacagctcgcatgaaaacagcagccctggggcatgacttagacggacaggacgccgatgaggatgcaagtggatcaggcggcgggcaacagtacgccgacgattggatggcaggcgccgtggcaccacccgcgagacccccaagacctccttaccctccgcggagagacggctctggaggcaagggtggcggtggctccgcacgctataatcagggaaggtctaggagtggaggagccagtataggcttccacacccagacgatcttaatcctgtccctgagcgctctggctttgctcggtcccagatag

SEQ ID NO: 244522 - RNA, 1740 nt, Artificial Sequence
  derived and/or modified sequence
augucggcucucagacccuugcugcuguuacuacucccucugugcccagggccagggcccggccccgggagugaggccaaagugacucgcuccugcgcugagaccaggcagguccuaggagcaagaggauauucacugaaucugauuccaccugcucugauuagcggugagcaccugagagucuguccccaagaguacacuugcuguagcuccgagaccgaacagagguuaauccgagaaacugaagccacguuccgcggccuggucgaagauucugguuccuuucuuguucacacgcucgccgccaggcauagaaaauuugaugaguucuuucuggaaaugcuaucggucgcacaacauucgcucacccagcucuuuagccacucauauggucgucucuacgcccagcacgcucugaucuuuaacggguuguucucacggcuccgggauuuuuauggggagucuggagagggccucgacgacacuuuggcugacuuuugggcccagcugcucgaacgcguuuuuccccuccuccauccccaauacuccuuccccccagacuaucuguugugucugagccgacuggcgaguucuaccgacgggucccuccagccguucggcgacuccccccguaggcuacggcugcaaauuacacgcacacugguugcagcccgagccuuuguucaaggccucgagaccgggagaaaugugguguccgaggcucugaagguccccgugucugagggguguagucaggcccugaugcgacugaucggauguccucucuguagaggcgugccauccuugaugccaugucagggguucugccuuaaugucguccgaggcugccuuuccucccggggcuuggagccugauugggguaauuaccuggacggccuucuaauucucgcugauaaacuccaggggcccuuuucuuuugaacugacagcugaguccaucggggugaagaucuccgaaggccugauguauuugcaggaaaauucugcuaagguaagcgcccagguauuucaggaaugcggaccaccugacccugugccagcgaggaaccgucgagccccucccccucgcgaagaggccggacgacuuugguccaugguuacagaagaggagcggccaacaacagcagcaggcaccaauuugcaccgccuagugugggaguuaagagagcgacuggcacgcaugagaggguuuugggcaagacucagucugacggugugcggcgacucuagaauggccgccgacgcuagccucgaagcugccccaugcuggacuggcgcaggacgaggacgcuaucuaccgcccgucguugggggcucaccagccgagcagguuaacaauccggaauugaagguugaugccucgggcccagacgugccgacgagacgacggagacuccaguugcgagcugcuacugcucguaugaagacggcugcucuaggccacgaucucgacggccaggacgcugaugaagacgccuccggcagugggggagggcagcaguacgccgaugauuggauggcaggggcagucgcuccuccugcgcguccuccaaggccacccuauccgcccaggagggacggcuccgggggaaagggaggggguggcagcgcacguuauaaucagggcagaucccggagcggaggcgcaagcauuggcuuucacacccagacaauccuuauccugucuuuaucugcacuugcauugcuggggccuagguag

SEQ ID NO: 244523 - RNA, 1740 nt, Artificial Sequence
  derived and/or modified sequence
augucagcauuaagaccgcuucuucuucuuuugcuuccacucuguccgggucccggccccgguccaggcagcgaagcuaaagugacacgcucgugcgccgagacaagacaggugcucggagcccggggauauucuuugaacuugauaccaccagcccugauaucgggcgagcaccugcgggucugcccccaagaguauaccuguuguuccucugagacugaacaaagacuuauacgagagacggaggcaacuuuucgcggccuuguugaggauucuggaaguuuccuuguacacacacuagcagcacggcauaggaaauucgacgaauuuuuucucgagaugcugucgguugcccaacacagucuuacacagcuauuuagucauucauacggccgucuuuacgcacagcacgcccuaauauucaacggguuauuuagcaggcuccgagacuucuacggcgagucaggcgagggucuggacgacacacuggcagacuucugggcccagcuguuggagcgcguuuuuccccuacuucacccacaauacucauucccaccggacuaucuucuuugccuaagccgccuggcauccaguacagaugguucacugcagcccuuuggcgacagcccaaggcgguuacgauugcagauuacccggacgcuggucgcugcccgagccuuuguacagggacuggaaaccggccggaacgucguuagcgaagcucugaagguucccgugagugagggauguagucaggcccuuaugcgcuuaauugguuguccgcugugcaggggaguuccuucacuuaugccaugccaaggcuuuugucuuaaugucguacggggaugcuugagcuccagaggucucgagccugauugggguaacuaccuggacggucugcuuauccuugcugacaaacuccaagguccguuuucuuucgaacugacggccgagucgauaggcguuaaaauuuccgagggccucauguaccugcaagaaaacuccgcuaaggucucagcccagguguuccaggaaugcgguccuccagaccccgugccagccagaaaucgcagggcccccccuccaagagaagaagcuggacgacucugguccauggugaccgaggaagaaagaccuacaacggccgcaggcacaaaucuccaucgucuugugugggaacucagagagcgccuggccagaaugcgcggguuuugggcacgccuuagcuuaaccgugugcggcgauagccgcauggcagcagacgcauccuuggaagccgcucccugcuggacaggggcgggccggggccgauaucugccucccgucguaggaggauccccugcagaacaaguaaacaauccugaauugaagguggacgcaucagggccagacguaccuacuaggcgaagaagacuccaguuacgcgccgcgaccgcucguaugaaaacagccgcacucggacacgaucuggacggacaggacgccgacgaggacgcuuccggcuccggagggggacagcaguacgccgacgacuggauggccggugcaguugcuccaccugcucgcccaccucguccccccuacccaccucgacgcgacggcagcggaggcaaaggcgggggaggaucugcuagauacaaccaaggccggucccgaucaggcggagcuuccauuggcuuccacacgcagaccauucugauauuaucacuuuccgcucuggcucugcuggguccaagguag

SEQ ID NO: 244524 - protein, 821 aa, Artificial Sequence
  derived and/or modified sequence
MDPECAQLLPALCAVLVDPRQPVADDTCLEKLLDWFKTVTEGESSVVLLQEHPCLVELLSHVLKVQDLSSGVLSFSLRLAGTFAAQENCFQYLQQGELLPGLFGEPGPLGRATWAVPTVRSGWIQGLRSLAQHPSALRFLADHGAVDTIFSLQGDSSLFVASAASQLLVHVLALSMRGGAEGQPCLPGGDWPACAQKIMDHVEESLCSAATPKVTQALNVLTTTFGRCQSPWTEALWVRLSPRVACLLERDPIPAAHSFVDLLLCVARSPVFSSSDGSLWETVARALSCLGPTHMGPLALGILKLEHCPQALRTQAFQVLLQPLACVLKATVQAPGPPGLLDGTADDATTVDTLLASKSSCAGLLCRTLAHLEELQPLPQRPSPWPQASLLGATVTVLRLCDGSAAPASSVGGHLCGTLAGCVRVQRAALDFLGTLSQGTGPQELVTQALAVLLECLESPGSSPTVLKKAFQATLRWLLSSPKTPGCSDLGPLIPQFLRELFPVLQKRLCHPCWEVRDSALEFLTQLSRHWGGQADFRCALLASEVPQLALQLLQDPESYVRASAVTAMGQLSSQGLHAPTSPEHAEARQSLFLELLHILSVDSEGFPRRAVMQVFTEWLRDGHADAAQDTEQFVATVLQAASRDLDWEVRAQGLELALVFLGQTLGPPRTHCPYAVALPEVAPAQPLTEALRALCHVGLFDFAFCALFDCDRPVAQKSCDLLLFLRDKIASYSSLREARGSPNTASAEATLPRWRAGEQAQPPGDQEPEAVLAMLRSLDLEGLRSTLAESSDHVEKSPQSLLQDMLATGGFLQGDEADCY

SEQ ID NO: 244525 - DNA, 2466 bp, Artificial Sequence
  derived and/or modified sequence
atggatcctgagtgcgcccagttgctccccgctttgtgtgctgtgctcgttgatccgagacagccagtagccgacgatacctgcctggagaagcttctcgactggttcaagactgttaccgagggcgaaagctccgttgtcctcctccaagagcacccttgcttagtggaactgttatctcacgtgttaaaggtgcaggatttgtcaagcggtgtgctgtcgttcagtttaaggctggctggaacattcgccgcccaggaaaattgtttccagtatctgcagcagggcgaacttttgcctgggctatttggggaaccaggtccccttgggagagcaacttgggccgtcccaacggtacggtctggttggatccagggcctgcggtctttggcacaacatccctccgcgctgagatttctagcagatcacggtgccgttgacacaatcttcagtctgcagggggattccagcctgttcgtagctagtgccgccagccagctgcttgtacacgtgctggcactgagtatgagaggcggcgcagagggccagccctgcctcccgggaggggattggcccgcatgtgcccagaaaatcatggaccacgtcgaagagtcgctgtgctcagccgcaactcccaaagttacacaggctctgaatgtgttgacgacaactttcgggcgttgtcaaagcccttggaccgaagcactttgggtacgactgagtcccagggtagcttgcctgctagaacgggatcctatccccgcggctcactcctttgttgatctgctactgtgtgtggcccggtcaccagtgttctcgagctcagatgggtcactttgggagaccgtggcgagggcactgtcatgtctcggaccaacacacatgggcccccttgcactgggaatcctgaagctagaacattgcccccaggccctgagaacccaggcttttcaggttctgctgcaacctctggcctgcgttctgaaagctaccgtgcaggctcctggccctcccggcttactcgacgggactgctgatgacgcgactaccgtcgatacattgctggcttccaagagttcatgtgcaggactgctgtgccgcacgctggctcacctcgaagaactgcagcccctccctcagaggcctagcccttggccacaagcttccttgttaggcgccacagtgactgtactgcggttatgtgatggctcagcggccccagcctcatcagttgggggccacctgtgtggcacccttgccgggtgcgtgcgggtgcaacgggccgctctcgactttctcggaactctaagccaggggacgggcccccaggaactcgtaacgcaggccttagccgtgctgctggagtgtctcgaaagtcccggatcctctccaacagtcctgaagaaggcttttcaggctacactacggtggcttctgtcatcccccaaaaccccagggtgctctgacctaggccctctgataccacagttcttacgggagctgttcccagtgctgcagaaacgactgtgtcatccttgttgggaggtccgggattccgccttggagttcctgactcagctatcccggcattggggaggacaggcggacttcagatgtgccctcctggcaagtgaagttccccagttggcgctgcaacttcttcaggaccccgaaagctatgtgagagcttctgctgttacggcaatggggcaactgagctctcaggggctccacgctcccacttcccctgagcacgccgaagcacgacagtctctgttcctcgagctactccatatcctgagcgttgatagcgagggcttcccacgcagggccgtcatgcaggtcttcacagaatggctgcgcgatggccacgcggacgccgcacaggacaccgagcaattcgttgctacagtgctccaagcggccagtagggacctggattgggaagtgagggctcaggggctagagctcgcactagtgtttttgggccagactctcgggcctccgcggacccactgcccttacgcagttgctctgccagaggtagcgccggcccagccgctgactgaggcacttcgggcgctttgtcacgtaggattgttcgattttgcattctgtgcgttatttgactgtgatcggccagtcgctcagaagtcctgcgatctcttgttattcctacgggacaagattgcgagttactcctccttgcgggaagcacgcggcagccctaatacagcttcagccgaagctacactgccccgctggcgcgcgggagaacaggctcaacccccaggcgatcaagagcccgaggccgtgctggcaatgctaaggagcttagatctcgagggcctgagaagcacattggcggagagtagcgatcatgtcgagaaatccccccagagtctactccaggacatgctggccaccggcgggtttctgcaaggcgacgaagcagattgctactag

SEQ ID NO: 244526 - DNA, 2466 bp, Artificial Sequence
  derived and/or modified sequence
atggaccctgaatgtgcccagctgctgcctgccctgtgtgctgtgctggtggacccccggcagcctgtggctgatgacacctgcctggagaagctgctggactggttcaagacagtgacagaaggagagagctctgtggtgctgctgcaggagcacccctgcctggtggagctgctgagccacgtgctgaaggtgcaggacctgagcagcggcgtgctgtccttcagcctgcggctggccggcacctttgctgcccaggagaactgcttccagtacctgcagcagggcgagctgctgcccggcctgtttggagagcccggccccctgggccgggccacctgggccgtgcccaccgtgcgcagcggctggatccagggcctgcggagcctggcccagcaccccagcgccctgcgcttcctggccgaccatggagctgtggacaccatcttcagcctgcagggcgacagcagcctgtttgtggccagcgctgccagccagctgctggtgcacgtgctggccctgtccatgaggggcggcgctgagggccagccctgcctgcctggaggagactggccagcctgtgcccagaagatcatggaccacgtggaggagagcctgtgcagcgctgccacccccaaggtgacccaggccctgaatgtgctgaccaccaccttcggccgctgccagagcccctggacagaggccctgtgggtgcggctgagcccccgggtggcctgcctgctggagcgggaccccatcccagctgcccacagctttgtggacctgctgctgtgtgtggcccggagccctgtgttcagcagcagtgatggcagcctgtgggagaccgtggcccgggccctgagctgcctgggccccacccacatgggccccctggccctgggcatcctgaagctggagcactgcccccaggccctgcggacccaggccttccaggtgctgctgcagcccctggcctgtgtgctgaaggccaccgtgcaggcccctggccccccaggcctgctggatggaacagcagatgatgccaccaccgtggacaccctgctggccagcaagagcagctgtgccggcctgctgtgcaggaccctggcccacctggaggagctgcagcccctgccccagaggcccagcccctggccccaggccagcctgctgggcgccaccgtgacagtgctgcggctgtgtgatggcagcgctgccccagccagctctgtgggcggccacctgtgtggcaccctggccggctgtgtgcgggtgcagagagctgccctggacttcctgggcaccctgagccagggcaccggcccccaggagctggtgacccaggccctggccgtgctgctggagtgcctggagagccctggcagcagccccaccgtgctgaagaaggccttccaggccaccctgcgctggctgctgagcagccccaagaccccaggctgcagcgacctgggccccctcatcccccagttcctgcgggagctgtttcctgtgctgcagaagaggctgtgccacccctgctgggaggtgcgggacagcgccctggagttcctgacccagctgagccgccactggggcggccaggccgacttccgctgtgccctgctggccagcgaggtgccccagctggccctgcagctgctgcaggaccctgagagctatgtgcgggccagcgctgtgacagccatgggccagctgagcagccagggcctgcacgcccccaccagccctgagcacgccgaggcccggcagagcctcttcctggagctgctgcacatcctgtctgtggacagcgagggcttccccaggagagctgtgatgcaggtgttcacagagtggctgagagatggccatgctgatgctgcccaggacacagagcagtttgtggccaccgtgctgcaggccgccagccgggacctggactgggaggtgcgggcccagggcctggagctggccctggtgttcctgggccagaccctgggcccccccaggacccactgcccctatgctgtggccctgcctgaggtggccccagcccagcccctgacagaggccctgcgggccctgtgccacgtgggcctgtttgattttgccttctgtgccctgtttgactgtgacaggcctgtggcccagaagagctgtgacctgctgctcttcctgcgggacaagatcgccagctacagcagcctgcgggaggcccggggcagccccaacacagccagcgctgaggccaccctgccccgctggagggctggggagcaggcccagcccccaggggaccaggagcctgaggccgtgctggccatgctgcggagcctggacctggagggcctgcggagcaccctggccgagagcagtgaccacgtggagaagagcccccagagcctgctgcaggacatgctggccactggaggcttcctgcagggagatgaggccgactgctactag

SEQ ID NO: 244527 - DNA, 2466 bp, Artificial Sequence
  derived and/or modified sequence
atggaccccgagtgcgcccagctgctgcccgccctgtgcgccgtgctggtagacccacgacagcctgtagctgatgatacatgccttgaaaagctcttggattggttcaaaacagtcacagaaggcgagagcagcgttgtcttacttcaggagcacccatgtcttgttgaactgctgagtcatgtactcaaagtgcaagacttgagctcaggagtcctcagcttttctctaagactggctggaacattcgccgctcaggaaaactgtttccagtatctgcagcagggcgaactcctgccaggcctgttcggagagcctggtcctctgggcagagccacttgggccgtgccaacagtacgatccggctggatccaggggttacggagcctcgcccagcacccaagcgctctaaggtttctcgcagatcacggggctgtggacacaatcttttcactgcagggcgatagctctttgttcgtcgcatccgcggcttctcagctgctcgtccacgtacttgccttaagtatgagagggggcgccgaagggcagccctgccttccgggtggcgactggcccgcttgcgcccaaaaaattatggatcacgtcgaggagtccctgtgttcggccgcgacgcccaaagtgacacaagctctgaatgttctgacaacaacatttgggaggtgtcaaagtccttggacggaggctctctgggttaggttgtccccaagggtggcctgtctactggaaagggaccccatcccagcggcccattcatttgtggatcttttgctgtgcgtggcaagatccccagtgttcagttcttctgatggaagcttgtgggaaaccgtcgctcgcgcactgtcatgtcttgggccaacacacatgggcccattggcgctggggatactgaaactcgagcattgccctcaggctctccgcacccaagcatttcaggttctcttgcagcctctagcatgtgtactgaaggctaccgtgcaagctccaggtcctccaggtctccttgacggcacggcggacgatgcaaccacggtcgacacactgctggcatcgaagtcctcttgtgcagggctgttgtgcagaacgctcgcccacttggaggagctccaaccgctaccccaacgaccatctccgtggccacaggccagtctgctgggcgccacagttactgtgctgagattgtgcgacgggagtgcagcacccgcatcttcagtggggggccacctttgcggcacattggccggctgcgtgcgcgtgcaacgagccgcccttgattttctgggcaccctgtcacagggcactggcccccaggaactggttacccaggcgttggccgtgttactagagtgcctagaatctcccgggtcatctcctaccgtactcaaaaaagctttccaagcaacactaaggtggctcttatcctcaccaaaaactcccggatgctctgaccttggcccgctcataccccagttccttcgggagttgttccccgttctacagaaaaggctatgccacccctgttgggaggtcagagactcagccctggagttcctcacccaactgtcgcggcattggggggggcaggccgatttccgctgtgcccttttagccagcgaggtcccgcagctggccttacaacttctgcaagacccagaatcctacgtgcgagcttcagcagtcacagcaatgggacaactctcttctcaaggccttcatgcgccaacctctcctgagcatgcggaggcccgccagagcctctttctggagctgctgcacatcttgtcagtcgactcagaggggttcccccgtcgagccgtgatgcaagtgtttacagaatggctgcgcgacggtcacgccgacgccgcccaggataccgagcagttcgtggcaaccgttttgcaggcagccagtagagacttagactgggaagtgagggctcaggggctggagttggcgctggttttcctgggacagactctggggccgccaaggacccactgcccatacgccgtggccttacccgaagtggctcccgcccaacctttaacagaagccttaagagcactgtgccacgtgggtttattcgatttcgcattctgcgctctcttcgattgcgataggcccgtggcccagaagtcttgtgatctcttgctgttcctgcgtgacaagatcgcgagttactctagcctgcgtgaagcccggggcagtcctaatacagcttcggccgaagccacccttcccaggtggcgtgctggtgaacaagctcaacctcccggagatcaagagccagaagctgttctggccatgctcagatctcttgatctggaggggctcagatctacactggcggaaagttccgaccacgttgaaaagagcccccagtccctgttacaagatatgctggctaccggcggcttcttgcagggcgatgaagccgattgttattag

SEQ ID NO: 244528 - DNA, 2466 bp, Artificial Sequence
  derived and/or modified sequence
atggaccccgaatgcgcccagctgctgcctgcgctctgtgctgtgttggtcgatccaagacaaccagtcgcggacgatacgtgtctggagaagctcttggattggttcaagacggtcaccgaaggtgaatctagtgtagtcctcttgcaggaacatccgtgcttggttgagctgctgtctcacgtcctgaaggtccaagacttatcaagcggggtgctcagtttctccctgagactggccggaacttttgcagcccaggaaaactgctttcagtaccttcaacagggggagcttctgccaggtctctttggagaacctgggcctctcggcagggctacgtgggctgtgcctaccgtcaggagtgggtggatccaaggccttcgctccctggctcagcatcctagtgccctccgctttctcgccgaccacggagccgttgataccatattctcccttcagggggactctagtctgttcgtcgctagcgctgcatcacagctcctggtacacgtactagcactgagtatgcggggaggtgctgaagggcagccatgcctgcccggaggcgactggcccgcttgtgctcagaaaataatggatcatgtggaggagtccctgtgttcagcggcaacccccaaggtgacccaggccctgaatgtgctaaccacaaccttcggtcggtgccagtccccctggaccgaagcactctgggttagactgtcgcccagggtagcttgtctgctggaaagggaccctatcccggcagctcatagctttgtggacctccttctgtgtgtggcccgatccccagtgttctcttctagcgacggctccttgtgggagactgtggctagagccctgagctgcctcggcccaacgcacatgggacccctggccctgggaatcctcaagctcgaacactgtccccaggccttgcggactcaggcatttcaagttctccttcaaccccttgcatgtgttctgaaggccacagtgcaggctccaggcccaccaggcctcttggacggaaccgctgacgatgccactaccgtggatacattactggcctccaagagctcttgtgctggacttctgtgtagaacgctcgcccacttagaggaattgcagccactgccccagagaccttcaccatggccccaggcttcactgctcggcgcaaccgtaacagttctgcgcctctgcgacggctccgctgctccggctagctccgtcgggggacacttgtgcggtacactggccggatgtgtgcgagtgcaaagagcagccttagatttccttgggaccctgagtcagggtactggtccgcaagagctggtgacacaggcattggccgtcttgctcgagtgtctggagtctcccggtagtagcccaactgtactcaagaaggcctttcaggctacgctgcgttggctcctttcatctcccaaaacccctggctgcagcgacttaggccctctaatcccgcagttcttgcgcgaactgtttccggtactacaaaaaaggctgtgccacccttgctgggaggtccgcgacagcgcactcgaatttcttacgcagctcagtcgtcattggggaggtcaggctgatttccgctgcgcattgctcgctagcgaagttcctcagctggccctccagctcctgcaggatcccgagtcttacgtccgcgcttccgccgtgaccgctatggggcaattgtcttcacagggcttgcacgctccaacctcccccgaacatgccgaggcgcgtcagtcactgttcttggagctgcttcacattctgagcgtagacagtgaggggttcccgaggcgggcagtgatgcaggttttcacagagtggctcagggacggacatgccgatgccgcacaagacaccgaacaatttgtggccacggtcctgcaagcagccagtcgcgatttagattgggaggtacgagcccaaggtctggaattggctctggtctttctgggccagactctcgggccaccccgaacacattgtccctacgccgtcgccctgccagaggtggcccctgctcagccactgactgaagccctgagggctttgtgtcacgtcggactgttcgactttgcattttgcgccctgttcgactgtgacaggcctgtggctcagaagagctgcgacctccttctatttcttagagacaagatcgcgtcatattccagcctacgtgaagcaagagggtctcctaatacagcgagcgctgaggcaaccttgcctcgatggcgtgcaggagagcaggcacaaccaccgggtgaccaggagcctgaggccgtgctggctatgctgagatcgctggatctggagggactgaggagcactttggccgagtcctccgatcatgttgagaagagccctcagagtcttttgcaggacatgctggcaaccggcggtttccttcaaggggacgaggccgactgttattag

SEQ ID NO: 244529 - DNA, 2915 bp, Artificial Sequence
  derived and/or modified sequence
tggcgggggtgatctgtcggagcgaccggcttggcgcctgcctgtccccagcccctctcagcttgaactccttccttcaagtctgggccctcgaggcttccagagcggcctccaggggtgcagtctcagttccccacgccagccgtctccgtcctccgcctcctccgggcctggcaggtggcactgtccggaggcggagccttgggcgaggggtggttgcggcggaggacgcaaccgagcgggcctgcggcctcaccatggacccagaatgcgcccagctgctcccggctctctgtgctgttctggtagatcccaggcagccggtggcagatgacacctgtttggagaagctcctggactggtttaaaacggtcactgaaggagagtccagtgtcgtgctgctgcaggagcacccctgcctggtggagctgctgtcccatgtgctgaaagtccaggacctgagttctggggtcctctccttctcactgcgcctggcaggaaccttcgcagcccaggaaaactgcttccagtatcttcagcagggggagttactaccagggctctttggggagccaggacccctcggccgagcaacctgggccgtccccaccgtgcgcagcggctggatccagggcctgcgctccctggcacagcaccccagcgccctgcgcttcctggccgaccatggtgcggtcgacaccatcttctccctgcagggagactccagcctgtttgtggcctcggcggccagtcagctcctggtgcacgtcctggctttgtccatgcgaggtggagccgaggggcagccctgcctgccggggggtgactggcccgcgtgtgcccagaagatcatggatcacgttgaagagtccttgtgctccgcggccacccccaaggtcactcaggccctgaacgtcctgaccacgaccttcgggcgctgccagagcccctggacggaagccctgtgggtgcggctgagtccccgcgtggcctgtctgctggagagagaccccatccccgccgcacactcgttcgtggacctgcttctctgtgtggctcgttctcccgtgttcagttcttccgacggcagcctgtgggagacagtggcgcgggctctgagctgcctgggtcccacccacatgggacccctggctttggggatcctgaagctcgagcactgtccacaggcactgaggacccaggccttccaggtccttctccagcccctggcctgtgtcctgaaggccacggttcaggcccccggacccccaggcttgctggacgggacggcagacgatgccacgacggtggacacactcctggcctccaagtcgtcctgcgccggcctcctgtgccgcaccctggctcacctggaggagctgcagccgctgccccagcgcccttcaccgtggccccaggcgtctctactgggggctacagtgactgtcctgcggctctgtgacggctcggctgcccctgcctccagtgtggggggccacctctgtgggaccctggcgggctgcgtccgggtccagcgagcagccctcgacttcctggggacgctgtcacaggggacaggcccccaggagctggtgacgcaggcgcttgctgtcctcctggagtgcctcgagagccccggctccagccccacggttctgaagaaggccttccaggccacgctcaggtggctcctgagctcacccaagacccccggctgctctgatctcggccccctcatcccgcagttcctcagagagctgttccctgtgctgcagaaacgcctgtgccacccctgctgggaggtgagggactccgccctcgagttcctgacccagctgagcaggcactggggaggacaggctgacttcagatgcgcactcttggcttcagaggtgcctcagctggccctgcagctcctccaggaccctgagagttatgtccgagcgagtgcagtgaccgccatggggcagctgtccagccagggcctgcacgcccccaccagccctgagcatgcagaggcccggcagagcctgttcctggagctcctgcacatcctctccgtagactcggagggcttcccacggcgggcggtcatgcaagtcttcactgagtggctgcgggacggccacgccgacgcggcccaggacacggagcagttcgtggccactgtgctgcaggcggcgagccgagacctggactgggaggtccgcgcccagggcctggagctggccctcgtgttcctgggccagactttggggccgccgcgtacccactgcccctatgccgtggccctacccgaggtggccccagcccagccactcaccgaggcactgagggctctctgccacgtggggctctttgacttcgccttttgtgccttgtttgactgcgaccgccctgtggcgcagaagtcttgtgacctccttctcttcctgagggacaagattgcttcctacagcagcctgcgggaggccaggggcagccccaacactgcctccgcagaggccaccctgccgaggtggcgggcgggtgagcaggcccagcccccaggggaccaggagcctgaggctgtgctggccatgctcaggtccctagacctggagggcctgcggagcacgctggccgagagcagcgaccacgtggaaaagagtccccagtccctcctgcaggacatgctggccacgggaggcttcctgcagggggacgaggccgactgctactgagcagaaccagagtctgccactggggctcaggaccaagggaggcagcaccatgtccttctgtgggacactgccagccccagggctccagcccagcccggtggatcctctggggaagccaggaccaggagagaagcaaggtcaagaaatcccacagtttgatgtattaaagaaatgacttatttctactcaaaa

SEQ ID NO: 244530 - DNA, 2466 bp, Artificial Sequence
  derived and/or modified sequence
atggaccccgagtgcgcccagctgctgcccgccctgtgcgccgtgctggtggaccccagacagcccgtggccgacgacacctgcctggagaagctgctggactggttcaagaccgtgaccgagggcgagagcagcgtggtgctgctgcaggagcacccctgcctggtggagctgctgagccacgtgctgaaggtgcaggacctgagcagcggcgtgctgagcttcagcctgagactggccggcaccttcgccgcccaggagaactgcttccagtacctgcagcagggcgagctgctgcccggcctgttcggcgagcccggccccctgggcagagccacctgggccgtgcccaccgtgagaagcggctggatccagggcctgagaagcctggcccagcaccccagcgccctgagattcctggccgaccacggcgccgtggacaccatcttcagcctgcagggcgacagcagcctgttcgtggccagcgccgccagccagctgctggtgcacgtgctggccctgagcatgagaggcggcgccgagggccagccctgcctgcccggcggcgactggcccgcctgcgcccagaagatcatggaccacgtggaggagagcctgtgcagcgccgccacccccaaggtgacccaggccctgaacgtgctgaccaccaccttcggcagatgccagagcccctggaccgaggccctgtgggtgagactgagccccagagtggcctgcctgctggagagagaccccatccccgccgcccacagcttcgtggacctgctgctgtgcgtggccagaagccccgtgttcagcagcagcgacggcagcctgtgggagaccgtggccagagccctgagctgcctgggccccacccacatgggccccctggccctgggcatcctgaagctggagcactgcccccaggccctgagaacccaggccttccaggtgctgctgcagcccctggcctgcgtgctgaaggccaccgtgcaggcccccggcccccccggcctgctggacggcaccgccgacgacgccaccaccgtggacaccctgctggccagcaagagcagctgcgccggcctgctgtgcagaaccctggcccacctggaggagctgcagcccctgccccagagacccagcccctggccccaggccagcctgctgggcgccaccgtgaccgtgctgagactgtgcgacggcagcgccgcccccgccagcagcgtgggcggccacctgtgcggcaccctggccggctgcgtgagagtgcagagagccgccctggacttcctgggcaccctgagccagggcaccggcccccaggagctggtgacccaggccctggccgtgctgctggagtgcctggagagccccggcagcagccccaccgtgctgaagaaggccttccaggccaccctgagatggctgctgagcagccccaagacccccggctgcagcgacctgggccccctgatcccccagttcctgagagagctgttccccgtgctgcagaagagactgtgccacccctgctgggaggtgagagacagcgccctggagttcctgacccagctgagcagacactggggcggccaggccgacttcagatgcgccctgctggccagcgaggtgccccagctggccctgcagctgctgcaggaccccgagagctacgtgagagccagcgccgtgaccgccatgggccagctgagcagccagggcctgcacgcccccaccagccccgagcacgccgaggccagacagagcctgttcctggagctgctgcacatcctgagcgtggacagcgagggcttccccagaagagccgtgatgcaggtgttcaccgagtggctgagagacggccacgccgacgccgcccaggacaccgagcagttcgtggccaccgtgctgcaggccgccagcagagacctggactgggaggtgagagcccagggcctggagctggccctggtgttcctgggccagaccctgggcccccccagaacccactgcccctacgccgtggccctgcccgaggtggcccccgcccagcccctgaccgaggccctgagagccctgtgccacgtgggcctgttcgacttcgccttctgcgccctgttcgactgcgacagacccgtggcccagaagagctgcgacctgctgctgttcctgagagacaagatcgccagctacagcagcctgagagaggccagaggcagccccaacaccgccagcgccgaggccaccctgcccagatggagagccggcgagcaggcccagccccccggcgaccaggagcccgaggccgtgctggccatgctgagaagcctggacctggagggcctgagaagcaccctggccgagagcagcgaccacgtggagaagagcccccagagcctgctgcaggacatgctggccaccggcggcttcctgcagggcgacgaggccgactgctactag

SEQ ID NO: 244531 - protein, 2213 aa, Artificial Sequence
  derived and/or modified sequence
MARGARPSAAGGGGGGAEPPERAGPGRPRGSPPGRARPSLAPRPGPEPSRPRAAPETSGGDTAGAGRCGGRRAAKLGPGRRGWWALLALQLHLLRALAQDDVAPYFKTEPGLPQIHLEGNRLVLTCLAEGSWPLEFKWMRDDSELTTYSSEYKYIIPSLQKLDAGFYRCVVRNRMGALLQRKSEVQVAYMGSFMDTDQRKTVSQGRAAILNLLPITSYPRPQVTWFREGHKIIPSNRIAITLENQLVILATTTSDAGAYYVQAVNEKNGENKTSPFIHLSIARDVGTPETMAPTIVVPPGNRSVVAGSSETTLECIASARPVEDLSVTWKRNGVRITSGLHSFGRRLTISNPTSADTGPYVCEAALPGSAFEPARATAFLFIIEPPYFTAEPESRISAEVEETVDIGCQAMGVPLPTLQWYKDAISISRLQNPRYKVLASGGLRIQKLRPEDSGIFQCFASNEGGEIQTHTYLDVTNIAPVFTQRPVDTTVTDGMTAILRCEVSGAPKPAITWKRENHILASGSVRIPRFMLLESGGLQIAPVFIQDAGNYTCYAANTEGSLNASATLTVWNRTSIVHPPEDHVVIKGTTATLHCGATHDPRVSLRYVWKKDNVALTPSSTSRIVVEKDGSLLISQTWSGDIGDYSCEIVSEGGNDSRMARLEVIELPHSPQNLLVSPNSSHSHAVVLSWVRPFDGNSPILYYIVELSENNSPWKVHLSNVGPEMTGVTVSGLTPARTYQFRVCAVNEVGRGQYSAETSRLMLPEEPPSAPPKNIVASGRTNQSIMVQWQPPPETEHNGVLRGYILRYRLAGLPGEYQQRNITSPEVNYCLVTDLIIWTQYEIQVAAYNGAGLGVFSRAVTEYTLQGVPTAPPQNVQTEAVNSTTIQFLWNPPPQQFINGINQGYKLLAWPADAPEAVTVVTIAPDFHGVHHGHITNLKKFTAYFTSVLCFTTPGDGPPSTPQLVWTQEDKPGAVGHLSFTEILDTSLKVSWQEPLEKNGIITGYQISWEVYGRNDSRLTHTLNSTTHEYKIQGLSSLTTYTIDVAAVTAVGTGLVTSSTISSGVPPDLPGAPSNLVISNISPRSATLQFRPGYDGKTSISRWIVEGQVGAIGDEEEWVTLYEEENEPDAQMLEIPNLTPYTHYRFRMKQVNIVGPSPYSPSSRVIQTLQAPPDVAPTSVTVRTASETSLRLRWVPLPDSQYNGNPESVGYRIKYWRSDLQSSAVAQVVSDRLEREFTIEELEEWMEYELQMQAFNAVGAGPWSEVVRGRTRESVPSAAPENVSAEAVSSTQILLTWTSVPEQDQNGLILGYKILFRAKDLDPEPRSHIVRGNHTQSALLAGLRKFVLYELQVLAFTRIGNGVPSTPLILERTKDDAPGPPVRLVFPEVRLTSVRIVWQPPEEPNGIILGYQIAYRLASSSPHTFTTVEVGATVRQFTATDLAPESAYIFRLSAKTRQGWGEPLEATVITTEKRERPAPPRELLVPQAEVTARSLRLQWVPGSDGASPIRYFTMQVRELPRGEWQTYSSSISHEATACVVDRLRPFTSYKLRLKATNDIGDSDFSSETEAVTTLQDVPGEPPGSVSATPHTTSSVLIQWQPPRDESLNGLLQGYRIYYRELEYEAGSGTEAKTLKNPIALHAELTAQSSFKTVNSSSTSTMCELTHLKKYRRYEVIMTAYNIIGESPASAPVEVFVGEAAPAMAPQNVQVTPLTASQLEVTWDPPPPESQNGNIQGYKIYYWEADSQNETEKMKVLFLPEPVVRLKNLTSHTKYLVSISAFNAAGDGPKSDPQQGRTHQAAPGAPSFLAFSEITSTTLNVSWGEPAAANGILQGYRVVYEPLAPVQGVSKVVTVEVRGNWQRWLKVRDLTKGVTYFFRVQARTITYGPELQANITAGPAEGSPGSPRDVLVTKSASELTLQWTEGHSGDTPTTGYVIEARPSDEGLWDMFVKDIPRSATSYTLSLDKLRQGVTYEFRVVAVNEAGYGEPSNPSTAVSAQVEAPFYEEWWFLLVMALSSLIVILLVVFALVLHGQNKKYKNCSTGKGISTMEESVTLDNGGFAALELSSRHLNVKSTFSKKNGTRSPPRPSPGGLHYSDEDICNKYNGAVLTESVSLKEKSADASESEATDSDYEDALPKHSFVNHYMSDPTYYNSWKRRAQGRAPAPHRYEAVAGSEAGAQLHPVITTQSAGGVYTPAGPGARTPLTGFSSFV

SEQ ID NO: 244532 - protein, 461 aa, Artificial Sequence
  derived and/or modified sequence
MKVLFLPEPVVRLKNLTSHTKYLVSISAFNAAGDGPKSDPQQGRTHQAAPGAPSFLAFSEITSTTLNVSWGEPAAANGILQGYRVVYEPLAPVQGVSKVVTVEVRGNWQRWLKVRDLTKGVTYFFRVQARTITYGPELQANITAGPAEGSPGSPRDVLVTKSASELTLQWTEGHSGDTPTTGYVIEARPSDEGLWDMFVKDIPRSATSYTLSLDKLRQGVTYEFRVVAVNEAGYGEPSNPSTAVSAQVEAPFYEEWWFLLVMALSSLIVILLVVFALVLHGQNKKYKNCSTGKGISTMEESVTLDNGGFAALELSSRHLNVKSTFSKKNGTRSPPRPSPGGLHYSDEDICNKYNGAVLTESVSLKEKSADASESEATDSDYEDALPKHSFVNHYMSDPTYYNSWKRRAQGRAPAPHRYEAVAGSEAGAQLHPVITTQSAGGVYTPAGPGARTPLTGFSSFV

SEQ ID NO: 244533 - DNA, 6642 bp, Artificial Sequence
  derived and/or modified sequence
atggccagaggcgccagacccagcgccgccggcggcggcggcggcggcgccgagccccccgagagagccggccccggcagacccagaggcagcccccccggcagagccagacccagcctggcccccagacccggccccgagcccagcagacccagagccgcccccgagaccagcggcggcgacaccgccggcgccggcagatgcggcggcagaagagccgccaagctgggccccggcagaagaggctggtgggccctgctggccctgcagctgcacctgctgagagccctggcccaggacgacgtggccccctacttcaagaccgagcccggcctgccccagatccacctggagggcaacagactggtgctgacctgcctggccgagggcagctggcccctggagttcaagtggatgagagacgacagcgagctgaccacctacagcagcgagtacaagtacatcatccccagcctgcagaagctggacgccggcttctacagatgcgtggtgagaaacagaatgggcgccctgctgcagagaaagagcgaggtgcaggtggcctacatgggcagcttcatggacaccgaccagagaaagaccgtgagccagggcagagccgccatcctgaacctgctgcccatcaccagctaccccagaccccaggtgacctggttcagagagggccacaagatcatccccagcaacagaatcgccatcaccctggagaaccagctggtgatcctggccaccaccaccagcgacgccggcgcctactacgtgcaggccgtgaacgagaagaacggcgagaacaagaccagccccttcatccacctgagcatcgccagagacgtgggcacccccgagaccatggcccccaccatcgtggtgccccccggcaacagaagcgtggtggccggcagcagcgagaccaccctggagtgcatcgccagcgccagacccgtggaggacctgagcgtgacctggaagagaaacggcgtgagaatcaccagcggcctgcacagcttcggcagaagactgaccatcagcaaccccaccagcgccgacaccggcccctacgtgtgcgaggccgccctgcccggcagcgccttcgagcccgccagagccaccgccttcctgttcatcatcgagcccccctacttcaccgccgagcccgagagcagaatcagcgccgaggtggaggagaccgtggacatcggctgccaggccatgggcgtgcccctgcccaccctgcagtggtacaaggacgccatcagcatcagcagactgcagaaccccagatacaaggtgctggccagcggcggcctgagaatccagaagctgagacccgaggacagcggcatcttccagtgcttcgccagcaacgagggcggcgagatccagacccacacctacctggacgtgaccaacatcgcccccgtgttcacccagagacccgtggacaccaccgtgaccgacggcatgaccgccatcctgagatgcgaggtgagcggcgcccccaagcccgccatcacctggaagagagagaaccacatcctggccagcggcagcgtgagaatccccagattcatgctgctggagagcggcggcctgcagatcgcccccgtgttcatccaggacgccggcaactacacctgctacgccgccaacaccgagggcagcctgaacgccagcgccaccctgaccgtgtggaacagaaccagcatcgtgcacccccccgaggaccacgtggtgatcaagggcaccaccgccaccctgcactgcggcgccacccacgaccccagagtgagcctgagatacgtgtggaagaaggacaacgtggccctgacccccagcagcaccagcagaatcgtggtggagaaggacggcagcctgctgatcagccagacctggagcggcgacatcggcgactacagctgcgagatcgtgagcgagggcggcaacgacagcagaatggccagactggaggtgatcgagctgccccacagcccccagaacctgctggtgagccccaacagcagccacagccacgccgtggtgctgagctgggtgagacccttcgacggcaacagccccatcctgtactacatcgtggagctgagcgagaacaacagcccctggaaggtgcacctgagcaacgtgggccccgagatgaccggcgtgaccgtgagcggcctgacccccgccagaacctaccagttcagagtgtgcgccgtgaacgaggtgggcagaggccagtacagcgccgagaccagcagactgatgctgcccgaggagccccccagcgccccccccaagaacatcgtggccagcggcagaaccaaccagagcatcatggtgcagtggcagcccccccccgagaccgagcacaacggcgtgctgagaggctacatcctgagatacagactggccggcctgcccggcgagtaccagcagagaaacatcaccagccccgaggtgaactactgcctggtgaccgacctgatcatctggacccagtacgagatccaggtggccgcctacaacggcgccggcctgggcgtgttcagcagagccgtgaccgagtacaccctgcagggcgtgcccaccgcccccccccagaacgtgcagaccgaggccgtgaacagcaccaccatccagttcctgtggaacccccccccccagcagttcatcaacggcatcaaccagggctacaagctgctggcctggcccgccgacgcccccgaggccgtgaccgtggtgaccatcgcccccgacttccacggcgtgcaccacggccacatcaccaacctgaagaagttcaccgcctacttcaccagcgtgctgtgcttcaccacccccggcgacggcccccccagcaccccccagctggtgtggacccaggaggacaagcccggcgccgtgggccacctgagcttcaccgagatcctggacaccagcctgaaggtgagctggcaggagcccctggagaagaacggcatcatcaccggctaccagatcagctgggaggtgtacggcagaaacgacagcagactgacccacaccctgaacagcaccacccacgagtacaagatccagggcctgagcagcctgaccacctacaccatcgacgtggccgccgtgaccgccgtgggcaccggcctggtgaccagcagcaccatcagcagcggcgtgccccccgacctgcccggcgcccccagcaacctggtgatcagcaacatcagccccagaagcgccaccctgcagttcagacccggctacgacggcaagaccagcatcagcagatggatcgtggagggccaggtgggcgccatcggcgacgaggaggagtgggtgaccctgtacgaggaggagaacgagcccgacgcccagatgctggagatccccaacctgaccccctacacccactacagattcagaatgaagcaggtgaacatcgtgggccccagcccctacagccccagcagcagagtgatccagaccctgcaggccccccccgacgtggcccccaccagcgtgaccgtgagaaccgccagcgagaccagcctgagactgagatgggtgcccctgcccgacagccagtacaacggcaaccccgagagcgtgggctacagaatcaagtactggagaagcgacctgcagagcagcgccgtggcccaggtggtgagcgacagactggagagagagttcaccatcgaggagctggaggagtggatggagtacgagctgcagatgcaggccttcaacgccgtgggcgccggcccctggagcgaggtggtgagaggcagaaccagagagagcgtgcccagcgccgcccccgagaacgtgagcgccgaggccgtgagcagcacccagatcctgctgacctggaccagcgtgcccgagcaggaccagaacggcctgatcctgggctacaagatcctgttcagagccaaggacctggaccccgagcccagaagccacatcgtgagaggcaaccacacccagagcgccctgctggccggcctgagaaagttcgtgctgtacgagctgcaggtgctggccttcaccagaatcggcaacggcgtgcccagcacccccctgatcctggagagaaccaaggacgacgcccccggcccccccgtgagactggtgttccccgaggtgagactgaccagcgtgagaatcgtgtggcagccccccgaggagcccaacggcatcatcctgggctaccagatcgcctacagactggccagcagcagcccccacaccttcaccaccgtggaggtgggcgccaccgtgagacagttcaccgccaccgacctggcccccgagagcgcctacatcttcagactgagcgccaagaccagacagggctggggcgagcccctggaggccaccgtgatcaccaccgagaagagagagagacccgccccccccagagagctgctggtgccccaggccgaggtgaccgccagaagcctgagactgcagtgggtgcccggcagcgacggcgccagccccatcagatacttcaccatgcaggtgagagagctgcccagaggcgagtggcagacctacagcagcagcatcagccacgaggccaccgcctgcgtggtggacagactgagacccttcaccagctacaagctgagactgaaggccaccaacgacatcggcgacagcgacttcagcagcgagaccgaggccgtgaccaccctgcaggacgtgcccggcgagccccccggcagcgtgagcgccaccccccacaccaccagcagcgtgctgatccagtggcagccccccagagacgagagcctgaacggcctgctgcagggctacagaatctactacagagagctggagtacgaggccggcagcggcaccgaggccaagaccctgaagaaccccatcgccctgcacgccgagctgaccgcccagagcagcttcaagaccgtgaacagcagcagcaccagcaccatgtgcgagctgacccacctgaagaagtacagaagatacgaggtgatcatgaccgcctacaacatcatcggcgagagccccgccagcgcccccgtggaggtgttcgtgggcgaggccgcccccgccatggccccccagaacgtgcaggtgacccccctgaccgccagccagctggaggtgacctgggacccccccccccccgagagccagaacggcaacatccagggctacaagatctactactgggaggccgacagccagaacgagaccgagaagatgaaggtgctgttcctgcccgagcccgtggtgagactgaagaacctgaccagccacaccaagtacctggtgagcatcagcgccttcaacgccgccggcgacggccccaagagcgacccccagcagggcagaacccaccaggccgcccccggcgcccccagcttcctggccttcagcgagatcaccagcaccaccctgaacgtgagctggggcgagcccgccgccgccaacggcatcctgcagggctacagagtggtgtacgagcccctggcccccgtgcagggcgtgagcaaggtggtgaccgtggaggtgagaggcaactggcagagatggctgaaggtgagagacctgaccaagggcgtgacctacttcttcagagtgcaggccagaaccatcacctacggccccgagctgcaggccaacatcaccgccggccccgccgagggcagccccggcagccccagagacgtgctggtgaccaagagcgccagcgagctgaccctgcagtggaccgagggccacagcggcgacacccccaccaccggctacgtgatcgaggccagacccagcgacgagggcctgtgggacatgttcgtgaaggacatccccagaagcgccaccagctacaccctgagcctggacaagctgagacagggcgtgacctacgagttcagagtggtggccgtgaacgaggccggctacggcgagcccagcaaccccagcaccgccgtgagcgcccaggtggaggcccccttctacgaggagtggtggttcctgctggtgatggccctgagcagcctgatcgtgatcctgctggtggtgttcgccctggtgctgcacggccagaacaagaagtacaagaactgcagcaccggcaagggcatcagcaccatggaggagagcgtgaccctggacaacggcggcttcgccgccctggagctgagcagcagacacctgaacgtgaagagcaccttcagcaagaagaacggcaccagaagcccccccagacccagccccggcggcctgcactacagcgacgaggacatctgcaacaagtacaacggcgccgtgctgaccgagagcgtgagcctgaaggagaagagcgccgacgccagcgagagcgaggccaccgacagcgactacgaggacgccctgcccaagcacagcttcgtgaaccactacatgagcgaccccacctactacaacagctggaagagaagagcccagggcagagcccccgccccccacagatacgaggccgtggccggcagcgaggccggcgcccagctgcaccccgtgatcaccacccagagcgccggcggcgtgtacacccccgccggccccggcgccagaacccccctgaccggcttcagcagcttcgtgtag

SEQ ID NO: 244534 - DNA, 1386 bp, Artificial Sequence
  derived and/or modified sequence
atgaaggtgctgttcctgcccgagcccgtggtgagactgaagaacctgaccagccacaccaagtacctggtgagcatcagcgccttcaacgccgccggcgacggccccaagagcgacccccagcagggcagaacccaccaggccgcccccggcgcccccagcttcctggccttcagcgagatcaccagcaccaccctgaacgtgagctggggcgagcccgccgccgccaacggcatcctgcagggctacagagtggtgtacgagcccctggcccccgtgcagggcgtgagcaaggtggtgaccgtggaggtgagaggcaactggcagagatggctgaaggtgagagacctgaccaagggcgtgacctacttcttcagagtgcaggccagaaccatcacctacggccccgagctgcaggccaacatcaccgccggccccgccgagggcagccccggcagccccagagacgtgctggtgaccaagagcgccagcgagctgaccctgcagtggaccgagggccacagcggcgacacccccaccaccggctacgtgatcgaggccagacccagcgacgagggcctgtgggacatgttcgtgaaggacatccccagaagcgccaccagctacaccctgagcctggacaagctgagacagggcgtgacctacgagttcagagtggtggccgtgaacgaggccggctacggcgagcccagcaaccccagcaccgccgtgagcgcccaggtggaggcccccttctacgaggagtggtggttcctgctggtgatggccctgagcagcctgatcgtgatcctgctggtggtgttcgccctggtgctgcacggccagaacaagaagtacaagaactgcagcaccggcaagggcatcagcaccatggaggagagcgtgaccctggacaacggcggcttcgccgccctggagctgagcagcagacacctgaacgtgaagagcaccttcagcaagaagaacggcaccagaagcccccccagacccagccccggcggcctgcactacagcgacgaggacatctgcaacaagtacaacggcgccgtgctgaccgagagcgtgagcctgaaggagaagagcgccgacgccagcgagagcgaggccaccgacagcgactacgaggacgccctgcccaagcacagcttcgtgaaccactacatgagcgaccccacctactacaacagctggaagagaagagcccagggcagagcccccgccccccacagatacgaggccgtggccggcagcgaggccggcgcccagctgcaccccgtgatcaccacccagagcgccggcggcgtgtacacccccgccggccccggcgccagaacccccctgaccggcttcagcagcttcgtgtag

SEQ ID NO: 244535 - DNA, 6642 bp, Artificial Sequence
  derived and/or modified sequence
atggcgaggggggcccgaccaagtgccgcaggtggcggaggaggcggcgccgaacccccagagcgcgccggacctggaaggccccgcggtagcccccctggccgtgcccgacccagcctggcgccacgcccaggtccagagccatccagaccgcgtgctgcacctgaaacatccggtggggacacggctggggccggccggtgtggtggaaggagagccgccaagctcggacccgggcggcgcggctggtgggctttgctggcattacagcttcatcttctgcgcgccttagctcaggatgacgtggctccctatttcaagacggaacctggactaccccagatccacctagaggggaaccgtttggtcctcacttgccttgccgaaggaagctggccacttgaatttaaatggatgcgagatgacagcgagctcaccacctactcttcggagtataaatacattattccttccctgcagaagcttgatgcaggtttctatcgttgcgtggtgcgcaaccggatgggtgccctactacaacgaaaaagcgaagtgcaagtggcgtacatggggtccttcatggataccgaccagaggaaaaccgttagccaaggtcgcgccgccatattgaacctgctccccattacgagctaccctaggccacaagtgacctggttcagggaggggcacaaaattatcccatctaatcgaatcgcaataaccctcgagaatcaactcgtgatcctggcgaccaccactagcgacgccggggcatactatgtccaggccgtgaacgaaaagaacggggagaacaaaacctccccctttattcatctttccattgctcgcgatgtaggaacccccgaaacaatggcaccaaccatagtagtccctcccgggaacagatccgtggtcgctggtagcagcgagactacattagagtgcatagccagcgctcgccccgtcgaggacctgtcagtgacatggaaacggaatggtgttagaatcaccagtggactgcattcatttggcaggcgactgactatatccaatcccacaagtgccgataccggcccatacgtatgcgaggcagctctgccaggctccgctttcgagcccgcccgagctactgcttttctcttcataattgagcctccttactttacagctgagcccgagtcgcgaattagcgctgaggttgaagaaaccgttgacatcggttgccaggccatgggcgtccccttgccaaccctgcagtggtataaagatgctatatccatcagcaggcttcagaaccctcgatacaaagtcttagcaagtggtgggctgaggattcagaagctcagacccgaagattctggcatatttcagtgctttgcaagtaatgagggcggagagattcagactcacacctacctggacgtcactaatattgcacccgtgtttactcagcggcccgtggacaccaccgtaactgacggcatgaccgctatcctgcgctgcgaggtgtctggggcaccaaagccggcaatcacctggaagcgcgagaatcacatactggccagcgggtccgttcgtatcccacgtttcatgctcctggagagtggagggttgcagattgcaccagtgttcatacaagatgcaggcaactatacatgttacgcagcaaatactgaagggtctcttaacgcaagcgcgaccctcaccgtctggaataggaccagtatagtgcatcctcccgaagatcacgtagtgatcaagggaactacggcaaccttgcattgcggcgcgacccatgatcctcgtgtctcgttgcgttatgtatggaaaaaggataacgtggctctgactccttcctctacttctcgcatagtggtggagaaggatggcagcctcttgatctctcagacctggagcggagatatcggagactacagctgcgaaatcgttagcgaagggggcaacgacagccggatggctcgcctcgaagtgattgagctgccccatagtccacagaatctgctcgtttcgccgaattcttcacactcacatgctgtagtgctctcctgggtccgacccttcgatggcaacagccccattctttactacatcgtcgagctatccgagaacaacagtccgtggaaggtgcacctttccaatgtcggcccggagatgaccggtgtaacggtcagtggcctcactcctgccagaacctatcagttcagggtatgcgccgtcaacgaagtaggtcgagggcaatacagcgccgagacctctagacttatgctgcccgaggagcctccaagcgctccgcctaaaaacattgtggcttctggacggaccaaccagagcatcatggttcaatggcaaccccccccggagacagaacataatggcgttcttagggggtatatcttgagatacagacttgctgggctccctggcgagtaccagcaaaggaatattacctctcccgaggtgaactattgccttgtcaccgacctcattatttggactcagtacgaaatccaagttgcagcctataacggagcaggcctgggagtcttcagcagagctgtcacagaatataccttgcagggcgtaccaaccgctcccccacagaatgtgcagactgaagcagtaaattccactaccatccagtttctgtggaacccccccccccagcagttcatcaatgggatcaatcaaggttacaagctattggcgtggcccgcagacgcacctgaagcggtcaccgtggtgacaatcgcaccagatttccacggcgtgcaccacggacatattactaatctgaagaagttcacagcgtactttacttctgtcctgtgcttcaccacgccaggagacgggccaccatccactccacagctggtctggactcaggaagacaaacctggggcagtcggacatctgtcatttacggagatcctcgatacgtccttaaaggtgtcttggcaggagcctctggaaaagaatggcattataaccggttaccagataagctgggaggtatatggccggaatgactccaggctgactcacactctcaacagtactacccatgagtacaagatccagggtttatcttcgcttacaacctacacaatagacgtcgcagcagtgacggcagtgggcacaggcctggttaccagttcaaccatcagcagtggggtcccgccggatttgcctggagcgccctcaaatctggtgatctccaatatctcacccagaagcgcaactttgcagtttcgaccaggttacgatgggaagacgtcaatctcaaggtggattgtggaaggccaggttggagctatcggtgacgaagaagaatgggtcaccttgtatgaggaggagaacgaacccgacgcccaaatgctggagatcccaaacctgaccccttacacccactatcgattccgcatgaaacaagtgaacattgttgggccatctccgtattcaccctcatcacgagtcatacagacactccaggcacctccagacgtagcacccacatcggtgacagtgagaactgccagcgagacatctctgcgactccgctgggtgcctctgccggattcacagtataatggcaatcccgaatccgtgggctacaggatcaaatattggcggtccgatctgcagtcttccgccgtggcccaggttgtgtctgacagattggagagggaatttacaattgaagagctagaggaatggatggaatatgaactgcagatgcaggcgtttaatgccgtcggggcgggcccctggagtgaggtcgtgagaggcaggacccgcgaatccgttccctctgcagcacctgaaaatgtgagcgccgaagccgttagctcaactcagattctgttgacgtggacttccgtgcccgaacaggatcagaacgggctgattttgggatataagattctttttcgcgccaaggatcttgaccctgagccacgaagtcacatagtcaggggtaatcacacccagagcgcgctcctggccggacttaggaagtttgtactttacgagctccaggtgctggcctttacacgaatcggcaatggggtcccctcgactcccctcattctggagagaaccaaagatgacgcacccgggcccccagtgagactcgtcttccccgaagttagactcacctctgtgcggatagtttggcagccacccgaagagcccaacgggatcatcctcggataccagatcgcatacaggctggcgtccagctcgccccacacatttacaactgttgaagtcggtgctaccgttagacagttcactgccacagacttagctccagaaagcgcctatatttttcgcctgtctgctaaaacacggcagggttggggcgaacctctggaagccacagtgatcactacagagaaacgagagcgccctgctccacccagagaactgttagtgccccaggccgaggtcacagcccgctccctcagacttcagtgggtgcctggaagtgatggagcctcacccatcagatattttaccatgcaggtaagggagttgcctagaggggaatggcaaacctattcttcaagtatatcgcatgaggctactgcctgcgttgttgatcgcctgcggccatttactagttataagttgagattaaaagccaccaatgacatcggagatagcgatttttcatctgaaacagaagctgtgacgaccctacaggacgtgccgggtgagccaccggggtcagtatccgcaactccacacacaaccagttcagtgttaattcaatggcagccacccagggatgagagtctcaatgggctacttcaggggtaccgcatatactaccgcgagctagagtacgaggcgggctctggcaccgaggccaaaaccctgaaaaaccccatagcactccacgccgaacttaccgcccagtcatcttttaagacagtgaatagctcgagcacgagcacaatgtgcgagctgacacacctgaaaaaatatcggcgctatgaggtgatcatgaccgcatacaatatcataggcgaatccccagctagcgcccctgttgaagtttttgtcggagaggccgcccccgcgatggcacctcagaatgttcaggtgactccgctgacagcctcccagctggaggtgacctgggacccacccccacctgagtctcagaatggcaatattcaaggctataaaatttattattgggaggcagactcccagaacgagaccgaaaagatgaaagtgctgttcttgcctgaacctgtggttagactcaaaaacctaacaagtcataccaaatatctggtcagcatttctgccttcaacgcagcaggcgacggccctaagtctgatcctcagcagggacgtactcaccaggctgccccaggcgccccctctttccttgccttcagcgagattaccagtactaccctcaatgtatcgtggggcgagccagccgccgcaaacgggatcctgcagggatacagggtggtatacgaacccctggcacccgtccagggtgtgtccaaagtggtgactgtggaggtacgcgggaattggcaaaggtggctgaaggtccgtgatctgacaaagggggtaacttatttcttccgggttcaggctaggacaatcacttatggccctgagcttcaggccaatataactgctggacccgcggaggggtcccctgggagtccacgtgacgtcttagtgactaaaagtgcctcagagctaacattgcaatggactgagggacacagtggcgacactccaaccacgggctacgtgatagaagcgcggccgtcagacgaggggctgtgggatatgttcgttaaagacattcccaggagcgctacttcctacaccctgagcctagacaagcttcgccagggtgtgacatacgagtttagggtggtggctgtcaatgaggccggctacggcgaacctagcaaccccagtacagccgtgtccgcacaggtcgaggcgcccttctacgaagaatggtggtttctgttggtgatggccctgagcagcctgatcgtgattcttttagtagtttttgcactggtgcttcatggccagaacaagaaatataagaactgcagtaccgggaaagggatcagcaccatggaggagtccgtgactttagataatggtggattcgctgctttggagctcagctctcgacatttaaacgtgaagtcaacctttagcaaaaagaacgggactagaagccctcctcgcccctcaccaggagggctgcactactcagatgaggatatatgcaacaagtacaacggcgctgtgttaaccgaatcagtgtccttgaaggagaaatctgccgatgcatcagaatctgaggccaccgactctgattacgaagatgctctccctaaacactcattcgttaaccactacatgagcgacccgacctactacaacagctggaagaggcgagcccagggacgcgctcccgctccgcatcgatacgaagccgtcgccgggagtgaagccggggctcagttacaccccgtgattaccacccaatctgcaggtggggtatacacgcccgcaggacccggcgctaggacaccgctgaccgggttttcatccttcgtatag

SEQ ID NO: 244536 - DNA, 1386 bp, Artificial Sequence
  derived and/or modified sequence
atgaaagtgctctttctcccagagcccgttgtcagacttaagaatcttacatctcataccaaatacctcgtgtccatatcagccttcaacgcagccggggatggccccaaatccgacccacagcagggcaggacacaccaggccgcgcccggggcgccctctttcctggcgttctcagagattactagtacgacgcttaacgtttcttggggtgaacccgcggcggctaatggtattctccagggatatcgagtcgtctacgaacccctggctcccgtgcaaggggtgtccaaggtggtgacagtggaggtcagaggcaactggcagagatggttaaaggtacgtgacctcaccaaaggtgtcacatacttttttcgcgtacaggcacgcacgatcacctatggtcccgagttacaggcgaatattaccgctggccccgctgagggaagcccaggtagccctcgtgacgtcctcgtgacgaagtctgcctcagaactgaccctgcagtggaccgaggggcactctggggacacgcccaccacaggctacgtgatcgaagcgagaccttcagatgaaggtttgtgggacatgttcgtgaaagacattcccaggagcgcaacctcttatactctgtctcttgataaattgcggcaaggtgtaacatacgaatttcgagtggtggccgttaacgaagcggggtacggtgagccatctaaccccagcactgccgtgagcgctcaggtggaagccccattttatgaagaatggtggttcctgcttgtgatggcactgtcctccctgattgtaattttattagtagtgttcgctctcgtcctgcatgggcagaataagaagtacaagaattgttcaactggcaagggtataagcacaatggaggagagtgtaaccctcgataatggtgggtttgccgccctggagctgtcctcccgacatctgaacgttaagagcacattctccaaaaagaacggaacccgaagtccccctagacccagtcctggcgggctgcattacagcgacgaggatatttgtaacaaatacaacggcgccgttctgacagaatctgtgagcctgaaagagaagagcgccgacgctagcgaatccgaagccacggactccgactatgaggacgccctgccgaagcactcgtttgtcaaccactacatgtctgaccccacgtattacaactcgtggaaaagacgcgcccagggcagagcccctgcgccgcacagatacgaagccgtagccgggagcgaagctggggcccagctacatcctgtgatcacaactcagtccgctggcggggtctatacccccgcaggacccggtgcccggactcccctgactgggttcagttcttttgtgtag

SEQ ID NO: 244537 - DNA, 6642 bp, Artificial Sequence
  derived and/or modified sequence
atggcccggggggcccggcccagcgctgctgggggcggcggcggcggcgctgagcccccagagagagctggccctggccggccccggggcagccccccaggccgggcccggcccagcctggccccccggcccggccctgagcccagccggcccagggctgcccctgagaccagcggcggggacacagctggagctggccgctgtggcggcagaagagctgccaagctgggccctggccggcggggctggtgggccctgctggccctgcagctgcacctgctgcgggccctggcccaggatgatgtggccccctacttcaagacagagcccggcctgccccagatccacctggagggcaaccggctggtgctgacctgcctggccgagggctcctggcccctggagttcaagtggatgagagatgattctgagctgaccacctacagcagcgagtacaagtacatcatccccagcctgcagaagctggatgctggcttctaccgctgtgtggtgaggaacaggatgggcgccctgctgcagaggaagtctgaggtgcaggtggcctacatgggcagcttcatggacacagaccagaggaagacagtgtcccagggccgggccgccatcctgaacctgctgcccatcaccagctacccccggccccaggtgacctggttccgggagggccacaagatcatccccagcaaccgcatcgccatcaccctggagaaccagctggtgatcctggccaccaccaccagtgatgctggggcctactacgtgcaggccgtgaatgagaagaatggagagaacaagaccagccccttcatccacctgagcatcgccagagatgtgggcaccccagagaccatggcccccaccatcgtggtgcccccaggcaacagatctgtggtggccggcagcagcgagaccaccctggagtgcatcgccagcgcccggcctgtggaggacctgtctgtgacctggaagagaaatggagtgcgcatcaccagcggcctgcacagctttggaagaaggctgaccatcagcaaccccaccagcgctgacaccggcccctacgtgtgtgaggccgccctgcccggcagcgcctttgagcccgcccgggccacagccttcctgttcatcatcgagcccccctacttcaccgctgagcctgagagccgcatctctgctgaggtggaggagaccgtggacatcggctgccaggccatgggcgtgcccctgcccaccctgcagtggtacaaggatgccatcagcatcagccggctgcagaacccccgctacaaggtgctggccagcggcggcctgcgcatccagaagctgcggccagaagattctggcatcttccagtgctttgccagcaatgaaggaggagagatccagacccacacctacctggatgtgaccaacatcgcccctgtgttcacccagaggcctgtggacaccaccgtgacagatggcatgacagccatcctgcgctgtgaggtgtctggggcccccaagccagccatcacctggaagcgggagaaccacatcctggccagcggctctgtgcgcatcccccgcttcatgctgctggagagcggcggcctgcagatcgcccctgtgttcatccaggatgctggcaactacacctgctatgctgccaacacagagggcagcctgaatgccagcgccaccctgactgtgtggaacagaaccagcatcgtgcaccccccagaagatcatgtggtgatcaagggcaccacagccaccctgcactgtggggccacccatgacccccgggtgtccctgcgctacgtgtggaagaaggacaacgtggccctgacccccagcagcaccagccgcatcgtggtggagaaggatggcagcctgctgatcagccagacctggagcggggacatcggggactacagctgtgaaattgtgtctgagggcggcaatgacagcaggatggcccggctggaggtgattgagctgccccacagcccccagaacctgctggtgagccccaacagcagccacagccatgctgtggtgctgtcctgggtgcggccctttgatggcaacagccccatcctgtactacatcgtggagctgtctgagaacaacagcccctggaaggtgcacctgagcaatgtgggccctgagatgactggagtgacagtgtctggcctgaccccagcccggacctaccagttccgggtgtgtgctgtgaatgaggtgggccggggccagtacagcgctgagaccagccggctgatgctgcctgaggagcccccatctgccccacccaagaacatcgtggccagcggccgcaccaaccagagcatcatggtgcagtggcagcccccacctgagacagagcacaacggggtgctgcggggctacatcctgcgctaccgcctggccggcctgcccggggagtaccagcagaggaacatcaccagccctgaggtgaactactgcctggtgacagacctgatcatctggacccagtatgagatccaggtggccgcctacaatggagctggcctgggcgtcttcagcagagctgtgacagagtacaccctgcagggcgtgcccacagccccaccccagaatgtgcagacagaggccgtgaacagcaccaccatccagttcctgtggaaccccccaccccagcagttcatcaatggcatcaaccagggctacaagctgctggcctggccagcagatgcccctgaggccgtgacagtggtgaccatcgccccagacttccacggcgtgcaccacggccacatcaccaacctgaagaagttcaccgcctacttcacctctgtgctgtgcttcaccaccccaggagatggcccccccagcaccccccagctggtgtggacccaggaggacaagccaggagctgtgggccacctgtccttcacagagatcctggacaccagcctgaaggtgtcctggcaggagcccctggagaagaatggcatcatcaccggctaccagatctcctgggaggtgtatggaagaaatgacagccggctgacccacaccctgaacagcaccacccatgagtacaagatccagggcctgagcagcctgaccacctacaccattgatgtggccgctgtgacagctgtgggcaccggcctggtgaccagcagcaccatcagcagtggagtgcccccagacctgcccggggcccccagcaacctggtgatcagcaacatcagccccaggtctgccaccctgcagttccggcccggctatgatggcaagaccagcatcagccgctggatcgtggagggccaggtgggcgccatcggagatgaggaggagtgggtgaccctgtatgaggaggagaatgaaccagatgcccagatgctggagatccccaacctgaccccctacacccactaccgcttcaggatgaagcaggtgaacatcgtgggccccagcccctacagccccagcagcagggtcatccagaccctgcaggcccccccagatgtggcccccacctctgtgacagtgaggacagccagcgagaccagcctgcggctgcgctgggtgcccctgcctgacagccagtacaatggaaatcctgagagcgtgggctaccgcatcaagtactggaggagtgacctgcagagcagcgctgtggcccaggtggtgtctgaccggctggagcgggagttcaccatcgaggagctggaggagtggatggagtatgagctgcagatgcaggccttcaatgctgtgggcgccggcccctggagcgaggtggtgcggggccgcacccgggagagcgtgcccagcgctgccccagaaaatgtgtctgctgaggccgtgagcagcacccagatcctgctgacctggacctctgtgcctgagcaggaccagaatggcctcatcctgggctacaagatcctcttccgggccaaggacctggaccctgagcccaggagccacatcgtgcggggcaaccacacccagagcgccctgctggccggcctgaggaagtttgtgctgtatgagctgcaggtgctggccttcaccagaattggaaatggagtgcccagcacccccctcatcctggagaggaccaaggatgatgcccctggcccccctgtgcggctggtgtttcctgaggtgcggctgacctctgtgcgcatcgtgtggcagcccccagaggagcccaacggcatcatcctgggctaccagatcgcctaccgcctggccagcagcagcccccacaccttcaccaccgtggaggtgggcgccaccgtgcggcagttcaccgccacagacctggcccctgagagcgcctacatcttccggctgagcgccaagacccggcagggctggggcgagcccctggaggccaccgtcatcaccacagagaagcgggagaggcctgccccaccccgggagctgctggtgccccaggccgaggtgacagcccggagcctgcggctgcagtgggtgcccggcagtgatggagccagccccatccgctacttcaccatgcaggtgcgggagctgcccagaggagagtggcagacctacagcagcagcatcagccatgaggccacagcctgtgtggtggaccggctgcggcccttcaccagctacaagctgcggctgaaggccaccaatgacattggagacagcgacttcagcagcgagacagaggccgtgaccaccctgcaggatgtgcctggagagcccccaggctctgtgtctgccaccccccacaccaccagctctgtgctgatccagtggcagcccccaagagatgagagcctgaatggcctgctgcagggctaccgcatctactaccgggagctggagtatgaagctggcagcggcacagaggccaagaccctgaagaaccccatcgccctgcacgccgagctgacagcccagagcagcttcaagacagtgaacagcagcagcaccagcaccatgtgtgagctgacccacctgaagaagtacagaagatatgaagtcatcatgacagcctacaacatcattggagagagccctgccagcgcccctgtggaggtgtttgtgggggaggccgccccagccatggccccccagaatgtgcaggtgacccccctgacagccagccagctggaggtgacctgggaccccccacctcctgagagccagaatggaaacatccagggctacaagatctactactgggaggccgacagccagaatgaaacagagaagatgaaggtgctcttcctgcctgagcctgtggtgcggctgaagaacctgaccagccacaccaagtacctggtgtccatcagcgccttcaatgctgctggagatggccccaagagtgacccccagcagggccgcacccaccaggccgcccctggggcccccagcttcctggccttcagcgagatcaccagcaccaccctgaatgtgtcctggggcgagcctgctgctgccaacggcatcctgcagggctacagagtggtgtatgagcccctggcccctgtgcagggcgtgtccaaggtggtgacagtggaggtgcggggcaactggcagcgctggctgaaggtgcgggacctgaccaagggcgtgacctacttcttccgggtgcaggcccggaccatcacctacggccctgagctgcaggccaacatcacagctggccctgctgagggcagccctggcagccccagagatgtgctggtgaccaagagcgccagcgagctgaccctgcagtggacagagggccacagcggggacacccccaccaccggctacgtgattgaggcccggcccagtgatgagggcctgtgggacatgtttgtgaaggacatccccaggtctgccaccagctacaccctgagcctggacaagctgcggcagggcgtgacctatgagttccgggtggtggccgtgaatgaggccggctacggggagcccagcaaccccagcacagctgtgtctgcccaggtggaggcccccttctatgaggagtggtggttcctgctggtgatggccctgagcagcctcatcgtcatcctgctggtggtgtttgccctggtgctgcacggccagaacaagaagtacaagaactgcagcacaggcaagggcatcagcaccatggaggagagcgtgaccctggacaatggaggctttgctgccctggagctgagcagccgccacctgaatgtgaagagcaccttcagcaagaagaatggcaccaggagccccccccggcccagccctgggggcctgcactacagtgatgaggacatctgcaacaagtacaacggggctgtgctgacagaatctgtgtccctgaaggagaagtctgcagatgccagcgagagcgaggccacagacagcgactatgaagatgccctgcccaagcacagctttgtgaaccactacatgtctgaccccacctactacaacagctggaagaggcgggcccagggccgggccccagccccccacagatatgaggccgtggccggcagcgaggccggggcccagctgcaccctgtgatcaccacccagagcgctggaggagtgtacaccccagctggccctggggcccggacccccctgaccggcttcagcagctttgtgtag

SEQ ID NO: 244538 - DNA, 1386 bp, Artificial Sequence
  derived and/or modified sequence
atgaaggtgctcttcctgcctgagcctgtggtgcggctgaagaacctgaccagccacaccaagtacctggtgtccatcagcgccttcaatgctgctggagatggccccaagagtgacccccagcagggccgcacccaccaggccgcccctggggcccccagcttcctggccttcagcgagatcaccagcaccaccctgaatgtgtcctggggcgagcctgctgctgccaacggcatcctgcagggctacagagtggtgtatgagcccctggcccctgtgcagggcgtgtccaaggtggtgacagtggaggtgcggggcaactggcagcgctggctgaaggtgcgggacctgaccaagggcgtgacctacttcttccgggtgcaggcccggaccatcacctacggccctgagctgcaggccaacatcacagctggccctgctgagggcagccctggcagccccagagatgtgctggtgaccaagagcgccagcgagctgaccctgcagtggacagagggccacagcggggacacccccaccaccggctacgtgattgaggcccggcccagtgatgagggcctgtgggacatgtttgtgaaggacatccccaggtctgccaccagctacaccctgagcctggacaagctgcggcagggcgtgacctatgagttccgggtggtggccgtgaatgaggccggctacggggagcccagcaaccccagcacagctgtgtctgcccaggtggaggcccccttctatgaggagtggtggttcctgctggtgatggccctgagcagcctcatcgtcatcctgctggtggtgtttgccctggtgctgcacggccagaacaagaagtacaagaactgcagcacaggcaagggcatcagcaccatggaggagagcgtgaccctggacaatggaggctttgctgccctggagctgagcagccgccacctgaatgtgaagagcaccttcagcaagaagaatggcaccaggagccccccccggcccagccctgggggcctgcactacagtgatgaggacatctgcaacaagtacaacggggctgtgctgacagaatctgtgtccctgaaggagaagtctgcagatgccagcgagagcgaggccacagacagcgactatgaagatgccctgcccaagcacagctttgtgaaccactacatgtctgaccccacctactacaacagctggaagaggcgggcccagggccgggccccagccccccacagatatgaggccgtggccggcagcgaggccggggcccagctgcaccctgtgatcaccacccagagcgctggaggagtgtacaccccagctggccctggggcccggacccccctgaccggcttcagcagctttgtgtag

SEQ ID NO: 244539 - DNA, 6642 bp, Artificial Sequence
  derived and/or modified sequence
atggcccggggcgcccggcccagcgccgccggcggcggcggcggcggcgccgaaccaccagaacgcgcaggccccggtcgaccacgaggcagccctcctggacgggccagaccctctctggcacctcgacctggacccgaacccagccgcccacgggctgcacccgagacttccggaggagacacagctggtgccggccgatgcggaggcaggcgcgccgccaaacttggacccggcaggaggggatggtgggctcttctggcactccagctgcatctgcttcgggctctggcccaggacgacgtggccccatacttcaaaaccgagccgggactacctcagatacacctggaaggtaacaggttagttctgacgtgtctggccgaaggcagttggccactggaatttaagtggatgcgtgacgatagtgaactgactacatacagctccgagtataaatatattattccctcactgcagaagctagatgccggattctacaggtgcgtggtgcggaacagaatgggcgcactgcttcagcggaaatctgaggttcaggtggcgtacatgggcagttttatggatacggatcagcgcaagactgtttcacaagggcgcgccgccatcttaaatttgctgcccattacttcctacccccgccctcaagtgacttggttccgggaaggacacaagataatcccgtccaaccgcattgccataaccctcgaaaatcagttggtgatcctcgccactactaccagcgacgccggcgcttattatgtccaggcggtgaatgagaaaaatggggaaaacaagacttcacctttcatacacttgtctatcgcaagggacgtgggtacccccgagacaatggccccaaccatcgtggtaccgccggggaacaggtcggtggtagccggtagctctgagactaccctggaatgcattgcatctgctcgcccggttgaagacctttccgtgacctggaaaagaaacggggttcggatcacatctggtctgcacagctttggtagacgcctcacaatcagcaatccaacttctgcagacacagggccatatgtctgtgaagccgcgcttccaggttcagccttcgaaccagctcgagcgaccgctttcctctttatcattgaaccaccttactttacagctgagccagaatctagaatctcagccgaggtcgaagagaccgttgacattgggtgccaggcaatgggagtcccgttacctaccctccaatggtacaaggatgcaatcagcatctccaggcttcagaaccctcggtataaggttctcgcaagcgggggccttagaatacaaaaactccggcccgaagacagcggtatcttccagtgcttcgccagtaatgagggtggcgagattcagacccacacatatttggatgtgactaatattgccccggttttcacccagagacccgtagataccactgtgacagacggaatgactgccattttgaggtgcgaagtgtcaggggctcctaaaccggccattacttggaagcgcgagaaccatatcctggctagtggatccgtgcggatacctaggttcatgctcctcgaatctggcgggctccaaatagcacccgtattcattcaggatgccggaaattatacctgctacgcagctaacactgagggtagtctcaatgcttctgcgactctcaccgtctggaaccgcactagcattgttcatccacccgaagaccatgtcgtgatcaagggtaccacagccacattacactgtggagccacccatgaccctagggtgagtctgcgttatgtgtggaagaaagataacgtggcattaactccctccagtacatcgcgaattgtggttgaaaaggacgggtcgctactcatttcacaaacctggagtggcgacatcggagattatagctgtgagatagtgagcgagggcgggaatgattcacgtatggccaggctcgaggtcatagagctgcctcattccccccagaacttactcgtgtcccctaactccagccacagccacgcagtggtgctgtcttgggtcaggcctttcgacggcaacagtccaattctttactacattgtggagctgtctgagaataactcaccatggaaagtccaccttagtaacgtcggaccggagatgacaggcgtcactgtctctgggctcacacctgcccgcacgtatcagttccgagtgtgcgcggttaatgaggtgggccggggccagtactccgctgaaacatctcggctgatgctacccgaggaacctcccagcgctccccccaagaacatcgttgcctccgggcgcaccaaccagtccattatggtccaatggcaaccacccccagaaacagagcataatggggtgctgcggggatatatcctcagataccggcttgctggtcttcctggggagtaccagcagcgaaatattacaagccccgaagttaactactgcctggtgaccgacctgatcatatggacacaatacgagattcaggttgccgcctacaatggggctggcctcggagttttctcaagggcagtgactgaatacaccttacaaggggttcccaccgctcccccacagaacgttcagaccgaggctgtcaatagcaccactattcagttcctgtggaacccacctccccagcagtttatcaacgggataaaccaagggtataagctgctcgcctggcctgccgacgcccctgaggctgtcactgtggtgactattgcacctgactttcatggcgtgcaccacggacacatcactaacctgaagaagtttaccgcttacttcacatctgtactttgttttacaactccaggggatgggcccccctcaacccctcaactggtgtggacccaagaggataagcccggagcagtcggacaccttagcttcacagaaatcctcgacacaagtcttaaagtatcttggcaggaaccgttggaaaagaacggcataatcacagggtatcagatctcttgggaagtgtacgggcggaacgatagccgactcacccatactttgaacagtactacccacgagtacaagatccagggtctctcttctctcaccacctatactattgacgtcgcggcagtaacagccgtcggtaccgggctggttacgtcttccactatttctagtggagtaccccccgacctccctggtgcaccatccaatctggtcatcagtaatattagccccaggagcgcgaccctgcaattccgtcccggatatgatggcaaaacatccatctcaaggtggatcgtggaaggtcaagtcggggccattggggacgaggaggaatgggtcaccctctatgaggaggagaacgagccagatgcccagatgttagaaatcccaaatttaaccccttacacacactatcgctttcgcatgaagcaagtgaacattgtcggaccctcaccgtacagcccttcatcaagagtaatacaaacacttcaggcacccccagacgtagcaccaacgtctgtgaccgtacgaaccgccagcgagacctctttgagactccggtgggtcccactcccagatagccaatacaacgggaaccctgaatccgtgggatatcgcattaagtactggagaagcgacctacagtcgtctgctgtggcccaggtggtcagcgaccggctggagcgggaattcaccattgaagaactcgaagaatggatggagtacgaattgcagatgcaggcgtttaatgctgttggggccggcccctggtccgaagtggtccgtgggcgcacccgtgaaagcgtgccgagcgcagctccagaaaatgtgtcagctgaagcagtctcatctacccagatattactgacctggacgagcgtgcctgaacaggaccagaacgggctgatactgggatacaagattctatttagagctaaggatcttgatccagaaccaaggtctcacattgtgcgcggcaatcatacacagtctgccctccttgccgggcttcgcaaatttgtgctgtatgagctccaggtgctcgccttcacccggatcggcaacggcgttcctagcacccccctgatcctagaacgcaccaaggatgatgccccaggccctccggtgagactggtcttcccagaggttcgactaacctctgtacgcatagtgtggcagcctcctgaggaacccaatggcattatactgggttatcagatagcctacaggctagccagcagctctcctcacactttcactactgtggaggtgggcgcaaccgtccggcaatttacagctactgacttggctcccgaaagtgcatatatttttcgattaagcgctaaaacccgccaaggctggggggagcccctcgaagcaaccgttatcacaacagaaaagagagagcgccctgctcctcctagggagctgctcgtgccccaggctgaagtgactgcccgctccctgcgcctgcagtgggtgccaggttcagatggcgcatcaccaatcagatactttaccatgcaggtgagagagttgccaagaggtgaatggcagacttatagttcctctatttcacacgaagccactgcttgcgtcgtggatcgtctgcgcccctttacctcctacaaactacggctgaaggcaaccaacgatataggcgactccgattttagcagtgagactgaggccgtcaccaccctgcaggacgtcccaggggagcccccaggcagcgtgtcggctacgccacacacaacctcatccgtgctcatacagtggcagccacccagggacgagtccctcaatggccttttacagggatataggatctactaccgggagctggaatacgaggcagggtccgggactgaggcgaaaaccttgaagaatccgatcgccttgcacgctgagcttactgcccagagctcattcaagactgtcaattcaagttcaacctctaccatgtgtgagctcacccatctgaaaaaataccgccggtatgaggtgattatgaccgcctataatatcatcggggaatcacccgcatcagcaccggtcgaggtattcgttggggaggcagctccagcaatggccccacagaacgtgcaggtaacccctttaactgccagccagttggaagtgacctgggaccccccgcctccagaatcccagaatgggaacatccagggttacaagatctattactgggaggcggatagccaaaacgagacggaaaaaatgaaagtgctcttcctcccagagccggtagtcagactgaagaacctgacatctcataccaagtatctggtaagcatatccgcgttcaacgccgcgggagacggacccaagtcagacccccaacaggggaggacccaccaggccgctccaggtgcgccttcatttcttgccttcagcgagatcacatcaacgaccttaaacgtgagttggggggaacccgccgccgctaacggcatcctacaggggtatagggttgtgtatgagcccttagctccggtgcaaggggtgagcaaagttgtcactgttgaggtcagggggaattggcagagatggctcaaggtcagggatcttactaaaggggtgacatacttttttagagtgcaagcccgtactatcacatacggtcctgagctgcaagccaacatcacagccggaccagccgaggggtcacctggcagcccacgcgatgttctagtcacaaagagcgcatccgagttaactctgcagtggacagaaggacactctggagacacccctaccacaggatacgtgatcgaggcaagacctagtgacgaggggctgtgggacatgttcgtgaaggacatccctcggtcagccacaagctacaccctctcactggacaagctaagacagggagtcacctatgaattcagggtcgtggctgtcaatgaggctggatatggcgagccaagtaacccctccactgccgtctctgcccaggtcgaagctcccttttatgaggagtggtggttcctgctcgttatggcccttagttcattgatagtcatcttgctggttgtctttgccctggtgctccatggtcagaacaaaaagtacaagaattgcagtaccggtaagggaatttctactatggaagaatccgtcactctggataacggcggtttcgccgcactcgagctcagtagtcgccacttgaatgtgaaaagcacgttctcaaagaagaatggcaccaggagcccaccacgacccagcccaggggggctgcattattctgatgaggatatatgcaataaatacaacggcgccgtgcttacagaatctgtgtctctgaaggagaagtctgctgacgcatcagaatcagaggctactgatagcgactatgaggatgcactgcctaagcatagcttcgtgaatcattacatgtccgaccctacctattacaactcctggaagcgtcgggcgcaaggccgtgctcctgccccccatagatacgaagctgtggcaggcagcgaagcaggcgcccagctgcaccctgtcataacgactcagtcagcggggggagtttacactcccgctggaccgggagcgagaactcctcttactggcttctcatctttcgtgtag

SEQ ID NO: 244540 - DNA, 1386 bp, Artificial Sequence
  derived and/or modified sequence
atgaaggtgctgttcctgcccgagcccgtggtgcggctgaagaacttaacatcccatacaaagtacctggttagcatatccgctttcaacgccgctggagacggtccaaagtccgacccccaacagggtaggacacaccaagccgctccgggagctccaagcttcctggcattctctgagatcacttcaacaacccttaacgtctcatggggcgaaccggccgccgctaacggcatactgcagggttatagagttgtctatgagccacttgcgcccgtgcagggcgtgtcaaaggttgttacagtggaggtacgaggaaactggcagcgttggctgaaggttcgggacctgaccaaaggcgtgacttattttttccgtgttcaggcccgcaccattacttacggcccagagctccaggcaaacattacagcaggacccgctgagggtagcccgggttcgccgagggatgtgctggtgactaagagtgcctctgaattaaccctccagtggactgagggacactctggggacacgccgacgacgggctacgtcatcgaggcaagaccctcagatgagggcctttgggatatgttcgtaaaagacatcccacgctctgctacaagctacaccctcagtttagacaagctgcgccagggtgtcacctacgagtttagggtggtagccgtgaatgaagcagggtacggtgagccttcaaacccttccactgcagtctcagctcaagtcgaggcaccattctatgaggagtggtggtttctccttgtgatggctctgagctcgttgatcgtcatcctcctagtggtgtttgcgctggtcttgcacggtcagaataaaaagtacaaaaattgcagtacgggcaagggcattagtactatggaggaatcggtcactctggataacggcgggtttgccgccctagagttgagcagtcggcacctgaacgtgaaatcaactttctccaagaagaacgggacccggtcaccaccccgcccaagccccggcggcctgcattactcggacgaggacatctgcaacaaatacaacggtgctgtcctcaccgagagtgtctccctgaaagagaagagcgcggacgcctccgagagcgaagcaaccgactctgattacgaagacgccctaccgaaacacagttttgtcaaccattatatgtccgaccctacctattacaatagctggaaaaggcgggctcaggggcgggcccctgctccacatcggtatgaagccgtggcggggtccgaggcaggcgcccagttgcaccccgttataaccactcagtcagcaggtggagtatacacaccggccggtcctggtgcgcggaccccccttacggggtttagtagctttgtatag

SEQ ID NO: 244541 - DNA, 6641 bp, Artificial Sequence
  derived and/or modified sequence
atggccaggggcgcaaggcctagcgcagcagggggaggcggaggtggtgccgaaccgcctgagagggcgggtcctggtcgcccacggggatctccccctgggagagccagaccatctcttgcaccacggccaggacccgaaccctctcggcctcgcgctgcaccagaaacatcgggcggagatacagcgggtgctggcagatgtggagggaggagagctgccaaactgggaccgggacggagaggatggtgggctcttttggctctgcaactgcacttactcagagccctcgcacaggatgacgtggctccctactttaaaaccgagcccggtctcccgcagattcatctggagggcaatcggctcgtgctgacttgcctggcggaaggcagctggccgctggagtttaagtggatgcgcgacgatagcgaactcaccacctactcctctgagtacaagtacatcattccatctctgcagaaattagacgccggattttacagatgtgtcgtgagaaacagaatgggcgctcttctgcagagaaagtccgaggttcaggtggcctacatgggttcttttatggatactgaccagcgaaagacagtgtcacaggggagggctgctattctaaatctactccctattacctcttacccacgcccacaggtaacgtggttcagggagggccacaaaattattccaagtaacagaatcgccattactttggaaaaccaactggtcatcctggctaccacaacctctgatgccggagcatattatgttcaggctgtaaatgaaaagaacggcgagaacaaaacctctcccttcattcatctgagcatagctcgtgacgttggtacaccagagaccatggcgcctaccatagtagtgccacctggcaacaggtctgtggtcgctggatcaagtgaaacgaccctggaatgtatcgctagcgcaagacctgtggaagatttaagcgtgacctggaaacgaaatggagtgaggatcacttcagggctgcatagcttcggcaggcgccttacgatcagcaaccctacatctgcagataccggaccatacgtttgcgaagccgcactacctgggtcagccttcgagcccgcaagggccaccgcatttctgtttataattgaacctccgtacttcacggccgagccagaatcccgaatctcggccgaggtcgaagagacagtcgatatcggatgtcaagcgatgggcgtgccactccctaccctgcaatggtataaggacgctatctcgatatccaggctgcagaatccccgatacaaagtgttggcctccggaggccttcggattcagaaacttagacccgaggattcgggcatattccaatgttttgcttctaacgagggcggtgaaatccaaactcatacttacctggatgtcactaatatcgcacccgtctttactcagcggccagttgacacaacggtcaccgacggtatgacagccattctccggtgcgaagtttccggtgctcccaagcctgccatcacctggaaaagagaaaaccacatcttggcttcagggtccgtgcgaattcctcggtttatgttgcttgagagcggaggcctgcagatcgcaccagtgtttattcaggacgccggaaattatacttgctacgcagctaatacggaagggagtctgaacgctagtgccacactgaccgtgtggaatcggaccagcattgttcatccccctgaggaccatgtggttattaaggggacaaccgcaacactccactgcggggcaacccacgatccacgggtgagcctacgctacgtctggaaaaaggataacgtagccctaaccccctccagcacaagcagaattgttgtggaaaaggatggttctttgcttataagccagacatggagtggagacattggagattattcatgcgaaatcgtgagcgaaggcggaaatgactctcggatggcccgtctggaagtcatagagctcccccacagcccccagaatctgctggtgtctcctaatagctcccattcccacgctgttgtcctgtcgtgggtacggccttttgatgggaattctccaatcctgtactacatcgttgaactgtctgaaaacaattcaccatggaaggtacacctgagtaatgtgggccctgaaatgaccggggtgactgtgtcaggccttactcccgctcgcacatatcagttccgcgtgtgcgctgtgaacgaagttggaaggggccagtacagcgccgagacttcccgccttatgttacctgaagagcctcctagcgcaccaccaaaaaatatcgtggcttcaggtcgcactaatcagagtattatggtccaatggcagccaccgcctgaaaccgagcacaatggagttctgcggggatacatcctgagatataggctggcgggtcttcctggcgaatatcagcagagaaacattaccagccctgaggtgaactattgcctagttactgatctgattatttggacccaatacgaaattcaggtggcagcttacaatggggctggtctgggggtgttcagtcgcgctgtcacagaatatacactgcagggggtgcctactgcccctccccagaacgtgcagacagaggctgtgaatagcacaacaattcaattcctgtggaatccacctccccagcagttcatcaatggaataaatcagggctacaagttgcttgcctggccagccgatgcacctgaggcggtgaccgttgtcacaatcgccccagactttcatggcgtgcaccatggccacatcacgaacttaaagaagtttacggcatactttacatcagtgctctgttttaccacccctggcgatggccctccttcaactccacagctcgtctggacgcaggaggataagcccggagccgttggtcatctctcctttacagaaatcctggatacaagtctgaaagtgtcttggcaggaacccctggagaagaacgggattattactggctatcagatctcctgggaagtctacggcagaaacgattccaggctaacccataccttgaactctaccacccacgagtacaaaattcagggcctgtccagcctgactacctatacaatcgatgtcgcagccgtcactgcagtaggaacgggcttagtgaccagctccaccatctcttccggcgtccccccagacttgcccggagctccatcaaacttggtcatctctaatatttccccaaggagcgcgaccctgcagttccgtccgggttacgacggcaaaacatctatttccaggtggattgtcgagggccaagttggggcaattggcgatgaagaagagtgggtgactctctatgaggaggagaatgaaccggatgcccagatgctggagatcccaaacctgaccccgtacacccattatcgatttcgtatgaaacaagtcaatatcgtgggcccaagcccttattcgcctagttcaagggtgatccagaccctgcaggcaccacccgacgtggcccctacgtcggtgacagtccgaactgcaagtgagacatcactgaggctccgctgggtgccactccccgatagtcagtacaacggcaacccggaatcggtaggctaccggattaagtactggcgctccgatctgcagagttccgctgttgcgcaggttgttagcgatcggttggagagggagtttaccattgaggagctagaggagtggatggagtatgagctgcagatgcaggcctttaatgccgttggcgcaggtccgtggagtgaggtcgtcagagggcgaacgcgcgagtccgtgcccagcgccgctcccgagaacgtctcagccgaggcagtgagctctacgcagatcctgctcacttggacaagcgtcccagagcaggaccaaaacgggctcatcttgggttataaaattttgtttcgggctaaggacttggaccccgagcccagatctcatattgttcgaggaaaccacactcagtccgctttactggccggtctcaggaagttcgtgctgtatgagctccaggtgctggcctttactcgtatcggcaatggggttcctagcacccccctgattttagaacgcacaaaagacgatgcgcctggccctccagtgcgtttggtgttccctgaggttcgcttaacctccgttaggatagtatggcagccacccgaagaaccgaacgggatcatcctaggatatcagatagcctacagactagcatcttccagcccacataccttcaccacagtggaagtgggcgctacagtgagacaattcactgcaacagacctagcgccagaatccgcatacatattcagactgtctgcaaagacgaggcagggctggggcgagcctcttgaggccactgtcataacaaccgaaaaaagagaaagacctgccccaccacgtgagttgctggtcccccaagcagaggtaaccgcccgttcattgcggctacagtgggtgccaggaagtgacggggcaagcccgattaggtatttcacaatgcaggtgcgggagctgcctcgtggagaatggcagacttacagcagtagcatatcacatgaagccaccgcttgcgtggtggatagattgcggccttttacaagttataagctgagactaaaggccacgaacgacattggggactccgactttagctctgagacggaagccgtgacaacactgcaggatgtccccggagagcccccaggctccgtttcagccacaccacatacaactagctctgtgttgattcagtggcagccaccgcgagacgagagtttaaacggtctcctccagggctataggatatattaccgggagctcgaatatgaggccggatccggcaccgaggccaaaacattaaaaaatcccatcgctctgcatgccgaacttacggctcagagctctttcaaaacagtgaattcttcaagcactagtacgatgtgcgagctgacacatctcaaaaagtacaggagatatgaagtaatcatgaccgcttataatattattggagagtctcccgcatctgcgcctgtagaagttttcgtaggcgaggccgctcccgctatggcaccgcagaatgtgcaggtgacaccccttaccgcctctcagctggaagtcacttgggaccccccaccaccggagtcacagaatggcaatatccaagggtacaaaatttactactgggaggcggactcacagaatgaaaccgagaaaatgaaggtgctgtttctgcccgagccggtggtgcgtctgaagaacctgaccagccatacaaaatatctcgtctcgatttccgcattcaatgcggcaggcgatggcccaaagagcgatccacaacagggcagaacacaccaagccgcacctggtgcaccatcgtttttggcatttagtgaaatcacatcaacgaccctgaacgtgtcctggggtgagcccgctgctgctaacggtattctgcaggggtaccgtgtggtgtacgaaccactcgcgcctgtgcagggggtgtctaaggtcgtgacagtggaggtcaggggaaactggcagagatggctcaaagttagggatctcaccaaaggcgtgacctatttcttcagagtgcaggctagaactatcacctatgggcctgagctccaagccaacattaccgcaggccctgccgagggatccccaggtagcccaagggatgtgctcgtcaccaagagtgcctccgaactcaccctgcagtggaccgaaggacacagtggagacactccgactaccggttacgtcatcgaggccaggccctcagacgaagggctatgggatatgttcgttaaagatatccctcggagcgcaacatcatatactttgtcattggataaactgcgccagggagtgacctacgagttccgtgttgtggccgtgaacgaagctggctatggcgagccatccaatccatcaactgccgttagcgcccaagtcgaggcccctttctatgaggagtggtggttcctgctcgtcatggccctgtctagtctgattgtgatactgcttgtggtattcgccctcgtgctccacgggcagaataagaagtacaagaactgtagcactggcaaaggtatatccaccatggaagaatctgtgacacttgacaacggaggcttcgctgccctggaactctctagccggcaccttaatgtgaagagtacattctcaaaaaaaaatggaacaagaagccccccaaggccttctcctggcggactgcattactcggacgaagatatctgtaataaatacaacggcgcagtcttgactgagagcgtgagcctaaaagagaagagtgccgatgcatctgagagcgaagctaccgactcagattacgaggacgcgctgcctaagcatagttttgtcaaccactatatgtccgaccctacctattacaactcatggaagagacgggctcaggggcgagcacctgcccctcatcgctatgaggctgtggccggttcggaggctggcgctcagttgcatccagtcatcacgactcaatccgcgggaggggtgtacactccagccggacccggagccaggacacccctaactgggttctcgtctttcgtgta

SEQ ID NO: 244542 - DNA, 1386 bp, Artificial Sequence
  derived and/or modified sequence
atgaaggttctgtttctgcccgaacccgtagttaggcttaagaacttaactagccacacaaagtatcttgtgtccatctctgcttttaatgctgctggagacggtccaaagagcgatccacagcaggggaggacacaccaggccgcaccaggcgctccttctttccttgccttctctgagattaccagcacaactcttaatgtaagctggggcgagcctgccgcagctaacggtattctgcagggttatagggttgtttacgagccactcgcccctgtccaaggggtaagcaaggtcgtgaccgtggaggttagggggaattggcagcgatggttaaaggtccgtgacctgactaagggtgtgacttacttctttcgagtgcaggctcgaacgattacctacggacccgagctacaagctaacattactgctggccctgccgagggctcccccggttcacccagggacgtactggtgacaaagagtgcgagtgaacttaccttgcaatggacggaaggtcacagcggggacacaccaaccacagggtacgtgatcgaggccagaccatctgatgagggactgtgggatatgttcgtgaaggatattcccaggtcagctacctcctacactttatcccttgataagctgagacaaggggtgacgtatgaatttagagttgtggctgtcaacgaagcaggatatggcgagccctccaatccttcaactgctgtatcagctcaggttgaagcgcctttctatgaagagtggtggttcctgctcgtcatggcattatccagcttaattgtaatcctgctcgttgttttcgcgttggtgctacacggacaaaataagaaatacaaaaactgcagcactgggaagggaatctctaccatggaggagtctgtgacattggataacggtggattcgctgctctagagctgtctagcagacacctaaacgtcaagtctacattttcaaaaaagaatggaaccagatccccccctaggccatcacctggtgggctgcactactctgacgaggacatctgcaacaagtacaacggcgcagtcttgaccgagtctgtgtctctgaaagagaagtccgctgacgctagcgaatcagaggccactgactctgactacgaagatgcgcttcccaagcactcctttgtcaaccactacatgtctgatcccacttattataacagctggaaaaggagagcccagggcagagcaccggctcctcatagatacgaagcggtggcgggttcagaggccggtgcgcagctccacccagtaatcactacgcaaagcgctggtggagtatataccccagccggaccaggagcacgcacaccccttacagggttttcatcattcgtgtag

SEQ ID NO: 244543 - DNA, 10397 bp, Artificial Sequence
  derived and/or modified sequence
cctcagcgctgggcggccgctcacctcgggccggggggcgccgcgcctcccgcggagtggccgcgcccgctcggagccgtcccgcctgtcctgcccgcccgtccgtccggcgcggcgctcggggtggcggctgctcggcatggcccggggcgcccggccctcggcggccggtggcggcggcggcggcgcggagccccctgagcgcgcgggccccgggcggccgcggggatccccgcccggccgcgcccgcccctcgctggcgccgcgccccggcccggagccctcgcgaccccgggcggcgcccgagacctccggcggggacacggcgggcgcggggcggtgcggcgggcggcgggcggcaaagttggggccgggccgccgcggctggtgggcgctgctggcgctgcagctgcacttgctccgggcgctggcgcaagatgatgttgctccatattttaaaacggagccaggcctaccacagatccacctggaagggaaccgccttgttctcacctgccttgccgaagggagctggcctttggagttcaagtggatgcgcgatgacagtgagctcaccacctacagcagcgaatataagtacattattccatctttgcagaagctcgatgctgggttttaccgctgcgtggtgcgaaacagaatgggagcactcctgcaaagaaaatcagaagttcaagtcgcatatatgggaagtttcatggatacggaccagaggaaaacagtttctcaaggacgtgcagcgattctaaacctgctgcccatcaccagctaccccagacctcaagtgacttggtttagagaagggcacaagattattccaagcaacagaatagccatcacattggagaatcagctggtgatcctcgccaccacaaccagtgatgccggggcatactacgtgcaggccgtgaatgagaaaaatggagaaaacaagacaagcccattcattcatttgagcatagcaagagatgttggcacacctgaaaccatggccccaaccattgtggttcccccgggcaacagaagtgtggtggctggatccagtgagaccaccttggaatgtatagccagtgccaggcctgtggaggacctgagtgtgacctggaagaggaatggagtgagaatcaccagtggcctccacagctttggaagacgcctcaccatcagcaacccgacgtccgcggacaccgggccatacgtctgcgaggcggcgctgccggggagcgcttttgaaccggccagggcgacggcctttcttttcatcatagagccaccatattttactgctgagcccgagagtcggatttcagctgaagtagaagaaactgtggacatcggatgtcaagccatgggggtcccccttcccaccctccagtggtacaaggatgccatctccatcagcaggctccagaatcctcgatacaaagtgctcgccagcggaggcctgcgcatccagaagctgcgtccagaggactccggaatcttccagtgcttcgccagcaatgaaggaggggagatccagacccacacctacctggatgtaaccaatatcgctccagtgttcacccagcggccagtggacaccacagttactgacgggatgacagccattctaaggtgtgaggtgtccggggctcccaaacccgccatcacctggaaaagagaaaaccacattctggccagtggctctgtccggattcctaggttcatgcttcttgaatcggggggtctacagatcgcgcccgtcttcatccaggatgccggcaactacacctgctatgcggccaacacagagggctccctgaatgcatcggccacgctcactgtgtggaatcggacgtccatcgtccaccctcctgaggaccacgtggtgattaaggggaccacggccacgctgcactgtggtgccacacatgacccccgggtttcactccgctacgtttggaagaaggacaacgtggccctgactccatcgagcacgtctaggatcgtggtggagaaggacgggtcccttctcatcagccagacgtggtcaggcgacatcggtgactacagctgcgagattgtttctgaaggagggaatgactccaggatggcccggctggaagtgattgaactgcctcattcacctcagaacctcctggtcagccctaattcttcccacagccacgccgtggtgctctcttgggtccggccctttgatggaaacagtcctattctttattacatcgtggagctctctgaaaacaactctccatggaaggtgcatctgtcaaacgttggccctgagatgacaggcgtcaccgtgagtggcctgactccggctcgtacctatcaattccgggtgtgcgcggtgaatgaagtgggcaggggccagtacagcgccgagacaagcaggttgatgctacctgaagaaccacccagtgctcccccgaaaaatatagtggccagtgggcggactaatcagtccattatggtccagtggcagccacccccagaaacagagcacaacggggtgttgcgtggatacatcctcaggtaccgcctggctggccttcccggagagtaccagcagcggaacatcaccagcccggaggtgaactactgcctggtgacagacctgatcatctggacacagtatgagatacaggtggcggcgtacaacggggccggtctgggcgtcttcagcagggcagtgaccgagtacaccttgcagggagtgcccaccgcgcccccgcagaacgtgcagacggaagccgtgaactccaccaccattcagttcctgtggaaccctccgcctcagcagtttatcaatggcatcaaccagggatacaagcttctggcatggccggcagatgcccccgaggctgtcactgtggtcactattgccccagatttccacggagtccaccatggacacataacgaacctgaagaagtttaccgcctacttcacttccgttctgtgcttcaccacccctggggacgggcctcccagcacacctcagctggtctggactcaggaagacaaaccaggagctgtgggacatctgagtttcacagagatcttggacacatctctcaaggtcagctggcaggagcccctggagaaaaatggcatcattactggctatcagatctcttgggaagtgtacggcaggaacgactctcgtctcacgcacaccctgaacagcacgacgcacgagtacaagatccaaggcctctcatctctcaccacctacaccatcgacgtggccgctgtgactgccgtgggcactggcctggtgacttcatccaccatttcttctggagtgcccccagaccttcctggtgccccatccaacctggtcatttccaacatcagccctcgctccgccacccttcagttccggccaggctatgacgggaaaacgtccatctccaggtggattgttgaggggcaggtgggagctatcggcgacgaggaggagtgggtcaccctctatgaagaggagaatgagcctgatgcccagatgctggagatcccaaacctcacaccctacactcactacagatttcgaatgaagcaagtgaacattgttgggccgagcccctacagtccgtcttcccgggtcatccagaccctgcaggccccacccgacgtggctccaaccagcgtcacggtccgtactgccagtgagaccagcctgcggcttcgctgggtgcccctgccggattctcagtacaacgggaaccccgagtccgtgggctacaggattaagtactggcgctcagacctccagtcctcagcagtggcccaagtcgtcagtgaccggctggagagagaattcaccatcgaggagctggaggagtggatggaatacgagctgcagatgcaggccttcaacgccgtcggggctgggccgtggagcgaggtggtgcggggccggacgcgggagtcagttccttcagccgcccctgagaacgtgtcagccgaggctgtcagctcgacccagattttactgacatggacatccgtgccggaacaggaccagaatgggctcatactgggctacaagatcctgttccgggccaaagacctggatcccgagcccaggagccacatcgtgcgagggaaccacacgcagtcggccctgctggcaggcctgcgcaagttcgtgctctacgagctccaggtgctggcgttcacccgcatcgggaacggggtccccagcacgcccctcatcctggagcgcaccaaagacgatgccccaggcccaccagtgaggctcgtgttccccgaagtgagactcacctccgtgcggatagtgtggcaacctccggaggagcccaacggcatcatcctggggtaccagattgcctaccgcctggccagcagcagcccccacaccttcaccaccgtggaggtcggcgccacagtgaggcagttcacagccaccgacctggccccggagtccgcatacatcttcaggctgtccgccaagacgaggcagggctggggggagccactggaggccaccgtcatcaccaccgagaagagagagcggccggcaccccccagagagctcctggtgccccaggcagaagtgaccgcacgcagcctccggctccagtgggtcccgggcagcgacggggcctcccccatccggtacttcaccatgcaggtgcgagagctgcctcggggtgagtggcagacctactcctcgtccatcagccatgaggcgacagcatgcgtcgttgacagactgaggcccttcacctcctacaagctgcgcctgaaagccaccaacgacattggggacagtgacttcagttcagagacagaggcggtgaccacgctgcaggatgttccaggagagcccccgggatctgtctcagcgacgccacacaccacgtcctctgtcctgatacagtggcagcctccgagggacgaaagcctgaatggccttcttcagggatacaggatctactacagggagctggagtatgaagccgggtcaggcactgaggccaagacgctcaaaaaccctatagctttacatgctgagctcacagcccaaagcagcttcaagacggtgaacagcagctccacatcgacgatgtgtgaactaacacatttaaagaagtaccggcgctatgaagtaataatgaccgcctataacatcatcggcgagagcccagccagcgcgcccgtggaggtctttgtcggcgaggctgccccggccatggccccgcagaacgtgcaggtgaccccactcacggccagccagctggaggtcacgtgggacccaccacccccggagagccagaatgggaacatccaaggctacaagatttactactgggaggcagacagccagaacgaaacggagaaaatgaaggtcctcttcctccccgagcccgtggtgaggctgaagaacctgaccagccataccaagtacctggtcagcatatcagccttcaacgccgccggagatggacctaagagtgacccccagcaggggcgcacccaccaggccgcccctggggcccccagctttctggcgttctcagaaataacctccaccacgctcaacgtgtcctggggcgagcctgcggcggccaacggcatcctgcagggctatcgggtggtgtacgagcccttggcccctgtacaaggggtgagcaaggtggtgaccgtggaagtgagagggaactggcagcgctggctgaaggtgcgggacctcaccaagggagtgacctatttcttccgtgtccaagcgcggaccatcacctacgggcccgagctccaagccaatatcacagccgggccagccgagggatccccgggctcgcctagagatgtcctggtcaccaagtccgcctctgaactgacgctgcagtggactgagggacactctggcgacacacctaccacgggctatgtgatcgaggcccggccctcagatgaaggcttatgggacatgtttgtgaaggacatcccgcggagcgccacatcctacaccctcagcctggataagctccggcaaggagtgacttacgagttccgggtggtggctgtgaatgaggcgggctacggggagcccagcaacccctccacggctgtgtcagctcaagtggaagccccattctacgaggagtggtggttcctcctggtgatggctctgtccagcctgatcgtcatcctgctggtggtgttcgccctcgtcctgcacgggcagaataagaagtataagaactgcagcacaggaaaggggatctccaccatggaggagtctgtgaccctggacaacggaggatttgctgccctggagctcagcagccgccacctcaatgtcaagagcaccttctccaagaagaacgggaccaggtccccaccccggcctagccccggcggcctgcactactcagacgaggacatctgcaacaagtacaacggcgccgtgctgaccgagagcgtgagcctcaaggagaagtcggcagatgcatcagaatctgaggccacggactctgactacgaggacgcgctgcccaagcactccttcgtgaaccactacatgagcgaccccacctactacaactcatggaagcgcagggcccagggccgcgcacctgcgccgcacaggtacgaggcggtggcgggctccgaggcgggcgcgcagctgcacccggtcatcaccacgcagagcgcgggcggcgtctacacccccgctggccccggcgcgcgaactccgctcaccggcttctcctccttcgtgtgagcaaagcgccgcgcctccctcagggcggaacggaggcaactttccggagtctatttttgttaagacaatcaactccaataactgagctgaagtttttgtttaaaaagaaaaaaatctgataagtgatgattttacctacttgtggacactagatttcaattaggaaggtttttttaaacggctttttgtaacttcgctgcaggaagcaggtttgtttctttttcttttctttttaagagaaggtgtatttcactggtgcaatggcttggcacctccggggcctgggaggacctcagacctccccagccctgggtttctccgtcttcaagaccaactaggaagggtcaagcggggagagggagtggagggtcaggtgagatctcagagctgccccggccggcccccgtctctttctacctcctcttccagagaaccagcggctcacacccttctcaacgcaggacatcctcggcggctcctggggtttgaagagcaaacgtttttccctgggctcagtgcgttttgtcccaacttcatctgtttctgaaatgttctcacttggcagtgtctagtcaaggagtcggctttcaggttcctgacggccaggcagggatgctaaggtgtggctcagccgtcactgtctgtgtcactgcagtggtgcggtcctcaggcttttctgcctgtctttcccccttccttctcacctgacagcgagggagagggaagcctcttagggctggaagccaccacgctggccctctccttccccgaacacagcacacggtcaactccgcgggacacgaggacacgggacggcgtctccagaattgcttgttacgtaggaagcgtgcattgttaaccagagtatttttaaaatctttttatctttttttaaactatgtcacatgaaatgaatgcgtctttgctgtctccaggtgcctttttattaattgttcagctttgtacatgggaaagatgaaaagcaacagtgtctgcaaataaagcaaaacagctctgagaacacacgctcccgactcgcctcgtgcacaccaggccgtcccctccctctgtcctggcttctgctggctgctcgcagcagccaccgcttctccaccactggcgctgctgctgccccctctcccagtccgaggccagcttttagccttaacaggttttttggaaatgtttcttttttttatttaaaattgtcattgtttggtttaaatttttcagctagatgaaaagagtatgaactactttggaaaacttaacagctcagagatggccatgcctccagcccctcacgtcatctttgcaacagacgactgggctgccatggtccacccctcagcccgggtcccgggtctggatggaacgggagcactgctggtgcccactggcgtgtgtgccccgggtccctgtaagtgccccctcaccagcagcagcgtgacacacacaagactcaagaccaccctgtcagtgccccccagtgcacggcaaacgggcaggtgccgttcccccagtgacctgagggtaggggacaactgagcagtatctgaccagtgccacccaggagccagtctcctggccacatgcagaaagtgtggcccctgcttacctagatgttttgtgcacctccatgggcagagggtgtggatattgcctggattctgtgctgtcagcgttgctgagtatggccccaggagaccaaggagagttttgtataggctggaaaaccccttttcagtctttccaaaattagagggtatggcaagtttccttttttctctcctcccttccttcccctccttcctttcctttacccctcctttccttccttcctcccttcctctcttctttcctccctccctccctccttccctcccttccttcctctctttcctccttccttccctcccttctttccctccctcccttcctctctcccctattccttcttccttttctcctcctttttctgagtggagggggaaatattctaaaccaaaaatcctagatgctctgcccaaagccacttctgcatgagaatcgcaacccacagttccccggatgagactcaccacagtggacagtgccacctccttcccctcggccccggagagggcgaagtgggcgggaagccaggatgtgagcactggaatttcttggaagagaagcgataaatggagaccatggccagcgctgctttctgtgcactctgatgactgctctctgcagccatgaggatgtggctttacatgccagggagagtgttgagacgtcttaggttgaggatgagcagattcgagatatgtttgttgctctcgggttttcgatacaacatcatgacacttctgtttcaagctcatgttttccgtctcccctccactcttagtaaaccttgatctgtacggagcggcctgtccgaggctacgccggcctcctggctgctgctggactgtgcttaggacagcgcccatgcctcggagggactctgtcccatgagaaccacctgtgcaaaggaacagagctggatgtttccaggtagattttggcctcccagagcaatgcggcatttgagaagcaacagttcctaactccttatcttcagggaaggaaaagaaaatcacagcctaggaagatggaggttggattttaatctcggttttaaaaagaggacaaacaaaatgtctctaagccaggctagatggaatgtgctcccgctctctcctgccgtgctgaaagtcatgccttgcggatgcctcatgacagcagtggctgagtctccccacccacccccaacgtggctcatttcagattgcttcggccccaccctgcaaggatgtggtcacggagtggccaggaggctccgtctgagccacagggatgggtgtgcagagctccctcctcctggggtgccagggcagagattccaggcaggtgagcccagagagagctgccaggccacaccccctcggcctcctgcacggccaccttctgggtgaatcggtccagcccaagcccctctccccagcctcgccttcagcctctctcccagcctgcttttataaggcgcacttcactcaatgctgtagccaaaaaacgaggggccccagggagaggggacccagatggccacacacggaacgcgcctccacagccccgggaggtggctcactctgtacaggtcttcggaggccgtgtttgtatctaactgtgactgggctgaagcatgatgtttgcctaatggttcgtagcatggtttttatttcttacgcattcttggcacacagtgtagctatcctcctgacgagcaacccgtctgcgtacctaagtgtggctccccgtgggtcagcgtcctggtagcatggatccagtctgaaaggtgaggacaacgtggaaactcatgagctgagcctgcccgctgggacacgtctccttcccgcgtcaccttctggtttagggagccgtcaggtccctaaacgttccctacaactttttctgaaattgtgcagaaaaacagatctcattaaaagaaaaaaagaaacaacttgtaggaagacagagaggtgctatgggtacaatttttaataaaaacattattttgttccttaaa

SEQ ID NO: 244544 - DNA, 6997 bp, Artificial Sequence
  derived and/or modified sequence
cctcagcgctgggcggccgctcacctcgggccggggggcgccgcgcctcccgcggagtggccgcgcccgctcggagccgtcccgcctgtcctgcccgcccgtccgtccggcgcggcgctcggggtggcggctgctcggcatggcccggggcgcccggccctcggcggccggtggcggcggcggcggcgcggagccccctgagcgcgcgggccccgggcggccgcggggatccccgcccggccgcgcccgcccctcgctggcgccgcgccccggcccggagccctcgcgaccccgggcggcgcccgagacctccggcggggacacggcgggcgcggggcggtgcggcgggcggcgggcggcaaagttggggccgggccgccgcggctggtgggcgctgctggcgctgcagctgcacttgctccgggcgctggcgcaaggtaggtgccccatattttaaaacggagccaggcctaccacagatccacctggaagggaaccgccttgttctcacctgccttgccgaagggagctggcctttggagttcaagtggatgcgcgatgacagtgagctcaccacctacagcagcgaatataagtacattattccatctttgcagaagctcgatgctgggttttaccgctgcgtggtgcgaaacagaatgggagcactcctgcaaagaaaatcagaagttcaagtcgcatatatgggaagtttcatggatacggaccagaggaaaacagtttctcaaggacgtgcagcgattctaaacctgctgcccatcaccagctaccccagacctcaagtgacttggtttagagaagggcacaagattattccaagcaacagaatagccatcacattggagaatcagctggtgatcctcgccaccacaaccagtgatgccggggcatactacgtgcaggccgtgaatgagaaaaatggagaaaacaagacaagcccattcattcatttgagcatagcaagagatgttggcacacctgaaaccatggccccaaccattgtggttcccccgggcaacagaagtgtggtggctggatccagtgagaccaccttggaatgtatagccagtgccaggcctgtggaggacctgagtgtgacctggaagaggaatggagtgagaatcaccagtggcctccacagctttggaagacgcctcaccatcagcaacccgacgtccgcggacaccgggccatacgtctgcgaggcggcgctgccggggagcgcttttgaaccggccagggcgacggcctttcttttcatcatagagccaccatattttactgctgagcccgagagtcggatttcagctgaagtagaagaaactgtggacatcggatgtcaagccatgggggtcccccttcccaccctccagtggtacaaggatgccatctccatcagcaggctccagaatcctcgatacaaagtgctcgccagcggaggcctgcgcatccagaagctgcgtccagaggactccggaatcttccagtgcttcgccagcaatgaaggaggggagatccagacccacacctacctggatgtaaccaatatcgctccagtgttcacccagcggccagtggacaccacagttactgacgggatgacagccattctaaggtgtgaggtgtccggggctcccaaacccgccatcacctggaaaagagaaaaccacattctggccagtggctctgtccggattcctaggttcatgcttcttgaatcggggggtctacagatcgcgcccgtcttcatccaggatgccggcaactacacctgctatgcggccaacacagagggctccctgaatgcatcggccacgctcactgtgtggaatcggacgtccatcgtccaccctcctgaggaccacgtggtgattaaggggaccacggccacgctgcactgtggtgccacacatgacccccgggtttcactccgctacgtttggaagaaggacaacgtggccctgactccatcgagcacgtctaggatcgtggtggagaaggacgggtcccttctcatcagccagacgtggtcaggcgacatcggtgactacagctgcgagattgtttctgaaggagggaatgactccaggatggcccggctggaagtgattgaactgcctcattcacctcagaacctcctggtcagccctaattcttcccacagccacgccgtggtgctctcttgggtccggccctttgatggaaacagtcctattctttattacatcgtggagctctctgaaaacaactctccatggaaggtgcatctgtcaaacgttggccctgagatgacaggcgtcaccgtgagtggcctgactccggctcgtacctatcaattccgggtgtgcgcggtgaatgaagtgggcaggggccagtacagcgccgagacaagcaggttgatgctacctgaagaaccacccagtgctcccccgaaaaatatagtggccagtgggcggactaatcagtccattatggtccagtggcagccacccccagaaacagagcacaacggggtgttgcgtggatacatcctcaggtaccgcctggctggccttcccggagagtaccagcagcggaacatcaccagcccggaggtgaactactgcctggtgacagacctgatcatctggacacagtatgagatacaggtggcggcgtacaacggggccggtctgggcgtcttcagcagggcagtgaccgagtacaccttgcagggagtgcccaccgcgcccccgcagaacgtgcagacggaagccgtgaactccaccaccattcagttcctgtggaaccctccgcctcagcagtttatcaatggcatcaaccagggatacaagcttctggcatggccggcagatgcccccgaggctgtcactgtggtcactattgccccagatttccacggagtccaccatggacacataacgaacctgaagaagtttaccgcctacttcacttccgttctgtgcttcaccacccctggggacgggcctcccagcacacctcagctggtctggactcaggaagacaaaccaggagctgtgggacatctgagtttcacagagatcttggacacatctctcaaggtcagctggcaggagcccctggagaaaaatggcatcattactggctatcagatctcttgggaagtgtacggcaggaacgactctcgtctcacgcacaccctgaacagcacgacgcacgagtacaagatccaaggcctctcatctctcaccacctacaccatcgacgtggccgctgtgactgccgtgggcactggcctggtgacttcatccaccatttcttctggagtgcccccagaccttcctggtgccccatccaacctggtcatttccaacatcagccctcgctccgccacccttcagttccggccaggctatgacgggaaaacgtccatctccaggtggattgttgaggggcaggtgggagctatcggcgacgaggaggagtgggtcaccctctatgaagaggagaatgagcctgatgcccagatgctggagatcccaaacctcacaccctacactcactacagatttcgaatgaagcaagtgaacattgttgggccgagcccctacagtccgtcttcccgggtcatccagaccctgcaggccccacccgacgtggctccaaccagcgtcacggtccgtactgccagtgagaccagcctgcggcttcgctgggtgcccctgccggattctcagtacaacgggaaccccgagtccgtgggctacaggattaagtactggcgctcagacctccagtcctcagcagtggcccaagtcgtcagtgaccggctggagagagaattcaccatcgaggagctggaggagtggatggaatacgagctgcagatgcaggccttcaacgccgtcggggctgggccgtggagcgaggtggtgcggggccggacgcgggagtcagttccttcagccgcccctgagaacgtgtcagccgaggctgtcagctcgacccagattttactgacatggacatccgtgccggaacaggaccagaatgggctcatactgggctacaagatcctgttccgggccaaagacctggatcccgagcccaggagccacatcgtgcgagggaaccacacgcagtcggccctgctggcaggcctgcgcaagttcgtgctctacgagctccaggtgctggcgttcacccgcatcgggaacggggtccccagcacgcccctcatcctggagcgcaccaaagacgatgccccaggcccaccagtgaggctcgtgttccccgaagtgagactcacctccgtgcggatagtgtggcaacctccggaggagcccaacggcatcatcctggggtaccagattgcctaccgcctggccagcagcagcccccacaccttcaccaccgtggaggtcggcgccacagtgaggcagttcacagccaccgacctggccccggagtccgcatacatcttcaggctgtccgccaagacgaggcagggctggggggagccactggaggccaccgtcatcaccaccgagaagagagagcggccggcaccccccagagagctcctggtgccccaggcagaagtgaccgcacgcagcctccggctccagtgggtcccgggcagcgacggggcctcccccatccggtacttcaccatgcaggtgcgagagctgcctcggggtgagtggcagacctactcctcgtccatcagccatgaggcgacagcatgcgtcgttgacagactgaggcccttcacctcctacaagctgcgcctgaaagccaccaacgacattggggacagtgacttcagttcagagacagaggcggtgaccacgctgcaggatgttccaggagagcccccgggatctgtctcagcgacgccacacaccacgtcctctgtcctgatacagtggcagcctccgagggacgaaagcctgaatggccttcttcagggatacaggatctactacagggagctggagtatgaagccgggtcaggcactgaggccaagacgctcaaaaaccctatagctttacatgctgagctcacagcccaaagcagcttcaagacggtgaacagcagctccacatcgacgatgtgtgaactaacacatttaaagaagtaccggcgctatgaagtaataatgaccgcctataacatcatcggcgagagcccagccagcgcgcccgtggaggtctttgtcggcgaggctgccccggccatggccccgcagaacgtgcaggtgaccccactcacggccagccagctggaggtcacgtgggacccaccacccccggagagccagaatgggaacatccaaggctacaagatttactactgggaggcagacagccagaacgaaacggagaaaatgaaggtcctcttcctccccgagcccgtggtgaggctgaagaacctgaccagccataccaagtacctggtcagcatatcagccttcaacgccgccggagatggacctaagagtgacccccagcaggggcgcacccaccaggccgcccctggggcccccagctttctggcgttctcagaaataacctccaccacgctcaacgtgtcctggggcgagcctgcggcggccaacggcatcctgcagggctatcgggtggtgtacgagcccttggcccctgtacaaggggtgagcaaggtggtgaccgtggaagtgagagggaactggcagcgctggctgaaggtgcgggacctcaccaagggagtgacctatttcttccgtgtccaagcgcggaccatcacctacgggcccgagctccaagccaatatcacagccgggccagccgagggatccccgggctcgcctagagatgtcctggtcaccaagtccgcctctgaactgacgctgcagtggactgagggacactctggcgacacacctaccacgggctatgtgatcgaggcccggccctcagatgaaggcttatgggacatgtttgtgaaggacatcccgcggagcgccacatcctacaccctcagcctggataagctccggcaaggagtgacttacgagttccgggtggtggctgtgaatgaggcgggctacggggagcccagcaacccctccacggctgtgtcagctcaagtggaagccccattctacgaggagtggtggttcctcctggtgatggctctgtccagcctgatcgtcatcctgctggtggtgttcgccctcgtcctgcacgggcagaataagaagtataagaactgcagcacaggaaaggggatctccaccatggaggagtctgtgaccctggacaacggaggatttgctgccctggagctcagcagccgccacctcaatgtcaagagcaccttctccaagaagaacgggaccaggtccccaccccggcctagccccggcggcctgcactactcagacgaggacatctgcaacaagtacaacggcgccgtgctgaccgagagcgtgagcctcaaggagaagtcggcagatgcatcagaatctgaggccacggactctgactacgaggacgcgctgcccaagcactccttcgtgaaccactacatgagcgaccccacctactacaactcatggaagcgcagggcccagggccgcgcacctgcgccgcacaggtacgaggcggtggcgggctccgaggcgggcgcgcagctgcacccggtcatcaccacgcagagcgcgggcggcgtctacacccccgctggccccggcgcgcgaactccgctcaccggcttctcctccttcgtgtgagcaaagcgccgcgcctccctcagggcggaacggaggcaactttccggagtctatttttgttaagacaatcaactccaataactgagctgaagtttttgtttaaaaagaaaaaaatctgataagtgatgattttacctacttgtggacactagatttcaattaggaaggtttttttaaacggctttttgtaacttcgctgcaggaagcaggtttgtttc

SEQ ID NO: 244545 - protein, 271 aa, Artificial Sequence
  derived and/or modified sequence
MQAACWYVLFLLQPTVYLVTCANLTNGGKSELLKSGSSKSTLKHIWTESSKDLSISRLLSQTFRGKENDTDLDLRYDTPEPYSEQDLWDWLRNSTDLQEPRPRAKRRPIVKTGKFKKMFGWGDFHSNIKTVKLNLLITGKIVDHGNGTFSVYFRHNSTGQGNVSVSLVPPTKIVEFDLAQQTVIDAKDSKSFNCRIEYEKVDKATKNTLCNYDPSKTCYQEQTQSHVSWLCSKPFKVICIYISFYSTDYKLVQKVCPDYNYHSDTPYFPSG

SEQ ID NO: 244546 - protein, 154 aa, Artificial Sequence
  derived and/or modified sequence
MFGWGDFHSNIKTVKLNLLITGKIVDHGNGTFSVYFRHNSTGQGNVSVSLVPPTKIVEFDLAQQTVIDAKDSKSFNCRIEYEKVDKATKNTLCNYDPSKTCYQEQTQSHVSWLCSKPFKVICIYISFYSTDYKLVQKVCPDYNYHSDTPYFPSG

SEQ ID NO: 244547 - protein, 143 aa, Artificial Sequence
  derived and/or modified sequence
MQAACWYVLFLLQPTVYLVTCANLTNGGKSELLKSGSSKSTLKHIWTESSKDLSISRLLSQTFRGKENDTDLDLRYDTPEPYSEQDLWDWLRNSTDLQEPRPRAKRRPIVKTGKFKKMFGWGDFHSNIKTVKLNLLITGKIVD

SEQ ID NO: 244548 - protein, 139 aa, Artificial Sequence
  derived and/or modified sequence
MQAACWYVLFLLQPTVYLVTCANLTNGGKSELLKSGSSKSTLKHIWTESSKDLSISRLLSQTFRGKENDTDLDLRYDTPEPYSEQDLWDWLRNSTDLQEPRPRAKRRPIVKTGKFKKMFGWGDFHSNIKTVKLNLLITG

SEQ ID NO: 244549 - DNA, 2921 bp, Artificial Sequence
  derived and/or modified sequence
aagtaattgtccgtgtcaggaaggtaggcgtgccaagccgcggctctgcggagaaaccacgaccaccgcggccgccggaaacccaaagcgctccagagcgtccccgggtggccgggcagcaccagggacagcgcccgggactccactggggaccggctcctgggcttcccagcgtcgcgggtagaggtacagctgctccgtgtgccgcaggctccagattctcgccaccccacccctccctcagaaactcggactgctctcgtctgccgtgtggttctcttttcttccgaaaggccagtgtcttatctctccacttcaagtccagaggacttgctcagtctcctccccttaagtcatttccaccatcctcaggcagctgtgggaagccgagagtcctggactgttcgtccgggtgccagcgctggcagtcccagtccgtccggtgcagcagcccggcgcattcccctctctccctccctcttgctctccctccctttctgtcttcctctctttcctcctctactgctccctccctctcttgcctcttaagtttcctgcaccgtgaatccaactgtgccaagccttggctcccgcgaaccaatcctgagcgcgacccgggcactgggacggcgactccgccaaagctggacgaggcagccggacccgtctgcgctcgagcatggagacggagcgcctgggagggcacgtccggggcgctggagacgccaggcccgagtagcttctccatggagcctgcccagagcggtcccttctcgcaggattcgccccaagtcctgtgcggctgctgagagcgctccttgctctgtaaagtggatgtcaggtggatctatgtttctgaaggaacaaagactcaaagaaggcaccgccaaggaagtttgagacgcgggagaatgcaggctgcgtgctggtacgtgcttttcctcctgcagcccaccgtctacttggtcacatgtgccaatttaacgaacggtggaaagtcagaacttctgaaatcaggaagcagcaaatccacactaaagcacatatggacagaaagcagcaaagacttgtctatcagccgactcctgtcacagacttttcgtggcaaagagaatgatacagatttggacctgagatatgacaccccagaaccttattctgagcaagacctctgggactggctgaggaactccacagaccttcaagagcctcggcccagggccaagagaaggcccattgttaaaacgggcaagtttaagaaaatgtttggatggggcgattttcattccaacatcaaaacagtgaagctgaacctgttgataactgggaaaattgtagatcatggcaatgggacatttagtgtttatttcaggcataattcaactggtcaagggaatgtatctgtcagcttggtaccccctacaaaaatcgtggaatttgacttggcacaacaaaccgtgattgatgccaaagattccaagtcttttaattgtcgcattgaatatgaaaaggttgacaaggctaccaagaacacactctgcaactatgacccttcaaaaacctgttaccaggagcaaacccaaagtcatgtatcctggctctgctccaagccctttaaggtgatctgtatttacatttccttttatagtacagattataaactggtacagaaagtgtgccctgactacaactaccacagtgacacaccttactttccctcgggatgaaggtgaacatgggggtgagactgaagcctgaggaattaaaggtcatatgacagggctgttacctcaaagaagaaggtcacatctgttgcctggaatgtgtctacactgctgctcttgtcaactggctgcaaaatacactagtggaaaacactctgatgtaatttctgcccagtcagcttcatccctcagtataattgtaaatcatcacagattttgaattcacacctgaagacatgctctcacatatagaggtacacaaacacaccgtcatgcacatttcagcttgcgtctatcatgattcctgttgagagggctttcattgtctgactcataatggttcaggatcaactatcatcaaacggaaggattaactagacagagaatgtttctaacagttgctgttatggaaatctcttttaaagtcttgagtacatgctaatcaataatctccactcatgcattcctactgcttggagtagctgtactggtaaatactactgtaggagtatctgcttgttaaaatggaaaaatgtgtctttagagctcagtattctttattttacaaacacaacaaaatgtagtaacttttttccagcatacagtaggcacattcaaagtggtccaagatggctcttttttctttgaaaggggcctgttctcagtaaagatgagcaaacatttggaatttacatgtgggcagacattgggataacaactttcatcaccaatcattggacttttgtgaagttgacaccagctaaggctgcttaaaataagttctgatcattatataagaagggaaatgcctggcagacaccatgtaagttataagtgtctgtcttatctttactacacatattgtaacaaattcaatatcctagtcttcatttgtatgaatggtttgtattgtacatagtttaaccaagtgttatttgagctgcttattaatattaacttgtacttgtctctctgcttgttattggttaagaaaaaaggatatgaggaattcattttatcaatgtagctgtgaaggccattaaaaagacaaacttaatgtacagagcatttattcagatcaagtattgttgaaagctatacatatacaacattacagtctgtctgtatttagatattttatttctggaaaaaatgaaatgtacataaaaataaaacacttaaagttgagtttcaata

SEQ ID NO: 244550 - DNA, 816 bp, Artificial Sequence
  derived and/or modified sequence
atgcaggctgcttgttggtacgtgttgtttttgctccagcctacagtttacctcgtaacctgcgccaatcttacaaatggaggtaagagcgaacttctgaaatccggaagtagcaagtcaacgcttaaacacatctggaccgagtcctccaaggatttgtccatcagcaggttgctgtcccagacgttccgagggaaggaaaatgacaccgatctcgatctgagatacgataccccagaaccctacagcgaacaggatctctgggattggctgcgaaactcaacagatttacaagagcctcggcctagggccaaacgtcgcccaatcgtgaagaccggaaaatttaagaaaatgttcgggtggggtgactttcactcaaacatcaaaactgtgaaactgaatttacttatcacaggcaaaattgttgaccacggaaatggaactttctccgtatacttccgccacaactcaacgggacagggcaatgtttcagtgagcttagtccccccaactaaaattgtggaatttgacctggcccagcagaccgtcattgatgccaaagatagtaaatcttttaactgcaggatcgagtacgagaaggtggacaaggcaactaaaaacacgctgtgtaactacgatccttcaaaaacgtgttaccaagagcagacccagtcacatgtctcttggctttgttctaagccattcaaggtcatttgtatatacatttcattttacagcaccgattacaagctggttcagaaggtatgccctgactataactaccactccgacacaccctatttccctagcggatag

SEQ ID NO: 244551 - DNA, 465 bp, Artificial Sequence
  derived and/or modified sequence
atgttcggttggggggactttcatagcaacatcaagaccgtcaaacttaatctactgatcaccggcaagatcgtagaccacggcaacggcacattctccgtctattttcggcacaatagcaccggtcagggcaacgtttccgtatccctcgtgcctccaaccaaaatcgtggagttcgatctagcacagcagaccgtgatcgatgctaaggattctaagtcctttaattgcaggatcgagtacgagaaagtggacaaggccaccaaaaacacactctgcaactacgatccgtccaagacatgttaccaggaacagacacagagtcatgtatcctggctctgtagcaagccattcaaagtcatctgtatttacatcagtttctacagcacagactacaaactcgtgcaaaaggtatgcccagattacaattaccatagcgatactccatatttcccatccggctag

SEQ ID NO: 244552 - DNA, 432 bp, Artificial Sequence
  derived and/or modified sequence
atgcaggcagcgtgttggtacgtcctctttcttttgcaaccaacggtctacttggtgacgtgcgctaacctgacaaatggtggaaagagtgagctcttgaagagcggaagctctaaatcgactctcaaacacatctggactgaatcgtctaaggatctgtccataagcaggcttctgtctcagaccttcagggggaaggaaaacgatacggatctcgacctgcggtacgacacacccgaaccctactcagaacaggatctttgggactggctgcgaaactctacagatctgcaggagcctaggccccgagcgaaaagaaggcccattgtgaagacagggaagttcaaaaaaatgttcggatggggcgattttcacagcaacatcaagaccgtgaaattgaatctgctcataacgggtaagattgttgattag

SEQ ID NO: 244553 - DNA, 420 bp, Artificial Sequence
  derived and/or modified sequence
atgcaggcagcctgttggtacgtgctgttcttacttcagccaactgtttacctggttacttgcgcgaacctgaccaatggtggaaaaagcgaactcctcaagtccggaagcagcaagagcactttaaaacatatttggacagaatcttccaaggatctatctatcagtcggctcctatcccaaactttccgtggaaaggagaacgacaccgacctcgatttaaggtatgatactcctgagccatactccgagcaagacctgtgggactggctacgcaactcaacggatctgcaggagccacgtccaagggccaagcgccgtcctatcgttaagacaggaaagtttaagaagatgttcggatggggtgatttccattccaatattaagaccgtgaagctcaacctgctaataacgggatag

SEQ ID NO: 244554 - DNA, 949 bp, Artificial Sequence
  derived and/or modified sequence
gtgtacgtgtgtgagcactgccagggctggcgaagaaccagccgccgcctttagtccgagccgccgggccacccaacacaagggcaggtctcgctgccggagaagcctgggctccgaaccagcctgcacgcggctcagtgtgctccgccgcctgggaactcgcacccgaggagcgcagggggcaaggagcccctcaccctccctctcgtccgcccgcccgcctccccagctgcggaccgcgcgcttgctggtctcaggcgctggatttactcgcttttcaatttttcgtaccctccctcccttttttttttggtcccccactccccgctacgaccccctttccccgcttgattgtcaagcctaaccttgcccgcgtagtcatgggatgtctaattttatttgcatctaggctgctgagagcgctccttgctctgtaaagtggatgtcaggtggatctatgtttctgaaggaacaaagactcaaagaaggcaccgccaaggaagtttgagacgcgggagaatgcaggctgcgtgctggtacgtgcttttcctcctgcagcccaccgtctacttggtcacatgtgccaatttaacgaacggtggaaagtcagaacttctgaaatcaggaagcagcaaatccacactaaagcacatatggacagaaagcagcaaagacttgtctatcagccgactcctgtcacagacttttcgtggcaaagagaatgatacagatttggacctgagatatgacaccccagaaccttattctgagcaagacctctgggactggctgaggaactccacagaccttcaagagcctcggcccagggccaagagaaggcccattgttaaaacgggcaagtttaagaaaatgtttggatggggcgattttcattccaacatcaaaacagtgaagctgaacctgttgataactgggaaaattgtagatc

SEQ ID NO: 244555 - DNA, 816 bp, Artificial Sequence
  derived and/or modified sequence
atgcaggccgcatgttggtacgtgctattcttgttgcagccaaccgtgtatctggtgacatgcgctaatctgacaaacggaggcaaaagcgaattgctgaaatccggaagttcaaaatccactcttaagcacatttggaccgaaagttcaaaggatctatctatctccagactcctcagtcaaacctttcggggaaaagagaatgacaccgatcttgatctgaggtatgacacacccgagccctattccgagcaggacctgtgggactggctgcgcaattccaccgacttacaggaacctcgcccccgtgctaaacgcagaccaattgtcaagacagggaaattcaaaaaaatgttcggatggggggacttccattctaatatcaagactgtaaaactcaacctcctgatcacagggaagattgtggaccacggtaacggaaccttctcggtgtattttagacacaactccacaggccagggtaacgtgtcagtttctttggtaccccctactaagattgtagaattcgaccttgctcaacagaccgttatcgacgctaaagacagtaagtcttttaactgtcgcatagaatacgaaaaggtggataaagcaacaaaaaacactctgtgcaattatgaccctagcaagacctgttatcaggagcagacacagagccacgtgtcctggctttgttccaagcccttcaaggtgatttgtatttacatttctttttattccaccgactacaaacttgttcagaaagtctgtcccgactacaactaccactctgatactccttattttcccagcggttag

SEQ ID NO: 244556 - DNA, 465 bp, Artificial Sequence
  derived and/or modified sequence
atgtttggctggggagactttcactccaatatcaaaacagtaaagctgaacctgcttattacaggcaagatcgtggaccatggtaacggaacttttagtgtgtacttcaggcataactctaccgggcagggtaatgtatctgtgtcacttgtaccacccacaaagatcgtcgagtttgatcttgcccaacaaacagtaattgatgctaaagatagcaagagtttcaattgcaggatagaatatgaaaaggtagacaaagcgaccaaaaataccctctgtaactacgacccaagtaaaacgtgctaccaggagcaaacccagagtcacgttagctggttatgttccaagccattcaaagtcatttgcatatacatctctttctattctactgattataaactggtgcagaaagtgtgccccgactacaattatcactcagacacaccatatttcccaagcgggtag

SEQ ID NO: 244557 - DNA, 432 bp, Artificial Sequence
  derived and/or modified sequence
atgcaggctgcttgctggtacgttctgtttcttctccaacctacggtctatctagtcacctgtgctaacttgacaaatgggggtaagtctgaacttctgaagtccgggtcttctaagagcacgctcaagcacatttggacggaatcttccaaagatctgtcaataagtcgactgctaagccagacctttcgtggcaaagaaaacgataccgaccttgatcttcgctatgacactcccgaaccttactcagaacaagatctatgggactggctccgaaactcaactgacttgcaagaacctagaccaagggctaaacgcaggccaattgtgaagacaggtaagtttaaaaagatgtttggctggggagacttccactctaatattaaaacagtgaagctcaaccttctgatcactgggaaaattgtggactag

SEQ ID NO: 244558 - DNA, 420 bp, Artificial Sequence
  derived and/or modified sequence
atgcaggccgcttgttggtacgtgctgttcctcctgcagcctaccgtgtaccttgtgacatgtgccaatctaacgaatggagggaaatctgagctactgaagtccggcagttcaaagtctaccctgaaacatatatggacagagagctctaaagatctgtcaatctccaggttactgtcccaaacctttagaggcaaggaaaacgacacagacctcgatctccgctacgacacaccagaaccatactcagagcaggatctttgggattggttacgtaactcgaccgacttgcaggaaccacgaccaagggcaaagaggcgccccatagtaaagacaggcaagttcaagaagatgttcggctggggagactttcattccaacatcaaaaccgtcaagctcaatctgctgatcacaggatag

SEQ ID NO: 244559 - DNA, 568 bp, Artificial Sequence
  derived and/or modified sequence
acttcaccgaacgtgttgaggtacctagcacctaatcgcggctgctgagagcgctccttgctctgtaaagtggatgtcaggtggatctatgtttctgaaggaacaaagactcaaagaaggcaccgccaaggaagtttgagacgcgggagaatgcaggctgcgtgctggtacgtgcttttcctcctgcagcccaccgtctacttggtcacatgtgccaatttaacgaacggtggaaagtcagaacttctgaaatcaggaagcagcaaatccacactaaagcacatatggacagaaagcagcaaagacttgtctatcagccgactcctgtcacagacttttcgtggcaaagagaatgatacagatttggacctgagatatgacaccccagaaccttattctgagcaagacctctgggactggctgaggaactccacagaccttcaagagcctcggcccagggccaagagaaggcccattgttaaaacgggcaagtttaagaaaatgtttggatggggcgattttcattccaacatcaaaacagtgaagctgaacctgttgataactggga

SEQ ID NO: 244560 - DNA, 816 bp, Artificial Sequence
  derived and/or modified sequence
atgcaggccgcttgttggtatgtcctcttcctcctgcaacctactgtttaccttgtgacctgcgctaacctaaccaacggcggcaaaagcgaactgcttaagagtggctcatctaaatccactctcaaacatatctggaccgagtccagcaaagatctctctatcagccggcttctgtctcagaccttcagaggcaaagaaaatgatacagatttggacctgagatacgacacccctgaaccttacagcgaacaggacctttgggactggctgcggaactctactgatctacaggagcccagaccgagagctaaaagaagaccaattgtgaaaaccggaaaatttaagaaaatgttcgggtggggcgattttcactcaaacattaaaaccgttaaattgaacctgttaataaccggcaagatcgtggatcacgggaatgggacattttcagtgtattttcgacacaactctacaggccagggcaatgtttctgtatccttggtccctcctacgaaaattgtggagtttgacctggctcagcaaacggtgatcgacgcaaaggatagcaagagtttcaactgccgcatcgaatacgagaaggttgataaagcaaccaaaaacaccctgtgcaattatgacccatccaagacttgctaccaggaacagacccagtcacacgtgtcttggctatgttcaaaaccattcaaagtgatctgtatttatatttcattctatagcaccgattacaaactggtccagaaggtttgtcccgattataactatcattctgatactccctattttccctccggatag

SEQ ID NO: 244561 - DNA, 465 bp, Artificial Sequence
  derived and/or modified sequence
atgttcggttggggagattttcacagcaatatcaagactgtcaaactcaatttactgatcacaggaaagatagttgaccatggcaatggcactttcagtgtctattttcggcacaattcaactgggcaaggcaatgtctccgtatccttggtcccaccaactaaaatcgtcgaattcgatctcgcacagcagacagttatcgatgcaaaagattccaagagtttcaattgccgaatagaatacgagaaggtcgacaaggcaaccaagaacactctttgcaattacgatccctcaaaaacttgttaccaggaacagacacagtcacacgtgtcatggctctgctcgaagccctttaaagtcatatgcatttacatctctttctattccaccgactacaaactggtccagaaggtctgccccgattataactaccattctgacaccccctactttccctcaggttag

SEQ ID NO: 244562 - DNA, 432 bp, Artificial Sequence
  derived and/or modified sequence
atgcaggccgcgtgctggtatgtccttttccttctacagcccaccgtctatctggtgacttgcgccaacctaacaaatgggggtaagtcggagttgttaaagagtggatcctccaaaagcacccttaagcatatatggaccgagtcctctaaagatctttcgatttcaagactgttgagtcagaccttccgcggtaaggaaaatgatacagacctggacctgcgctatgacacccctgagccatacagcgaacaagatctgtgggactggttacggaatagtactgacctccaggagcctagacctcgcgcaaaaagaagacccatcgtaaaaaccggtaagtttaagaaaatgtttggatggggcgacttccactccaatattaaaaccgtgaagttaaatctgctcatcaccggaaagatcgtggactag

SEQ ID NO: 244563 - DNA, 420 bp, Artificial Sequence
  derived and/or modified sequence
atgcaggccgcttgctggtacgtgttgttccttcttcaaccaacagtgtatctagtgacatgtgcaaaccttactaacggcggaaagtcagagcttctcaagtcaggaagctccaagagcacattgaagcatatttggaccgaatcatccaaggacctttctatttcaagactactctcgcaaaccttccgcggcaaagaaaatgacacggacctcgaccttagatacgatacccccgaaccgtactccgaacaggatttgtgggattggcttcgcaatagcaccgacttgcaggagcccagacctagagccaaaaggaggcctatagtaaagactggtaaatttaagaaaatgtttggttggggagacttccactctaatataaagaccgtgaagctgaacctattgatcacaggctag

SEQ ID NO: 244564 - DNA, 816 bp, Artificial Sequence
  derived and/or modified sequence
atgcaggccgcctgctggtacgtgctgttcctgctgcagcccaccgtgtacctggtgacctgcgccaacctgaccaacggcggcaagagcgagctgctgaagagcggcagcagcaagagcaccctgaagcacatctggaccgagagcagcaaggacctgagcatcagcagactgctgagccagaccttcagaggcaaggagaacgacaccgacctggacctgagatacgacacccccgagccctacagcgagcaggacctgtgggactggctgagaaacagcaccgacctgcaggagcccagacccagagccaagagaagacccatcgtgaagaccggcaagttcaagaagatgttcggctggggcgacttccacagcaacatcaagaccgtgaagctgaacctgctgatcaccggcaagatcgtggaccacggcaacggcaccttcagcgtgtacttcagacacaacagcaccggccagggcaacgtgagcgtgagcctggtgccccccaccaagatcgtggagttcgacctggcccagcagaccgtgatcgacgccaaggacagcaagagcttcaactgcagaatcgagtacgagaaggtggacaaggccaccaagaacaccctgtgcaactacgaccccagcaagacctgctaccaggagcagacccagagccacgtgagctggctgtgcagcaagcccttcaaggtgatctgcatctacatcagcttctacagcaccgactacaagctggtgcagaaggtgtgccccgactacaactaccacagcgacaccccctacttccccagcggctag

SEQ ID NO: 244565 - DNA, 465 bp, Artificial Sequence
  derived and/or modified sequence
atgttcggctggggcgacttccacagcaacatcaagaccgtgaagctgaacctgctgatcaccggcaagatcgtggaccacggcaacggcaccttcagcgtgtacttcagacacaacagcaccggccagggcaacgtgagcgtgagcctggtgccccccaccaagatcgtggagttcgacctggcccagcagaccgtgatcgacgccaaggacagcaagagcttcaactgcagaatcgagtacgagaaggtggacaaggccaccaagaacaccctgtgcaactacgaccccagcaagacctgctaccaggagcagacccagagccacgtgagctggctgtgcagcaagcccttcaaggtgatctgcatctacatcagcttctacagcaccgactacaagctggtgcagaaggtgtgccccgactacaactaccacagcgacaccccctacttccccagcggctag

SEQ ID NO: 244566 - DNA, 432 bp, Artificial Sequence
  derived and/or modified sequence
atgcaggccgcctgctggtacgtgctgttcctgctgcagcccaccgtgtacctggtgacctgcgccaacctgaccaacggcggcaagagcgagctgctgaagagcggcagcagcaagagcaccctgaagcacatctggaccgagagcagcaaggacctgagcatcagcagactgctgagccagaccttcagaggcaaggagaacgacaccgacctggacctgagatacgacacccccgagccctacagcgagcaggacctgtgggactggctgagaaacagcaccgacctgcaggagcccagacccagagccaagagaagacccatcgtgaagaccggcaagttcaagaagatgttcggctggggcgacttccacagcaacatcaagaccgtgaagctgaacctgctgatcaccggcaagatcgtggactag

SEQ ID NO: 244567 - DNA, 420 bp, Artificial Sequence
  derived and/or modified sequence
atgcaggccgcctgctggtacgtgctgttcctgctgcagcccaccgtgtacctggtgacctgcgccaacctgaccaacggcggcaagagcgagctgctgaagagcggcagcagcaagagcaccctgaagcacatctggaccgagagcagcaaggacctgagcatcagcagactgctgagccagaccttcagaggcaaggagaacgacaccgacctggacctgagatacgacacccccgagccctacagcgagcaggacctgtgggactggctgagaaacagcaccgacctgcaggagcccagacccagagccaagagaagacccatcgtgaagaccggcaagttcaagaagatgttcggctggggcgacttccacagcaacatcaagaccgtgaagctgaacctgctgatcaccggctag

SEQ ID NO: 244568 - DNA, 816 bp, Artificial Sequence
  derived and/or modified sequence
atgcaggcggcatgttggtacgttctgtttctgctccaaccgactgtgtaccttgtgacctgcgcaaatctgacaaacggtggcaagtccgaactgctgaagtcagggtcaagcaagagtaccttaaaacatatttggactgagagctcaaaggatctttctattagtagattacttagccagaccttccgtggtaaggagaacgacactgatctggatctgagatatgacaccccagagccctatagtgaacaggatttgtgggattggctcagaaacagcactgatctgcaggagccccgaccacgcgccaaacggcggccaatcgtgaaaaccggcaagttcaagaaaatgttcggctggggagatttccactcaaatattaagactgtgaagctgaatctgctgatcacaggcaagatcgtggaccacggaaatggaacgtttagtgtgtatttcagacacaacagtaccggtcagggtaacgtctctgttagtctggtcccaccaacgaagattgtagagttcgacctagcacaacaaactgtaatcgacgcgaaggattccaagagttttaattgtcgtattgagtacgagaaggtggacaaagccacaaaaaacaccctttgtaactacgatccaagtaaaacttgttaccaggagcaaacccagagtcacgtgtcgtggctgtgtagtaaaccgttcaaggtgatttgcatttacatatcattctattctaccgactataagctggttcagaaagtatgtcctgactataattatcatagcgacactccatatttcccctccgggtag

SEQ ID NO: 244569 - DNA, 465 bp, Artificial Sequence
  derived and/or modified sequence
atgtttggctggggtgatttccacagcaacattaagaccgtgaagctgaacctgttgattacagggaaaatcgtggatcacgggaacggcacattctctgtatactttagacataacagcaccgggcagggcaatgtcagtgtgtccctggtccctcccacaaagatcgtcgagtttgatcttgcacagcaaacagtaatcgatgccaaggatagcaaatcttttaattgtcgtatcgagtacgaaaaggtggacaaggctaccaagaatacgctatgcaactatgacccttccaagacctgctatcaagagcagacacagagccatgtgtcctggctgtgctccaaaccttttaaagtaatctgtatctatatttctttttattctactgactataagctcgttcagaaagtttgtcctgactacaactatcactctgatacgccttatttcccgtccggatag

SEQ ID NO: 244570 - DNA, 432 bp, Artificial Sequence
  derived and/or modified sequence
atgcaggccgcctgttggtacgtcctgtttctactacagccaacagtctatctggttacttgcgcgaacctgaccaacggcgggaagagcgaactcctcaagtccggtagtagcaagagtaccctgaagcatatatggaccgagagcagtaaggacctctccattagcaggctactgtcccagaccttccggggtaaggaaaacgatactgatctggatctccggtacgacaccccggagccctactccgaacaggatctttgggattggctccgcaacagtaccgacctgcaagagccacgccctagagctaaacgcagacctattgtgaagactggaaagtttaaaaagatgtttgggtggggtgatttccacagcaacatcaaaacggtgaagttgaacctcctcatcaccggcaaaatcgttgactag

SEQ ID NO: 244571 - DNA, 420 bp, Artificial Sequence
  derived and/or modified sequence
atgcaggcagcctgttggtatgtgttatttctgctgcagcccaccgtttacctggtcacctgtgctaatcttacgaacggaggaaagagcgagcttctgaagtctgggtcttctaaatccaccttgaagcacatctggacagaaagtagcaaggacttgagcataagtcggttgctgagtcaaacatttcgagggaaagagaatgacacggacctggaccttagatacgacaccccagaaccctattccgaacaagatctctgggactggctgaggaacagtacggatcttcaggagccacgcccccgagccaagaggagaccaatcgtgaaaacagggaagtttaagaaaatgttcggttggggtgacttccactctaatatcaagaccgtgaagttgaatctgttgattacaggatag

SEQ ID NO: 244572 - DNA, 816 bp, Artificial Sequence
  derived and/or modified sequence
atgcaggccgcctgctggtacgtgctcttcctgctgcagcccaccgtgtacctggtgacctgtgccaacctgaccaacggcggcaagtctgagctgctgaagagcggcagcagcaagagcaccctgaagcacatctggacagagagcagcaaggacctgagcatcagccggctgctgagccagaccttccggggcaaggaaaatgacacagacctggacctgcgctatgacaccccagagccctacagcgagcaggacctgtgggactggctgaggaacagcacagacctgcaggagccccggccccgggccaagaggcggcccatcgtgaagacaggcaagttcaagaagatgtttggctggggagacttccacagcaacatcaagacagtgaagctgaacctgctgatcaccgggaagatcgtggaccacggcaatggcaccttctctgtgtacttccgccacaacagcacaggccagggcaatgtgtctgtgtccctggtgccccccaccaagatcgtggagtttgacctggcccagcagacagtgattgatgccaaggacagcaagagcttcaactgccgcatcgagtatgagaaggtggacaaggccaccaagaacaccctgtgcaactatgaccccagcaagacctgctaccaggagcagacccagagccacgtgtcctggctgtgcagcaagcccttcaaggtgatctgcatctacatctccttctacagcacagactacaagctggtgcagaaggtgtgcccagactacaactaccacagcgacaccccctacttccccagcggctag

SEQ ID NO: 244573 - DNA, 465 bp, Artificial Sequence
  derived and/or modified sequence
atgtttggctggggagacttccacagcaacatcaagacagtgaagctgaacctgctgatcaccgggaagatcgtggaccatggaaatggcaccttctctgtgtacttccgccacaacagcacaggccagggcaatgtgtctgtgtccctggtgccccccaccaagatcgtggagtttgacctggcccagcagacagtgattgatgccaaggacagcaagagcttcaactgcagaattgaatatgagaaggtggacaaggccaccaagaacaccctgtgcaactatgaccccagcaagacctgctaccaggagcagacccagagccacgtgtcctggctgtgcagcaagcccttcaaggtgatctgcatctacatctccttctacagcacagactacaagctggtgcagaaggtgtgcccagactacaactaccacagcgacaccccctacttccccagcggctag

SEQ ID NO: 244574 - DNA, 432 bp, Artificial Sequence
  derived and/or modified sequence
atgcaggccgcctgctggtacgtgctcttcctgctgcagcccaccgtgtacctggtgacctgtgccaacctgaccaacggcggcaagtctgagctgctgaagagcggcagcagcaagagcaccctgaagcacatctggacagagagcagcaaggacctgagcatcagccggctgctgagccagaccttccggggcaaggaaaatgacacagacctggacctgcgctatgacaccccagagccctacagcgagcaggacctgtgggactggctgaggaacagcacagacctgcaggagccccggccccgggccaagaggcggcccatcgtgaagacaggcaagttcaagaagatgtttggctggggagacttccacagcaacatcaagacagtgaagctgaacctgctgatcaccgggaagatcgtggactag

SEQ ID NO: 244575 - DNA, 420 bp, Artificial Sequence
  derived and/or modified sequence
atgcaggccgcctgctggtacgtgctcttcctgctgcagcccaccgtgtacctggtgacctgtgccaacctgaccaacggcggcaagtctgagctgctgaagagcggcagcagcaagagcaccctgaagcacatctggacagagagcagcaaggacctgagcatcagccggctgctgagccagaccttccggggcaaggaaaatgacacagacctggacctgcgctatgacaccccagagccctacagcgagcaggacctgtgggactggctgaggaacagcacagacctgcaggagccccggccccgggccaagaggcggcccatcgtgaagacaggcaagttcaagaagatgtttggctggggagacttccacagcaacatcaagacagtgaagctgaacctgctgatcaccggctag

SEQ ID NO: 244576 - DNA, 816 bp, Artificial Sequence
  derived and/or modified sequence
atgcaggccgcctgctggtacgtgctgttcctgctgcagcccaccgtgtacctggtaacatgcgcaaatttaactaatggcggaaagtcggagctccttaagtccggctcctctaagtcaacgctgaagcacatttggacagagagcagcaaagacttgagtatctcacgtcttctcagccagactttccggggtaaggagaatgatacagacctcgatctcaggtacgatacccccgaaccctatagcgagcaagacctgtgggattggctcagaaattcgaccgacttgcaggagcccagaccacgggccaaacggagacctattgtcaaaactgggaaatttaaaaaaatgttcggatggggcgatttccactctaacatcaagaccgttaagctcaatctgctgataacgggcaaaatagtggatcacggcaatggcacattttccgtgtactttcgccacaactctacaggtcagggcaacgtaagcgtttcactcgtcccccctacgaagatcgtggagtttgacctcgcccaacaaaccgtcatcgacgcaaaggatagtaaatccttcaactgtcgcatcgagtatgagaaggttgacaaggctacgaagaacacactgtgcaactacgatccatccaagacctgctaccaggagcaaacccagtcacacgtcagctggctctgcagcaaaccctttaaagtgatttgcatctacatctctttctacagtaccgattacaagctcgtgcagaaggtatgcccagactacaactatcattctgacaccccatactttccctctgggtag

SEQ ID NO: 244577 - DNA, 465 bp, Artificial Sequence
  derived and/or modified sequence
atgttcggctggggcgacttccacagcaacatcaagaccgtgaagcttaatctcttaatcacaggcaagattgttgatcacggaaatggaacattttctgtctattttcggcacaatagtacggggcaggggaacgtcagtgtgtccctggtcccccctacaaagattgtcgaattcgatttggcccagcaaaccgtgattgacgcgaaggatagtaaatcctttaattgcagaatcgagtacgaaaaggtggacaaggctactaagaacacactgtgtaactacgatccgtccaagacctgctaccaggagcaaacccaatctcatgtttcctggttatgtagtaagccttttaaggtgatatgcatctatatttctttctacagcactgactacaagctggtgcaaaaggtctgccccgactacaattaccatagcgacacaccatacttcccatcaggatag

SEQ ID NO: 244578 - DNA, 432 bp, Artificial Sequence
  derived and/or modified sequence
atgcaggccgcctgctggtacgtgctgttcctgctgcagcccaccgtttacctggtgacgtgtgccaatctcacgaatgggggtaagagtgagctcttgaaaagcgggagcagtaagtctactctcaaacacatatggactgagagctccaaggacctgtcgatctccaggttgttaagccagacatttcgaggaaaagaaaacgacacggatttagacttgagatatgacactcctgaaccttacagcgagcaggatttgtgggattggctcagaaactcaactgacttgcaggaaccacgtccccgggcaaaacgtagacctatcgtaaagactggaaagtttaagaagatgtttgggtggggagattttcattcaaacattaagactgtgaagctgaacctgctgatcactggcaagatcgtcgattag

SEQ ID NO: 244579 - DNA, 420 bp, Artificial Sequence
  derived and/or modified sequence
atgcaggccgcctgctggtacgtgctgttcctgctgcagcccaccgtataccttgtgacttgcgctaacttaacaaacggaggcaaatctgagctgctgaagagcggctcctcgaagagtaccctcaaacacatatggacagaaagttccaaggatctctctatctcccggctgctgtcccagaccttcagggggaaggagaacgacactgacctggatcttaggtacgatacccctgagccctactccgagcaagatctttgggattggctgaggaacagtaccgatctgcaggagccccggcctcgcgcaaaacggcgacccatcgttaaaaccggaaaattcaagaagatgttcggatggggagactttcacagcaatatcaagactgtcaaactcaaccttctgattactgggtag

SEQ ID NO: 244580 - RNA, 816 nt, Artificial Sequence
  derived and/or modified sequence
augcaggccgcauguugguacgugcuauucuuguugcagccaaccguguaucuggugacaugcgcuaaucugacaaacggaggcaaaagcgaauugcugaaauccggaaguucaaaauccacucuuaagcacauuuggaccgaaaguucaaaggaucuaucuaucuccagacuccucagucaaaccuuucggggaaaagagaaugacaccgaucuugaucugagguaugacacacccgagcccuauuccgagcaggaccugugggacuggcugcgcaauuccaccgacuuacaggaaccucgcccccgugcuaaacgcagaccaauugucaagacagggaaauucaaaaaaauguucggauggggggacuuccauucuaauaucaagacuguaaaacucaaccuccugaucacagggaagauuguggaccacgguaacggaaccuucucgguguauuuuagacacaacuccacaggccaggguaacgugucaguuucuuugguacccccuacuaagauuguagaauucgaccuugcucaacagaccguuaucgacgcuaaagacaguaagucuuuuaacugucgcauagaauacgaaaagguggauaaagcaacaaaaaacacucugugcaauuaugacccuagcaagaccuguuaucaggagcagacacagagccacguguccuggcuuuguuccaagcccuucaaggugauuuguauuuacauuucuuuuuauuccaccgacuacaaacuuguucagaaagucugucccgacuacaacuaccacucugauacuccuuauuuucccagcgguuag

SEQ ID NO: 244581 - RNA, 465 nt, Artificial Sequence
  derived and/or modified sequence
auguuuggcuggggagacuuucacuccaauaucaaaacaguaaagcugaaccugcuuauuacaggcaagaucguggaccaugguaacggaacuuuuaguguguacuucaggcauaacucuaccgggcaggguaauguaucugugucacuuguaccacccacaaagaucgucgaguuugaucuugcccaacaaacaguaauugaugcuaaagauagcaagaguuucaauugcaggauagaauaugaaaagguagacaaagcgaccaaaaauacccucuguaacuacgacccaaguaaaacgugcuaccaggagcaaacccagagucacguuagcugguuauguuccaagccauucaaagucauuugcauauacaucucuuucuauucuacugauuauaaacuggugcagaaagugugccccgacuacaauuaucacucagacacaccauauuucccaagcggguag

SEQ ID NO: 244582 - RNA, 432 nt, Artificial Sequence
  derived and/or modified sequence
augcaggcugcuugcugguacguucuguuucuucuccaaccuacggucuaucuagucaccugugcuaacuugacaaauggggguaagucugaacuucugaaguccgggucuucuaagagcacgcucaagcacauuuggacggaaucuuccaaagaucugucaauaagucgacugcuaagccagaccuuucguggcaaagaaaacgauaccgaccuugaucuucgcuaugacacucccgaaccuuacucagaacaagaucuaugggacuggcuccgaaacucaacugacuugcaagaaccuagaccaagggcuaaacgcaggccaauugugaagacagguaaguuuaaaaagauguuuggcuggggagacuuccacucuaauauuaaaacagugaagcucaaccuucugaucacugggaaaauuguggacuag

SEQ ID NO: 244583 - RNA, 420 nt, Artificial Sequence
  derived and/or modified sequence
augcaggccgcuuguugguacgugcuguuccuccugcagccuaccguguaccuugugacaugugccaaucuaacgaauggagggaaaucugagcuacugaaguccggcaguucaaagucuacccugaaacauauauggacagagagcucuaaagaucugucaaucuccagguuacugucccaaaccuuuagaggcaaggaaaacgacacagaccucgaucuccgcuacgacacaccagaaccauacucagagcaggaucuuugggauugguuacguaacucgaccgacuugcaggaaccacgaccaagggcaaagaggcgccccauaguaaagacaggcaaguucaagaagauguucggcuggggagacuuucauuccaacaucaaaaccgucaagcucaaucugcugaucacaggauag

SEQ ID NO: 244584 - RNA, 816 nt, Artificial Sequence
  derived and/or modified sequence
augcaggccgcuuguugguauguccucuuccuccugcaaccuacuguuuaccuugugaccugcgcuaaccuaaccaacggcggcaaaagcgaacugcuuaagaguggcucaucuaaauccacucucaaacauaucuggaccgaguccagcaaagaucucucuaucagccggcuucugucucagaccuucagaggcaaagaaaaugauacagauuuggaccugagauacgacaccccugaaccuuacagcgaacaggaccuuugggacuggcugcggaacucuacugaucuacaggagcccagaccgagagcuaaaagaagaccaauugugaaaaccggaaaauuuaagaaaauguucggguggggcgauuuucacucaaacauuaaaaccguuaaauugaaccuguuaauaaccggcaagaucguggaucacgggaaugggacauuuucaguguauuuucgacacaacucuacaggccagggcaauguuucuguauccuuggucccuccuacgaaaauuguggaguuugaccuggcucagcaaacggugaucgacgcaaaggauagcaagaguuucaacugccgcaucgaauacgagaagguugauaaagcaaccaaaaacacccugugcaauuaugacccauccaagacuugcuaccaggaacagacccagucacacgugucuuggcuauguucaaaaccauucaaagugaucuguauuuauauuucauucuauagcaccgauuacaaacugguccagaagguuugucccgauuauaacuaucauucugauacucccuauuuucccuccggauag

SEQ ID NO: 244585 - RNA, 465 nt, Artificial Sequence
  derived and/or modified sequence
auguucgguuggggagauuuucacagcaauaucaagacugucaaacucaauuuacugaucacaggaaagauaguugaccauggcaauggcacuuucagugucuauuuucggcacaauucaacugggcaaggcaaugucuccguauccuuggucccaccaacuaaaaucgucgaauucgaucucgcacagcagacaguuaucgaugcaaaagauuccaagaguuucaauugccgaauagaauacgagaaggucgacaaggcaaccaagaacacucuuugcaauuacgaucccucaaaaacuuguuaccaggaacagacacagucacacgugucauggcucugcucgaagcccuuuaaagucauaugcauuuacaucucuuucuauuccaccgacuacaaacugguccagaaggucugccccgauuauaacuaccauucugacacccccuacuuucccucagguuag

SEQ ID NO: 244586 - RNA, 432 nt, Artificial Sequence
  derived and/or modified sequence
augcaggccgcgugcugguauguccuuuuccuucuacagcccaccgucuaucuggugacuugcgccaaccuaacaaauggggguaagucggaguuguuaaagaguggauccuccaaaagcacccuuaagcauauauggaccgaguccucuaaagaucuuucgauuucaagacuguugagucagaccuuccgcgguaaggaaaaugauacagaccuggaccugcgcuaugacaccccugagccauacagcgaacaagaucugugggacugguuacggaauaguacugaccuccaggagccuagaccucgcgcaaaaagaagacccaucguaaaaaccgguaaguuuaagaaaauguuuggauggggcgacuuccacuccaauauuaaaaccgugaaguuaaaucugcucaucaccggaaagaucguggacuag

SEQ ID NO: 244587 - RNA, 420 nt, Artificial Sequence
  derived and/or modified sequence
augcaggccgcuugcugguacguguuguuccuucuucaaccaacaguguaucuagugacaugugcaaaccuuacuaacggcggaaagucagagcuucucaagucaggaagcuccaagagcacauugaagcauauuuggaccgaaucauccaaggaccuuucuauuucaagacuacucucgcaaaccuuccgcggcaaagaaaaugacacggaccucgaccuuagauacgauacccccgaaccguacuccgaacaggauuugugggauuggcuucgcaauagcaccgacuugcaggagcccagaccuagagccaaaaggaggccuauaguaaagacugguaaauuuaagaaaauguuugguuggggagacuuccacucuaauauaaagaccgugaagcugaaccuauugaucacaggcuag

SEQ ID NO: 244588 - protein, 862 aa, Artificial Sequence
  derived and/or modified sequence
MHSSWIPRGNYIESNRDDCTVSLIYAVHLKKSGYVFFEYQYVDNNIFFEFFIQNDQCQEMDTTTDKWVKLTDNGEWGSHSVMLKSGTNILYWRTTGILMGSKAVKPVLVKNITIEGVAYTSECFPCKPGTFSNKPGSFNCQVCPRNTYSEKGAKECIRCKDDSQFSEEGSSECTERPPCTTKDYFQIHTPCDEEGKTQIMYKWIEPKICREDLTDAIRLPPSGEKKDCPPCNPGFYNNGSSSCHPCPPGTFSDGTKECRPCPAGTEPALGFEYKWWNVLPGNMKTSCFNVGNSKCDGMNGWEVAGDHIQSGAGGSDNDYLILNLHIPGFKPPTSMTGATGSELGRITFVFETLCSADCVLYFMVDINRKSTNVVESWGGTKEKQAYTHIIFKNATFTFTWAFQRTNQGQDNRRFINDMVKIYSITATNAVDGVASSCRACALGSEQSGSSCVPCPPGHYIEKETNQCKECPPDTYLSIHQVYGKEACIPCGPGSKNNQDHSVCYSDCFFYHEKENQSLHYDFSNLSSVGSLMNGPSFTSKGTKYFHFFNISLCGHEGKKMALCTNNITDFTVKEIVAGSDDYTNLVGAFVCQSTIIPSESKGFRAALSSQSIILADTFIGVTVETTLKNINIKEDMFPVPTSQIPDVHFFYKSSTATTSCINGRSTAVKMRCNPTKSGAGVISVPSKCPAGTCDGCTFYFLWESAEACPLCTEHDFHEIEGACKRGFQETLYVWNEPKWCIKGISLPEKKLATCETVDFWLKVGAGVGAFTAVLLVALTCYFWKKNQKLEYKYSKLVMTTNSKECELPAADSCAIMEGEDNEEEVVYSNKQSLLGKLKSLATKEKEDHFESVQLKTSRSPNI

SEQ ID NO: 244589 - DNA, 2589 bp, Artificial Sequence
  derived and/or modified sequence
atgcattcaagttggattccaaggggaaattacatcgagtccaacagggacgactgcaccgtttccctgatctacgcagtgcacctcaagaaatctggctatgtattcttcgaatatcagtatgttgataacaatatttttttcgaattctttatccagaacgaccagtgccaggaaatggacacaactactgacaaatgggtgaagctaaccgacaacggcgaatggggctcccattcagtcatgctcaaaagcggaaccaatattttgtattggaggactacaggtattttaatgggatctaaggccgttaaacccgttttggtgaaaaatatcaccatcgagggggtggcatatacttctgaatgctttccctgcaagccaggcacattttcaaacaagcccggtagtttcaattgtcaggtgtgcccacgaaatacatactctgagaagggggcaaaggagtgtatccggtgtaaggacgatagccaattttccgaagaaggctcatccgagtgtaccgaacgccccccctgcacaacaaaggattattttcagatccataccccatgcgatgaggaagggaagactcaaatcatgtacaagtggattgagccaaagatctgtcgcgaggacctgacagacgctatacgactgcctccatccggtgagaagaaagactgcccaccttgtaatcccggtttctacaacaacggtagcagttcctgtcacccatgccccccgggcactttctcggatggtaccaaggagtgcagaccatgcccagccggaacagagccggctctaggcttcgaatataagtggtggaatgtgttacccggcaatatgaagactagctgctttaacgtgggcaactccaagtgtgacgggatgaacggttgggaagtggccggggatcacattcagagcggagcagggggatcggataatgattatctgatcctgaacttgcacattcccggttttaagcctccaacttccatgacaggcgcaacgggaagtgaactcggacggatcacctttgtatttgagaccctctgctctgcagactgcgtcctatatttcatggtggacattaaccgaaaatccaccaatgtggtagagtcctggggcgggaccaaggagaaacaggcttacacccatattatttttaagaacgctacattcacattcacgtgggccttccagagaaccaatcagggtcaggataatcgcagattcataaatgatatggtgaagatttatagcattaccgccaccaatgccgtggacggcgtagcgtccagctgccgcgcctgcgccttaggatccgagcagtccggatcatcatgtgtcccatgtccaccaggccactacattgagaaagaaacaaatcagtgcaaagaatgcccgcctgatacttacctgtccatacatcaagtctacgggaaagaggcgtgtatcccctgtggccccgggagcaagaataatcaagaccactccgtgtgctattccgactgctttttttatcatgaaaaagagaatcagtctctccattatgacttctctaacttatcttcagtagggtccctcatgaacggtcccagcttcacttccaaagggacaaagtacttccacttttttaatatctcactgtgtggccacgagggaaaaaagatggctctctgcacaaataatattacagactttactgttaaggagattgtggccggaagcgacgactacaccaaccttgtaggagcctttgtctgtcagagtacaattatcccttcagagagcaaaggctttagagcagccctctctagccaatctattatccttgccgacacctttatcggagtaactgtcgagacaacactcaagaatattaatatcaaggaggacatgtttccggtgcctacttcacagattcctgatgtgcatttcttttacaagtccagcaccgctaccacctcatgtattaatggtaggtccacggcagtcaagatgagatgcaaccccaccaaaagcggggccggcgtgatttcagttccatcgaagtgcccagcaggcacgtgcgacggctgtactttttatttcctgtgggaaagcgctgaagcgtgccccctttgcacagaacatgatttccacgagattgagggggcctgtaagcgcggctttcaagagaccctgtacgtttggaacgagcctaaatggtgcattaaaggcatcagcctgcccgagaaaaagctggctacatgtgagacagtcgacttctggcttaaagttggggccggagttggtgctttcaccgcagtcttgctcgttgctttgacctgctacttctggaagaagaatcagaagctcgaatataaatactccaaactagtaatgactactaactcaaaggaatgcgaattgcctgccgccgattcctgcgccattatggagggcgaggacaacgaagaggaagtggtgtattctaataagcagagcttattgggaaagcttaaatcgctagcaaccaaggaaaaagaggaccatttcgagtcagttcagcttaagacttcacggtcccccaacatatag

SEQ ID NO: 244590 - DNA, 2589 bp, Artificial Sequence
  derived and/or modified sequence
atgcacagctcctggatcccccggggcaactacatcgagagcaacagagatgactgcaccgtgtccctcatctatgctgtgcacctgaagaagagcggctacgtgttctttgagtaccagtatgtggacaacaacatcttctttgagttcttcatccagaatgaccagtgccaggagatggacaccaccacagacaagtgggtgaagctgacagacaatggagagtggggcagccacagcgtgatgctgaagagcggcaccaacatcctgtactggaggaccaccggcatcctgatgggcagcaaggctgtgaagcctgtgctggtgaagaacatcaccatcgagggcgtggcctacaccagcgagtgcttcccctgcaagccaggcaccttcagcaacaagccaggcagcttcaactgccaggtgtgccccaggaacacctacagcgagaagggggccaaggagtgcatccgctgcaaggatgacagccagttcagcgaggagggcagcagcgagtgcacagagaggcctccctgcaccaccaaggactacttccagatccacaccccctgtgatgaggagggcaagacccagatcatgtacaagtggattgagcccaagatctgccgggaggacctgacagatgccatccggctgccccccagcggggagaagaaggactgccccccctgcaaccctggcttctacaacaacggcagcagcagctgccacccctgccccccaggcaccttcagtgatggcaccaaggaatgtcggccctgcccagctggaacagagcccgccctgggctttgagtacaagtggtggaatgtgctgcccggcaacatgaagaccagctgcttcaacgtgggcaacagcaaatgtgatggcatgaatggctgggaggtggccggggaccacatccagagcggggccggcggcagtgacaatgactacctgatcctgaacctgcacatccctggcttcaagccacccacctccatgaccggggccactggaagtgagctgggccgcatcacctttgtgtttgagaccctgtgcagcgctgactgtgtgctgtacttcatggtggacatcaacaggaagagcaccaacgtggtggagagctggggcggcaccaaggagaagcaggcctacacccacatcatcttcaagaatgccaccttcaccttcacctgggccttccagaggaccaaccagggccaggacaacagacgcttcatcaatgacatggtgaagatctacagcatcacagccaccaatgctgtggatggagtggccagcagctgccgggcctgtgccctgggcagcgagcagagcggcagcagctgtgtgccctgccccccaggccactacatcgagaaggagaccaaccagtgcaaggaatgtcctccagacacctacctgagcatccaccaggtgtatggcaaggaggcctgcatcccctgtggccctggcagcaagaacaaccaggaccacagcgtgtgctacagcgactgcttcttctaccacgagaaggagaaccagagcctgcactatgacttcagcaacctgagctctgtgggcagcctgatgaatggccccagcttcaccagcaagggcaccaagtacttccacttcttcaacatcagcctgtgtggccacgagggcaagaagatggccctgtgcaccaacaacatcacagacttcaccgtgaaggagatcgtggccggcagtgatgactacaccaacctggtgggcgcctttgtgtgccagagcaccatcatccccagcgagagcaagggcttccgggccgccctgagcagccagagcatcatcctggccgacaccttcatcggcgtgacagtggagaccaccctgaagaacatcaacatcaaggaggacatgtttcctgtgcccaccagccagatcccagatgtgcacttcttctacaagagcagcacagccaccaccagctgcatcaatggccgcagcacagctgtgaagatgcgctgcaaccccaccaagtctggagctggggtcatctctgtgcccagcaaatgtcctgctggcacctgtgatggctgcaccttctacttcctgtgggagagcgctgaggcctgccccctgtgcacagaacatgacttccatgaaattgaaggagcctgcaagaggggcttccaggagaccctgtatgtgtggaatgagcccaagtggtgcatcaagggcatcagcctgcctgagaagaagctggccacctgtgagaccgtggacttctggctgaaggtgggcgccggcgtgggcgccttcaccgctgtgctgctggtggccctgacctgctacttctggaagaagaaccagaagctggagtacaagtacagcaagctggtgatgaccaccaacagcaaagaatgtgagctgcctgctgctgacagctgtgccatcatggagggagaagataatgaggaggaggtggtgtacagcaacaagcagagcctgctgggcaagctgaagagcctggccaccaaggagaaggaggaccactttgaatctgtgcagctgaagaccagccgcagccccaacatctag

SEQ ID NO: 244591 - DNA, 2589 bp, Artificial Sequence
  derived and/or modified sequence
atgcacagcagctggatcccccggggcaactacatcgagagcaacagagatgactgtacggtgagtcttatttacgctgttcacttaaagaaatccggctatgttttctttgaataccaatatgtcgataataatatattctttgaatttttcatccagaatgaccagtgccaagagatggatacaaccaccgacaagtgggtgaaactgactgacaacggggaatggggtagccacagtgtcatgctcaaaagcggtacaaacattttgtattggcgaactactggtatcctgatgggatcaaaggcagtgaagcctgtgctggttaagaatataacaatagaaggggtagcctacacctccgaatgctttccatgcaagcctggtacctttagtaacaagccagggagcttcaactgccaggtttgcccaagaaacacatactctgaaaagggcgcaaaagaatgcatccgctgcaaggacgactcgcagtttagcgaagaagggtcttctgagtgtacagagcgcccgccctgtaccaccaaggactacttccagatccatacaccctgtgacgaagaaggaaagacccaaatcatgtataaatggatcgaaccaaagatatgtagggaggaccttaccgacgcaataagactgcctccgtccggcgagaagaaggactgtcctccttgtaaccctgggttttacaataacggctcgtcatcatgccacccttgtcctcctggaacattcagtgacggaacaaaggaatgtcgtccatgccccgctgggaccgaacctgctcttggattcgagtataagtggtggaatgtgctgccaggaaatatgaagacaagctgcttcaacgtgggcaattccaagtgcgacggcatgaatgggtgggaagtagctggcgaccacattcaaagtggcgctggaggttccgacaacgattatctcatccttaatctacacattcctgggtttaaaccccccactagcatgacgggggcaactgggagcgagctaggccgcataacctttgtgtttgagacactgtgttccgctgactgtgtgctgtatttcatggtcgacatcaatcgcaagtccaccaatgtggtggagtcgtgggggggtaccaaggaaaagcaagcctacacacatatcatttttaagaatgccactttcacattcacatgggctttccaaagaacaaatcaggggcaagataaccgtcgcttcatcaatgatatggtgaaaatctacagtattaccgcaaccaacgccgtggatggcgtggctagcagctgccgggcgtgtgccctaggctccgaacagtccggctcatcatgcgtgccttgccctccagggcactatattgaaaaggagaccaaccagtgcaaagaatgccctcccgacacttatctctccatccaccaggtgtatggcaaagaagcatgcataccctgcggacccggctcaaagaataaccaggatcacagcgtttgctattccgactgctttttctatcatgaaaaggaaaaccaatctctgcattatgattttagtaacctgagcagtgtgggctctctgatgaacggaccaagcttcacttctaaaggtactaagtattttcactttttcaacatcagtctctgtgggcacgaggggaaaaaaatggccttatgtaccaacaatataaccgattttaccgtaaaggagatcgtggcaggaagtgatgactacactaatctggtcggagctttcgtgtgccagtccacgattatcccaagcgagagtaaggggtttagggctgccctgagtagccagtccatcatcttggcggacaccttcattggagtcacagtcgaaacaacccttaaaaacattaatattaaggaggatatgtttccagtgccaacctctcagattcccgacgtacactttttttataagtcatctacagccacaaccagttgtattaatggccggtctactgccgtgaaaatgcgctgcaaccccaccaagagcggcgctggagtgatatcagtgcctagtaagtgtcccgccggcacctgtgacggttgtaccttttacttcctttgggaatctgcagaggcctgccccttgtgcacagaacatgactttcacgaaattgagggcgcatgcaagcgcgggtttcaggaaactttgtacgtctggaatgagccaaaatggtgtattaagggcattagtctgccagagaaaaaacttgctacttgtgagaccgttgatttctggctgaaggtgggggctggagtgggcgccttcacagcagtcctgttggtcgccttgacatgctatttctggaagaaaaatcagaaactggagtacaaatacagtaaactcgtcatgacaactaactctaaagaatgcgaactccctgccgctgactcttgtgccatcatggagggggaggacaatgaagaagaagtggtgtacagcaataagcagtctctcctcgggaagctcaaaagcttagccacaaaggagaaagaagaccatttcgagtccgtccaactgaagacaagcagatcccctaatatctag

SEQ ID NO: 244592 - DNA, 2589 bp, Artificial Sequence
  derived and/or modified sequence
atgcacagcagctggatcccacgagggaattacatcgaaagtaatcgcgatgattgcacagtcagcctgatttacgctgtccacctgaagaagtctggttacgtgttctttgaatatcagtatgttgacaacaatatcttctttgaatttttcatccagaacgatcagtgtcaggagatggacacaacgactgacaagtgggtgaagctaacagataacggggagtgggggtcccatagtgtgatgctgaagtccggtaccaacattctgtactggcggaccacgggtattctcatgggaagtaaggccgttaagccagtgcttgtgaaaaatattacaatcgagggcgttgcatacaccagcgagtgcttcccctgcaaacctggcacattttctaataaaccaggctcgttcaattgtcaggtttgccccagaaacacatattctgagaagggcgctaaggagtgcatcagatgcaaggatgactcgcagttttccgaagaaggttcgagtgagtgtactgaacgccctccgtgcactaccaaggattatttccagatccatactccatgcgacgaggaaggtaagacccaaatcatgtacaaatggatagaaccgaagatctgtcgtgaggatctgactgacgcaattaggcttcctccgagcggcgaaaagaaggactgccctccatgcaaccccggattctataataacggatcaagtagctgccatccttgccctccaggaactttcagcgatgggacaaaggagtgtcggccatgtcccgcaggaacagagcccgctctcggtttcgaatacaaatggtggaatgtgctccccggaaacatgaaaacctcatgcttcaacgtcggtaatagtaaatgtgatgggatgaacggctgggaggtggctggagaccatattcagtcgggtgccggaggatccgataacgattatcttatcttgaacctgcacatccctggattcaaaccacctacttccatgacaggagctactgggagcgagctgggtcgaattacatttgtcttcgagacactgtgctcagccgattgcgtactgtattttatggtggacatcaatcgcaaatcaacaaatgtggtggagtcatggggcggtactaaggagaaacaagcatacactcacattattttcaagaatgctactttcacgtttacctgggcctttcagcggaccaatcagggacaggataaccggagatttattaacgatatggtcaagatctattctattacggccaccaatgccgtggacggcgtggcatcttcttgtagagcctgtgctctcgggagtgagcagtctgggtcgagttgtgtcccctgtcctcccggacactacatcgagaaagaaaccaatcaatgcaaggagtgccctcctgacacctatttgagcattcaccaggtgtatggtaaagaggcctgcatcccgtgcggcccaggttccaagaataaccaggaccatagcgtctgctatagtgattgttttttctatcacgagaaggagaaccagtcacttcactacgacttctccaatctcagcagcgtagggtccctaatgaatgggcctagtttcacctcaaaaggcaccaagtactttcatttctttaacataagcttgtgcggccacgaggggaagaagatggccctttgtacaaacaacatcacagatttcacagtaaaggagatcgtagcaggtagtgatgactataccaacctggtgggtgcgtttgtgtgtcagagcactatcatcccttctgagagtaaaggatttagagctgccctctccagtcaaagcatcatcctcgccgacacgttcattggagtgacagttgagaccaccctgaagaacatcaatatcaaggaggatatgttccccgtgcccacctcacagattccggatgttcattttttttataagtcctctaccgccaccacttcttgcataaacggcagatccactgccgtgaagatgcggtgcaacccaactaaatccggggctggggtgatctctgtaccatctaagtgcccagcaggaacttgtgatgggtgtaccttctattttctatgggagtcagcggaagcatgcccactttgtactgagcacgactttcatgagattgaaggggcttgtaagagagggtttcaagagacactgtatgtctggaacgagccaaagtggtgtatcaagggaatttctctgccagagaaaaaactggctacctgtgaaaccgtggatttttggttgaaggtcggtgcaggcgtgggtgcatttacggccgttcttttggttgccttgacatgctacttctggaagaagaaccaaaaactggaatataaatacagtaagctggtgatgacgacaaactcaaaggaatgtgaactaccggctgcggactcatgcgctatcatggagggcgaggataacgaggaggaagttgtgtacagcaacaagcaatcattgcttggaaaactgaagtcactagcaaccaaggagaaggaggatcattttgagtcggtccaacttaaaacatctagatcccccaacatttag

SEQ ID NO: 244593 - DNA, 3179 bp, Artificial Sequence
  derived and/or modified sequence
tcattgacacagtgagggaggcaaaacagtgtggatgcagcagaataaccacaaccaggattttgaactgaataagtaagaaagattatcactttgaatatacggaatgtgatagcagtggctccaggtggagagttgccattccaaattctgcagtggactgctctggcctgcctgacccagtgagaggcaaagaatgcactcttcttggatccctcgtggaaactacatagaatctaatcgtgatgactgcacggtgtctttgatctatgctgtgcaccttaagaagtcaggctatgtcttctttgagtaccagtatgtcgacaacaacatcttctttgagttctttattcaaaatgatcagtgccaggagatggacaccaccactgacaagtgggtaaaacttacagacaatggagaatggggctctcattctgtaatgctgaaatcaggcacaaacatactctactggagaactacaggcatccttatgggttctaaggcggtcaagcctgtgctggtaaaaaatatcacaattgaaggggtggcgtacacatcagaatgttttccttgcaagccaggcacattcagcaacaaaccaggttcattcaactgccaggtgtgtcccagaaacacctattctgagaaaggagccaaagaatgtataaggtgtaaagacgactctcaattttcagaggaaggatccagtgagtgtacagagcgccctccctgtaccacaaaagactatttccagatccatactccatgtgatgaagaaggaaagacacagataatgtacaagtggatagagcccaaaatctgccgggaggatctcacagatgctattagattgcccccttctggagagaagaaggattgtccgccttgcaaccctggattttataacaatggatcatcttcttgccatccctgtcctcctggaacattttcagatggaaccaaagaatgtagaccatgtccagcaggaacggagcctgcacttggctttgaatataaatggtggaatgtccttcctggcaacatgaaaacttcctgcttcaatgttgggaattcaaagtgcgatggaatgaatggttgggaggtggctggagatcatatccagagtggggctggaggttctgacaatgattacctgatcttaaacttgcatatcccaggatttaaaccaccaacatctatgactggagccacgggttctgaactaggaagaataacatttgtctttgagaccctctgttcagctgactgtgttttgtacttcatggtggatattaatagaaaaagtacaaatgtggtagaatcgtggggtggaaccaaagaaaaacaagcttacacccatatcatcttcaagaatgcaacttttacatttacatgggcattccagagaactaatcagggtcaagataatagacggttcatcaatgacatggtgaagatttattctatcacagccactaatgcagttgatggggtggcgtcctcatgccgtgcctgtgccctcggttctgaacagtcgggttcatcgtgtgtcccctgccctccaggccactacattgagaaagaaaccaaccagtgcaaggaatgtccacctgacacctacctgtccatacatcaggtctatggcaaagaggcttgtattccatgcgggcctgggagtaaaaacaatcaggaccattcggtttgctatagtgactgctttttctaccatgaaaaagaaaatcagagtttgcactatgactttagcaacctcagcagtgtgggctcattaatgaatggccccagcttcacctccaaaggaacaaaatacttccatttcttcaatatcagtttatgtgggcatgaggggaagaagatggctctctgtaccaacaatataacagactttacagtaaaagaaatagtggcagggtcagatgattacacaaatttggtaggggcatttgtatgccagtcaacaattattccttctgaaagtaagggtttccgagcagccttatcatcacaatccatcattctggcagatacattcataggagtcacagttgaaaccacattgaaaaatattaatataaaagaagatatgttcccagttccaacaagccaaataccagatgtgcatttcttttataagtcttctacagcaacaacatcttgtattaatggccgatcaactgctgtgaaaatgaggtgtaatcctactaaatctggagcaggagtgatttcagtccccagcaagtgcccagcaggtacctgtgatgggtgtacgttctatttcctgtgggagagtgctgaagcttgccctctgtgtacggagcatgacttccatgagattgagggagcctgcaagagaggatttcaggaaaccttgtatgtgtggaatgaacctaaatggtgcattaaaggaatttctttgcctgagaaaaagttggcaacctgtgaaacggttgacttttggctgaaggtgggagccggtgtgggagcttttactgccgttttgctggtggctctgacctgctacttctggaaaaagaatcaaaaactggaatacaaatattccaagttagtaatgacgactaactcaaaagagtgtgaactcccggctgcagacagttgtgctatcatggaaggagaagataatgaagaggaagttgtatattccaataaacagtcactactaggaaaactcaaatctttggcaaccaaggaaaaagaagaccattttgaatctgttcaactgaaaacctcaagatccccaaatatatgaagagacagtgctgtagccttgagactaatgaacaaagaaacctgctctagttttacaggaccatattttagggtctgtcctcatacctgtcacattggtgatctcacagaggagggccatgccgctgaaaagggaaggagattgaaacatttgattgccttatcacatggtcaagtaccttgccaaataaaggaaagcaaatgatttgggtctcaactgaagatgaagctcaactcaggaagagatttatctgtatatacacataactgaaaaccaagtttaagcccaccaatgcactgctgatgcatgccatataattaatgggtaacttttattctttatgatgtctacataacaagtgtgatttggaaggcacatgtgagcatatgcatta

SEQ ID NO: 244594 - DNA, 2589 bp, Artificial Sequence
  derived and/or modified sequence
atgcacagcagctggatccccagaggcaactacatcgagagcaacagagacgactgcaccgtgagcctgatctacgccgtgcacctgaagaagagcggctacgtgttcttcgagtaccagtacgtggacaacaacatcttcttcgagttcttcatccagaacgaccagtgccaggagatggacaccaccaccgacaagtgggtgaagctgaccgacaacggcgagtggggcagccacagcgtgatgctgaagagcggcaccaacatcctgtactggagaaccaccggcatcctgatgggcagcaaggccgtgaagcccgtgctggtgaagaacatcaccatcgagggcgtggcctacaccagcgagtgcttcccctgcaagcccggcaccttcagcaacaagcccggcagcttcaactgccaggtgtgccccagaaacacctacagcgagaagggcgccaaggagtgcatcagatgcaaggacgacagccagttcagcgaggagggcagcagcgagtgcaccgagagacccccctgcaccaccaaggactacttccagatccacaccccctgcgacgaggagggcaagacccagatcatgtacaagtggatcgagcccaagatctgcagagaggacctgaccgacgccatcagactgccccccagcggcgagaagaaggactgccccccctgcaaccccggcttctacaacaacggcagcagcagctgccacccctgcccccccggcaccttcagcgacggcaccaaggagtgcagaccctgccccgccggcaccgagcccgccctgggcttcgagtacaagtggtggaacgtgctgcccggcaacatgaagaccagctgcttcaacgtgggcaacagcaagtgcgacggcatgaacggctgggaggtggccggcgaccacatccagagcggcgccggcggcagcgacaacgactacctgatcctgaacctgcacatccccggcttcaagccccccaccagcatgaccggcgccaccggcagcgagctgggcagaatcaccttcgtgttcgagaccctgtgcagcgccgactgcgtgctgtacttcatggtggacatcaacagaaagagcaccaacgtggtggagagctggggcggcaccaaggagaagcaggcctacacccacatcatcttcaagaacgccaccttcaccttcacctgggccttccagagaaccaaccagggccaggacaacagaagattcatcaacgacatggtgaagatctacagcatcaccgccaccaacgccgtggacggcgtggccagcagctgcagagcctgcgccctgggcagcgagcagagcggcagcagctgcgtgccctgcccccccggccactacatcgagaaggagaccaaccagtgcaaggagtgcccccccgacacctacctgagcatccaccaggtgtacggcaaggaggcctgcatcccctgcggccccggcagcaagaacaaccaggaccacagcgtgtgctacagcgactgcttcttctaccacgagaaggagaaccagagcctgcactacgacttcagcaacctgagcagcgtgggcagcctgatgaacggccccagcttcaccagcaagggcaccaagtacttccacttcttcaacatcagcctgtgcggccacgagggcaagaagatggccctgtgcaccaacaacatcaccgacttcaccgtgaaggagatcgtggccggcagcgacgactacaccaacctggtgggcgccttcgtgtgccagagcaccatcatccccagcgagagcaagggcttcagagccgccctgagcagccagagcatcatcctggccgacaccttcatcggcgtgaccgtggagaccaccctgaagaacatcaacatcaaggaggacatgttccccgtgcccaccagccagatccccgacgtgcacttcttctacaagagcagcaccgccaccaccagctgcatcaacggcagaagcaccgccgtgaagatgagatgcaaccccaccaagagcggcgccggcgtgatcagcgtgcccagcaagtgccccgccggcacctgcgacggctgcaccttctacttcctgtgggagagcgccgaggcctgccccctgtgcaccgagcacgacttccacgagatcgagggcgcctgcaagagaggcttccaggagaccctgtacgtgtggaacgagcccaagtggtgcatcaagggcatcagcctgcccgagaagaagctggccacctgcgagaccgtggacttctggctgaaggtgggcgccggcgtgggcgccttcaccgccgtgctgctggtggccctgacctgctacttctggaagaagaaccagaagctggagtacaagtacagcaagctggtgatgaccaccaacagcaaggagtgcgagctgcccgccgccgacagctgcgccatcatggagggcgaggacaacgaggaggaggtggtgtacagcaacaagcagagcctgctgggcaagctgaagagcctggccaccaaggagaaggaggaccacttcgagagcgtgcagctgaagaccagcagaagccccaacatctag

SEQ ID NO: 244595 - protein, 885 aa, Artificial Sequence
  derived and/or modified sequence
MQEAIILLALLGAMSGGEALHLILLPATGNVAENSPPGTSVHKFSVKLSASLSPVIPGFPQIVNSNPLTEAFRVNWLSGTYFEVVTTGMEQLDFETGPNIFDLQIYVKDEVGVTDLQVLTVQVTDVNEPPQFQGNLAEGLHLYIVERANPGFIYQVEAFDPEDTSRNIPLSYFLISPPKSFRMSANGTLFSTTELDFEAGHRSFHLIVEVRDSGGLKASTELQVNIVNLNDEVPRFTSPTRVYTVLEELSPGTIVANITAEDPDDEGFPSHLLYSITTVSKYFMINQLTGTIQVAQRIDRDAGELRQNPTISLEVLVKDRPYGGQENRIQITFIVEDVNDNPATCQKFTFSIMVPERTAKGTLLLDLNKFCFDDDSEAPNNRFNFTMPSGVGSGSRFLQDPAGSGKIVLIGDLDYENPSNLAAGNKYTVIIQVQDVAPPYYKNNVYVYILTSPENEFPLIFDRPSYVFDVSERRPARTRVGQVRATDKDLPQSSLLYSISTGGASLQYPNVFWINPKTGELQLVTKVDCETTPIYILRIQATNNEDTSSVTVTVNILEENDEKPICTPNSYFLALPVDLKVGTNIQNFKLTCTDLDSSPRSFRYSIGPGNVNNHFTFSPNAGSNVTRLLLTSRFDYAGGFDKIWDYKLLVYVTDDNLMSDRKKAEALVETGTVTLSIKVIPHPTTIITTTPRPRVTYQVLRKNVYSPSAWYVPFVITLGSILLLGLLVYLVVLLAKAIHRHCPCKTGKNKEPLTKKGETKTAERDVVVETIQMNTIFDGEAIDPVTGETYEFNSKTGARKWKDPLTQMPKWKESSHQGAAPRRVTAGEGMGSLRSANWEEDELSGKAWAEDAGLGSRNEGGKLGNPKNRNPAFMNRAYPKPHPGK

SEQ ID NO: 244596 - protein, 885 aa, Artificial Sequence
  derived and/or modified sequence
MQEAIILLALLGAMSGGEALHLILLPATGNVAENSPPGTSVHKFSVKLSASLSPVIPGFPQIVNSNPLTEAFRVNWLSGTYFEVVTTGMEQLDFETGPNIFDLQIYVKDEVGVTDLQVLTVQVTDVNEPPQFQGNLAEGLHLYIVERANPGFIYQVEAFDPEDTSRNIPLSYFLISPPKSFRMSANGTLFSTTELDFEAGHRSFHLIVEVRDSGGLKASTELQVNIVNLNDEVPRFTSPTRVYTVLEELSPGTIVANITAEDPDDEGFPSHLLYSITTVSKYFMINQLTGTIQVAQRIDRDAGELRQNPTISLEVLVKDRPYGGQENRIQITFIVEDVNDNPATCQKFTFSIMVPERTAKGTLLLDLNKFCFDDDSEAPNNRFNFTMPSGVGSGSRFLQDPAGSGKIVLIGDLDYENPSNLAAGNKYTVIIQVQDVAPPYYKNNVYVYILTSPENEFPLIFDRPSYVFDVSERRPARTRVGQVRATDKDLPQSSLLYSISTGGASLQYPNVFWINPKTGELQLVTKVDCETTPIYILRIQATNNEDTSSVTVTVNILEENDEKPICTPNSYFLALPVDLKVGTNIQNFKLTCTDLDSSPRSFRYSIGPGNVNNHFTFSPNAGSNVTRLLLTSRFDYAGGFDKIWDYKLLVYVTDDNLMSDRKKAEALVETGTVTLSIKVIPHPTTIITTTPRPRVTYQVLRKNVYSPSAWYVPFVITLGSILLLGLLVYLVVLLAKAIHRHCPCKTGKNKEPLKKKTETKTAERDVVVETIQMNTIFDGEAIDPVTGETYEFNSKTGARKWKDPLTQMPKWKESSHQGAAPRRVTAGEGMGSLRSANWEEDELSGKAWAEDAGLGSRNEGGKLGNPKNRNPAFMNRAYPKPHPGK

SEQ ID NO: 244597 - DNA, 2658 bp, Artificial Sequence
  derived and/or modified sequence
atgcaggaggccatcatcctgctggccctgctgggcgccatgagcggcggcgaggccctgcacctgatcctgctgcccgccaccggcaacgtggccgagaacagcccccccggcaccagcgtgcacaagttcagcgtgaagctgagcgccagcctgagccccgtgatccccggcttcccccagatcgtgaacagcaaccccctgaccgaggccttcagagtgaactggctgagcggcacctacttcgaggtggtgaccaccggcatggagcagctggacttcgagaccggccccaacatcttcgacctgcagatctacgtgaaggacgaggtgggcgtgaccgacctgcaggtgctgaccgtgcaggtgaccgacgtgaacgagcccccccagttccagggcaacctggccgagggcctgcacctgtacatcgtggagagagccaaccccggcttcatctaccaggtggaggccttcgaccccgaggacaccagcagaaacatccccctgagctacttcctgatcagcccccccaagagcttcagaatgagcgccaacggcaccctgttcagcaccaccgagctggacttcgaggccggccacagaagcttccacctgatcgtggaggtgagagacagcggcggcctgaaggccagcaccgagctgcaggtgaacatcgtgaacctgaacgacgaggtgcccagattcaccagccccaccagagtgtacaccgtgctggaggagctgagccccggcaccatcgtggccaacatcaccgccgaggaccccgacgacgagggcttccccagccacctgctgtacagcatcaccaccgtgagcaagtacttcatgatcaaccagctgaccggcaccatccaggtggcccagagaatcgacagagacgccggcgagctgagacagaaccccaccatcagcctggaggtgctggtgaaggacagaccctacggcggccaggagaacagaatccagatcaccttcatcgtggaggacgtgaacgacaaccccgccacctgccagaagttcaccttcagcatcatggtgcccgagagaaccgccaagggcaccctgctgctggacctgaacaagttctgcttcgacgacgacagcgaggcccccaacaacagattcaacttcaccatgcccagcggcgtgggcagcggcagcagattcctgcaggaccccgccggcagcggcaagatcgtgctgatcggcgacctggactacgagaaccccagcaacctggccgccggcaacaagtacaccgtgatcatccaggtgcaggacgtggcccccccctactacaagaacaacgtgtacgtgtacatcctgaccagccccgagaacgagttccccctgatcttcgacagacccagctacgtgttcgacgtgagcgagagaagacccgccagaaccagagtgggccaggtgagagccaccgacaaggacctgccccagagcagcctgctgtacagcatcagcaccggcggcgccagcctgcagtaccccaacgtgttctggatcaaccccaagaccggcgagctgcagctggtgaccaaggtggactgcgagaccacccccatctacatcctgagaatccaggccaccaacaacgaggacaccagcagcgtgaccgtgaccgtgaacatcctggaggagaacgacgagaagcccatctgcacccccaacagctacttcctggccctgcccgtggacctgaaggtgggcaccaacatccagaacttcaagctgacctgcaccgacctggacagcagccccagaagcttcagatacagcatcggccccggcaacgtgaacaaccacttcaccttcagccccaacgccggcagcaacgtgaccagactgctgctgaccagcagattcgactacgccggcggcttcgacaagatctgggactacaagctgctggtgtacgtgaccgacgacaacctgatgagcgacagaaagaaggccgaggccctggtggagaccggcaccgtgaccctgagcatcaaggtgatcccccaccccaccaccatcatcaccaccacccccagacccagagtgacctaccaggtgctgagaaagaacgtgtacagccccagcgcctggtacgtgcccttcgtgatcaccctgggcagcatcctgctgctgggcctgctggtgtacctggtggtgctgctggccaaggccatccacagacactgcccctgcaagaccggcaagaacaaggagcccctgaccaagaagggcgagaccaagaccgccgagagagacgtggtggtggagaccatccagatgaacaccatcttcgacggcgaggccatcgaccccgtgaccggcgagacctacgagttcaacagcaagaccggcgccagaaagtggaaggaccccctgacccagatgcccaagtggaaggagagcagccaccagggcgccgcccccagaagagtgaccgccggcgagggcatgggcagcctgagaagcgccaactgggaggaggacgagctgagcggcaaggcctgggccgaggacgccggcctgggcagcagaaacgagggcggcaagctgggcaaccccaagaacagaaaccccgccttcatgaacagagcctaccccaagccccaccccggcaagtag

SEQ ID NO: 244598 - DNA, 2658 bp, Artificial Sequence
  derived and/or modified sequence
atgcaggaggcgatcatcctcctagctttgttaggggctatgagcggcggcgaggccttgcatttaatattactcccagccactggcaacgtcgctgaaaattcaccaccagggacctcagttcataaattctcagttaaactgtccgcctctctgagtcccgtgatacccggttttcctcagatcgttaattcgaatccactgactgaggccttcagagtcaactggttaagcggcacatactttgaggtggtgactactggcatggaacagttggacttcgaaacgggtccgaatatattcgaccttcagatttacgtgaaagacgaggttggcgtcaccgatcttcaggtgctgacggtacaggtcacagacgtgaatgagcctcctcagttccagggtaacctagctgaaggcctgcatctgtacatcgtcgaacgcgcaaaccctggtttcatctatcaggtcgaggctttcgaccccgaggacacttctcgtaacatccctttgtcctactttctgatctcacctcctaagagcttccgtatgtcggcaaatggcactcttttttccacaaccgaactcgatttcgaagctggacataggtcttttcacctcatcgtggaagtgagggactctggcgggctcaaagcttccacagagcttcaggtgaacattgttaatctcaacgacgaagtgccccggttcacctcccccaccagggtgtataccgtcctggaggaactaagtcccgggactatcgtggcaaatattactgccgaagacccagatgatgagggttttccctcccaccttctctattccattacaaccgtctcaaagtatttcatgatcaatcagcttacggggacgatccaggtggcacagaggatcgatagagacgcgggagagttgagacagaaccccaccatcagtttagaagtgctcgtgaaagataggccttatggagggcaagagaaccgcatccaaattacattcatagtagaggatgtgaacgacaatcctgctacctgtcagaaattcacattctcaataatggtgccagagcgcaccgcgaaaggcacactactattagacttgaacaagttctgttttgatgatgattctgaggcacccaacaataggttcaatttcacgatgccctctggagtggggtccgggagtagattcctgcaagacccagccggcagtgggaagattgtcctgataggcgaccttgactatgaaaacccaagtaatctggccgctggtaacaaatacactgttatcattcaggtgcaggacgtggcacctccgtactataagaataatgtttacgtgtatatcctgacctctccggaaaacgagttccctcttatattcgaccggccttcttacgttttcgacgtgagtgaaaggcgaccggctagaacaagagttggacaagttagagcaacagacaaggacctccctcagagcagcttgctctattctatttccacgggcggtgcctccttgcaatatcctaacgtgttttggatcaatcctaaaaccggagagctgcagttagttactaaagtcgactgcgaaaccactcccatttacatcctccgcatccaggctacaaataacgaagataccagcagtgtgacagtgacagtgaatatcttagaggaaaacgacgagaagcccatctgcaccccaaactcctatttcttagcccttcccgtcgatctgaaggtgggtacaaatatacaaaacttcaagctaacttgtacagacctggactcgagtccccggtcattccggtatagtatcggcccaggtaatgtcaataatcatttcactttctcgcctaatgccggctccaacgtcacccggctcctgctgacttcccggttcgactatgccggaggttttgacaaaatttgggattataagctcctcgtctacgttaccgacgacaatctaatgagtgatcggaagaaagccgaggccttggtggaaaccggaaccgtgaccctgtcaatcaaggtgataccccatccgacgacaattattaccaccactccaagaccccgcgtaacataccaggtattaaggaaaaacgtttatagtcctagcgcctggtatgtgccgtttgtgataactttgggtagcatccttctgctgggcttgctcgtgtacttggtagttctgctcgccaaagccatccacagacattgcccttgcaagaccggcaaaaacaaagagccactgacaaagaaaggggaaacaaagacagccgaacgcgacgtggtagtcgagacaattcaaatgaacactatcttcgatggggaggctattgatccagtgacaggcgagacctacgagtttaacagtaagactggagcgaggaaatggaaggatcccctgacacaaatgcctaagtggaaagagtcgagtcatcagggcgccgcaccccgacgagtcacggcgggcgaaggcatgggatccctcagaagtgccaattgggaggaggatgaactgagtgggaaggcttgggctgaggacgctggtcttggatcacgaaatgaaggcggaaagctgggcaacccaaagaaccgtaaccctgcttttatgaaccgggcctatcccaagcctcacccgggcaagtag

SEQ ID NO: 244599 - DNA, 2658 bp, Artificial Sequence
  derived and/or modified sequence
atgcaggaggccatcatcctgctggccctgctgggcgccatgtctggaggagaggccctgcacctgatcctgctgcctgccactggaaatgtggccgagaacagccccccaggcacctctgtgcacaagttctctgtgaagctgagcgccagcctgagccctgtgattcctggcttcccccagatcgtgaacagcaaccccctgacagaggccttccgggtgaactggctgagcggcacctactttgaggtggtgaccaccggcatggagcagctggactttgagaccggccccaacatctttgacctgcagatctacgtgaaggatgaggtgggcgtgacagacctgcaggtgctgactgtgcaggtgacagatgtgaatgaaccaccccagttccagggcaacctggccgagggcctgcacctgtacatcgtggagcgggccaaccctggcttcatctaccaggtggaggcctttgatcctgaggacaccagcaggaacatccccctgagctacttcctgatcagcccccccaagagcttcaggatgtctgccaacggcaccctcttcagcaccacagagctggactttgaagctggccaccgctccttccacctgattgtggaggtgcgggacagcggcggcctgaaggccagcacagagctgcaggtgaacatcgtgaacctgaatgatgaggtgccccgcttcaccagccccaccagggtgtacacagtgctggaggagctgagccctggcaccatcgtggccaacatcacagcagaagatcctgatgatgagggcttccccagccacctgctgtacagcatcaccaccgtgtccaagtacttcatgatcaaccagctgaccggcaccatccaggtggcccagagaattgacagagatgctggggagctgcggcagaaccccaccatcagcctggaggtgctggtgaaggaccggccctacggcggccaggagaaccgcatccagatcaccttcatcgtggaggatgtgaatgacaacccagccacctgccagaagttcaccttcagcatcatggtgcctgagaggacagccaagggcaccctgctgctggacctgaacaagttctgctttgatgatgacagcgaggcccccaacaaccgcttcaacttcaccatgcccagcggcgtgggcagcggcagccgcttcctgcaggaccctgctggcagcggcaagatcgtgctgattggagacctggactatgagaaccccagcaacctggccgccggcaacaagtacaccgtcatcatccaggtgcaggatgtggccccaccctactacaagaacaacgtgtatgtgtacatcctgaccagcccagaaaatgagttccccctcatctttgaccggcccagctatgtgtttgatgtgtctgaaagaagacctgcccggaccagggtgggccaggtgcgggccacagacaaggacctgccccagagcagcctgctgtacagcatcagcactggaggagccagcctgcagtaccccaacgtgttctggatcaaccccaagacaggagagctgcagctggtgaccaaggtggactgtgagaccacccccatctacatcctgcgcatccaggccaccaacaatgaagacaccagctctgtgacagtgacagtgaacatcctggaggagaatgatgagaagcccatctgcacccccaacagctacttcctggccctgcctgtggacctgaaggtgggcaccaacatccagaacttcaagctgacctgcacagacctggacagcagccccaggagcttccgctacagcatcggccctggaaatgtgaacaaccacttcaccttcagccccaatgccggcagcaatgtgacccggctgctgctgaccagcagatttgattatgccggcggctttgacaagatctgggactacaagctgctggtgtatgtgacagatgacaacctgatgtctgacaggaagaaggccgaggccctggtggagaccggcaccgtgaccctgagcatcaaggtgatcccccaccccaccaccatcatcaccaccaccccccggccccgggtgacctaccaggtgctgaggaagaatgtgtacagccccagcgcctggtacgtgcccttcgtcatcaccctgggcagcatcctgctgctgggcctgctggtgtacctggtggtgctgctggccaaggccatccaccgccactgcccctgcaagacaggcaagaacaaggagcccctgaccaagaagggggagaccaagacagctgagagagatgtggtggtggagaccatccagatgaacaccatctttgatggagaggccatcgaccctgtgactggagagacctatgagttcaacagcaagacaggagccaggaagtggaaggaccccctgacccagatgcccaagtggaaggagagcagccaccagggcgccgccccccggcgggtgacagctggggagggcatgggcagcctgcggagcgccaactgggaggaggatgagctgagcggcaaggcctgggccgaggatgctggcctgggcagcagaaatgaaggaggcaagctgggcaaccccaagaacagaaatcctgccttcatgaacagagcctaccccaagccccaccctgggaagtag

SEQ ID NO: 244600 - DNA, 2658 bp, Artificial Sequence
  derived and/or modified sequence
atgcaggaggccatcatcctgctggccctgctgggcgccatgagcggaggtgaggccctgcatctcatcctgctgccggccacagggaacgtggctgagaattctccacctggaacgtctgtgcacaagttttccgtgaaactttcagcctccttgtccccggtaatccccgggtttccccagattgtcaattcaaatccactaacagaagcctttcgcgtcaattggctgtcaggaacctacttcgaggtggtgacgaccggtatggagcagctggacttcgagacgggcccaaatatttttgatctgcagatctatgttaaagacgaggttggagtgactgatctgcaggtcttaactgttcaagtgacggacgtcaatgaacctccacagtttcagggaaacctcgctgaagggttgcacctgtacattgttgaacgcgccaacccaggtttcatctaccaggtggaagccttcgaccctgaggacacaagccgcaacatcccacttagctatttcttgatttcaccaccaaaaagtttcagaatgtctgctaacggcactctgttctctactacggaactggatttcgaagccggacacagatcttttcatttaattgtggaagtgagagactccggcggcctgaaagcctctacggaactgcaggtcaacatcgttaacctaaatgacgaggtcccaagattcacgtcaccaacccgcgtctacaccgtgctcgaggagctgagcccaggcaccatcgtggctaatatcacagccgaggatcccgatgacgaaggtttcccctcccacctgctgtactccatcaccaccgtgagtaaatatttcatgatcaatcagcttacaggtacaatccaggtcgctcagcgcattgatcgggacgcaggagagctgcggcagaatccaactatctccctggaggttcttgtgaaagatcgcccctatggtgggcaggaaaacaggattcagatcacctttattgtcgaagatgtgaacgataacccagccacatgccagaaattcacattttccatcatggtgccggagcgcaccgcaaaagggaccctcttgctggatctcaataaattctgcttcgatgacgactccgaggctcctaataataggtttaacttcacgatgccaagcggggtgggctccggcagtcgctttttacaggacccagctggcagcggaaaaattgtgttgattggagatctcgattacgagaatccctccaacctcgctgccggcaacaaatacaccgtgataatacaggtgcaggacgtggctcccccatactacaagaataatgtgtacgtgtacatcctgacctctccggaaaatgaattccccctcatcttcgataggccatcctacgtattcgatgtgtcagaacggcggcccgctcggacccgggtaggtcaggttcgcgcaactgacaaggatctgccacagagttctctgctgtacagtatcagcaccggcggcgcaagcctgcaatatcctaacgtcttttggatcaacccaaagacaggtgaactccagctcgtgacaaaagtggattgcgagactactcccatctacatcctccgcatacaggcaacaaacaacgaagatactagcagcgtaactgttaccgtgaacatcctcgaagagaacgatgagaagccaatatgcactcctaacagctactttttggcattgcctgtagacctgaaagtgggcaccaatatacagaatttcaagttgacttgtaccgacctggattcctctcctcgatctttccgatacagcataggacccggtaatgtgaacaaccactttacattcagcccaaatgccgggtccaatgtgacacgtcttctgctgactagcagattcgattacgctggagggtttgacaaaatctgggattacaagcttctggtgtatgtgacagacgataatctaatgagcgatagaaaaaaggctgaagccctggtcgagacaggtaccgtgactctttctatcaaggtcattccccatcctactacgatcattacgaccactccacgaccaagagtaacttaccaggtgctccgcaagaatgtctacagtccctccgcctggtatgtgccttttgtgatcacactggggagtattctcttgctcggcctgctggtgtacctggtggtgctcctggccaaggccatccaccgtcattgtccttgtaagaccggaaaaaacaaggaaccactgaccaaaaaaggagaaaccaagaccgccgagcgcgacgtcgtcgtagaaactatccagatgaacacaatatttgacggcgaagccattgaccccgttactggtgagacgtatgaattcaatagtaaaacaggggccaggaaatggaaggaccctctgacccagatgcccaagtggaaggaaagtagtcaccagggcgccgcaccccgtagagtcacagctggagagggcatgggttccttgaggtcagctaactgggaagaggatgagctgtccggtaaggcttgggccgaagatgcgggtttaggatcccgcaacgagggggggaagttgggcaatccgaaaaacagaaacccagccttcatgaatagggcgtatcctaagccgcacccgggtaagtag

SEQ ID NO: 244601 - DNA, 2658 bp, Artificial Sequence
  derived and/or modified sequence
atgcaggaggcaatcattctcttggctctcctgggtgccatgtctggcggtgaagctctccatctgatcctgttgcccgcaacaggcaacgtcgcggagaacagtccgcctggcacctctgtgcataaattctctgtaaaactttctgccagtctgtctcccgtcattccaggcttcccacaaatcgtgaattctaacccactgaccgaggcctttagggtcaactggctgtctgggacatattttgaggtggtcaccaccggtatggagcagctggacttcgagacaggcccaaacatcttcgatctgcagatatatgtgaaggacgaggtcggggtcacagatcttcaggtgctcactgtgcaagttaccgatgtgaacgaacctcctcaatttcaggggaacctggccgaaggcctgcatctttatatagtggagagggccaaccccggtttcatctaccaggtcgaagcgttcgatcctgaggatacgtctcgtaacatcccactctcttattttctgatctcacctccaaagtccttcaggatgagcgcgaacggtacgctcttttctactaccgagctagattttgaggctggccatcgtagcttccaccttatcgtggaagtcagagattctggtggcctgaaagcatctacagagttgcaagtgaacatcgtcaacctgaacgacgaggtgccacgctttaccagccccacccgcgtgtatacagtgctggaagagctgtcccctggaacgattgtcgctaatatcacagccgaagatcctgacgacgaaggcttcccgtcacatctgctgtacagtattacaaccgtgtctaaatatttcatgatcaatcagcttaccggcactattcaggttgcacagagaatagaccgcgatgctggagagttacggcagaaccccacaatttcactggaagtgctggtgaaagataggccctacggtggacaggagaatcgcatccaaatcacatttatcgtggaagacgtgaacgacaatcccgcaacttgtcaaaaattcaccttcagtatcatggtgccagagagaactgcaaaaggcaccctactgctggacctcaataagttctgttttgacgatgattcagaggccccaaataatcggtttaattttaccatgccgtcaggcgtgggcagtggttcacgatttctgcaggatccagcaggttcaggaaagatcgtgttgatcggagacctggattatgaaaaccctagcaatttagccgctggtaacaagtacactgtgataatccaggtacaggatgtggcacccccatattataagaataacgtttacgtatacatccttacctcgcctgagaatgagtttcctctcatttttgatcgcccaagctacgtgtttgacgtttccgaacgcaggcctgctaggacacgtgtggggcaggtgcgggctaccgacaaggacttaccacaatcctctcttctctatagcatttctacaggtggggcttccctacagtaccccaacgttttctggataaaccccaagacaggcgaattgcaactggttacaaaagtggactgcgagacgacacctatctacatcttaaggatacaggccacaaataacgaggataccagttctgtcactgttacggtcaatatcttagaagaaaacgacgaaaaacccatatgtacacctaattcatattttctggccctcccggttgatttaaaagtgggtaccaatattcagaacttcaagctgacctgcacggacctggattcctcaccaagatcctttcggtactctattggcccagggaacgttaataatcacttcacatttagtccaaacgctggatccaacgtgaccaggctgctgctaacgtcacgctttgactatgctgggggatttgacaagatatgggattacaagctgctggtttatgttaccgacgataatctcatgagtgacaggaaaaaggccgaggccttagtggagaccggcactgtgaccctgagcatcaaggtgatcccccatcctaccaccatcatcactacaactccaagaccacgcgttacttatcaggtgctcagaaaaaatgtgtactctccaagcgcctggtacgtaccattcgtcattacccttggatccatcctcttactagggcttctggtctacctggtagttctgttggccaaagctatccacaggcattgcccctgcaagacaggaaagaacaaagaacctctgaccaagaagggggaaaccaaaacagccgagcgtgatgtggttgtagagacgatccagatgaatacgatattcgacggcgaagcaatcgatcctgtaacgggcgagacttatgagttcaattccaaaactggagcacggaaatggaaggaccctctgacacagatgcccaagtggaaagaaagctcccaccaaggtgccgctccccgacgcgtaactgcaggagaggggatgggctccctgagatctgcgaactgggaagaagatgaactatctggaaaagcctgggctgaagatgccggactgggaagccggaacgagggcggtaaactgggaaatccaaaaaatcgtaaccctgccttcatgaatagggcataccctaagccccatccaggcaagtag

SEQ ID NO: 244602 - DNA, 3813 bp, Artificial Sequence
  derived and/or modified sequence
ctggaataaactttgggtgtgagacgggattcaggctgtggctaatgtgctggaagcacgcacagttgtgaccatcaagtatgcaggaagcaatcattctcctggctctcctgggtgccatgtcagggggagaagcactacacctaatcctcttacctgctacaggcaatgtggcagagaattctccacctgggacttcagtgcacaagttttctgtgaagttatcagcatcattgtcacctgtgatcccaggatttccccagatagtcaactcaaatcccctcactgaagcttttagggtgaattggctgtcaggcacctactttgaggttgtcaccactgggatggaacaactagattttgaaacaggaccaaacatatttgatttgcagatttatgtgaaggatgaggttggtgtcacagacctgcaagtcctgactgtccaggtaacagatgtgaacgagccacctcagtttcaaggcaacttggcagaaggtctacacctctacatagtagaaagagcaaaccctggattcatttaccaggttgaggccttcgatccagaagacacaagccgaaacattcccctcagttatttcctgatttctcccccaaagagcttcagaatgtctgctaatggcaccctcttctccacaacagaattggactttgaagcaggacacagaagtttccatctcatcgtggaggtgagggacagtggaggcctcaaagcctccacagagctccaggtgaacatcgtgaacctcaacgacgaagtccctcgctttaccagcccgacacgagtgtacacagtcctggaggaactgagtccaggaaccatcgtggccaatatcacagcggaggatcctgatgatgaaggttttcccagccacctcctctacagcattaccactgttagcaaatatttcatgataaatcagttgactggtacaatccaagtggcccaaaggatagaccgagatgcaggtgaattgagacaaaatcccaccatttccctggaagttctagtgaaggacagaccatatgggggtcaggagaatcgcatccagataaccttcattgtggaagacgtcaacgacaatcctgccacatgccaaaagttcaccttcagcattatggtgccggaaagaacagccaaggggacgttgcttcttgacctaaacaagttctgctttgatgatgacagtgaggcaccaaacaacagattcaacttcaccatgccatctggagtggggagcggcagcagatttttacaggatccagctggctctgggaagattgtgctgattggtgatctagactacgaaaatccaagtaacctagcagccggcaataaatatacggtgataatccaggtgcaggatgtggcccccccttactataaaaataacgtctacgtttatatcctaacaagcccagaaaatgagtttcctctcatttttgataggccatcctatgtatttgatgtgtcagaaagaaggcccgccagaacccgagtgggacaggtgcgagccactgataaagacctcccccagagcagcctcctgtactccatctccactggaggggccagcctccagtatccaaatgtattttggattaatcccaagacaggagaactccagctggtaactaaagtggactgtgaaacaacccccatctatattctcagaatccaggccaccaacaacgaagacacaagctctgtcactgttactgtgaacatccttgaagaaaatgatgaaaagccaatttgtactccaaactcttatttcctggccctcccagtggatctgaaagttggcacaaatattcagaatttcaagctgacatgtaccgaccttgattccagccccagatctttccgttattccattggcccaggtaacgtcaacaatcatttcaccttctctcccaatgctggttccaatgtcacacgcctgctgcttacatctcgctttgactatgctggtgggtttgataagatctgggactacaagctacttgtctacgtaactgatgacaacttgatgtctgacaggaagaaagcggaggctcttgttgagacaggaacagtgacactgagtattaaagtcattccccacccaaccactatcatcaccacgacccccaggcccagggtcacctatcaggtcctgaggaaaaacgtttactctccatctgcatggtacgtgccgtttgtcatcactttgggctccatattgcttctgggtctcctcgtgtacctggtcgtcctattggccaaagccatccacagacactgcccctgcaagactgggaagaacaaggaacctctgacaaagaaaggagaaacgaagactgcagagagagacgtcgtggtggaaactatccagatgaacactatctttgatggagaagccatagatccagtgaccggggaaacatatgaattcaactcaaaaactggagccagaaagtggaaagatccactaacccaaatgccaaaatggaaagagtccagccaccagggagctgccccacgcagagtcactgctggggaagggatggggtcactgagaagtgccaactgggaagaagatgagctgagtggcaaagcgtgggctgaggatgctggtctgggttccagaaatgagggtggcaagctgggcaacccaaagaacagaaatccagccttcatgaacagggcttaccccaaaccacacccaggaaagtaaacggggtctaaggaggggcctgtcaatcactgagatgctgcctcaccctaaattctatggggatggtgtgggcatggtgtaggggggaaaatgtgggctgaggggattcagacatccagggtcaaacatgggatgtttgacaaatttttaaacaaatagaaaggggtttgatcacatagttgcgtgttctgaaatgatacaggaacattttctatcagatttcagaactacctgtgcttctgataagcaagactgttaactttggggtgtggaattgttgtgtttcttctttgcattgactgctaggaagctctattctgttcaccatagaaagtttgtaggaattcctgacataaatagtgaagactatccttacatctggtttccaccttattttcctgccctcgttttaacatcacccagatttcttcagttataaatatgccatacacctttgtaagtcacctcaaatcttcttcaaaagaagcagaacagtgaaaaaaacagatgagtaagttaagagttggtcatctggaaagaagaaaactcagtaggcaccttcttttgttttttcttgtggtgtccggatcagcatcctgcatgtgagattcatccacgttgtcctgtctagcagtagttcagttctcttcatggttatgtctggtttcattctatgattatatcacaatttatctattctacacttgggtggcagctgcttcagattttttacttttaaaaaatatacttaaaagtgaactacaggcagggcatgatggctcatgcctgtaatgccagcactttgccaaggtgggcagatcacctaaggtcaggagttcaagatcagcctggcctagatggcaaaaccctgtctctactaaaaaatacaaaaattagcttggtgtggtggtgggcacatgtaatcccagctacttgggaggctgaggtagggagaactgcttaaacctgagaggtggaggttacagtgagttgagattgtgccactgcactctagcctgggtgacaaagcaagactccatctcagaaaaaaaaaataaaagtgaattacaacact

SEQ ID NO: 244603 - DNA, 2658 bp, Artificial Sequence
  derived and/or modified sequence
atgcaggaggccatcatcctgctggccctgctgggcgccatgagcggcggcgaggccctgcacctgatcctgctgcccgccaccggcaacgtggccgagaacagcccccccggcaccagcgtgcacaagttcagcgtgaagctgagcgccagcctgagccccgtgatccccggcttcccccagatcgtgaacagcaaccccctgaccgaggccttcagagtgaactggctgagcggcacctacttcgaggtggtgaccaccggcatggagcagctggacttcgagaccggccccaacatcttcgacctgcagatctacgtgaaggacgaggtgggcgtgaccgacctgcaggtgctgaccgtgcaggtgaccgacgtgaacgagcccccccagttccagggcaacctggccgagggcctgcacctgtacatcgtggagagagccaaccccggcttcatctaccaggtggaggccttcgaccccgaggacaccagcagaaacatccccctgagctacttcctgatcagcccccccaagagcttcagaatgagcgccaacggcaccctgttcagcaccaccgagctggacttcgaggccggccacagaagcttccacctgatcgtggaggtgagagacagcggcggcctgaaggccagcaccgagctgcaggtgaacatcgtgaacctgaacgacgaggtgcccagattcaccagccccaccagagtgtacaccgtgctggaggagctgagccccggcaccatcgtggccaacatcaccgccgaggaccccgacgacgagggcttccccagccacctgctgtacagcatcaccaccgtgagcaagtacttcatgatcaaccagctgaccggcaccatccaggtggcccagagaatcgacagagacgccggcgagctgagacagaaccccaccatcagcctggaggtgctggtgaaggacagaccctacggcggccaggagaacagaatccagatcaccttcatcgtggaggacgtgaacgacaaccccgccacctgccagaagttcaccttcagcatcatggtgcccgagagaaccgccaagggcaccctgctgctggacctgaacaagttctgcttcgacgacgacagcgaggcccccaacaacagattcaacttcaccatgcccagcggcgtgggcagcggcagcagattcctgcaggaccccgccggcagcggcaagatcgtgctgatcggcgacctggactacgagaaccccagcaacctggccgccggcaacaagtacaccgtgatcatccaggtgcaggacgtggcccccccctactacaagaacaacgtgtacgtgtacatcctgaccagccccgagaacgagttccccctgatcttcgacagacccagctacgtgttcgacgtgagcgagagaagacccgccagaaccagagtgggccaggtgagagccaccgacaaggacctgccccagagcagcctgctgtacagcatcagcaccggcggcgccagcctgcagtaccccaacgtgttctggatcaaccccaagaccggcgagctgcagctggtgaccaaggtggactgcgagaccacccccatctacatcctgagaatccaggccaccaacaacgaggacaccagcagcgtgaccgtgaccgtgaacatcctggaggagaacgacgagaagcccatctgcacccccaacagctacttcctggccctgcccgtggacctgaaggtgggcaccaacatccagaacttcaagctgacctgcaccgacctggacagcagccccagaagcttcagatacagcatcggccccggcaacgtgaacaaccacttcaccttcagccccaacgccggcagcaacgtgaccagactgctgctgaccagcagattcgactacgccggcggcttcgacaagatctgggactacaagctgctggtgtacgtgaccgacgacaacctgatgagcgacagaaagaaggccgaggccctggtggagaccggcaccgtgaccctgagcatcaaggtgatcccccaccccaccaccatcatcaccaccacccccagacccagagtgacctaccaggtgctgagaaagaacgtgtacagccccagcgcctggtacgtgcccttcgtgatcaccctgggcagcatcctgctgctgggcctgctggtgtacctggtggtgctgctggccaaggccatccacagacactgcccctgcaagaccggcaagaacaaggagcccctgaagaagaagaccgagaccaagaccgccgagagagacgtggtggtggagaccatccagatgaacaccatcttcgacggcgaggccatcgaccccgtgaccggcgagacctacgagttcaacagcaagaccggcgccagaaagtggaaggaccccctgacccagatgcccaagtggaaggagagcagccaccagggcgccgcccccagaagagtgaccgccggcgagggcatgggcagcctgagaagcgccaactgggaggaggacgagctgagcggcaaggcctgggccgaggacgccggcctgggcagcagaaacgagggcggcaagctgggcaaccccaagaacagaaaccccgccttcatgaacagagcctaccccaagccccaccccggcaagtag

SEQ ID NO: 244604 - DNA, 2658 bp, Artificial Sequence
  derived and/or modified sequence
atgcaggaagcaatcatcctactggcattgctgggcgccatgtcaggtggcgaggcccttcatcttatcttacttccggccaccggcaacgtggctgaaaattcacctcctggaacctcagtgcataaattttctgtgaaactgagcgcctcattatctcccgtgatccctggcttccctcagatcgtcaatagtaatccgctgaccgaggcatttcgcgttaactggctgagcggcacctacttcgaggtcgtcaccaccggaatggaacagttggattttgaaaccggccccaatatttttgacctccaaatctatgtgaaagatgaagtgggcgtcacagacctacaggtcctgacggttcaagtcactgacgttaatgagcctccacagttccagggaaatctagcggagggcctgcacctgtatatcgtggagagagcaaaccccgggttcatctaccaggtagaggcatttgatcccgaggatacctctcgtaacatccctctgagctatttcctcatcagccctcctaagagcttcagaatgtcggctaatgggaccctcttttccacgactgagttggatttcgaggctggccacagaagtttccatctcatagttgaagtccgcgacagcggaggactcaaagcatctaccgagctccaggtgaatatcgtcaacctcaatgacgaagtccctcgtttcacgagtccgaccagggtgtacaccgtactcgaagagctatccccgggaaccatcgtggctaacataaccgccgaggacccagacgacgaagggtttccctcccacctgttgtatagcattaccaccgtgagcaaatactttatgatcaatcaactgactggcaccattcaagttgcccagagaatagatcgcgacgccggggaattgcgccaaaaccctacgatatcacttgaggtactggtgaaggatcgaccatatggcggacaggaaaatcgcatacagataacctttatcgtggaggatgtaaatgacaaccccgctacctgccaaaagttcactttttcaatcatggtacccgaacgcaccgctaaaggcaccctgctgctcgatctgaataagttttgcttcgatgacgacagcgaagcaccaaacaataggttcaatttcacaatgccttccggcgtgggtagcggctccaggtttctgcaggatcccgcagggtctggcaagatagtgctgataggtgacctcgattacgagaaccccagtaacctggctgctgggaataaatacaccgtcattattcaggtgcaggacgtcgcacctccatattataagaacaatgtctatgtctatattcttacttcccctgagaatgagtttccgttgatttttgacaggcccagctatgtattcgacgttagtgagcggcgtcccgcgcgcacaagggtcgggcaggtgcgtgccactgataaggatctgcctcaatctagtctcttgtactctatcagcactggcggcgcgtccctccaatatccaaatgttttctggattaatccgaagaccggtgagctacagttagttacgaaggtagattgtgagacaacccctatttatattctgcgaattcaggccactaacaatgaggacacttccagtgtgacagtcacggtgaacatcctggaggagaatgatgagaagcctatctgtacaccaaattcatactttctggcactacctgtagacctaaaagtaggcaccaacattcagaactttaagttgacctgtactgatcttgacagttcccccagatcattcagatactcaatcgggcctggcaacgtaaataaccatttcactttttcccctaacgcaggttctaatgtgaccagattactgctgactagtcgcttcgactacgcaggcggcttcgataagatttgggactataagctgctggtgtacgtgactgatgataatctcatgagtgaccgcaaaaaggccgaggctctggtggagactggaactgtgaccctgagcatcaaggtaattccccatcccacgacaataatcacaacaacacctcgtccacgggtgacctaccaggtgctgcgaaaaaacgtctacagcccaagcgcctggtacgtgccgttcgtgataaccttaggttcaatcctcctccttggactgctggtgtacctggtggtcttgttagctaaagccatccaccgccattgcccatgcaagactgggaaaaacaaggaaccactgaaaaagaagacagaaacaaaaaccgccgagcgcgacgtcgtggtcgaaacaatccagatgaatacaatctttgacggtgaagctattgaccctgtaacaggcgaaacctacgaattcaattcaaagaccggcgcccgaaagtggaaggatcctctgactcaaatgcctaaatggaaggagtctagccaccaaggggcggccccacgcagggtaactgcgggcgaaggaatggggagcctgcggagcgccaattgggaagaggacgaactgtcgggtaaagcctgggccgaagacgcaggcctggggtcccgtaatgagggaggaaagctgggaaatcctaagaatagaaatcctgctttcatgaatagggcatacccgaagccacatcccgggaagtag

SEQ ID NO: 244605 - DNA, 2658 bp, Artificial Sequence
  derived and/or modified sequence
atgcaggaggccatcatcctgctggccctgctgggcgccatgtctggaggagaggccctgcacctgatcctgctgcctgccactggaaatgtggccgagaacagccccccaggcacctctgtgcacaagttctctgtgaagctgagcgccagcctgagccctgtgattcctggcttcccccagatcgtgaacagcaaccccctgacagaggccttccgggtgaactggctgagcggcacctactttgaggtggtgaccaccggcatggagcagctggactttgagaccggccccaacatctttgacctgcagatctacgtgaaggatgaggtgggcgtgacagacctgcaggtgctgactgtgcaggtgacagatgtgaatgaaccaccccagttccagggcaacctggccgagggcctgcacctgtacatcgtggagcgggccaaccctggcttcatctaccaggtggaggcctttgatcctgaggacaccagcaggaacatccccctgagctacttcctgatcagcccccccaagagcttcaggatgtctgccaacggcaccctcttcagcaccacagagctggactttgaagctggccaccgctccttccacctgattgtggaggtgcgggacagcggcggcctgaaggccagcacagagctgcaggtgaacatcgtgaacctgaatgatgaggtgccccgcttcaccagccccaccagggtgtacacagtgctggaggagctgagccctggcaccatcgtggccaacatcacagcagaagatcctgatgatgagggcttccccagccacctgctgtacagcatcaccaccgtgtccaagtacttcatgatcaaccagctgaccggcaccatccaggtggcccagagaattgacagagatgctggggagctgcggcagaaccccaccatcagcctggaggtgctggtgaaggaccggccctacggcggccaggagaaccgcatccagatcaccttcatcgtggaggatgtgaatgacaacccagccacctgccagaagttcaccttcagcatcatggtgcctgagaggacagccaagggcaccctgctgctggacctgaacaagttctgctttgatgatgacagcgaggcccccaacaaccgcttcaacttcaccatgcccagcggcgtgggcagcggcagccgcttcctgcaggaccctgctggcagcggcaagatcgtgctgattggagacctggactatgagaaccccagcaacctggccgccggcaacaagtacaccgtcatcatccaggtgcaggatgtggccccaccctactacaagaacaacgtgtatgtgtacatcctgaccagcccagaaaatgagttccccctcatctttgaccggcccagctatgtgtttgatgtgtctgaaagaagacctgcccggaccagggtgggccaggtgcgggccacagacaaggacctgccccagagcagcctgctgtacagcatcagcactggaggagccagcctgcagtaccccaacgtgttctggatcaaccccaagacaggagagctgcagctggtgaccaaggtggactgtgagaccacccccatctacatcctgcgcatccaggccaccaacaatgaagacaccagctctgtgacagtgacagtgaacatcctggaggagaatgatgagaagcccatctgcacccccaacagctacttcctggccctgcctgtggacctgaaggtgggcaccaacatccagaacttcaagctgacctgcacagacctggacagcagccccaggagcttccgctacagcatcggccctggaaatgtgaacaaccacttcaccttcagccccaatgccggcagcaatgtgacccggctgctgctgaccagcagatttgattatgccggcggctttgacaagatctgggactacaagctgctggtgtatgtgacagatgacaacctgatgtctgacaggaagaaggccgaggccctggtggagaccggcaccgtgaccctgagcatcaaggtgatcccccaccccaccaccatcatcaccaccaccccccggccccgggtgacctaccaggtgctgaggaagaatgtgtacagccccagcgcctggtacgtgcccttcgtcatcaccctgggcagcatcctgctgctgggcctgctggtgtacctggtggtgctgctggccaaggccatccaccgccactgcccctgcaagacaggcaagaacaaggagcccctgaagaagaagacagagaccaagacagctgagagagatgtggtggtggagaccatccagatgaacaccatctttgatggagaggccatcgaccctgtgactggagagacctatgagttcaacagcaagacaggagccaggaagtggaaggaccccctgacccagatgcccaagtggaaggagagcagccaccagggcgccgccccccggcgggtgacagctggggagggcatgggcagcctgcggagcgccaactgggaggaggatgagctgagcggcaaggcctgggccgaggatgctggcctgggcagcagaaatgaaggaggcaagctgggcaaccccaagaacagaaatcctgccttcatgaacagagcctaccccaagccccaccctgggaagtag

SEQ ID NO: 244606 - DNA, 2658 bp, Artificial Sequence
  derived and/or modified sequence
atgcaggaggccatcatcctgctggccctgctgggcgccatgagcggtggcgaggcacttcacctcatcctcctgccagccacggggaacgtggcggaaaacagtcccccaggtacatcagttcacaaattctcggtgaaactctccgccagtctgagcccggtcattcctgggtttccacagatcgtgaactctaacccactgaccgaagcttttcgtgtgaactggctatcgggcacatattttgaggtagtaacgaccggaatggagcagctagatttcgagaccggtcctaatatctttgacctgcagatttacgtgaaagacgaagtcggcgtcactgacttgcaggttctgactgtccaagtcacagatgtgaatgaacctccacagttccagggtaatctggccgaggggctgcacctttatatcgtggagcgagccaaccccggtttcatctaccaagtcgaggccttcgaccccgaagacacgtctcgaaacatcccattgtcctatttcctcatatctcctcctaagtcatttaggatgagtgctaatggcacactgttctccactactgagctggattttgaggcggggcacagatctttccacctgattgtggaagtgagggattctgggggacttaaggcatccacagagctccaggtcaacattgtgaacttgaatgacgaggtccccagattcacttcacccacacgggtgtacaccgtgcttgaagagctgtcgccaggtactattgtggccaacataacagccgaggacccagatgatgaggggtttccctcccatctgttgtacagtattactactgtgtcaaaatactttatgatcaatcagctcaccggcaccatccaggtcgctcagcgtatagaccgtgatgcaggggagctccgacaaaaccccacaattagcctagaggtgctcgttaaagatcgcccttacgggggccaggagaacagaattcagatcacatttatcgttgaggatgtcaacgataatccagcaacgtgccaaaaattcacattttctattatggtacccgaacgcacggcgaaggggaccctgcttctcgacctgaataagttctgcttcgatgatgactccgaggcccctaacaataggttcaattttactatgccctcaggcgtcgggtctgggagcagattcttgcaagaccccgctggcagcgggaaaatcgtccttattggcgatcttgattatgagaacccaagcaatctggcggccggaaacaagtataccgtgatcatccaggtacaggatgtcgcacctccttactacaagaataacgtgtatgtctacattctgacaagccccgagaatgaattccctttgatctttgatagaccctcttatgtgtttgacgtcagcgagagacggcctgcccggacgagagtcgggcaggttcgagctacggacaaggatcttccacagagctctttgttatactctatctcaactggcggagcctctctccagtacccaaacgtgttttggattaacccaaaaactggggagttacagctggtaactaaggtcgattgtgagacaactccaatttacattctacggatccaggctaccaataatgaggatacttcatcggtgaccgtgacagttaatattctggaggagaatgatgagaagccgatctgcactccaaacagttacttcctggctcttcccgtagacttgaaagtgggaacgaatatccaaaatttcaagctaacctgcaccgacctggattcttcacctcgcagttttcgctatagcatcggaccagggaatgttaataatcattttactttttctcctaatgccgggtcgaatgtgacacgtttattgctcacatcccgcttcgactacgccggcggttttgacaagatctgggactacaagctgctggtgtatgttactgacgacaatttaatgtccgaccggaaaaaagcggaagccctggtggagacgggcaccgttacactctccattaaagtgatcccccatccgaccactattatcacaacaacacctaggccgcgtgttacttaccaggttctgcgaaaaaacgtctactctcccagcgcctggtatgtgccattcgtgattaccctgggtagtatattgctgctgggactgctggtgtatttggtcgtgttacttgcaaaagcaatccaccgccactgcccgtgtaagacaggcaagaacaaggaacccctgaagaagaagacggagaccaagactgccgaacgggatgttgttgtcgagaccatccaaatgaataccattttcgacggtgaagccatcgaccccgtgaccggtgagacatatgagttcaattctaagaccggagcacggaagtggaaggatccccttacccagatgccaaagtggaaagaaagtagtcatcagggagctgcgccgcgtagggtgacggccggtgagggcatgggcagcctgcgttcagcaaactgggaggaggatgagttatccggaaaggcctgggcagaagacgctggtctcgggagcaggaacgagggcgggaagttaggcaaccccaaaaatcggaacccagcatttatgaatagggcctaccccaagcctcatccaggtaaatag

SEQ ID NO: 244607 - DNA, 2658 bp, Artificial Sequence
  derived and/or modified sequence
atgcaggaagctatcatcctcctggctctgctgggcgctatgtcaggtggtgaggctctccacctcatactgctgcccgctacaggaaacgtcgccgagaattctcccccaggcacttcagtgcacaaattctctgttaagctgagcgccagtctgtcgcctgtgattcctgggtttccccaaattgtgaactccaatccgcttaccgaggccttccgcgtgaactggttaagcggcacatatttcgaagtagtgacaacaggcatggaacagctcgatttcgagaccggccctaacatattcgatctccaaatctacgttaaggacgaagtgggagtgactgatttacaggtactcactgtgcaggtcacagacgtgaacgagccaccacagtttcaaggaaacctggctgaaggtcttcacctgtacattgtggagagggccaaccccggatttatttaccaagtggaagcgtttgatcccgaagacacttctcggaatatcccgctgtcatacttcctgatctctccaccgaaatccttccggatgtctgctaatgggactctttttagcactacagagctcgattttgaagctggacataggtcctttcatttaattgtggaggttagggatagcggcggtcttaaagcctcgactgaactgcaggtcaacattgtgaatctcaatgacgaggtgcctagatttaccagtcctacccgggtgtacaccgttcttgaggaactgtcccctggcaccattgtcgccaacatcacagccgaggatccggacgacgagggctttcctagccatcttctgtactctatcactaccgtgtcaaaatactttatgattaatcaactcactgggactattcaggtggctcagagaatcgatcgcgatgcaggggagttgcggcagaatcccacaatctcactggaggtgttggtgaaggacaggccctacggcggacaggagaaccggatacagatcacattcattgtggaagatgtgaacgacaaccccgcaacatgccaaaagttcacgttttctatcatggtgcctgaacggactgccaagggaaccctcctcctcgatttgaataagttctgctttgacgatgacagcgaggcgcctaataacaggtttaattttacaatgcccagcggcgtaggcagtggatctaggttcttgcaagaccctgccggaagtgggaagatcgtgctgataggtgacttggactacgagaatccctcaaatctcgctgctggcaataagtacaccgtaatcatccaagtgcaggatgtcgcaccaccctactacaagaacaatgtttatgtatacatactaacgtctcccgagaacgaattccccttgatttttgatcggccttcatatgtgttcgacgtgtccgagcggaggcccgctcgaacgcgagtggggcaagtgcgggcaaccgataaagacctcccccagtcgagtctgctttacagcatttcaaccggaggtgcttccctgcagtatcccaatgtattttggattaatccaaaaacaggtgagctgcaactggtaaccaaggtcgactgtgagactaccccaatctatatacttcgcatacaagcaacaaacaatgaggatacctcatccgtcaccgtgacagttaatatcctggaagagaacgacgagaagcctatctgtactcctaattcttacttcctcgccctgccagttgaccttaaagtgggtaccaatatacagaatttcaaactgacttgcacagatctcgattcaagtcccagaagcttcagatactcaatcggtcctggtaacgtcaataaccactttacgttcagccctaacgcaggctccaatgtgacacgcctgctgctcacgagccgttttgattacgcgggaggcttcgacaagatttgggactacaagctcctggtttacgttaccgacgataatctgatgtctgatagaaagaaagctgaggctctggtcgagaccggtaccgtcacactctccatcaaggtgatcccacaccctaccaccataattaccacaacccctagacccagagtgacctaccaggttttgcgaaagaatgtctattctcccagcgcctggtacgtcccctttgttataacgctgggtagtattttgctgttggggctgctggtttatctcgtcgtcttattagcgaaagcaattcatcgccattgcccctgcaagaccggtaaaaacaaagagccgctcaagaaaaagacagaaaccaagactgccgaacgtgatgtggtcgtggagaccatccagatgaatacaatctttgacggagaggccatagacccagtgaccggggaaacatacgagtttaattcaaagacaggcgcacgcaaatggaaggaccccttgactcagatgcccaagtggaaggagagttcacaccagggtgcagccccacgcagggtgacagctggagaggggatgggctctctgcgaagcgctaattgggaagaggatgaactgagtggaaaggcatgggcagaggacgctggcctcgggtctagaaacgaggggggaaagctgggcaaccccaagaatcggaatcccgcttttatgaaccgcgcttacccaaagccccatcctgggaaatag

SEQ ID NO: 244608 - DNA, 6500 bp, Artificial Sequence
  derived and/or modified sequence
aaaaccaggaggggaagctgagtggcttctggaataaactttgggtgtgagacgggattcaggctgtggctaatgtgctggaagcacgcacagttgtgaccatcaagtatgcaggaagcaatcattctcctggctctcctgggtgccatgtcagggggagaagcactacacctaatcctcttacctgctacaggcaatgtggcagagaattctccacctgggacttcagtgcacaagttttctgtgaagttatcagcatcattgtcacctgtgatcccaggatttccccagatagtcaactcaaatcccctcactgaagcttttagggtgaattggctgtcaggcacctactttgaggttgtcaccactgggatggaacaactagattttgaaacaggaccaaacatatttgatttgcagatttatgtgaaggatgaggttggtgtcacagacctgcaagtcctgactgtccaggtaacagatgtgaacgagccacctcagtttcaaggcaacttggcagaaggtctacacctctacatagtagaaagagcaaaccctggattcatttaccaggttgaggccttcgatccagaagacacaagccgaaacattcccctcagttatttcctgatttctcccccaaagagcttcagaatgtctgctaatggcaccctcttctccacaacagaattggactttgaagcaggacacagaagtttccatctcatcgtggaggtgagggacagtggaggcctcaaagcctccacagagctccaggtgaacatcgtgaacctcaacgacgaagtccctcgctttaccagcccgacacgagtgtacacagtcctggaggaactgagtccaggaaccatcgtggccaatatcacagcggaggatcctgatgatgaaggttttcccagccacctcctctacagcattaccactgttagcaaatatttcatgataaatcagttgactggtacaatccaagtggcccaaaggatagaccgagatgcaggtgaattgagacaaaatcccaccatttccctggaagttctagtgaaggacagaccatatgggggtcaggagaatcgcatccagataaccttcattgtggaagacgtcaacgacaatcctgccacatgccaaaagttcaccttcagcattatggtgccggaaagaacagccaaggggacgttgcttcttgacctaaacaagttctgctttgatgatgacagtgaggcaccaaacaacagattcaacttcaccatgccatctggagtggggagcggcagcagatttttacaggatccagctggctctgggaagattgtgctgattggtgatctagactacgaaaatccaagtaacctagcagccggcaataaatatacggtgataatccaggtgcaggatgtggcccccccttactataaaaataacgtctacgtttatatcctaacaagcccagaaaatgagtttcctctcatttttgataggccatcctatgtatttgatgtgtcagaaagaaggcccgccagaacccgagtgggacaggtgcgagccactgataaagacctcccccagagcagcctcctgtactccatctccactggaggggccagcctccagtatccaaatgtattttggattaatcccaagacaggagaactccagctggtaactaaagtggactgtgaaacaacccccatctatattctcagaatccaggccaccaacaacgaagacacaagctctgtcactgttactgtgaacatccttgaagaaaatgatgaaaagccaatttgtactccaaactcttatttcctggccctcccagtggatctgaaagttggcacaaatattcagaatttcaagctgacatgtaccgaccttgattccagccccagatctttccgttattccattggcccaggtaacgtcaacaatcatttcaccttctctcccaatgctggttccaatgtcacacgcctgctgcttacatctcgctttgactatgctggtgggtttgataagatctgggactacaagctacttgtctacgtaactgatgacaacttgatgtctgacaggaagaaagcggaggctcttgttgagacaggaacagtgacactgagtattaaagtcattccccacccaaccactatcatcaccacgacccccaggcccagggtcacctatcaggtcctgaggaaaaacgtttactctccatctgcatggtacgtgccgtttgtcatcactttgggctccatattgcttctgggtctcctcgtgtacctggtcgtcctattggccaaagccatccacagacactgcccctgcaagactgggaagaacaaggaacctctaaaaaaaaaaacagaaacgaagactgcagagagagacgtcgtggtggaaactatccagatgaacactatctttgatggagaagccatagatccagtgaccggggaaacatatgaattcaactcaaaaactggagccagaaagtggaaagatccactaacccaaatgccaaaatggaaagagtccagccaccagggagctgccccacgcagagtcactgctggggaagggatggggtcactgagaagtgccaactgggaagaagatgagctgagtggcaaagcgtgggctgaggatgctggtctgggttccagaaatgagggtggcaagctgggcaacccaaagaacagaaatccagccttcatgaacagggcttaccccaaaccacacccaggaaagtaaacggggtctaaggaggggcctgtcaatcactgagatgctgcctcaccctaaattctatggggatggtgtgggcatggtgtaggggggaaaatgtgggctgaggggattcagacatccagggtcaaacatgggatgtttgacaaatttttaaacaaatagaaaggggtttgatcacatagttgcgtgttctgaaatgatacaggaacattttctatcagatttcagaactacctgtgcttctgataagcaagactgttaactttggggtgtggaattgttgtgtttcttctttgcattgactgctaggaagctctattctgttcaccatagaaagtttgtaggaattcctgacataaatagtgaagactatccttacatctggtttccaccttattttcctgccctcgttttaacatcacccagatttcttcagttataaatatgccatacacctttgtaagtcacctcaaatcttcttcaaaagaagcagaacagtgaaaaaaacagatgagtaagttaagagttggtcatctggaaagaagaaaactcagtaggcaccttcttttgttttttcttgtggtgtccggatcagcatcctgcatgtgagattcatccacgttgtcctgtctagcagtagttcagttctcttcatggttatgtctggtttcattctatgattatatcacaatttatctattctacacttgggtggcagctgcttcagattttttacttttaaaaaatatacttaaaagtgaactacaggcagggcatgatggctcatgcctgtaatgccagcactttgccaaggtgggcagatcacctaaggtcaggagttcaagatcagcctggcctagatggcaaaaccctgtctctactaaaaaatacaaaaattagcttggtgtggtggtgggcacatgtaatcccagctacttgggaggctgaggtagggagaactgcttaaacctgagaggtggaggttacagtgagttgagattgtgccactgcactctagcctgggtgacaaagcaagactccatctcagaaaaaaaaaataaaagtgaattacaacactatgaactttcttgtacatgtcttttggtgaacataaacactcacttttttgctcatatatctaagagtgggattgctggagcaattgctggatctgccaaagagttccaaagtggtggctctgattcacattccagcagcaaacactgagagttgcaattgctctctatccttgccaacacttgggattgtcaatccttttaactttagccattctggttaaaattactattgaagtgaaatcactttttcctcaaagctgaaacaccatcagccttacaacctacctgccttgctccttcccacttcctatgattggaaggaactgcaggactctgagtggggacatactggaagccccatctagacataaaactcagacttccacctgtaggcatgagcaatgaactgggaataaatggtattatgatggaataggaaatgtaactttccaatgtgtgcctagcagagcctgagcaagcttcactcgagctctatgccctgctgcccagctgctgcgaccctagtccagtaaccctaagaaaggtccaggtgagtgttcattagggaagcactcccttcccaactggggagtcaggtgagagcctaccaggtccacaaggtcctgtgggagacagactggatccagcaaatgtagagcttcagagagagcagcagcttgtttactgtgtgcctagtgccagtgtcacttctcaagcaaaagaagcatttgcaaaatgcctgtcctggcctagattgagcgtgatttattaataagggttggttgccagggaactcccttgaatggatttaaactttgcaaaagaaggcagaactgttcatttatgcaggttaaagtgagtgaagtggctgattgcccatttaaggcattgcaaatctgtggggcccggagtcaaatgctttccttggaagctctcagcttcaatgcaagtaaaatgaggttctgagaaggctgaagggggacttaataactgcttataagcccattaagaatgattaaaagggccgggtgaggtggctcatgcctgtaatcccagcactctgggaggctgaggcaggtggatcacctgaggtcaggagtttgagaccagcctggccaacatggtgaaaccctgtctctactaaaaaatagaaaaattagctggacgtgttagcaggcacctgtaatcccagctactcaggaggctgaggcaagagaatcgcttgaacccaggaggcagaagttgcagtgggctgagattgcgccactgcactccagcctgggtgacaagggcaaaactctgtgtcaagaaaaaaaaaaaaaaaagaataattaaaaggagagagtggtgagcagctggtctttcttctccagtgatgacagggcaagagggaattgtgcttaatggccagagaagagatttaagtcaggcaccaagagggacttcctgaagcctggggcctctctgaagagctcagtgtcttctctggtgataggcaggaagagctgagtgtcttcctagtcgcaaggcaagcctcgagaaactcaagaaataggggcaagagtgcgccaggaggagagaacacctgctgccccgtttcttttgtatatccggctatttggttcggggaaatccagaagtcaaagtgtcaccggtggagggtcttgactgcaagttgtccaagttcttggagttttgaacaaagaatggaacaaaatgcccagcaaagcagagaaagaatgaggcaacgaaagaatgaaagcagggatttattgaaaaccaaagtacactccacagtgtgggaacgggcctgagcaagtgactcaagggcccagatacagtcttctcagtccaaataccccttggaggtttccccttggccacttcatgctcacctcatggaaatgaagtagtggaccacaattggtctgattggttgcaggaagcaaccaatcagagactgaagtggagttacaaaggtcacgctcctgtgcaaacatctgattggttgcaaaaagcaaccaatcagaggctaaggtgaagttacaacgttgcaacgaagactcggctggcaatcagtctgattggttacagacagccaatttcccagcgttgaccaggttttggggggaacaaaattatctgaataaaatgaagacagcaaccgtcgtggatttggtgaaagttttctcccatctccctctcaaggccttaaacaggtatgagttgattatagccaatgtttacttttctcattctgattcattataaaactggggtaaatacgttcaggaattagaccacgtaacaattataattgtcgaagactttgaaactgcatagtagattgtgacattggagctttttgttgtgctcattagaaagcagggtctgaaactcagcctgtgtagcaagcacgggtggctcacaagcagaactgggaaatgacacttctgctccccagagccccctttcacatctggggttctcattgtttgcctttttacttaatgtattttgtaatggctgtgaaaattaagctacaaaatgagtgaacattgaagacaatgattgctattgaaacttaggatttctcatttcaaacttagcgtgtgtttatccttcgtattcattcaataaatatctgtggagcaacta

SEQ ID NO: 244609 - protein, 993 aa, Artificial Sequence
  derived and/or modified sequence
MGSGRVPGLCLLVLLVHARAAQYSKAAQDVDECVEGTDNCHIDAICQNTPRSYKCICKSGYTGDGKHCKDVDECEREDNAGCVHDCVNIPGNYRCTCYDGFHLAHDGHNCLDVDECAEGNGGCQQSCVNMMGSYECHCREGFFLSDNQHTCIQRPEEGMNCMNKNHGCAHICRETPKGGIACECRPGFELTKNQRDCKLTCNYGNGGCQHTCDDTEQGPRCGCHIKFVLHTDGKTCIETCAVNNGGCDSKCHDAATGVHCTCPVGFMLQPDRKTCKDIDECRLNNGGCDHICRNTVGSFECSCKKGYKLLINERNCQDIDECSFDRTCDHICVNTPGSFQCLCHRGYLLYGITHCGDVDECSINRGGCRFGCINTPGSYQCTCPAGQGRLHWNGKDCTEPLKCQGSPGASKAMLSCNRSGKKDTCALTCPSRARFLPESENGFTVSCGTPSPRAAPARAGHNGNSTNSNHCHEAAVLSIKQRASFKIKDAKCRLHLRNKGKTEEAGRITGPGGAPCSECQVTFIHLKCDSSRKGKGRRARTPPGKEVTRLTLELEAEVRAEETTASCGLPCLRQRMERRLKGSLKMLRKSINQDRFLLRLAGLDYELAHKPGLVAGERAEPMESCRPGQHRAGTKCVSCPQGTYYHGQTEQCVPCPAGTFQEREGQLSCDLCPGSDAHGPLGATNVTTCAGQCPPGQHSVDGFKPCQPCPRGTYQPEAGRTLCFPCGGGLTTKHEGAISFQDCDTKVQCSPGHYYNTSIHRCIRCAMGSYQPDFRQNFCSRCPGNTSTDFDGSTSVAQCKNRQCGGELGEFTGYIESPNYPGNYPAGVECIWNINPPPKRKILIVVPEIFLPSEDECGDVLVMRKNSSPSSITTYETCQTYERPIAFTARSRKLWINFKTSEANSARGFQIPYVTYDEDYEQLVEDIVRDGRLYASENHQEILKDKKLIKAFFEVLAHPQNYFKYTEKHKEMLPKSFIKLLRSKVSSFLRPYK

SEQ ID NO: 244610 - DNA, 2982 bp, Artificial Sequence
  derived and/or modified sequence
atgggatcaggcagagtccctgggctgtgtctgttagtgctactggtccacgccagggcagctcagtattctaaagctgctcaggacgttgacgaatgtgtggaaggaactgataactgccacatcgacgccatctgccagaacaccccgagatcttacaaatgtatttgcaagagtggttacaccggcgatggaaagcactgcaaggatgtggatgaatgtgagagggaggacaatgctggctgcgtgcacgattgcgtcaacatccccggaaactacaggtgcacctgttacgatggttttcatcttgctcacgacggacacaactgtttggacgtggacgagtgcgccgaaggtaatggcggttgccagcagtcttgcgtgaatatgatgggaagttatgaatgccattgccgtgaaggattttttctgtccgacaatcagcacacttgtatccaaaggcctgaggagggcatgaactgtatgaacaaaaaccatggttgtgcacatatttgtcgggagactcctaagggtggcatagcttgcgagtgccgccctggatttgaactgaccaagaatcagagagactgcaagcttacttgtaactacggcaatgggggatgccagcacacctgtgatgatactgaacaaggccctcgttgtggatgtcatattaaattcgtgcttcacactgatgggaagacttgcatcgaaacctgcgccgttaacaatggaggatgcgattcgaaatgccatgacgccgctaccggcgttcactgcacatgtcccgtcgggttcatgctccaacctgatcgtaagacctgcaaagacattgatgagtgccgcctcaacaacggaggttgcgatcacatatgccggaatactgtgggatcattcgagtgttcctgtaagaaggggtacaagctgttgataaatgaacggaattgccaggatatcgacgagtgctcctttgacaggacatgtgaccatatttgcgtgaatacacccggatcatttcagtgtctctgtcacaggggttatttgctgtatgggatcacgcactgtggagacgtcgatgaatgtagcataaataggggcggatgtcgatttgggtgcatcaacacccctggcagctaccaatgtacctgtcccgctggccaggggagactgcattggaatggtaaggactgtaccgagccgctgaaatgtcaaggcagtccaggtgccagtaaagccatgctgagctgcaatcggtccgggaaaaaggacacatgtgccttgacctgtccgtcgcgcgctcgattcctgcccgaatccgaaaatggttttaccgtgtcttgcggtactccgagcccaagggctgcacccgcacgagccggtcacaatggcaatagtaccaatagcaaccattgccacgaggctgcagtgctgagtataaaacagcgagcaagcttcaagattaaagatgctaaatgtcggctgcaccttagaaataaaggcaagaccgaggaggccggacgcataacaggtcccggaggcgctccttgctctgaatgccaagtgactttcatccacctcaagtgcgattcatctagaaaaggaaaaggtcggagggctcgaacccctccaggaaaggaagtcacgcgtctgaccttggagcttgaggcagaggtgagagccgaggaaacgacagcaagctgcggccttccatgtctgagacagagaatggaacggagactcaagggtagcctcaagatgttgcgaaagtctattaaccaagaccgcttcctgctacggctggctggtctggattatgaactcgcgcacaaacctggcctggttgcaggggagagggccgaacccatggagagctgccgcccaggccagcaccgggctggcacgaagtgcgtgtcttgcccacagggcacctattaccacggccagacagaacagtgtgtgccttgcccggctggcaccttccaggagagggagggccagctgtcatgtgatctgtgcccaggcagcgacgcacacgggcctctaggcgctactaatgttaccacatgtgctggtcagtgtccaccagggcaacattctgtggatggcttcaaaccctgtcagccatgccctaggggtacttaccaacccgaagccggtcgcacgctatgcttcccttgcggcggagggttgactactaaacatgagggagccatttcttttcaggactgcgacactaaggtacaatgctcacccggacattattataatacttcaatccaccgctgtattaggtgcgctatgggaagctatcaaccagatttcagacagaacttttgttcacggtgtcctggcaacaccagtaccgacttcgacggaagcacgagcgtcgcacagtgcaaaaacagacaatgcggcggagagctcggagagttcaccggttatattgaaagccccaactatccaggcaactaccctgctggagtagaatgtatttggaacatcaatccgcctcccaaaagaaagatcctgatcgtcgttccagagatcttcctgcccagcgaagacgagtgcggagatgtgctcgtaatgcggaagaacagctccccttccagcatcacaacatacgagacctgtcagacctatgagcgccctatcgcctttactgctagatcacgcaagctgtggatcaattttaaaaccagcgaagctaattccgccagggggtttcagataccatacgttacgtatgatgaggactacgagcaattggtcgaagacattgtccgagatggtcggctctacgccagcgaaaatcaccaggagattttgaaggacaaaaagctgattaaggccttctttgaagtgctggcccatccacagaactactttaaatacactgagaaacacaaggagatgctcccgaagtcattcattaaacttttaaggtccaaagtatccagtttcctgcgaccgtacaaatag

SEQ ID NO: 244611 - DNA, 2982 bp, Artificial Sequence
  derived and/or modified sequence
atgggctccgggagggttcctggcctttgcctgttggtactcctagttcatgcccgcgcagcacagtactcaaaagccgctcaagatgtggacgaatgcgtcgaaggaactgacaactgtcatattgacgccatatgtcagaatactcccaggagttataaatgcatttgtaagtctggttacaccggggacggtaagcactgcaaagacgtcgatgagtgtgaaagggaggacaacgccggatgcgtgcatgattgtgtgaacattcccgggaattaccggtgtacatgttacgatggatttcacttagcacatgatggacataattgcttggacgtggacgaatgcgccgaggggaatggcggttgccagcaatcttgtgttaatatgatgggctcttacgagtgccactgccgggagggcttttttctgagcgataatcagcacacatgcattcagaggccagaggaaggcatgaattgcatgaataagaatcatggttgtgcccatatctgtcgggaaacacctaagggcggtattgcctgtgagtgtcgcccaggatttgagttgacaaagaatcagagagattgtaagctgacttgtaattatgggaacggcggctgtcaacatacatgcgacgatacagagcaagggccaaggtgtggttgtcatatcaagtttgttctccacacagacggcaaaacatgtatcgagacttgcgcagtcaacaatgggggatgcgacagcaagtgtcacgacgctgctactggagttcactgcacctgcccagtggggtttatgctgcagccggaccgcaagacgtgcaaggacattgacgagtgtcgcctgaataatggcgggtgcgatcatatctgcagaaatacagttggatccttcgagtgcagttgtaaaaaagggtacaagctgttaatcaatgaaaggaactgccaagatatcgacgagtgtagtttcgacaggacctgcgaccatatctgtgtgaatacaccggggtcattccaatgcttatgtcaccgcggctacttgttatatgggattactcattgtggcgatgttgacgagtgcagtattaaccgaggcggctgcagatttggatgtataaacactcctggctcataccagtgcacttgcccagcaggccaaggccgtctgcattggaacggaaaagattgtacagaaccactgaagtgtcaaggatcccccggggccagtaaggctatgttgtcgtgtaatagatctgggaagaaggatacttgtgccctaacctgcccaagtcgcgctcgctttttgcctgaatctgagaatggcttcaccgtgtcctgcggtactcctagtccaagagcggcccctgcccgtgccgggcataacgggaattctacaaattcaaatcattgccatgaagccgcagttctgtccataaaacagcgagcttcattcaaaatcaaggatgcaaaatgcagattgcacttgaggaataagggtaagaccgaggaggccgggcgcatcactggtcccgggggcgcaccctgcagtgaatgccaggtgacttttattcacctaaagtgcgacagttctaggaaaggcaaagggagacgggcccggactccacccggcaaagaggtgacccgtctgaccctggaactggaagccgaggtgcgagccgaagagacaactgcatcatgcggcctgccttgcttacggcagcgcatggagaggagactcaaaggctcactcaagatgctaagaaaatccattaatcaggatcggtttttgttacggctcgcgggcctcgactacgaactcgcacataagcccggactggtggccggagagagagccgagcccatggaatcatgtcggcctggacagcatagagcagggacaaaatgtgtatcttgcccacagggaacctactaccacggacagacagagcaatgtgttccctgccccgccgggactttccaggagcgcgaggggcagctgagctgcgacttatgtcccggctcagacgctcatggacccctcggggctaccaacgttaccacgtgtgccggacagtgcccgcctgggcagcactcagtggatgggttcaaaccatgtcagccttgccctagaggtacataccagccagaagcgggcaggacattgtgtttcccctgcggcggtgggttaactactaaacacgagggagctatctctttccaagactgcgatacaaaagtgcagtgtagcccaggccactactacaacacctcgattcacaggtgcatcagatgcgcgatggggtcctaccagcctgatttccggcagaatttctgcagccgctgtcccgggaatacgagtaccgattttgacggttccacctccgtcgctcagtgcaaaaacaggcagtgcggcggcgagctaggtgaattcaccggctatatagagagccctaactacccaggaaattatcccgctggcgtggagtgcatttggaatatcaatcccccccccaagcgcaagattctgatcgtcgtcccagagatattcctgcccagcgaagacgaatgtggagacgtcctggtcatgagaaagaactcctcccccagcagtatcacaacatacgaaacatgccagacctatgaacgccccattgcatttacagcccgttctcgcaagttatggatcaattttaagacctcagaagcaaattcagctcggggctttcaaattccctacgtaacgtatgatgaggattatgagcaactggttgaggatatcgtcagggacggccgactgtacgcatcagaaaaccatcaggaaattcttaaggataaaaagctgataaaggccttttttgaggtgcttgcccaccctcaaaactattttaagtataccgagaagcacaaggagatgctgcccaaaagcttcattaaacttctgagatctaaggtctcctctttcctgcgaccttacaaatag

SEQ ID NO: 244612 - DNA, 2982 bp, Artificial Sequence
  derived and/or modified sequence
atgggatcaggaagagtgccaggtctttgtcttctggtgctgctagtgcacgctagggctgcccaatactctaaagctgctcaggatgtggatgaatgcgtagaagggacagacaattgtcatatagacgccatctgtcagaatacaccacgtagttacaagtgcatctgcaagtccgggtatactggagatggtaagcattgcaaagatgtagacgagtgtgagagagaggacaacgccggctgtgtacacgattgcgttaatatccccggaaactacaggtgtacctgttacgacggatttcacctagctcacgatgggcacaactgcctagatgtggacgaatgtgccgaaggaaatggaggctgtcaacaatcatgcgtcaatatgatgggatcgtatgaatgtcactgcagagaaggcttttttttatccgacaatcagcatacatgcatccaaaggcccgaagagggtatgaactgtatgaataaaaaccatggttgcgcccacatttgtagagagactccaaagggaggcatagcttgcgagtgccggcccggcttcgaattgaccaaaaaccagagagactgcaaactgacttgtaattatggtaatggaggatgtcagcatacatgcgacgatactgaacaagggccaagatgcggatgccatatcaagtttgttctgcacacagatgggaaaacctgcatagagacttgcgctgttaataatggtggatgtgattccaagtgtcacgacgcagccaccggcgttcactgtacatgccccgtgggcttcatgcttcagccagaccgtaagacgtgcaaggacattgatgagtgtcggctgaacaatggaggatgtgatcacatttgtcgcaacacagtcggatcctttgaatgcagttgtaaaaaagggtacaagctgttaatcaatgaaaggaactgccaagatatcgacgagtgtagtttcgacaggacctgcgaccatatctgtgtgaatacaccggggtcattccaatgcttatgtcaccgcggctacttgttatatgggattactcattgtggcgatgttgacgagtgcagtattaaccgaggcggctgcagatttggatgtataaacactcctggctcataccagtgcacttgcccagcaggccaaggccgtctgcattggaacggaaaagattgtacagaaccactgaagtgtcagggcagccccggagcgagcaaggctatgctgagctgtaatcggtcaggcaaaaaggacacatgtgcactgacctgcccttcccgagcccggttccttcctgagagcgagaacggattcacagtctcatgcggcacgccaagccctagggccgcacccgctcgtgcaggtcacaatggcaattccacgaactctaaccactgtcacgaagccgcggtactttcaattaagcagagagcttccttcaagatcaaagatgcaaagtgtaggttgcaccttcgaaataaaggtaagaccgaggaagctggcagaatcacaggaccaggaggagcgccttgcagtgaatgtcaagtgactttcatccatttgaagtgcgacagcagtagaaaaggaaagggccgaagagcacggacacccccgggtaaagaggtcaccagactcacgctggagctggaggctgaggtcagggctgaggagaccaccgcctcttgtggtctgccctgtctaagacagcggatggaacgacgtttgaagggctcattgaaaatgctaaggaaatcaatcaatcaagaccggtttctgctacgacttgccggcctggactacgagcttgcccataaaccaggtctcgtggcaggggaaagggcagagcccatggaatcctgccgccctggacagcacagagcaggtacaaagtgcgtctcttgcccgcaaggtacatactaccatggacagactgagcagtgcgtcccttgtcctgctggaactttccaagaaagagaaggccagctgtcttgtgatctttgccccggctccgatgcccatggtccactgggagccactaacgtcaccacctgcgccggtcagtgtccccccggtcagcattctgttgatggcttcaaaccctgccaaccgtgcccccgaggcacctatcagcccgaagccggccgaacactttgctttccttgcggtggaggtctgacaacaaaacacgaaggcgctatctcttttcaagattgtgatactaaggtgcagtgcagccccggacactactacaacaccagcattcacagatgtattcgctgtgcaatgggaagttatcaacccgatttcaggcagaatttttgttcccgctgtcctgggaacacctcaacagacttcgatggatctactagcgttgcccagtgtaaaaataggcagtgtggtggtgagctgggcgaattcaccggttatatagaatcacctaactatcctggaaactatcctgctggcgtggaatgcatctggaacataaacccacccccgaaaagaaagattctcatagtggtgcctgagatctttttaccttccgaggatgaatgtggcgatgttcttgtcatgagaaagaactctagtccttccagtattacaacttatgaaacttgccagacctatgagagaccgatcgcttttacggctaggtcccggaagttatggatcaactttaaaacttctgaagcaaattctgctcgaggatttcagataccgtatgtgacctacgatgaggactacgaacagctcgtggaggacatagttagggacggcaggctgtacgcaagcgagaaccatcaggaaattctcaaagacaagaaattaatcaaagcattttttgaagtcttggcacatcctcagaattactttaaatataccgaaaaacataaagaaatgctgcccaaatcattcattaagttgctaagaagcaaggtatccagtttccttagaccctataagtag

SEQ ID NO: 244613 - DNA, 7356 bp, Artificial Sequence
  derived and/or modified sequence
atgggctcggggcgcgtacccgggctctgcctgcttgtcctgctggtccacgcccgcgccgcccagtacagcaaagccgcgcaagatgtggatgagtgtgtggaggggactgacaactgccacatcgatgctatctgccagaacaccccgaggtcatacaagtgcatctgcaagtctggctacacaggggacggcaaacactgcaaagacgtggatgagtgcgagcgagaggataatgcaggttgtgtgcatgactgtgtcaacatccctggcaattaccggtgtacctgctatgatggattccacctggcacatgacggacacaactgtctggatgtggacgagtgtgccgagggcaacggcggctgtcagcagagctgtgtcaacatgatgggcagctatgagtgccactgccgggaaggcttcttcctcagcgacaaccagcatacctgtatccagcggccagaagaaggaatgaattgcatgaacaagaaccacggctgtgcccacatttgccgggagacacccaaggggggtattgcctgtgaatgccgtcctggctttgagcttaccaagaaccaacgggactgtaaattgacatgcaactatggtaacggcggctgccagcacacgtgtgatgacacagagcagggtccccggtgcggctgccatatcaagtttgtgctccataccgacgggaagacatgcatcgagacctgtgctgtcaacaacgggggctgtgacagtaagtgccatgatgcagcgactggtgtccactgcacctgccctgtgggcttcatgctgcagccagacaggaagacgtgcaaagatatagatgagtgccgcttaaacaacgggggctgtgaccatatttgccgcaacacagtgggcagcttcgaatgcagttgcaagaaaggctataagcttctcatcaatgagaggaactgccaggatatagacgagtgttcctttgatcgaacctgtgaccacatatgtgtcaacacaccaggaagcttccagtgtctctgccatcgtggctacctgttgtatggtatcacccactgtggggatgtggatgaatgcagcatcaaccggggaggttgccgctttggctgcatcaacactcctggcagctaccagtgtacctgcccagcaggccagggtcggctgcactggaatggcaaagattgcacagagccactgaagtgtcagggcagtcctggggcctcgaaagccatgctcagctgcaaccggtctggcaagaaggacacctgtgccctgacctgtccctccagggcccgatttttgccagagtctgagaatggcttcacggtgagctgtgggacccccagccccagggctgctccagcccgagctggccacaatgggaacagcaccaactccaaccactgccatgaggctgcagtgctgtccattaaacaacgggcctccttcaagatcaaggatgccaaatgccgtttgcacctgcgaaacaaaggcaaaacagaggaggctggcagaatcacagggccaggtggtgccccctgctctgaatgccaggtcaccttcatccaccttaagtgtgactcctctcggaagggcaagggccgacgggcccggacccctccaggcaaagaggtcacaaggctcaccctggaactggaggcagaggtcagagccgaagaaaccacagccagctgtgggctgccctgcctccgacagcgaatggaacggcggctgaaaggatccctgaagatgctcagaaagtccatcaaccaggaccgcttcctgctgcgcctggcaggccttgattatgagctggcccacaagccgggcctggtagccggggagcgagcagagccgatggagtcctgtaggcccgggcagcaccgtgctgggaccaagtgtgtcagctgcccgcagggaacgtattaccacggccagacggagcagtgtgtgccatgcccagcgggcaccttccaggagagagaagggcagctctcctgcgacctttgccctgggagtgatgcccacgggcctcttggagccaccaacgtcaccacgtgtgcaggtcagtgcccacctggccaacactctgtagatgggttcaagccctgtcagccatgcccacgtggcacctaccaacctgaagcaggacggaccctatgcttcccttgtggtgggggcctcaccaccaagcatgaaggggccatttccttccaagactgtgacaccaaagtccagtgctccccagggcactactacaacaccagcatccaccgctgtattcgctgtgccatgggctcctatcagcccgacttccgtcagaacttctgcagccgctgtccaggaaacacaagcacagactttgatggctctaccagtgtggcccaatgcaagaatcgtcagtgtggtggggagctgggtgagttcactggctatattgagtcccccaactacccgggcaactacccagctggtgtggagtgcatctggaacatcaaccccccacccaagcgcaagatccttatcgtggtaccagagatcttcctgccatctgaggatgagtgtggggacgtcctcgtcatgagaaagaactcatccccatcctccattaccacttatgagacctgccagacctacgagcgtcccattgccttcactgcccgttccaggaagctctggatcaacttcaagacaagcgaggccaacagcgcccgtggcttccagattccctatgttacctatgatgaggactatgagcagctggtagaagacattgtgcgagatggccggctctatgcctctgaaaaccaccaggagattttaaaggacaagaagctcatcaaggccttctttgaggtgctagcccacccccagaactacttcaagtacacagagaaacacaaggagatgctgccaaaatccttcatcaagctgctccgctccaaagtttccagcttcctgaggccctacaaatagtaaccctaggctcagagacccaattttttaagcccccagactccttagccctcagagccggcagccccctaccctcagacaaggaactctctcctctctttttggagggaaaaaaaaaatatcactacacaaaccaggcactctccctttctgtctttctagtttcctttccttgtctctctctgcctgcctctctactgttcccccttttctaacacactacctagaaaagccattcagtactggctctagtccccgtgagatgtaaagaaacagtacagccccttccactgcccattttaccagctcacattcccgaccccatcagcttggaagggtgctagaggcccatcaaggaagtgggtctggtgggaaacggggaggggaaagaagggcttctgccattatagggttgtgccttgctagtcaggggccaaaatgtcccctggctctgctccctagggtgattctaacagcccagggtcctgccaaagaagcctttgatttacaggcttaatgccagcaccagtcctctggggcacatggtttgagctctggacttcccacatggccagctttcttgtctatacagatcctctctttctttccctacgtctgcctggggtctactccataagggtttacaaatggcccacaacactgagttagtggacaccggctaaatgaggaagagcagcaggcattgtcatggtgaatgccccgctgtagctccctgagagaaagactgtaactctgcaggacagaaacaaggttttaaagcattgccaaaaaaaagaaaacagaaagaaaaaatgtatcatctaaaggactagacacagaacaattggaagtcaacttcaaacactaatcccttttcttgtcttccctggcccagccacctcctcagccccatgtgatgctccctgggggagccctactccccttgctacatgttgtccttaaacatggttattgacctgaagccagcctaggccttgccctacagttgtttttcccttgtagccccagctggcttgtgggcttcaccaaagaggaccccactctgaagccagcctggagccacctacctctggcctcaggctgtgggcagcaaaaggaatgtgtgtgcacttggcgagcctcctgcccaccctgtccacacctaataagtgcaatcattttgagtctttctatgttgtctagacggaggggtttttgttttctgggtttgttttttgtttttgtttcttcttcctctattagcaaaaccctatttatagctgcccaagagaaaagagtgtatgtttggagtggaagaaaatcggttttgaatctcatgaaccttgagtgctggagcatctgatctgtctctatgccaccactggccacctagagcccttggctgtggtaatccagggtaattgcgcagaggcatctgatgtgtaggaaagtaattctggggatttgatggagcagaaaggagagagacctatgtttgctaaaccaatcttgctatccctatgcctctccatggagtcagtgtggacctcatgattatagaggccaatggaactggtcagtgattctctaccccaagtagggaaaacctccatcttttccctgtcttcatcctgttatcccctggtgtacacatggaagaggaccaggacataccacctggggatgggctgactcagggtcccgaggccagagacaaagctgtgggagccaagaataagacagaaggcatcagatatttgcctggctctggtcacttccctttgaagttgacttcaagcttagcttcctcaactactgtttttcagaaggaagaaagaatcaaatggaagaagaatcaagtccatgcccaagcccaaagcctgcacacattctgcccttaatccaagtgttgcctataaaattattttctgttttctcactctagttcccccaaagctgtagtcccaatcaatcaaaggctaccaactgagtcctcaggttcatttcttttttttttttttttctttttaactctcctggtaactcacagaacagctcaggttcatttctaggtgactgtcctaggctactgctcccccaggagactcaacactaaataaaggagtctgactccctgccctcccatcagtagcattcatcagccaaaacggccatagcagtaggtagccaatgacacagctagattccctgacaaccattagccaacatcatggtccttgtgggtagagtgtctggctacctttgtctttctgggtcaaggagggccactgtaaagatgcaaaatggctgcttccaaacaagggaaatggtcatttagtatgagtgtctctgtacttcccaggaagcaccatgaaaactgctttaatcaactctgactatcctaattctccaccagaagctaggataactttctttctttctttctttttttttttttttttttttgagatggagtctcgctctgtcacccaggctggagtgtaatggtgctatctcggcctactgcaacctccgcctcccaggctcaagcaattctgcctcggcctcccaagtagctgggattacaggcatgcgccaccgcgcccagctaatttttgtatttttagtagagatggggtttcaccatgttgcccgggctggtcttgaactcttgacctcaggtgatccacccgcctcagtctcccaaagtgctgggattacaggcatgagccaccgcgcccagcctaggataactttctgattcctctctgccagccgttttgcgtctcttggaaagccaaacggtgaccatgcttcttaatttatgccttcagggtctggcttctcctttctcccttcctttcctgtcacaccatgcatacatacatacaaatacacatccttcaaccatttattccatggcttatgagacctgcaaatgagttccacagtacggaaggcatagaccactaggcttcttaattgatgtcaaggcagatcttggtgagcaggtaaaaacctgctattgtccaccaagtttaatttaggtcctccaagttggagggttaagaacccaggcaaagctgctgctgaatctatggaggaggctggccctgggacatcaaactaggggttaactggattgaatgaggagtcaacgctcagggacattctaggtctttacaggtcagacagaagagaggtttttaccattggagggaaatggaaagatggtataaataggatcccttcatgaagcaacccagaggcctctctgcagcgtgtagggtgtggggcgacagtattgtggggcttccattcatcttagtacaaaacctcacctgctctgagcctggaaatgggagggcttcacgcaccaagtaatgcacaccagaaaggcacttatatcctcagcaacatggcagttcctctttacttctctgcctccctctttctatattatcaggccatgcctattcctacaacctgagacaactcttggagtcagaagaaaactgaccagatcctggatctgagctgcctgctccaggcctagaaatccccaaaggctggcactgagctgtgactgctttaacagcccccaagatttggtcagtttgaggtggtggagactcagatttgttgctgaaagttcagtaacacagtcctggtctttggccctagagaaactttttatatgagaagtgttctctatatacatgtttgaggtgactctggaatggattatgaggtcatatctcaaaatgtcagaaaacgttatagagcactcgaacttttgtatttgctgcttaacctcaatattacagccacaaacaaggggtaccaagacaaagtataactgagcataagcagaaaatgttaaccctccaggtttctttcttaagcacaataaaagtgggagcgaacaacacaaggatatttttacatttgacccgtctcaaaagtagcacaccctatccttgtgccattatttgtacaaggaaatatatgattagaaggaatagaacccccagttgtcatcagcttttttagacaccacaggttgtagcagtttgaacaaactgaaaactttatacttctgtgtgagctgaactcaagtttcagaataatcatcgccatgtgggaggctttttgttaaatgcagaagaaatttcaaaatattgtatttatatctgccttccactgctgccaatttagtaagcatctcctatacaatcgacaataaacagcaaatgatgcagttcatagagtattttgcacttggggaaaaatatgtatctgaattgtaaaaagaaatgtttggattttgtatgtcttttttattattattaaaatactaaatgaaactcctca

SEQ ID NO: 244614 - DNA, 2982 bp, Artificial Sequence
  derived and/or modified sequence
atgggcagcggcagagtgcccggcctgtgcctgctggtgctgctggtgcacgccagagccgcccagtacagcaaggccgcccaggacgtggacgagtgcgtggagggcaccgacaactgccacatcgacgccatctgccagaacacccccagaagctacaagtgcatctgcaagagcggctacaccggcgacggcaagcactgcaaggacgtggacgagtgcgagagagaggacaacgccggctgcgtgcacgactgcgtgaacatccccggcaactacagatgcacctgctacgacggcttccacctggcccacgacggccacaactgcctggacgtggacgagtgcgccgagggcaacggcggctgccagcagagctgcgtgaacatgatgggcagctacgagtgccactgcagagagggcttcttcctgagcgacaaccagcacacctgcatccagagacccgaggagggcatgaactgcatgaacaagaaccacggctgcgcccacatctgcagagagacccccaagggcggcatcgcctgcgagtgcagacccggcttcgagctgaccaagaaccagagagactgcaagctgacctgcaactacggcaacggcggctgccagcacacctgcgacgacaccgagcagggccccagatgcggctgccacatcaagttcgtgctgcacaccgacggcaagacctgcatcgagacctgcgccgtgaacaacggcggctgcgacagcaagtgccacgacgccgccaccggcgtgcactgcacctgccccgtgggcttcatgctgcagcccgacagaaagacctgcaaggacatcgacgagtgcagactgaacaacggcggctgcgaccacatctgcagaaacaccgtgggcagcttcgagtgcagctgcaagaagggctacaagctgctgatcaacgagagaaactgccaggacatcgacgagtgcagcttcgacagaacctgcgaccacatctgcgtgaacacccccggcagcttccagtgcctgtgccacagaggctacctgctgtacggcatcacccactgcggcgacgtggacgagtgcagcatcaacagaggcggctgcagattcggctgcatcaacacccccggcagctaccagtgcacctgccccgccggccagggcagactgcactggaacggcaaggactgcaccgagcccctgaagtgccagggcagccccggcgccagcaaggccatgctgagctgcaacagaagcggcaagaaggacacctgcgccctgacctgccccagcagagccagattcctgcccgagagcgagaacggcttcaccgtgagctgcggcacccccagccccagagccgcccccgccagagccggccacaacggcaacagcaccaacagcaaccactgccacgaggccgccgtgctgagcatcaagcagagagccagcttcaagatcaaggacgccaagtgcagactgcacctgagaaacaagggcaagaccgaggaggccggcagaatcaccggccccggcggcgccccctgcagcgagtgccaggtgaccttcatccacctgaagtgcgacagcagcagaaagggcaagggcagaagagccagaaccccccccggcaaggaggtgaccagactgaccctggagctggaggccgaggtgagagccgaggagaccaccgccagctgcggcctgccctgcctgagacagagaatggagagaagactgaagggcagcctgaagatgctgagaaagagcatcaaccaggacagattcctgctgagactggccggcctggactacgagctggcccacaagcccggcctggtggccggcgagagagccgagcccatggagagctgcagacccggccagcacagagccggcaccaagtgcgtgagctgcccccagggcacctactaccacggccagaccgagcagtgcgtgccctgccccgccggcaccttccaggagagagagggccagctgagctgcgacctgtgccccggcagcgacgcccacggccccctgggcgccaccaacgtgaccacctgcgccggccagtgcccccccggccagcacagcgtggacggcttcaagccctgccagccctgccccagaggcacctaccagcccgaggccggcagaaccctgtgcttcccctgcggcggcggcctgaccaccaagcacgagggcgccatcagcttccaggactgcgacaccaaggtgcagtgcagccccggccactactacaacaccagcatccacagatgcatcagatgcgccatgggcagctaccagcccgacttcagacagaacttctgcagcagatgccccggcaacaccagcaccgacttcgacggcagcaccagcgtggcccagtgcaagaacagacagtgcggcggcgagctgggcgagttcaccggctacatcgagagccccaactaccccggcaactaccccgccggcgtggagtgcatctggaacatcaaccccccccccaagagaaagatcctgatcgtggtgcccgagatcttcctgcccagcgaggacgagtgcggcgacgtgctggtgatgagaaagaacagcagccccagcagcatcaccacctacgagacctgccagacctacgagagacccatcgccttcaccgccagaagcagaaagctgtggatcaacttcaagaccagcgaggccaacagcgccagaggcttccagatcccctacgtgacctacgacgaggactacgagcagctggtggaggacatcgtgagagacggcagactgtacgccagcgagaaccaccaggagatcctgaaggacaagaagctgatcaaggccttcttcgaggtgctggcccacccccagaactacttcaagtacaccgagaagcacaaggagatgctgcccaagagcttcatcaagctgctgagaagcaaggtgagcagcttcctgagaccctacaagtag

SEQ ID NO: 244615 - DNA, 2982 bp, Artificial Sequence
  derived and/or modified sequence
atgggaagtggccgggtgccaggcttgtgcctgctggtgttgctagtccacgcccgagccgctcagtattccaaggccgcccaagatgtcgatgaatgtgtggagggcaccgataactgtcatattgacgctatctgccagaatacacccaggtcatataaatgtatttgcaaatcaggctacaccggggatggcaagcactgtaaggatgtggacgagtgcgagcgcgaggacaacgctggatgtgtgcatgactgcgtcaatattccgggtaactataggtgcacatgctacgatgggttccatttggcccacgatggtcataactgcttagacgtggacgaatgcgctgaaggaaacggcggatgtcaacagtcttgcgtgaacatgatgggctcttatgagtgtcattgtcgcgaggggtttttcttaagcgacaatcagcatacctgtatccaaaggcctgaagagggtatgaattgtatgaacaaaaatcatggatgtgctcatatctgccgcgagacgcctaaaggcggcatagcatgcgaatgccgacccggttttgagctcactaagaaccagagggactgtaagttgacttgtaactacggtaatgggggatgccagcacacctgcgacgacacagaacagggccctcgatgtgggtgtcacattaaatttgtcctgcacacagatggcaagacatgcatcgaaacttgtgccgttaacaatggtggttgtgactccaagtgtcatgacgcagctaccggagtgcattgcacctgtccggtgggattcatgctgcaacccgatcggaagacgtgtaaggacattgatgaatgtaggctcaacaatggcggctgcgatcacatttgccgcaacacggtggggtctttcgaatgttcctgcaagaaaggatacaaactcttgattaatgagcggaattgccaagacatcgacgagtgctcctttgaccgaacttgcgatcacatctgcgtgaacacacccggctcgtttcaatgtctgtgccatcggggatacctgctttatggaattactcattgcggcgatgtggacgaatgctcaattaatcgtggcggttgccgctttggctgcatcaatacaccaggcagctaccagtgcacatgtccggccggacaaggtagactacattggaatggaaaagattgcaccgagccactcaaatgccagggcagcccaggggccagcaaggcaatgctgtcatgcaaccgctccggcaagaaagacacctgtgccctgacatgcccatcccgcgcaagatttctcccagaatcagagaacgggtttactgtgagttgcggcactccctcccctcgcgccgcgccagcaagggccggtcacaatggcaacagcactaattctaaccattgccacgaggcagccgtgttgagcattaaacagcgggcctccttcaagattaaagatgccaagtgtcgattacacttgcgcaacaagggcaagactgaagaagcgggtagaattaccggccctgggggagctccgtgctcagagtgccaggttactttcatccatcttaagtgcgactcctccagaaagggaaaggggcgccgcgcccgcacccccccagggaaagaagtgacccgtctgactttggaattggaagctgaagtccgagccgaagagactacagcatcctgcgggctcccatgtctccggcagaggatggagcgacgcctgaagggctctctgaaaatgctgcggaagtcaatcaatcaagatcgttttctccttcgcctggctggactcgactacgagttggcccataaaccaggattagttgccggggagcgagccgagccaatggagagttgcaggccgggacagcacagagccggcacaaaatgtgtctcttgtccgcagggcacttattatcacggtcagaccgagcagtgcgtgccatgcccggccggaacattccaggagcgtgaggggcaactcagctgtgatctatgccctgggagcgatgcacacggtccccttggagctacgaacgttaccacatgcgccggtcagtgcccaccaggacagcacagcgtggacggctttaagccgtgccagccgtgtcctcgaggaacctaccagcctgaggccggacgcaccttgtgctttccctgcggcggaggactgaccacgaagcacgagggggccatttcttttcaggactgcgacacaaaggtgcagtgcagcccagggcactattacaatacctcaattcacaggtgtatccggtgcgccatgggcagctatcaaccagattttagacagaacttctgttctcgatgtcctggtaacacatccaccgatttcgacggtagtacctcggttgcccaatgcaaaaaccgacagtgtggtggcgaactgggtgaatttacaggatacatcgaatcacccaattatccggggaattatcctgcaggcgtggagtgcatttggaacatcaatcccccacccaaacggaagatccttatcgtggtccctgaaatcttcctgccctctgaggatgagtgtggcgatgtgcttgtcatgcgaaagaatagttcccctagttccatcaccacctatgagacctgtcagacatacgagaggccaattgctttcaccgcgcgcagtaggaagctgtggatcaactttaagacatctgaagcaaactccgccagaggattccagatcccttacgtgacatacgacgaagattatgaacagctggtcgaggacatcgtgagggatgggagactgtacgcttctgaaaatcatcaggaaatacttaaagacaagaagctcatcaaggcctttttcgaagttctggctcatcctcaaaactactttaaatatacagaaaagcacaaggagatgctgccaaagagcttcatcaagctgcttaggtcaaaagtgtctagcttcttaagaccctacaagtag

SEQ ID NO: 244616 - DNA, 2982 bp, Artificial Sequence
  derived and/or modified sequence
atgggcagcggccgggtgcccggcctgtgcctgctggtgctgctggtgcacgcccgggccgcccagtacagcaaggccgcccaggatgtggatgaatgtgtggagggcacagacaactgccacattgatgccatctgccagaacacccccaggagctacaagtgcatctgcaagagcggctacacaggagatggcaagcactgcaaggatgtggatgaatgtgaaagagaagataatgccggctgtgtgcatgactgtgtgaacatccctggcaactaccgctgcacctgctatgatggcttccacctggcccatgatggccacaactgcctggatgtggatgaatgtgccgagggcaatggaggctgccagcagagctgtgtgaacatgatgggcagctatgagtgccactgccgggagggcttcttcctgagtgacaaccagcacacctgcatccagaggcctgaggagggcatgaactgcatgaacaagaaccacggctgtgcccacatctgccgggagacccccaagggcggcatcgcctgtgaatgtcggcccggctttgagctgaccaagaaccagagggactgcaagctgacctgcaactatggaaatggaggctgccagcacacctgtgatgacacagagcagggcccccgctgtggctgccacatcaagtttgtgctgcacacagatggcaagacctgcatcgagacctgtgctgtgaacaacggcggctgtgacagcaagtgccatgatgctgccaccggggtgcactgcacctgccctgtgggcttcatgctgcagcctgacaggaagacctgcaaggacattgatgagtgccgcctgaacaatggaggctgtgaccacatctgcaggaacacagtgggcagctttgagtgcagctgcaagaagggctacaagctgctgatcaatgaaagaaactgccaggacattgatgaatgttcctttgacaggacctgtgaccacatctgtgtgaacaccccaggcagcttccagtgcctgtgccaccggggctacctgctgtatggcatcacccactgtggagatgtggatgagtgcagcatcaacagaggaggctgccgcttcggctgcatcaacaccccaggcagctaccagtgcacctgcccagctggccagggccgcctgcactggaatggcaaggactgcacagagcccctgaagtgccagggcagccctggggccagcaaggccatgctgagctgcaacagaagtggcaagaaggacacctgtgccctgacctgccccagccgggcccgcttcctgcctgagagtgaaaatggcttcaccgtgtcctgtggcacccccagcccccgggccgccccagcccgggccggccacaacggcaacagcaccaacagcaaccactgccacgaggccgctgtgctgagcatcaagcagagggccagcttcaagatcaaggatgccaagtgccgcctgcacctgagaaataaaggcaagacagaggaggccggccgcatcactggacctggaggagccccctgcagcgagtgccaggtgaccttcatccacctgaagtgtgacagcagcaggaaaggaaaaggaagaagagcccggaccccacctgggaaggaggtgacccggctgaccctggagctggaggccgaggtgcgggcagaggagaccacagccagctgtggcctgccctgcctgcggcagaggatggagcggcggctgaagggcagcctgaagatgctgaggaagagcatcaaccaggaccgcttcctgctgcggctggccggcctggactatgagctggcccacaagccaggcctggtggccggggagagagctgagcccatggagagctgcaggcctggccagcaccgggccggcaccaagtgtgtgtcctgcccccagggcacctactaccacggccagacagagcagtgtgtgccctgcccagctggcaccttccaggagcgggagggccagctgagctgtgacctgtgccccggcagtgatgcccacggccccctgggcgccaccaacgtgaccacctgtgccggccagtgccccccaggccagcacagcgtggatggcttcaagccctgccagccctgcccccggggcacctaccagcctgaggccggccgcaccctgtgcttcccctgtggcggcggcctgaccaccaagcatgagggcgccatctccttccaggactgtgacaccaaggtgcagtgcagccctggccactactacaacaccagcatccaccgctgcatccgctgtgccatgggcagctaccagcctgacttccggcagaacttctgcagccgctgccccggcaacaccagcacagactttgatggcagcacctctgtggcccagtgcaagaaccggcagtgtggcggggagctgggggagttcaccggctacatcgagagccccaactacccaggcaactacccagctggggtggagtgcatctggaacatcaaccccccacccaagaggaagatcctgattgtggtgcctgagatcttcctgcccagtgaagatgaatgtggagatgtgctggtgatgaggaagaacagcagccccagcagcatcaccacctatgagacctgccagacctatgagcggcccatcgccttcaccgcccggagcaggaagctgtggatcaacttcaagaccagcgaggccaacagcgcccggggcttccagatcccctacgtgacctatgatgaggactatgagcagctggtggaggacatcgtgagagatggccgcctgtatgccagcgagaaccaccaggagatcctgaaggacaagaagctgatcaaggccttctttgaggtgctggcccacccccagaactacttcaagtacacagagaagcacaaggagatgctgcccaagagcttcatcaagctgctgcggagcaaggtgtcctccttcctgcggccctacaagtag

SEQ ID NO: 244617 - DNA, 2982 bp, Artificial Sequence
  derived and/or modified sequence
atgggcagcggccgggtgcccggcctgtgcctgctggtgctgctggtgcatgcccgggcagctcagtattcaaaggccgcacaggatgtagacgagtgtgtcgaaggaacagacaactgccacattgatgctatctgccagaacactccacgcagctacaaatgcatttgtaagagtggttacacgggagacggtaagcactgtaaggatgtggatgaatgtgaaagagaggacaacgcgggatgcgtccacgattgtgtcaatatacccggtaattacagatgcacttgctacgatggatttcacctagctcacgacggacataattgtctggatgtggacgaatgtgcagagggcaatggcggttgccaacagtcgtgtgtaaatatgatgggcagctacgagtgtcattgtcgcgaaggtttttttttgtcggacaaccagcacacctgcatccagcgccctgaagaaggtatgaactgtatgaataagaatcacggttgtgcacacatctgccgggaaactccaaagggcggcatcgcttgcgaatgccgacccggtttcgagttgactaaaaatcaaagggattgtaaattgacttgcaactacggtaacggcggatgtcagcatacctgtgatgacaccgagcagggcccaaggtgcggctgccacataaagtttgtcttgcataccgacgggaagacatgtattgaaacctgcgccgtgaacaacggcggctgtgacagcaaatgccatgatgccgccactggggttcattgcacctgtcccgtggggttcatgcttcaaccagacaggaaaacctgtaaggacattgacgaatgccgcctaaataatggggggtgcgaccacatctgtagaaacacagttgggtccttcgagtgcagttgcaaaaagggctataaactgctgatcaacgaaagaaattgtcaggacatcgatgagtgctcattcgatagaacttgtgaccatatctgtgtcaatacacccggctccttccagtgcctctgtcacagaggctacctgctttatggaattacgcactgtggagatgttgatgaatgcagcatcaatcgtggcggatgtcggtttggctgtattaatacccccggcagctaccagtgcacgtgccctgccgggcagggaagattacactggaatggtaaggattgcacggagcccctgaagtgtcagggcagcccaggcgcttccaaagccatgcttagctgtaaccggagcggtaagaaggacacctgcgcgttaacgtgtcctagccgggctagattcctgccggagagcgagaacgggttcacagtgagttgcggtactccttctccccgcgccgcaccagcgagggctgggcacaacggaaactcgacaaacagcaatcactgccacgaggcagccgtcttgtcaattaaacagagagcttctttcaaaattaaggatgctaagtgtcgcctgcacctgagaaacaaggggaagaccgaggaggcggggcgaattactggccctggaggcgccccttgcagcgagtgccaggtgacatttatccacttgaaatgtgattccagccggaagggaaaagggcggcgcgctaggaccccacccgggaaagaggtaactcgtctgacgcttgaactggaagccgaagtgagagctgaagagacgaccgctagttgtggcctgccatgtctgcggcagagaatggagcggagactcaagggctccctaaagatgctgagaaaaagtatcaatcaggatcgctttcttttgagactcgccggattagattatgagctggcgcacaaacccggcctggtcgcgggagagcgggcggagcccatggagagctgccggcctgggcagcatagggccggtacaaagtgcgtgagttgtccccagggcacatactaccacgggcaaaccgagcagtgcgtgccttgtcccgctggtactttccaggagagggagggtcagctatcgtgcgatctgtgccctggctctgacgcccacggccccctcggggcgaccaacgtgacaacctgtgcggggcagtgcccgccaggacaacattcagtggacgggttcaagccctgtcaaccatgcccccgggggacataccagcccgaggctgggcgcaccctttgctttccctgcggcggaggattaactaccaaacacgagggagcgatttcatttcaagactgcgatacaaaagtgcagtgttcacccggccactattataacacaagcattcacaggtgtattcgctgcgcaatgggatcttaccaacccgactttagacagaatttttgttctcgatgtccaggcaacacgagcactgactttgacggcagcacaagcgtggctcaatgcaagaataggcagtgcggcggcgagctgggggagtttacaggctacatagagagtcctaattatccaggaaactacccagccggcgttgaatgcatatggaacatcaaccctccgccaaagcgaaagatccttattgttgtaccagagatattcctgccttccgaagacgagtgtggggacgtgctcgttatgcgaaaaaactcaagcccgtcgagcataaccacctacgaaacttgccagacatatgagcgaccaatagctttcactgctcgctctcggaagttgtggatcaactttaaaacctccgaagccaatagtgcgcgcggattccagatcccatatgttacatatgacgaggactacgagcagctagtggaggacatcgttagagatggtagactttatgctagcgagaatcaccaggagatactgaaggacaaaaagttgattaaagctttttttgaggtcttggcccacccccagaactactttaagtatactgaaaaacataaggagatgctgcctaaaagttttattaagttgctcagatctaaggtctcatcgtttctgaggccttataagtag

SEQ ID NO: 244618 - RNA, 2982 nt, Artificial Sequence
  derived and/or modified sequence
augggcuccgggaggguuccuggccuuugccuguugguacuccuaguucaugcccgcgcagcacaguacucaaaagccgcucaagauguggacgaaugcgucgaaggaacugacaacugucauauugacgccauaugucagaauacucccaggaguuauaaaugcauuuguaagucugguuacaccggggacgguaagcacugcaaagacgucgaugagugugaaagggaggacaacgccggaugcgugcaugauugugugaacauucccgggaauuaccgguguacauguuacgauggauuucacuuagcacaugauggacauaauugcuuggacguggacgaaugcgccgaggggaauggcgguugccagcaaucuuguguuaauaugaugggcucuuacgagugccacugccgggagggcuuuuuucugagcgauaaucagcacacaugcauucagaggccagaggaaggcaugaauugcaugaauaagaaucaugguugugcccauaucugucgggaaacaccuaagggcgguauugccugugagugucgcccaggauuugaguugacaaagaaucagagagauuguaagcugacuuguaauuaugggaacggcggcugucaacauacaugcgacgauacagagcaagggccaaggugugguugucauaucaaguuuguucuccacacagacggcaaaacauguaucgagacuugcgcagucaacaaugggggaugcgacagcaagugucacgacgcugcuacuggaguucacugcaccugcccagugggguuuaugcugcagccggaccgcaagacgugcaaggacauugacgagugucgccugaauaauggcgggugcgaucauaucugcagaaauacaguuggauccuucgagugcaguuguaaaaaaggguacaagcuguuaaucaaugaaaggaacugccaagauaucgacgaguguaguuucgacaggaccugcgaccauaucugugugaauacaccggggucauuccaaugcuuaugucaccgcggcuacuuguuauaugggauuacucauuguggcgauguugacgagugcaguauuaaccgaggcggcugcagauuuggauguauaaacacuccuggcucauaccagugcacuugcccagcaggccaaggccgucugcauuggaacggaaaagauuguacagaaccacugaagugucaaggaucccccggggccaguaaggcuauguugucguguaauagaucugggaagaaggauacuugugcccuaaccugcccaagucgcgcucgcuuuuugccugaaucugagaauggcuucaccguguccugcgguacuccuaguccaagagcggccccugcccgugccgggcauaacgggaauucuacaaauucaaaucauugccaugaagccgcaguucuguccauaaaacagcgagcuucauucaaaaucaaggaugcaaaaugcagauugcacuugaggaauaaggguaagaccgaggaggccgggcgcaucacuggucccgggggcgcacccugcagugaaugccaggugacuuuuauucaccuaaagugcgacaguucuaggaaaggcaaagggagacgggcccggacuccacccggcaaagaggugacccgucugacccuggaacuggaagccgaggugcgagccgaagagacaacugcaucaugcggccugccuugcuuacggcagcgcauggagaggagacucaaaggcucacucaagaugcuaagaaaauccauuaaucaggaucgguuuuuguuacggcucgcgggccucgacuacgaacucgcacauaagcccggacugguggccggagagagagccgagcccauggaaucaugucggccuggacagcauagagcagggacaaaauguguaucuugcccacagggaaccuacuaccacggacagacagagcaauguguucccugccccgccgggacuuuccaggagcgcgaggggcagcugagcugcgacuuaugucccggcucagacgcucauggaccccucggggcuaccaacguuaccacgugugccggacagugcccgccugggcagcacucaguggauggguucaaaccaugucagccuugcccuagagguacauaccagccagaagcgggcaggacauuguguuuccccugcggcgguggguuaacuacuaaacacgagggagcuaucucuuuccaagacugcgauacaaaagugcaguguagcccaggccacuacuacaacaccucgauucacaggugcaucagaugcgcgaugggguccuaccagccugauuuccggcagaauuucugcagccgcugucccgggaauacgaguaccgauuuugacgguuccaccuccgucgcucagugcaaaaacaggcagugcggcggcgagcuaggugaauucaccggcuauauagagagcccuaacuacccaggaaauuaucccgcuggcguggagugcauuuggaauaucaaucccccccccaagcgcaagauucugaucgucgucccagagauauuccugcccagcgaagacgaauguggagacguccuggucaugagaaagaacuccucccccagcaguaucacaacauacgaaacaugccagaccuaugaacgccccauugcauuuacagcccguucucgcaaguuauggaucaauuuuaagaccucagaagcaaauucagcucggggcuuucaaauucccuacguaacguaugaugaggauuaugagcaacugguugaggauaucgucagggacggccgacuguacgcaucagaaaaccaucaggaaauucuuaaggauaaaaagcugauaaaggccuuuuuugaggugcuugcccacccucaaaacuauuuuaaguauaccgagaagcacaaggagaugcugcccaaaagcuucauuaaacuucugagaucuaaggucuccucuuuccugcgaccuuacaaauag

SEQ ID NO: 244619 - RNA, 2982 nt, Artificial Sequence
  derived and/or modified sequence
augggaucaggaagagugccaggucuuugucuucuggugcugcuagugcacgcuagggcugcccaauacucuaaagcugcucaggauguggaugaaugcguagaagggacagacaauugucauauagacgccaucugucagaauacaccacguaguuacaagugcaucugcaaguccggguauacuggagaugguaagcauugcaaagauguagacgagugugagagagaggacaacgccggcuguguacacgauugcguuaauauccccggaaacuacagguguaccuguuacgacggauuucaccuagcucacgaugggcacaacugccuagauguggacgaaugugccgaaggaaauggaggcugucaacaaucaugcgucaauaugaugggaucguaugaaugucacugcagagaaggcuuuuuuuuauccgacaaucagcauacaugcauccaaaggcccgaagaggguaugaacuguaugaauaaaaaccaugguugcgcccacauuuguagagagacuccaaagggaggcauagcuugcgagugccggcccggcuucgaauugaccaaaaaccagagagacugcaaacugacuuguaauuaugguaauggaggaugucagcauacaugcgacgauacugaacaagggccaagaugcggaugccauaucaaguuuguucugcacacagaugggaaaaccugcauagagacuugcgcuguuaauaaugguggaugugauuccaagugucacgacgcagccaccggcguucacuguacaugccccgugggcuucaugcuucagccagaccguaagacgugcaaggacauugaugagugucggcugaacaauggaggaugugaucacauuugucgcaacacagucggauccuuugaaugcaguuguaaaaaaggguacaagcuguuaaucaaugaaaggaacugccaagauaucgacgaguguaguuucgacaggaccugcgaccauaucugugugaauacaccggggucauuccaaugcuuaugucaccgcggcuacuuguuauaugggauuacucauuguggcgauguugacgagugcaguauuaaccgaggcggcugcagauuuggauguauaaacacuccuggcucauaccagugcacuugcccagcaggccaaggccgucugcauuggaacggaaaagauuguacagaaccacugaagugucagggcagccccggagcgagcaaggcuaugcugagcuguaaucggucaggcaaaaaggacacaugugcacugaccugcccuucccgagcccgguuccuuccugagagcgagaacggauucacagucucaugcggcacgccaagcccuagggccgcacccgcucgugcaggucacaauggcaauuccacgaacucuaaccacugucacgaagccgcgguacuuucaauuaagcagagagcuuccuucaagaucaaagaugcaaaguguagguugcaccuucgaaauaaagguaagaccgaggaagcuggcagaaucacaggaccaggaggagcgccuugcagugaaugucaagugacuuucauccauuugaagugcgacagcaguagaaaaggaaagggccgaagagcacggacacccccggguaaagaggucaccagacucacgcuggagcuggaggcugaggucagggcugaggagaccaccgccucuuguggucugcccugucuaagacagcggauggaacgacguuugaagggcucauugaaaaugcuaaggaaaucaaucaaucaagaccgguuucugcuacgacuugccggccuggacuacgagcuugcccauaaaccaggucucguggcaggggaaagggcagagcccauggaauccugccgcccuggacagcacagagcagguacaaagugcgucucuugcccgcaagguacauacuaccauggacagacugagcagugcgucccuuguccugcuggaacuuuccaagaaagagaaggccagcugucuugugaucuuugccccggcuccgaugcccaugguccacugggagccacuaacgucaccaccugcgccggucaguguccccccggucagcauucuguugauggcuucaaacccugccaaccgugcccccgaggcaccuaucagcccgaagccggccgaacacuuugcuuuccuugcgguggaggucugacaacaaaacacgaaggcgcuaucucuuuucaagauugugauacuaaggugcagugcagccccggacacuacuacaacaccagcauucacagauguauucgcugugcaaugggaaguuaucaacccgauuucaggcagaauuuuuguucccgcuguccugggaacaccucaacagacuucgauggaucuacuagcguugcccaguguaaaaauaggcagugugguggugagcugggcgaauucaccgguuauauagaaucaccuaacuauccuggaaacuauccugcuggcguggaaugcaucuggaacauaaacccacccccgaaaagaaagauucucauaguggugccugagaucuuuuuaccuuccgaggaugaauguggcgauguucuugucaugagaaagaacucuaguccuuccaguauuacaacuuaugaaacuugccagaccuaugagagaccgaucgcuuuuacggcuaggucccggaaguuauggaucaacuuuaaaacuucugaagcaaauucugcucgaggauuucagauaccguaugugaccuacgaugaggacuacgaacagcucguggaggacauaguuagggacggcaggcuguacgcaagcgagaaccaucaggaaauucucaaagacaagaaauuaaucaaagcauuuuuugaagucuuggcacauccucagaauuacuuuaaauauaccgaaaaacauaaagaaaugcugcccaaaucauucauuaaguugcuaagaagcaagguauccaguuuccuuagacccuauaaguag

SEQ ID NO: 244620 - protein, 777 aa, Artificial Sequence
  derived and/or modified sequence
MNANKDERLKARSQDFHLFPALMMLSMTMLFLPVTGTLKQNIPRLKLTYKDLLLSNSCIPFLGSSEGLDFQTLLLDEERGRLLLGAKDHIFLLSLVDLNKNFKKIYWPAAKERVELCKLAGKDANTECANFIRVLQPYNKTHIYVCGTGAFHPICGYIDLGVYKEDIIFKLDTHNLESGRLKCPFDPQQPFASVMTDEYLYSGTASDFLGKDTAFTRSLGPTHDHHYIRTDISEHYWLNGAKFIGTFFIPDTYNPDDDKIYFFFRESSQEGSTSDKTILSRVGRVCKNDVGGQRSLINKWTTFLKARLICSIPGSDGADTYFDELQDIYLLPTRDERNPVVYGVFTTTSSIFKGSAVCVYSMADIRAVFNGPYAHKESADHRWVQYDGRIPYPRPGTCPSKTYDPLIKSTRDFPDDVISFIKRHSVMYKSVYPVAGGPTFKRINVDYRLTQIVVDHVIAEDGQYDVMFLGTDIGTVLKVVSISKEKWNMEEVVLEELQIFKHSSIILNMELSLKQQQLYIGSRDGLVQLSLHRCDTYGKACADCCLARDPYCAWDGNACSRYAPTSKRRARRQDVKYGDPITQCWDIEDSISHETADEKVIFGIEFNSTFLECIPKSQQATIKWYIQRSGDEHREELKPDERIIKTEYGLLIRSLQKKDSGMYYCKAQEHTFIHTIVKLTLNVIENEQMENTQRAEHEEGKVKDLLAESRLRYKDYIQILSSPNFSLDQYCEQMWHREKRRQRNKGGPKWKHMQEMKKKRNRRHHRDLDELPRAVAT

SEQ ID NO: 244621 - DNA, 2334 bp, Artificial Sequence
  derived and/or modified sequence
atgaacgcgaataaagacgaacgtttgaaagccaggagtcaagactttcacctattcccggcactgatgatgctgtctatgaccatgctctttttgcccgttactggcactctgaagcaaaatatccccaggctgaagttgacttataaggacttgctgttatccaacagctgcattccttttcttgggtcctccgagggcctggatttccagacgctgctgctggacgaagaacggggaagattgctgctaggcgctaaagatcacatcttcctccttagcctggttgatctcaacaagaatttcaagaaaatctactggcctgcagctaaagagcgcgtcgaactgtgtaagttggccggtaaggatgccaacaccgaatgtgccaacttcatccgtgtacttcaaccttacaacaaaacgcatatatacgtgtgtgggacaggagcgttccaccccatctgcgggtatatagacctgggggtgtacaaggaagacattatctttaagctcgacactcataatttggagtccggccgtctaaaatgcccgtttgacccccaacagccatttgcatcagttatgacagatgaatacttgtacagcggtacggcatctgacttcctgggcaaggacacagcttttacacgtagcttgggacccacgcacgaccaccattatatccgcaccgacatcagcgagcactattggttgaatggggcaaagtttatagggacattctttatacctgacacctacaacccagatgacgataaaatctattttttctttagggagtcaagtcaggaggggagtacaagcgataaaaccattctctcacgggtggggcgagtatgcaaaaatgacgtgggtggccagaggtcacttattaataaatggaccactttccttaaggctcggctgatctgctctatccccggttcagacggggctgacacctactttgacgagttacaagacatctacctgctgcctacccgtgacgagcgaaaccctgttgtttatggcgtgtttacaactacctcaagcatcttcaaagggtctgccgtgtgcgtttattcgatggccgatatccgcgcagtgtttaacgggccatacgcacataaagagagcgcagaccatagatgggtacagtacgacggacgtatcccttacccacgaccaggcacctgtccatccaagacatacgacccactcatcaagtcaacgagggatttccctgacgacgtgatcagtttcatcaaaagacactccgtgatgtataaatcggtctaccccgtcgctggcggtccaacctttaaaagaataaatgttgattatagattgacccaaatcgtggtggatcatgtcatcgctgaagatggccagtatgatgtcatgtttctcggaacagatatcggcactgttctgaaagtggtgagcatatcaaaagagaaatggaatatggaagaagtggtactcgaagagctgcagatattcaagcattccagcatcatcctgaatatggaactcagcttaaaacagcaacagctttatatcggatctcgagacgggcttgtgcaactgtccttacaccgatgcgacacatatggcaaggcttgcgcggactgctgtttagcccgagatccatactgcgcatgggacggtaatgcctgttctaggtatgccccaacttctaagcgacgggcaagaagacaggatgttaaatacggtgatccaatcacccagtgctgggatattgaggactctatcagtcacgagactgccgatgagaaggtcatcttcgggattgagtttaatagcacctttttggagtgtatacccaagtcacagcaggctacgataaaatggtacatccagaggtctggagatgaacaccgcgaggagctaaaacccgacgagaggatcattaaaactgaatatggcctattgattcggagtctacagaaaaaggatagtggcatgtactattgcaaggcccaggagcatacgtttatacacacgatcgtgaagctcacattaaatgtcattgagaatgaacagatggaaaacacccaaagagcagaacacgaggagggcaaggtaaaggatctgctggccgaaagccggcttcgctataaagattacatacagattttgtctagccctaacttttctcttgatcagtactgcgaacaaatgtggcaccgtgagaagcgaagacaacgcaacaaaggaggccctaaatggaaacatatgcaggaaatgaaaaaaaagaggaaccggagacaccaccgcgatttggacgagctgccgagagccgtggctacttag

SEQ ID NO: 244622 - DNA, 2334 bp, Artificial Sequence
  derived and/or modified sequence
atgaacgcgaacaaagatgagagactgaaggctcggagccaggacttccacctgtttcccgcactcatgatgctatcgatgacgatgctattcctccccgtcaccggcacgctgaagcagaacatcccacgcctgaagctgacatacaaggatctactgctcagtaattcctgtataccatttctaggtagtagtgaaggactggattttcagaccctactgttagatgaggaacgcggtaggttactgctgggcgctaaagatcacatcttccttctctccctcgtggatctgaataagaacttcaaaaaaatctactggcctgctgccaaagagcgcgtggagttatgtaagctcgctggaaaggacgccaacacagaatgcgccaactttattagagttcttcaaccctataacaagacacacatctatgtgtgcggaactggggcattccatccgatttgcggctacatcgatctgggcgtctataaggaggatatcatatttaagctcgacacccacaacctggagtcaggtaggctgaaatgtcccttcgatccacaacagccattcgcgagtgtaatgaccgatgagtatctgtactccggcacggcctctgatttcttagggaaggatactgcctttacgaggagcctcggccctacccacgatcaccactacatccgtacggatattagcgagcactattggttaaatggggccaagtttattggtaccttttttattcctgatacttacaaccccgacgacgacaagatttacttttttttccgtgagtcctctcaagagggttcaacctctgacaagactattctgtctagggttgggagggtatgcaagaacgacgttggcgggcagcggtcactgattaacaagtggactacattcctcaaggctagactgatttgctccataccagggtccgatggcgcagacacttattttgacgaactgcaagatatctatctcctgcctacaagagacgaaagaaatccagtggtatatggcgtgtttaccacaaccagctccatctttaaagggtctgcagtgtgcgtctactcgatggctgatataagggctgtttttaatggcccctacgcccacaaggagagcgcagatcatcgctgggttcagtatgatggtaggattccgtacccaaggcccgggacgtgcccaagcaaaacgtatgacccgctgatcaaaagcactcgcgactttcccgacgacgtgattagtttcatcaaacgtcatagcgtgatgtacaagtccgtgtaccctgtcgccgggggacctacctttaaacgaattaacgtggattatcgacttacccagatcgtggtggaccacgttattgcagaggatggacagtatgatgtaatgtttctcggcaccgacatagggacagtgctgaaagttgtatcaatctctaaagagaagtggaacatggaggaggtagtgttggaagagctgcagatcttcaagcattcaagcatcatcttgaacatggaacttagcttgaagcaacagcaactttacattgggagccgcgatgggctggttcaacttagtctgcataggtgcgatacatatggaaaagcttgtgccgactgctgcctcgcacgtgacccatattgcgcatgggacggcaatgcttgttcccgatacgcccccacctcaaaacgacgggcacgtcgacaagacgttaagtacggagaccccatcacacagtgctgggacatcgaagattctatctcacacgagacggcagatgaaaaggtgatatttggtatcgaattcaattctacctttcttgagtgtatccccaaatcccaacaggctactattaaatggtacattcaaagatccggggacgagcaccgagaggaactgaagcccgacgaacggataattaaaacagagtacggcctcctcatccgcagtctgcagaaaaaggactccggcatgtactattgcaaagcccaagagcataccttcatccatacaatcgtgaagctgactttgaacgtcattgagaatgaacaaatggagaacactcagcgcgcagaacacgaagagggaaaagtgaaagacctcctagcagagtctcgcctgcggtacaaggattacattcagatcctgtcctccccaaacttctcactggaccagtactgcgagcagatgtggcatcgagaaaaaagaaggcagaggaacaagggaggaccaaagtggaaacacatgcaggagatgaagaaaaagagaaatcgtcgccaccatagagaccttgacgagctccctagagccgtagctacctag

SEQ ID NO: 244623 - DNA, 2334 bp, Artificial Sequence
  derived and/or modified sequence
atgaatgcaaacaaagacgaacgacttaaagcaaggtcccaggacttccacttattcccagccttgatgatgctctccatgaccatgttgtttctgcctgttaccggtacgctgaagcaaaatatccccaggctaaagctgacctacaaagaccttttactctccaattcctgcatacccttcctaggttcttccgaggggcttgacttccagacactgctgcttgacgaagaaaggggacgcctgctgctgggcgcgaaagaccacatattcttattatccctagtggatctgaacaagaattttaaaaaaatctattggcccgccgccaaagaaagggtagagctttgtaaactcgccggaaaagacgctaatacagaatgcgcaaacttcatccgggttttacaaccctacaacaaaacccacatctatgtatgtggtactggagcctttcatcccatttgtggttacattgatctcggggtatataaagaagacatcatctttaaactggatacacacaatcttgaatccgggagacttaaatgtccgtttgatccccaacaaccttttgcatccgtgatgaccgacgagtacctgtattccggtacagcatctgactttctggggaaggatacagcatttacacgctcactgggacccactcacgaccaccactatatacgaaccgacatttcagaacattattggctgaacggcgccaagtttataggaaccttcttcattccagatacttacaatccggacgacgacaagatctactttttctttcgggaatccagccaagagggcagcaccagcgataaaactatcctgagcagggtcgggcgagtctgtaagaatgatgtaggaggacagagaagtctcattaataagtggactacatttctgaaagccagacttatctgttcaatccctggaagtgacggagcagacacgtatttcgacgaactacaggatatctatctcctacccacccgcgacgaaagaaaccctgtcgtttatggtgttttcacaaccaccagcagcatcttcaaaggctccgcagtgtgcgtttactcaatggccgacatccgggctgtctttaatgggccttatgcccataaggaatctgccgaccaccgttgggtgcagtatgacggtcgcatcccttaccccagaccaggaacctgcccttctaagacttacgatcccctgattaagtcgactcgagatttccccgatgatgtcatctctttcataaaacggcactcagttatgtataaatcggtatatcctgtggctggcggcccaacattcaaacggataaacgtggactatcgactgactcaaattgtggtggaccatgtgattgcggaggacggacagtacgacgttatgttcctggggaccgatatcggcactgtattaaaagtcgttagcatttctaaggagaaatggaatatggaggaagttgtgctggaagagcttcagattttcaaacactctagtataatcctgaacatggagctcagtctaaagcagcagcagctatatattggctctcgtgatggtttagttcagttaagcttgcatcgatgtgacacttatggcaaggcctgtgccgattgttgccttgcccgcgacccctactgcgcttgggatggtaatgcctgtagtagatacgctcccacatctaaacgacgcgcaaggagacaggacgtgaaatacggagatccgatcacccaatgctgggacattgaggattcaattagtcatgagactgctgacgagaaggtcatcttcggcattgagttcaattctacattccttgaatgtataccgaaaagccaacaagccaccatcaaatggtacatccagagaagtggagatgaacatagagaagaactcaaaccagatgaaaggataattaaaaccgaatacggattactgatcaggagcctgcagaaaaaagattctggtatgtattactgcaaagcccaagaacacacattcatccataccattgttaaactgactcttaacgtcatagaaaacgaacagatggagaacactcagagagccgaacacgaggaaggaaaagtgaaggacttacttgccgagtcacgcctgcggtacaaagattacatccagattctcagctcccccaactttagccttgaccagtactgtgagcagatgtggcaccgggaaaagaggcgccagagaaataaaggagggcccaagtggaaacacatgcaagaaatgaagaagaaacgcaatcgccgtcaccatcgtgatttagacgaactaccccgagcagtcgccacctag

SEQ ID NO: 244624 - DNA, 6265 bp, Artificial Sequence
  derived and/or modified sequence
ttagattaaattaacaccatttgaaagagaacattgttttcatcatgaatgctaataaagatgaaagacttaaagccagaagccaagattttcacctttttcctgctttgatgatgctaagcatgaccatgttgtttcttccagtcactggcactttgaagcaaaatattccaagactcaagctaacctacaaagacttgctgctttcaaatagctgtattccctttttgggttcatcagaaggactggattttcaaactcttctcttagatgaggaaagaggcaggctgctcttgggagccaaagaccacatctttctactcagtctggttgacttaaacaaaaattttaagaagatttattggcctgctgcaaaggaacgggtggaattatgtaaattagctgggaaagatgccaatacagaatgtgcaaatttcatcagagtacttcagccctataacaaaactcacatatatgtgtgtggaactggagcatttcatccaatatgtgggtatattgatcttggagtctacaaggaggatattatattcaaactagacacacataatttggagtctggcagactgaaatgtcctttcgatcctcagcagccttttgcttcagtaatgacagatgagtacctctactctggaacagcttctgatttccttggcaaagatactgcattcactcgatcccttgggcctactcatgaccaccactacatcagaactgacatttcagagcactactggctcaatggagcaaaatttattggaactttcttcataccagacacctacaatccagatgatgataaaatatatttcttctttcgtgaatcatctcaagaaggcagtacctccgataaaaccatcctttctcgagttggaagagtttgtaagaatgatgtaggaggacaacgcagcctgataaacaagtggacgacttttcttaaggccagactgatttgctcaattcctggaagtgatggggcagatacttactttgatgagcttcaagatatttatttactccccacaagagatgaaagaaatcctgtagtatatggagtctttactacaaccagctccatcttcaaaggctctgctgtttgtgtgtatagcatggctgacatcagagcagtttttaatggtccatatgctcataaggaaagtgcagaccatcgttgggtgcagtatgatgggagaattccttatccacggcctggtacatgtccaagcaaaacctatgacccactgattaagtccacccgagattttccagatgatgtcatcagtttcataaagcggcactctgtgatgtataagtccgtatacccagttgcaggaggaccaacgttcaagagaatcaatgtggattacagactgacacagatagtggtggatcatgtcattgcagaagatggccagtacgatgtaatgtttcttggaacagacattggaactgtcctcaaagttgtcagcatttcaaaggaaaagtggaatatggaagaggtagtgctggaggagttgcagatattcaagcactcatcaatcatcttgaacatggaattgtctctgaagcagcaacaattgtacattggttcccgagatggattggttcagctctccttgcacagatgcgacacttatgggaaagcttgcgcagactgttgtcttgccagagacccctactgtgcctgggatggaaatgcatgctctcgatatgctcctacttctaaaaggagagctagacgccaagatgtaaaatatggcgacccaatcacccagtgctgggacatcgaagacagcattagtcatgaaactgctgatgaaaaggtgatttttggcattgaatttaactcaacctttctggaatgtatacctaaatcccaacaagcaactattaaatggtatatccagaggtcaggggatgagcatcgagaggagttgaagcccgatgaaagaatcatcaaaacggaatatgggctactgattcgaagtttgcagaagaaggattctgggatgtattactgcaaagcccaggagcacactttcatccacaccatagtgaagctgactttgaatgtcattgagaatgaacagatggaaaatacccagagggcagagcatgaggaggggaaggtcaaggatctattggctgagtcacggttgagatacaaagactacatccaaatccttagcagcccaaacttcagcctcgaccagtactgcgaacagatgtggcacagggagaagcggagacagagaaacaaggggggcccaaagtggaagcacatgcaggaaatgaagaagaaacgaaatcgaagacatcacagagacctggatgagctccctagagctgtagccacgtagttttctacttaatttaaagaaaagaattccttacctataaaaacattgccttctgttttgtatatcccttatagtaattcataaatgcttcccatggagttttgctaaggcacaagacaataatctgaataagacaatatgtgatgaatataagaaagggcaaaaaattcatttgaaccagttttccaagaacaaatcttgcacaagcaaagtataagaattatcctaaaaatagggggtttacagttgtaaatgttttatgttttgagttttggaatttattgtcatgtaaatagttgagctaagcaagccccgaatttgatagtgtataaggtgctttattccctcgaatgtccattaagcatggaatttaccatgcagttgtgctatgttcttatgaacagatatatcattcctattgagaaccagctaccttgtggtagggaataagaggtcagacacaaattaagacaactcccattatcaacaggaactttctcagtgagccattcactcctggagaatggtataggaatttggagaggtgcattatttctttctggccactggggttaaatttagtgtactacaacattgatttactgaagggcactaatgtttcccccaggatttctattgactagtcaggagtaacaggttcacagagagaagttggtgcttagttatgtgttttttagagtatatactaagctctacagggacagaatgcttaataaatactttaataagatatgggaaaatattttaataaaacaaggaaaacataatgatgtataatgcatcctgatgggaaggcatgcagatgggatttgttagaagacagaaggaaagacagccataaattctggctttggggaaaactcatatccccatgaaaaggaagaacaatcacaaataaagtgagagtaatgtaatggagctcttttcactagggtataagtagctgccaatttgtaattcatctgttaaaaaaaatctagattataacaaactgctagcaaaatctgaggaaacataaattcttctgaagaatcataggaagagtagacattttatttataaccaatgatatttcagtatatattttctctcttttaaaaaatatttatcatactctgtatattatttctttttactgcctttattctctcctgtatattggattttgtgattatatttgagtgaataggagaaaacaatatataacacacagagaattaagaaaatgacatttctggggagtggggatatatatttgttgaataacagaacgagtgtaaaattttaacaacggaaagggttaaattaactctttgacatcttcactcaaccttttctcattgctgagttaatctgttgtaattgtagtattgtttttgtaatttaacaataaataagcctgctacatgtaaaaagaaccaaactcacaatattaacataaacatctttcatattttgttagtactttcaaatgttttcaatttgactttccctctgaatatgcatggtgtgtttcctgtctgtttaagcagaactcacctttccttcttgtaacacagaacccttagccttcttctgttttgccttttcacgccctttatagtgtgaaatgaaaaattagtcacttcctcacatggaaggcagcttttcagaaaataacagacattgctcgtttctcatgcattctacatatcttgaaagaaaagtctgtgagaaaaccctgtgattagagggcaacttaatgcaagatctgtggctctatgttgagagcattctctctctgttatttttattttatttgcattgcttacctatctcaaagtagtcaaactgatatatgagattgagtactcccttttgatattatactgatgaatatttgtaggtgtttcactataaggaacagctaaggaataattttaataaaagtgaaccagaacaaatcactcatttaaaaagtaattcagaagaacagtgtggcatgatcagacttctaattgaatagcgtaacaacagtgtttgtaattatagatttgcttggacaaaatattccaggaactcatagcgagctcaaagcaattaagtgggaacatttttaatttaaaaaaaatttccaaatatttgtgggtccgacagtaatgatcaaaatatgaatgactttggaaaatttacatgaagctcaagtgttaggattgacttatgaaaataaattttatttctatccaaatttgaatgtccaaaccattttttagttacttctttctaatcctagttattcagacaaaatttggaaacttattttatgaccacatctaatattctggctgctttggatacaatactcttgatttatgataattagttaaaatatattaaaaatattattagtaaaataaaatttcacacaataaaaaacaacatagagtacacatatttatatgtatttttaaagataaagaatatctaaaatgtgtttttttcttagctttttagttgtctagaacatttagagaaagagtatgaatatattaaatccacaaacacactatatacttcctcaccactgactattttatcaaatttgccttaaaataatgaaaaagaaaagtatagttaatggtttcaaatatgctaagaaattgactctgcggaggggatcttaaaatgcctgtttactcatgttttcgtatttttcttgtctctaatacttttgtctttgtctgccttgtgtgttcttttctgaatttcatttcagcaatttatgctgctaaatagaatcccgcatgtctgcattcatttacattcaacttattgtaaattttgagattttatttagaaatgaattgtctaattaatttatgtagagtccttttttccaaagagctcaaaacactacatccacattattgacttttggaaaccaaccaaattacttaagaaatggaaaagtagtcacagagaaatttagtaatttgcaaaagccacaacagtagtggaagaattaaaattcataaagtctcatcattctgttggctaaaataatgctctttacaatatgctggctacaaaatggtcttactcttgaattttgcttttggttcatattttggttcttcatattctagtatgttttgttcctgctgaattttacagactcagctaaacaataagttattagtagtcacttgttttcattatcataattgaatttccaagaacaacttgatatcattcagctgtccaaaaaataataagagcattcattaaatactgattttcttaaacttaaatgttgtatttcatatttatttatataatacaaatggaaatcaaaactgaaatagcctccctttagaatgtcacatttttcttagaaaacattttggaattggttaaccttattgggaatggataatttagaaacaaaccaaaaaaaaaaaaagatatttgaagtgtttttataggagatgtatttttatcatagtaaatgatcacaattttaaataattcatcttacaagtcaggtaaaataaaatcgattcccagattccatacattaggagtgcaaagacaggatcatacacatgacttatacctctcatttaaatattttatagtataaagtatttatggaaagggtttgagatagatgatttttgggaaagggcaaaatgtgtcagatgccctagttaatcatgtaatttaattctggtattgtgagtggttagcaatcaattttgaatttataattctgctattttaaaagaaatgtagtcttgtagtatgaaataattaaaaattgttaaatgtatattttggttgtattataataaaatgcaaacatgactgttctatgattataaaaa

SEQ ID NO: 244625 - DNA, 2334 bp, Artificial Sequence
  derived and/or modified sequence
atgaacgccaacaaggacgagagactgaaggccagaagccaggacttccacctgttccccgccctgatgatgctgagcatgaccatgctgttcctgcccgtgaccggcaccctgaagcagaacatccccagactgaagctgacctacaaggacctgctgctgagcaacagctgcatccccttcctgggcagcagcgagggcctggacttccagaccctgctgctggacgaggagagaggcagactgctgctgggcgccaaggaccacatcttcctgctgagcctggtggacctgaacaagaacttcaagaagatctactggcccgccgccaaggagagagtggagctgtgcaagctggccggcaaggacgccaacaccgagtgcgccaacttcatcagagtgctgcagccctacaacaagacccacatctacgtgtgcggcaccggcgccttccaccccatctgcggctacatcgacctgggcgtgtacaaggaggacatcatcttcaagctggacacccacaacctggagagcggcagactgaagtgccccttcgacccccagcagcccttcgccagcgtgatgaccgacgagtacctgtacagcggcaccgccagcgacttcctgggcaaggacaccgccttcaccagaagcctgggccccacccacgaccaccactacatcagaaccgacatcagcgagcactactggctgaacggcgccaagttcatcggcaccttcttcatccccgacacctacaaccccgacgacgacaagatctacttcttcttcagagagagcagccaggagggcagcaccagcgacaagaccatcctgagcagagtgggcagagtgtgcaagaacgacgtgggcggccagagaagcctgatcaacaagtggaccaccttcctgaaggccagactgatctgcagcatccccggcagcgacggcgccgacacctacttcgacgagctgcaggacatctacctgctgcccaccagagacgagagaaaccccgtggtgtacggcgtgttcaccaccaccagcagcatcttcaagggcagcgccgtgtgcgtgtacagcatggccgacatcagagccgtgttcaacggcccctacgcccacaaggagagcgccgaccacagatgggtgcagtacgacggcagaatcccctaccccagacccggcacctgccccagcaagacctacgaccccctgatcaagagcaccagagacttccccgacgacgtgatcagcttcatcaagagacacagcgtgatgtacaagagcgtgtaccccgtggccggcggccccaccttcaagagaatcaacgtggactacagactgacccagatcgtggtggaccacgtgatcgccgaggacggccagtacgacgtgatgttcctgggcaccgacatcggcaccgtgctgaaggtggtgagcatcagcaaggagaagtggaacatggaggaggtggtgctggaggagctgcagatcttcaagcacagcagcatcatcctgaacatggagctgagcctgaagcagcagcagctgtacatcggcagcagagacggcctggtgcagctgagcctgcacagatgcgacacctacggcaaggcctgcgccgactgctgcctggccagagacccctactgcgcctgggacggcaacgcctgcagcagatacgcccccaccagcaagagaagagccagaagacaggacgtgaagtacggcgaccccatcacccagtgctgggacatcgaggacagcatcagccacgagaccgccgacgagaaggtgatcttcggcatcgagttcaacagcaccttcctggagtgcatccccaagagccagcaggccaccatcaagtggtacatccagagaagcggcgacgagcacagagaggagctgaagcccgacgagagaatcatcaagaccgagtacggcctgctgatcagaagcctgcagaagaaggacagcggcatgtactactgcaaggcccaggagcacaccttcatccacaccatcgtgaagctgaccctgaacgtgatcgagaacgagcagatggagaacacccagagagccgagcacgaggagggcaaggtgaaggacctgctggccgagagcagactgagatacaaggactacatccagatcctgagcagccccaacttcagcctggaccagtactgcgagcagatgtggcacagagagaagagaagacagagaaacaagggcggccccaagtggaagcacatgcaggagatgaagaagaagagaaacagaagacaccacagagacctggacgagctgcccagagccgtggccacctag

SEQ ID NO: 244626 - DNA, 2334 bp, Artificial Sequence
  derived and/or modified sequence
atgaacgcaaacaaggacgaacgactgaaggcccgaagccaagactttcacttatttccggccctgatgatgctttctatgaccatgctctttttaccagtgaccggtactctaaagcaaaacataccgaggctgaaactaacctacaaagacttgctgttgtccaactcctgcatcccattcctgggcagttcagaggggctggattttcaaacactgctgttagacgaggagcgaggccggttattactgggcgccaaggatcacattttccttctgtcattggtcgacctgaacaagaactttaaaaaaatctattggcccgctgccaaggaacgagtggaattgtgtaagcttgcgggcaaagacgccaacactgagtgtgcaaactttatcagagtgcttcagccttataataagacccacatttacgtatgtggaaccggcgcatttcacccaatctgtgggtatatcgacctgggggtctacaaagaggatattatcttcaagttagacacgcacaacctggaatccggacgtttgaaatgtccattcgacccacaacagcctttcgcttcggtcatgactgatgagtatttatattctggaaccgcttctgacttccttggtaaggacacagccttcacaagatccctgggcccaactcacgaccatcattatattaggacggatatcagcgagcactattggctgaatggagccaagttcattggaactttctttataccagacacctacaatcccgatgatgataagatttatttcttctttcgggagagttctcaggagggcagcactagtgataagactattttgtcccgggtgggccgtgtgtgcaaaaatgatgttggggggcagcggagtctgatcaacaagtggaccacattcttgaaggcacggctgatctgttccattcctggcagcgatggcgccgacacctacttcgacgagcttcaggacatctatctccttcctacccgagacgaacgcaatcctgtcgtgtacggcgtgtttaccaccaccagcagtatctttaaagggagcgccgtgtgcgtttactcaatggccgatatccgggctgttttcaatgggccctacgcacataaggaaagtgcagatcaccgatgggtacagtacgatggtcgaatcccttacccaagacctggtacatgccctagcaagacctacgaccccctcataaagtctacccgcgactttccagacgacgtgatctcctttatcaaacgtcactctgttatgtataaatcagtctaccctgtggctggaggacccacctttaagagaatcaatgttgactataggctcacacagatcgtggtggatcacgtcatagcagaggatgggcagtacgatgtgatgtttctgggaacggatattggaaccgtgcttaaggtcgtgagcatctctaaagagaaatggaatatggaagaagtcgttttagaagagctccagattttcaaacacagctcaattattctgaatatggagttgtcattaaagcaacagcagctctacattggctctagagatggcctggtgcagttgagcctccacagatgtgatacctatgggaaggcgtgcgcggattgctgcttggcgcgcgatccttactgtgcttgggacggcaatgcctgcagccgttatgcacccacaagcaagaggagagctagacgccaggacgtgaagtacggggaccccattactcagtgttgggacattgaggattcaatcagtcacgaaaccgccgacgaaaaagtcatctttggcattgagttcaactctacctttctggagtgtatacctaaatctcagcaagctactatcaagtggtacatccagcggagcggggatgaacacagagaggaactgaagccagacgagagaattataaaaacagaatatggcctgctcatccggtctctccagaagaaggactctggtatgtattattgcaaggcacaggaacataccttcattcacaccatcgttaagcttacactgaatgtcattgaaaacgagcagatggagaacacacagcgggccgaacacgaagaaggaaaggtcaaagacctgctcgcagagagtcgtctacgctataaggattatattcagatcctcagtagcccaaacttttctctggatcagtattgcgagcagatgtggcatcgcgaaaagcggcgccagcgaaacaagggcggaccaaagtggaagcatatgcaagagatgaaaaagaagaggaaccggagacatcacagggatctagacgagttacctcgggcagtggcgacgtag

SEQ ID NO: 244627 - DNA, 2334 bp, Artificial Sequence
  derived and/or modified sequence
atgaatgccaacaaggatgagcggctgaaggcccggagccaggacttccacctgtttcctgccctgatgatgctgtccatgaccatgctgttcctgcctgtgacaggcaccctgaagcagaacatcccccggctgaagctgacctacaaggacctgctgctgagcaacagctgcatccccttcctgggcagcagcgagggcctggacttccagaccctgctgctggatgaggagcggggccgcctgctgctgggcgccaaggaccacatcttcctgctgagcctggtggacctgaacaagaacttcaagaagatctactggccagctgccaaggagcgggtggagctgtgcaagctggccggcaaggatgccaacacagaatgtgccaacttcatccgggtgctgcagccctacaacaagacccacatctacgtgtgtggcaccggggccttccaccccatctgtggctacatcgacctgggcgtgtacaaggaggacatcatcttcaagctggacacccacaacctggagagcggccgcctgaagtgcccctttgacccccagcagccctttgcctctgtgatgacagatgagtacctgtacagcggcacagccagtgacttcctgggcaaggacacagccttcaccaggagcctgggccccacccatgaccaccactacatcagaacagacatcagcgagcactactggctgaatggagccaagttcatcggcaccttcttcatcccagacacctacaacccagatgatgacaagatctacttcttcttccgggagagcagccaggagggcagcaccagtgacaagaccatcctgagccgggtgggccgggtgtgcaagaatgatgtgggcggccagaggagcctcatcaacaagtggaccaccttcctgaaggcccggctcatctgcagcatccctggcagtgatggagctgacacctactttgatgagctgcaggacatctacctgctgcccaccagagatgaaagaaatcctgtggtgtatggagtcttcaccaccaccagcagcatcttcaagggcagcgctgtgtgtgtgtacagcatggctgacatccgggctgtgttcaacggcccctatgcccacaaggagagcgctgaccaccgctgggtgcagtatgatggccgcatcccctaccccaggcctggcacctgccccagcaagacctatgaccccctcatcaagagcacccgggacttcccagatgatgtgatctccttcatcaagaggcacagcgtgatgtacaagtctgtgtaccctgtggccggcggccccaccttcaagaggatcaacgtggactaccgcctgacccagatcgtggtggaccacgtgattgctgaagatggccagtatgatgtgatgttcctgggcacagacattggaacagtgctgaaggtggtgtccatcagcaaggagaagtggaacatggaggaggtggtgctggaggagctgcagatcttcaagcacagcagcatcatcctgaacatggagctgagcctgaagcagcagcagctgtacatcggcagcagagatggcctggtgcagctgagcctgcaccgctgtgacacctacggcaaggcctgtgccgactgctgcctggcccgggacccctactgtgcctgggatggaaatgcctgcagccgctatgcccccaccagcaagaggcgggcccggcggcaggatgtgaagtatggagaccccatcacccagtgctgggacatcgaggacagcatcagccatgaaacagcagatgagaaggtgatcttcggcatcgagttcaacagcaccttcctggagtgcatccccaagagccagcaggccaccatcaagtggtacatccagaggtctggagatgagcaccgggaggagctgaagccagatgagcgcatcatcaagacagaatatggcctgctgatccgcagcctgcagaagaaggacagcggcatgtactactgcaaggcccaggagcacaccttcatccacaccatcgtgaagctgaccctgaatgtgattgaaaatgagcagatggagaacacccagagagctgagcacgaggagggcaaggtgaaggacctgctggccgagagccggctgcgctacaaggactacatccagatcctgagcagccccaacttcagcctggaccagtactgtgagcagatgtggcaccgggagaagaggcggcagagaaataaaggaggccccaagtggaagcacatgcaggagatgaagaagaagaggaacagaagacaccaccgggacctggatgagctgcccagggctgtggccacctag

SEQ ID NO: 244628 - DNA, 2334 bp, Artificial Sequence
  derived and/or modified sequence
atgaacgccaacaaggacgagcggctgaaggcccggagccaggacttccacttatttcccgctctgatgatgctaagcatgacgatgctgtttttgccggtcacaggaaccctcaagcagaatatcccacgtctgaaactgacctacaaggacctgctgttgtccaacagctgtatcccatttttggggagctccgagggactagatttccaaactctgctactcgatgaggagcgtggaaggctgcttctgggcgccaaggaccacatttttctgttgtccctggtggacctgaataagaattttaagaagatctactggcccgccgctaaagagcgtgtggagctgtgcaagctggccgggaaagatgctaatacagaatgcgcaaattttatacgagttttgcaaccttataataagacccacatatacgtctgtgggacaggagcctttcatcctatatgcggttacatcgacctgggtgtctacaaagaagatattattttcaaattggatacacacaacctcgagagtggtcgtctaaagtgcccattcgacccccagcagccttttgctagtgtcatgactgacgagtacctgtactccggcactgcttccgacttcctgggcaaagacaccgccttcacaagatctctgggtcctactcacgatcaccattatattcgcactgatatttccgagcactactggctgaacggagctaagtttattgggaccttcttcattcccgatacttataatcccgacgacgacaagatttacttcttttttagggaaagttctcaagaaggctccacctccgataagaccattttgagcagagtcgggcgtgtgtgtaaaaacgatgtcggtggccagcgaagcctgattaacaagtggactaccttcctgaaagctcgtttgatctgttccattcctgggtctgatggggccgacacctactttgatgagctccaggacatttacctgcttccaacgagggatgagcggaacccagtggtgtacggtgtattcacaacaaccagttcaatcttcaaggggtcggccgtgtgcgtgtatagtatggccgatattagagctgtgttcaacggaccttatgcccataaggagtcagctgatcatcgctgggtgcagtacgacggtcgcataccttacccgcggccaggaacctgtccatctaagacttatgatcccctcatcaagagcaccagagacttccccgatgacgtaatatcatttatcaagcggcactctgtaatgtacaagtccgtatacccggtcgccggcgggccaacttttaaacgcattaacgttgactacaggctgacacagatcgtcgtagatcacgtcatcgcagaggacggccaatacgacgtgatgttcctaggcacagatatcggcaccgttctaaaagtggtctctatctccaaagaaaagtggaacatggaagaggtggtgcttgaagagctgcagatctttaagcactctagtattatattgaatatggagcttagcctcaaacaacagcagctctatatcggaagccgcgacggactcgtccagctctctcttcataggtgcgatacctacggaaaagcctgcgccgattgttgtctggccagggatccttattgtgcctgggatggtaacgcatgttcccgctatgccccaaccagtaaaagaagagcacgtcgccaggatgtgaaatatggcgatccgattacacagtgttgggacatcgaagatagcatttctcatgaaaccgccgatgagaaagtcatcttcggcatagaatttaacagtacttttcttgaatgtataccaaagtcacagcaggccaccatcaagtggtatatccagcgcagtggggacgagcatcgggaggagctgaaacctgatgaacggatcatcaagaccgagtatgggcttcttattaggtcgctgcagaaaaaagattctggcatgtattattgcaaggcccaggaacatacatttatccatactatagtaaaactgactttaaatgtgatcgaaaacgaacagatggaaaatacccagagagccgaacatgaggaggggaaggtaaaggacttgctggccgaatccagactccgttacaaggactacattcagatactatctagccccaatttctcactggaccagtattgtgagcagatgtggcaccgggaaaagaggagacaacgcaacaagggtggcccaaaatggaaacatatgcaggagatgaagaaaaagaggaacaggcgccaccatcgcgacttggacgaactgccacgtgctgtggcaacctag

SEQ ID NO: 244629 - RNA, 2334 nt, Artificial Sequence
  derived and/or modified sequence
augaacgcgaacaaagaugagagacugaaggcucggagccaggacuuccaccuguuucccgcacucaugaugcuaucgaugacgaugcuauuccuccccgucaccggcacgcugaagcagaacaucccacgccugaagcugacauacaaggaucuacugcucaguaauuccuguauaccauuucuagguaguagugaaggacuggauuuucagacccuacuguuagaugaggaacgcgguagguuacugcugggcgcuaaagaucacaucuuccuucucucccucguggaucugaauaagaacuucaaaaaaaucuacuggccugcugccaaagagcgcguggaguuauguaagcucgcuggaaaggacgccaacacagaaugcgccaacuuuauuagaguucuucaacccuauaacaagacacacaucuaugugugcggaacuggggcauuccauccgauuugcggcuacaucgaucugggcgucuauaaggaggauaucauauuuaagcucgacacccacaaccuggagucagguaggcugaaaugucccuucgauccacaacagccauucgcgaguguaaugaccgaugaguaucuguacuccggcacggccucugauuucuuagggaaggauacugccuuuacgaggagccucggcccuacccacgaucaccacuacauccguacggauauuagcgagcacuauugguuaaauggggccaaguuuauugguaccuuuuuuauuccugauacuuacaaccccgacgacgacaagauuuacuuuuuuuuccgugaguccucucaagaggguucaaccucugacaagacuauucugucuaggguugggaggguaugcaagaacgacguuggcgggcagcggucacugauuaacaaguggacuacauuccucaaggcuagacugauuugcuccauaccaggguccgauggcgcagacacuuauuuugacgaacugcaagauaucuaucuccugccuacaagagacgaaagaaauccagugguauauggcguguuuaccacaaccagcuccaucuuuaaagggucugcagugugcgucuacucgauggcugauauaagggcuguuuuuaauggccccuacgcccacaaggagagcgcagaucaucgcuggguucaguaugaugguaggauuccguacccaaggcccgggacgugcccaagcaaaacguaugacccgcugaucaaaagcacucgcgacuuucccgacgacgugauuaguuucaucaaacgucauagcgugauguacaaguccguguacccugucgccgggggaccuaccuuuaaacgaauuaacguggauuaucgacuuacccagaucgugguggaccacguuauugcagaggauggacaguaugauguaauguuucucggcaccgacauagggacagugcugaaaguuguaucaaucucuaaagagaaguggaacauggaggagguaguguuggaagagcugcagaucuucaagcauucaagcaucaucuugaacauggaacuuagcuugaagcaacagcaacuuuacauugggagccgcgaugggcugguucaacuuagucugcauaggugcgauacauauggaaaagcuugugccgacugcugccucgcacgugacccauauugcgcaugggacggcaaugcuuguucccgauacgcccccaccucaaaacgacgggcacgucgacaagacguuaaguacggagaccccaucacacagugcugggacaucgaagauucuaucucacacgagacggcagaugaaaaggugauauuugguaucgaauucaauucuaccuuucuugaguguauccccaaaucccaacaggcuacuauuaaaugguacauucaaagauccggggacgagcaccgagaggaacugaagcccgacgaacggauaauuaaaacagaguacggccuccucauccgcagucugcagaaaaaggacuccggcauguacuauugcaaagcccaagagcauaccuucauccauacaaucgugaagcugacuuugaacgucauugagaaugaacaaauggagaacacucagcgcgcagaacacgaagagggaaaagugaaagaccuccuagcagagucucgccugcgguacaaggauuacauucagauccuguccuccccaaacuucucacuggaccaguacugcgagcagauguggcaucgagaaaaaagaaggcagaggaacaagggaggaccaaaguggaaacacaugcaggagaugaagaaaaagagaaaucgucgccaccauagagaccuugacgagcucccuagagccguagcuaccuag

SEQ ID NO: 244630 - RNA, 2334 nt, Artificial Sequence
  derived and/or modified sequence
augaaugcaaacaaagacgaacgacuuaaagcaaggucccaggacuuccacuuauucccagccuugaugaugcucuccaugaccauguuguuucugccuguuaccgguacgcugaagcaaaauauccccaggcuaaagcugaccuacaaagaccuuuuacucuccaauuccugcauacccuuccuagguucuuccgaggggcuugacuuccagacacugcugcuugacgaagaaaggggacgccugcugcugggcgcgaaagaccacauauucuuauuaucccuaguggaucugaacaagaauuuuaaaaaaaucuauuggcccgccgccaaagaaaggguagagcuuuguaaacucgccggaaaagacgcuaauacagaaugcgcaaacuucauccggguuuuacaacccuacaacaaaacccacaucuauguaugugguacuggagccuuucaucccauuugugguuacauugaucucgggguauauaaagaagacaucaucuuuaaacuggauacacacaaucuugaauccgggagacuuaaauguccguuugauccccaacaaccuuuugcauccgugaugaccgacgaguaccuguauuccgguacagcaucugacuuucuggggaaggauacagcauuuacacgcucacugggacccacucacgaccaccacuauauacgaaccgacauuucagaacauuauuggcugaacggcgccaaguuuauaggaaccuucuucauuccagauacuuacaauccggacgacgacaagaucuacuuuuucuuucgggaauccagccaagagggcagcaccagcgauaaaacuauccugagcagggucgggcgagucuguaagaaugauguaggaggacagagaagucucauuaauaaguggacuacauuucugaaagccagacuuaucuguucaaucccuggaagugacggagcagacacguauuucgacgaacuacaggauaucuaucuccuacccacccgcgacgaaagaaacccugucguuuaugguguuuucacaaccaccagcagcaucuucaaaggcuccgcagugugcguuuacucaauggccgacauccgggcugucuuuaaugggccuuaugcccauaaggaaucugccgaccaccguugggugcaguaugacggucgcaucccuuaccccagaccaggaaccugcccuucuaagacuuacgauccccugauuaagucgacucgagauuuccccgaugaugucaucucuuucauaaaacggcacucaguuauguauaaaucgguauauccuguggcuggcggcccaacauucaaacggauaaacguggacuaucgacugacucaaauugugguggaccaugugauugcggaggacggacaguacgacguuauguuccuggggaccgauaucggcacuguauuaaaagucguuagcauuucuaaggagaaauggaauauggaggaaguugugcuggaagagcuucagauuuucaaacacucuaguauaauccugaacauggagcucagucuaaagcagcagcagcuauauauuggcucucgugaugguuuaguucaguuaagcuugcaucgaugugacacuuauggcaaggccugugccgauuguugccuugcccgcgaccccuacugcgcuugggaugguaaugccuguaguagauacgcucccacaucuaaacgacgcgcaaggagacaggacgugaaauacggagauccgaucacccaaugcugggacauugaggauucaauuagucaugagacugcugacgagaaggucaucuucggcauugaguucaauucuacauuccuugaauguauaccgaaaagccaacaagccaccaucaaaugguacauccagagaaguggagaugaacauagagaagaacucaaaccagaugaaaggauaauuaaaaccgaauacggauuacugaucaggagccugcagaaaaaagauucugguauguauuacugcaaagcccaagaacacacauucauccauaccauuguuaaacugacucuuaacgucauagaaaacgaacagauggagaacacucagagagccgaacacgaggaaggaaaagugaaggacuuacuugccgagucacgccugcgguacaaagauuacauccagauucucagcucccccaacuuuagccuugaccaguacugugagcagauguggcaccgggaaaagaggcgccagagaaauaaaggagggcccaaguggaaacacaugcaagaaaugaagaagaaacgcaaucgccgucaccaucgugauuuagacgaacuaccccgagcagucgccaccuag

SEQ ID NO: 244631 - protein, 1708 aa, Artificial Sequence
  derived and/or modified sequence
MAAIGRGRSLKNLRVRGRNDSGEENVPLDLTREPSDNLREILQNVARLQGVSNMRKLGHLNNFTKLLCDIGHSEEKLGFHYEDIIICLRLALLNEAKEVRAAGLRALRYLIQDSSILQKVLKLKVDYLIARCIDIQQSNEVERTQALRLVRKMITVNASLFPSSVTNSLIAVGNDGLQERDRMVRACIAIICELALQNPEVVALRGGLNTILKNVIDCQLSRINEALITTILHLLNHPKTRQYVRADVELERILAPYTDFHYRHSPDTAEGQLKEDREARFLASKMGIIATFRSWAGIINLCKPGNSGIQSLIGVLCIPNMEIRRGLLEVLYDIFRLPLPVVTEEFIEALLSVDPGRFQDSWRLSDGFVAAEAKTILPHRARSRPDLMDNYLALILSAFIRNGLLEGLVEVITNSDDHISVRATILLGELLHMANTILPHSHSHHLHCLPTLMNMAASFDIPKEKRLRASAALNCLKRFHEMKKRGPKPYSLHLDHIIQKAIATHQKRDQYLRVQKDIFILKDTEEALLINLRDSQVLQHKENLEWNWNLIGTILKWPNVNLRNYKDEQLHRFVRRLLYFYKPSSKLYANLDLDFAKAKQLTVVGCQFTEFLLESEEDGQGYLEDLVKDIVQWLNASSGMKPERSLQNNGLLTTLSQHYFLFIGTLSCHPHGVKMLEKCSVFQCLLNLCSLKNQDHLLKLTVSSLDYSRDGLARVILSKILTAATDACRLYATKHLRVLLRANVEFFNNWGIELLVTQLHDKNKTISSEALDILDEACEDKANLHALIQMKPALSHLGDKGLLLLLRFLSIPKGFSYLNERGYVAKQLEKWHREYNSKYVDLIEEQLNEALTTYRKPVDGDNYVRRSNQRLQRPHVYLPIHLYGQLVHHKTGCHLLEVQNIITELCRNVRTPDLDKWEEIKKLKASLWALGNIGSSNWGLNLLQEENVIPDILKLAKQCEVLSIRGTCVYVLGLIAKTKQGCDILKCHNWDAVRHSRKHLWPVVPDDVEQLCNELSSIPSTLSLNSESTSSRHNSESESVPSSMFILEDDRFGSSSTSTFFLDINEDTEPTFYDRSGPIKDKNSFPFFASSKLVKNRILNSLTLPNKKHRSSSDPKGGKLSSESKTSNRRIRTLTEPSVDFNHSDDFTPISTVQKTLQLETSFMGNKHIEDTGSTPSIGENDLKFTKNFGTENHRENTSRERLVVESSTSSHMKIRSQSFNTDTTTSGISSMSSSPSRETVGVDATTMDTDCGSMSTVVSTKTIKTSHYLTPQSNHLSLSKSNSVSLVPPGSSHTLPRRAQSLKAPSIATIKSLADCNFSYTSSRDAFGYATLKRLQQQRMHPSLSHSEALASPAKDVLFTDTITMKANSFESRLTPSRFMKALSYASLDKEDLLSPINQNTLQRSSSVRSMVSSATYGGSDDYIGLALPVDINDIFQVKDIPYFQTKNIPPHDDRGARAFAHDAGGLPSGTGGLVKNSFHLLRQQMSLTEIMNSIHSDASLFLESTEDTGLQEHTDDNCLYCVCIEILGFQPSNQLSAICSHSDFQDIPYSDWCEQTIHNPLEVVPSKFSGISGCSDGVSQEGSASSTKSTELLLGVKTIPDDTPMCRILLRKEVLRLVINLSSSVSTKCHETGLLTIKEKYPQTFDDICLYSEVSHLLSHCTFRLPCRRFIQELFQDVQFLQMHEEAEAVLATPPKQPIVDTSAES

SEQ ID NO: 244632 - DNA, 5127 bp, Artificial Sequence
  derived and/or modified sequence
atggccgccatcggcagaggcagaagcctgaagaacctgagagtgagaggcagaaacgacagcggcgaggagaacgtgcccctggacctgaccagagagcccagcgacaacctgagagagatcctgcagaacgtggccagactgcagggcgtgagcaacatgagaaagctgggccacctgaacaacttcaccaagctgctgtgcgacatcggccacagcgaggagaagctgggcttccactacgaggacatcatcatctgcctgagactggccctgctgaacgaggccaaggaggtgagagccgccggcctgagagccctgagatacctgatccaggacagcagcatcctgcagaaggtgctgaagctgaaggtggactacctgatcgccagatgcatcgacatccagcagagcaacgaggtggagagaacccaggccctgagactggtgagaaagatgatcaccgtgaacgccagcctgttccccagcagcgtgaccaacagcctgatcgccgtgggcaacgacggcctgcaggagagagacagaatggtgagagcctgcatcgccatcatctgcgagctggccctgcagaaccccgaggtggtggccctgagaggcggcctgaacaccatcctgaagaacgtgatcgactgccagctgagcagaatcaacgaggccctgatcaccaccatcctgcacctgctgaaccaccccaagaccagacagtacgtgagagccgacgtggagctggagagaatcctggccccctacaccgacttccactacagacacagccccgacaccgccgagggccagctgaaggaggacagagaggccagattcctggccagcaagatgggcatcatcgccaccttcagaagctgggccggcatcatcaacctgtgcaagcccggcaacagcggcatccagagcctgatcggcgtgctgtgcatccccaacatggagatcagaagaggcctgctggaggtgctgtacgacatcttcagactgcccctgcccgtggtgaccgaggagttcatcgaggccctgctgagcgtggaccccggcagattccaggacagctggagactgagcgacggcttcgtggccgccgaggccaagaccatcctgccccacagagccagaagcagacccgacctgatggacaactacctggccctgatcctgagcgccttcatcagaaacggcctgctggagggcctggtggaggtgatcaccaacagcgacgaccacatcagcgtgagagccaccatcctgctgggcgagctgctgcacatggccaacaccatcctgccccacagccacagccaccacctgcactgcctgcccaccctgatgaacatggccgccagcttcgacatccccaaggagaagagactgagagccagcgccgccctgaactgcctgaagagattccacgagatgaagaagagaggccccaagccctacagcctgcacctggaccacatcatccagaaggccatcgccacccaccagaagagagaccagtacctgagagtgcagaaggacatcttcatcctgaaggacaccgaggaggccctgctgatcaacctgagagacagccaggtgctgcagcacaaggagaacctggagtggaactggaacctgatcggcaccatcctgaagtggcccaacgtgaacctgagaaactacaaggacgagcagctgcacagattcgtgagaagactgctgtacttctacaagcccagcagcaagctgtacgccaacctggacctggacttcgccaaggccaagcagctgaccgtggtgggctgccagttcaccgagttcctgctggagagcgaggaggacggccagggctacctggaggacctggtgaaggacatcgtgcagtggctgaacgccagcagcggcatgaagcccgagagaagcctgcagaacaacggcctgctgaccaccctgagccagcactacttcctgttcatcggcaccctgagctgccacccccacggcgtgaagatgctggagaagtgcagcgtgttccagtgcctgctgaacctgtgcagcctgaagaaccaggaccacctgctgaagctgaccgtgagcagcctggactacagcagagacggcctggccagagtgatcctgagcaagatcctgaccgccgccaccgacgcctgcagactgtacgccaccaagcacctgagagtgctgctgagagccaacgtggagttcttcaacaactggggcatcgagctgctggtgacccagctgcacgacaagaacaagaccatcagcagcgaggccctggacatcctggacgaggcctgcgaggacaaggccaacctgcacgccctgatccagatgaagcccgccctgagccacctgggcgacaagggcctgctgctgctgctgagattcctgagcatccccaagggcttcagctacctgaacgagagaggctacgtggccaagcagctggagaagtggcacagagagtacaacagcaagtacgtggacctgatcgaggagcagctgaacgaggccctgaccacctacagaaagcccgtggacggcgacaactacgtgagaagaagcaaccagagactgcagagaccccacgtgtacctgcccatccacctgtacggccagctggtgcaccacaagaccggctgccacctgctggaggtgcagaacatcatcaccgagctgtgcagaaacgtgagaacccccgacctggacaagtgggaggagatcaagaagctgaaggccagcctgtgggccctgggcaacatcggcagcagcaactggggcctgaacctgctgcaggaggagaacgtgatccccgacatcctgaagctggccaagcagtgcgaggtgctgagcatcagaggcacctgcgtgtacgtgctgggcctgatcgccaagaccaagcagggctgcgacatcctgaagtgccacaactgggacgccgtgagacacagcagaaagcacctgtggcccgtggtgcccgacgacgtggagcagctgtgcaacgagctgagcagcatccccagcaccctgagcctgaacagcgagagcaccagcagcagacacaacagcgagagcgagagcgtgcccagcagcatgttcatcctggaggacgacagattcggcagcagcagcaccagcaccttcttcctggacatcaacgaggacaccgagcccaccttctacgacagaagcggccccatcaaggacaagaacagcttccccttcttcgccagcagcaagctggtgaagaacagaatcctgaacagcctgaccctgcccaacaagaagcacagaagcagcagcgaccccaagggcggcaagctgagcagcgagagcaagaccagcaacagaagaatcagaaccctgaccgagcccagcgtggacttcaaccacagcgacgacttcacccccatcagcaccgtgcagaagaccctgcagctggagaccagcttcatgggcaacaagcacatcgaggacaccggcagcacccccagcatcggcgagaacgacctgaagttcaccaagaacttcggcaccgagaaccacagagagaacaccagcagagagagactggtggtggagagcagcaccagcagccacatgaagatcagaagccagagcttcaacaccgacaccaccaccagcggcatcagcagcatgagcagcagccccagcagagagaccgtgggcgtggacgccaccaccatggacaccgactgcggcagcatgagcaccgtggtgagcaccaagaccatcaagaccagccactacctgaccccccagagcaaccacctgagcctgagcaagagcaacagcgtgagcctggtgccccccggcagcagccacaccctgcccagaagagcccagagcctgaaggcccccagcatcgccaccatcaagagcctggccgactgcaacttcagctacaccagcagcagagacgccttcggctacgccaccctgaagagactgcagcagcagagaatgcaccccagcctgagccacagcgaggccctggccagccccgccaaggacgtgctgttcaccgacaccatcaccatgaaggccaacagcttcgagagcagactgacccccagcagattcatgaaggccctgagctacgccagcctggacaaggaggacctgctgagccccatcaaccagaacaccctgcagagaagcagcagcgtgagaagcatggtgagcagcgccacctacggcggcagcgacgactacatcggcctggccctgcccgtggacatcaacgacatcttccaggtgaaggacatcccctacttccagaccaagaacatccccccccacgacgacagaggcgccagagccttcgcccacgacgccggcggcctgcccagcggcaccggcggcctggtgaagaacagcttccacctgctgagacagcagatgagcctgaccgagatcatgaacagcatccacagcgacgccagcctgttcctggagagcaccgaggacaccggcctgcaggagcacaccgacgacaactgcctgtactgcgtgtgcatcgagatcctgggcttccagcccagcaaccagctgagcgccatctgcagccacagcgacttccaggacatcccctacagcgactggtgcgagcagaccatccacaaccccctggaggtggtgcccagcaagttcagcggcatcagcggctgcagcgacggcgtgagccaggagggcagcgccagcagcaccaagagcaccgagctgctgctgggcgtgaagaccatccccgacgacacccccatgtgcagaatcctgctgagaaaggaggtgctgagactggtgatcaacctgagcagcagcgtgagcaccaagtgccacgagaccggcctgctgaccatcaaggagaagtacccccagaccttcgacgacatctgcctgtacagcgaggtgagccacctgctgagccactgcaccttcagactgccctgcagaagattcatccaggagctgttccaggacgtgcagttcctgcagatgcacgaggaggccgaggccgtgctggccaccccccccaagcagcccatcgtggacaccagcgccgagagctag

SEQ ID NO: 244633 - DNA, 9543 bp, Artificial Sequence
  derived and/or modified sequence
gtttccggtgttgtgactgaaacccgtcaatatggcggcgatcggccgcggccgctctctgaagaacctccgagtacgagggcggaatgacagcggcgaggagaacgtcccgctggatctgacccgagaaccttctgataacttaagagagattctccaaaatgtggccagattgcagggagtatcaaatatgagaaagctaggccatctgaataactttactaagcttctttgtgatattggccacagtgaagaaaaactgggctttcactatgaggatatcataatttgtttgcggttagctttattaaatgaagcaaaagaagtgcgagcagcagggctacgagcgcttcgatatctcatccaagactccagtattctccagaaggtgctaaaattgaaagtggactatttaatagctaggtgcattgacatacaacagagcaacgaggtagagaggacacaagcacttcgattagtcagaaagatgattactgtgaatgcttccttgtttcctagttctgtgaccaactcattaattgcagttggaaatgatggacttcaagaaagagacagaatggtccgagcatgcattgccattatctgtgaactagcacttcagaatccagaggtggtggcccttcgaggtggactaaacaccatcttgaaaaatgtgatcgattgccaattaagtcgaataaatgaggccctaattactacaattttgcaccttcttaatcatccaaagactcgacagtatgtgcgagctgatgtagaattagagagaattttagcaccctatactgattttcactacagacatagtccagatacagctgaaggacagctcaaagaagacagagaagcacgatttctagccagtaaaatgggaatcatagcaacattccgatcatgggcaggtattattaatttatgtaaacctggaaattctgggatccagtctctaataggagtactttgcataccaaatatggaaataaggcgaggtctacttgaagtgctttatgatatatttcgtcttcctctacctgttgtgactgaggagttcatagaagcactactcagtgtagatccagggaggttccaagacagttggaggctttcagatggctttgtggcagctgaggcaaaaactattcttcctcatcgtgccagatccaggccagacctcatggataattatttggcactgatactctctgcatttattcgtaatggacttttagagggtctagttgaagtgataacaaacagtgatgatcatatctcagttagagctaccatccttttaggagagcttttacatatggcaaacacaattcttcctcattcacatagccatcatttacactgcttgccaaccctaatgaatatggctgcatcctttgatatccccaaggaaaagagactgcgagccagtgcagccttgaactgtttaaaacgcttccatgaaatgaagaaacgaggacctaagccttatagtcttcatttagaccacattattcagaaagcaattgcaacacaccagaaacgggatcagtatctccgagttcagaaagatatatttatccttaaggatacagaggaagctcttttaattaaccttagagatagccaagtccttcaacataaagagaatcttgaatggaattggaatcttatagggaccattcttaagtggccaaatgtaaatctaagaaactataaagatgaacagttacacaggtttgtacgaagactactttatttttacaagcccagcagtaaattatatgccaacctggatctggattttgccaaggccaaacagctcacggttgtaggttgccagtttacagaatttcttcttgaatctgaagaggatgggcaaggctacttagaagatctagtaaaggatattgttcagtggctcaatgcttcatctggaatgaaacccgaaagaagtcttcaaaataatggtttattgaccacccttagtcaacactactttttatttattggaacactttcttgccaccctcatggagttaaaatgctggaaaaatgcagtgtatttcagtgtctccttaatctttgctccttgaaaaaccaagatcacttgctaaaacttactgtttctagcttggactatagcagagatggattggctagagtcatcctttccaaaattttaactgcagctactgatgcctgcagactctatgcaacaaaacatttaagggtattattgagagctaatgttgaattctttaataattggggaattgagttgttagtgacccagctacatgataaaaacaaaacgatttcctctgaagctcttgatatcctcgatgaagcatgtgaagacaaggccaatcttcatgctctcattcagatgaaaccagcgttatcccaccttggagacaagggtttgcttctcctgctgagatttctctccattccaaaaggattttcctatctgaatgaaagaggttatgtagcaaaacaattggaaaagtggcacagggaatacaactccaaatatgttgacttgattgaggaacaactcaatgaagcacttactacttaccggaagcctgttgatggtgataactatgttcgtcggagtaaccaaagattacagcgtcctcacgtctacctgcctatacacctttatggacaactagtacaccataaaacaggctgccatttgttggaagtacagaatattattacagaactctgtcgtaatgttcgtacaccagatttggataagtgggaagaaattaaaaaactgaaagcatctctttgggccttgggaaatatcggctcatcaaattggggtctcaatttgctacaggaagaaaacgtgattccagatatactaaaacttgcaaaacagtgtgaagttctttccatcagagggacctgtgtatatgtacttgggctcatagctaaaaccaaacaaggctgtgatattctaaaatgtcacaactgggatgctgtgaggcatagtcgcaaacatctgtggccagtggttccagatgatgtggaacaactctgtaatgaactttcatctatcccaagcactctaagtttgaactcggagtcaaccagctctagacataatagtgaaagtgaatctgtgccatcgagtatgttcatattggaggatgaccggtttggcagcagctctactagcacatttttccttgatatcaatgaagatacagagccaacattttatgaccgatctggacccataaaggataaaaattcattccctttctttgcttctagtaaacttgtgaagaatcgtatcttaaattcgcttactttgcctaacaaaaaacatcgtagtagcagtgatccaaaaggagggaaattatcatctgaaagtaagacaagcaacaggcgaatcagaacacttacggagcccagtgttgattttaatcatagtgatgattttacacccatatccactgtacagaaaacattacaattagagacttcatttatggggaataagcacattgaagacactggtagtacaccaagcattggagaaaatgacttaaaattcaccaagaattttggtacagagaatcacagagaaaatacaagccgagagaggttagtagtagaaagttcaacgagctcacatatgaagatacgtagccaaagtttcaatacagacactacaacaagtggcataagttcaatgagctcaagtccttcacgagagacagtaggtgtagatgctacaactatggacacagactgtggaagcatgagtactgtggtaagtactaaaactattaagacaagccactatttgacgccacagtctaaccatctgtctctctccaaatcaaattcggtgtccctggtgcctccaggttcttctcatacgcttcctagaagagcacagtcccttaaagcaccctctattgctacaattaaaagtctagcagattgtaactttagttacacaagttctagagatgcttttggctatgctacactgaaaagactacagcaacaaagaatgcatccatccttatctcactctgaagctttggcatctccagcaaaagatgtgctatttactgataccatcaccatgaaggccaacagttttgagtccagattaacaccaagcaggttcatgaaagccttaagttatgcatcattagataaagaagatttattgagtcctattaatcaaaataccctgcaacgatcttcctcagtgcggtccatggtgtccagtgccacatatgggggttcagatgattacattggtcttgctctcccggtggatataaatgatatattccaggtaaaggatattccctattttcagacaaaaaacataccaccacatgatgatcgaggtgcaagagcatttgcccatgatgcaggaggtcttccatctggaactggaggtcttgtaaaaaattcttttcacttgctacgacagcagatgagtcttacggaaataatgaattcaatccattcagatgcctctctgtttttagaaagtacagaagacactggactacaggaacatacagatgataactgcctttattgtgtctgtattgaaattctgggtttccagcccagcaaccaactgagtgcaatatgtagtcattcagactttcaagatattccatattctgattggtgtgagcagactatccataatcctttagaagtggttccctctaagttttcggggatttctggatgcagtgatggggtgtctcaagaaggctcagctagcagcaccaaaagcacagaattgttactaggtgttaaaacaattccagatgatacaccaatgtgccgtatactccttcgcaaagaagttctaagattagtcattaatttgagtagttcagtttcaactaaatgtcatgagactgggcttttaacaattaaggagaagtatcctcaaacatttgatgacatatgcctttactctgaggtttcccatttgctgtcacactgcacattcagacttccgtgtcggaggttcatacaagaattatttcaagatgtacagtttctacaaatgcatgaagaagcagaggctgtgttggcaacaccaccaaagcaacctatagttgatacatctgctgaatcctgacctcatatttatgatggatatagatacatactatatatattcatatttgtggatttcctaaaagcctcagaaaatacgactgactaggcagcaaagacaggagtatcttctgtacactgttccgcagttactggtacatgaacagttggaactgctgactttcctaaccaaaacaacttccttctctcctttgttgagccttttgaggggttcatgattcattaccacagttttaagagtttcagttaccattgtatgcaagagccaagcactgaatacctacataggttttctattttctttcattttaaaagcataatgacagtggaacaataatgggatatgcagaagcacccttcacaagttatttctgaatgatttttagggtaaataatacagatgccttgtttgttaactaacttgtggaaagcaggaatcagtgtctctaaggctgcatcctattaccacaatggggtgtgctataactgctggtattagagagggaactttggccctttcacgtttttcttaatgtttgtaacactacttcagaggtttataacctcaaagcagaagaagagcctcaacaacccgggacttataagttatttttatgttactagacttgcataaagattcttgttttccaactcttcattttgttgcaatgtgttattacaggatatatgaaccaattaaggtttttcactacagttcttgaataaaatttaaaaatcattttttattttaattaaaaatatttcccatttatagaatgcatatatttgcaatggacttccactttcatcaactttccatctcatcgctttaaacaggaacttgaacaagcactgttagtttagacctaaaggataggaaagcattaaataatactttggatctcctgaggaaaagataagtttgcttgcaatttacacattccatggggaaagaagagccatatttccttaaaaaaaacattaataaagcttgttattgagaaaaattgtagtgaaaagccttaagtaccaaattttaaagcagcagtaacttaatttttatatcagtgtttttgttttgcacaaactaaatgcagtggtaggtgggtttatgagtatattaattgcctttatccatttgtgaagttaagttgatgagggcaaggtttttgtttgtttaatttgtatatgtctaaaggtatttggaactttttacaggaattaaacatatatgcaaatttgtatataaaaatagcatggccatcatttgaatgcttgtaaatgaaaggattatcttttttgagatctatatataaatagaaatagaaaatccagctggactgattaggattcttttttaattcatttgtgtataacatttttattacaattacacatcagttttgacacagtcatagcaacattaatattttcccatgatgcagatcctttttgtaatgggcttgttctttgagatctctgtaaagaaccctgtgaactagaaaacataactcacagagatacttttttaaaaaatttatttactggaactgaaagttccagttgggatgaagcatttcatctcacttcataacacctctttgactgcacttcagtgaattgttcttatgtgcactgtgtagcaacttacattataacaaagcagataagggctgtaagctgctgcttatgttgaaaagtggttcttcagattttctctcataaaatccagttgaagataaataatttttttatactttatcactgaacccaagtgtttatttaaatgtcaacagtacttctaagaacgttgcctgtcatcgtggtctttggtcttggataactaaactgcctttccagagaaccaaatgtcagagttactagaccaaatagtggttaaaacctccaaaggaagtaatgtaatcttattcataatgggattaacatattttagacattcattttaaacactacctcagttaatatagagtataaaaatctgtggtttaatccctcaaaagttaacagtaattttttttttgtcttacacacacacacaccccctcccccaccatcactatccctgtaccctcaccttggtcatctatcctgaaataaggcttagttagtattggcctgaatgttttgtgtttttttttttgttttttttttttactgttactttgaaaaatatgtatgtataccttatcatatctgcctatatcacttactttggggagatactcagagctttgtggttatcagtatactaaaaaaaaaaaaaagtctacgcttaaatttatagtgctatttggtttctccatgatttcactgacaggtctaatacattttctttgagtacttgtttgtaaaaagtagactttatggtgaaaaatacatgcagtgccaagtgattaacttaagtgtttaaaaatattaaattatagcagaagaggttaggaatgatatcagcagtaatagaaataattgagaaaatcatctataaataatagatattacagactatagaataccaaaataatgtcaatactgtagtttttaaagattttaggattaatcttagtccatataaatttgtactattggtaattattgaataattgggaggaatctgggcagttgtgctggttgtaaactatgaatttctaatcgtaaagtgaattgttatttctaattgaactttttttcaagaacagatttcagcctcacatactaagtaaatactgataaataaggaaattagaaatttagtattcataattaaatatgctctaaaatttcctatacttttatttcctgtttattcttaggtagattggaagggggaaacagtctgttctccctaattaaattttttctaataacgattagtagaatatggacattctatatgacagtgacattaaaagaggctctttggaagtatatacattattaacataatgtgtacaagtccttttgaaatgacaactttaatgggtttcagctcttttatctagagcttgagataattcaagctgagtttttcagggcatatcacaacggccaagtgttcagcagtgggatatcaatgcttatttacattttcctactgctatttatataaaatgttattccattcagaggatgccttttatccccacattaaagcacagatcattaagcaataaaaaccaaattgtctgtcattcaaattataactgcagttatttttgcatggtaagagtgaggtgctaattttgtgtgagatgaactttgtaaactactttgggaaatgttctttggaagtaaggttttttctcctttagtcttatgcttccacttttgtctcagattcacaatccattaaaacatggggaaaaaagaaaaggtaaaattgagagacttttgttagaggagctatttggaatgaaccaacatttcagattttccaaaatgtaagttaggaagtctccattgtctctgcattaacaaaatacactgttactatcttaatctcaagagtgtcattacagtgagaatctcatttaaaagcataccagtgaaattaatagcagtgcttatcaaagaacactgaaatctgtgagaatctttctaggagcattcttttcttcttttagttccaagttccagggtatttttcattcctagtaggtttatatgactcacagaatgtggacttttttcctgtttggagtatttttgtaatgtaagtatcggatagctgcaccacagcatgcataaattgcacattttgttttactttctttatagaatatttaatttcaaaaatataatttatgccaaaaaaagcatacctttcaattttgctacttggttgatttagcacaaaatgcaaagtcttggggcagagagggggagtgaaaaaaattttataggtaattgttacaaaaatacctgtcagaaaccctaaagctgcattgtaaaacaaatggtgtaaactagttttgaaaagtggtaaggaattgtgaaaaaaatctcagacttaatgctctctaaccacatgagtttcttcttttttatttagtaatacgctgctacatatttggaggttctggtgtttgtaggtcactgaacagacattgaaatctgatttatattgtataactgtaacatagaaagaaaaagtatttatattttttctgtaagaatatttcattgagttgtgtataatttaaataagatttgtccccaaatggttttgctcaccttgattttttttgttgtgattttcttgtttttgtataatgtgtatagtttatgtcaagggcattaaaagcctcctgaagcataatcttatcaaagggatacattgttaataaaatgtacttaaaattcttaaac

SEQ ID NO: 244634 - DNA, 5127 bp, Artificial Sequence
  derived and/or modified sequence
atggcggccatcggccgggggagaagccttaagaatctgcgtgttaggggacgaaacgatagcggtgaggaaaatgtaccactggatctcacaagggagccgagtgataaccttcgcgaaatcttacagaatgttgcccgtctgcagggggtctccaacatgcggaaactggggcacctaaacaatttcacgaagctcctgtgcgatatcggccacagcgaggagaagctcgggttccattacgaagacatcataatttgtcttagactcgcccttttgaatgaagctaaagaggtacgcgccgccggactcagagcgctgcggtatctgatacaggattcctctattctgcagaaagttctaaaactgaaggtagactacctgatagctaggtgcattgatatccaacaaagtaacgaggttgaacgtactcaggctctccgccttgtacgcaagatgatcactgtgaacgccagtctgtttccaagttcagttaccaactcactcatcgccgtgggcaacgacgggctgcaggagcgcgaccgtatggtccgggcctgcatcgctattatctgtgaacttgctctgcagaaccctgaagtggtggcccttagaggaggtctgaacacaatcctgaagaacgttatagattgtcagttatctaggatcaacgaggcattgattactacaatcctgcacttgctgaatcaccctaagacccgtcagtacgtgcgcgccgatgtcgagctcgaacggattctagcaccttacactgatttccactaccgacatagcccagacaccgccgagggccagctcaaagaggatcgtgaggccagatttttagcctccaagatgggcatcattgcgacttttcggagttgggccggcattattaatttgtgcaaaccaggaaactccggaatccagtctctgatcggtgtgctctgcatccctaacatggaaatacgcagaggtttactggaagttctgtacgacatcttccgactgcccttgccggtggtgacggaagaatttatagaggccctgctctcagttgatccgggccgctttcaggactcgtggagactctccgatggctttgtggccgcggaggctaaaacaattttgccacatcgtgctaggtccaggccagacctgatggataattacctggcactgatcctcagtgcattcatccggaatggactccttgaggggctggtggaggttatcaccaactctgacgatcacatctccgtcagagctaccattctcttaggagagttacttcacatggccaatacaattctaccccacagccattcgcaccacctgcattgtctgcccactctgatgaacatggccgcctcgttcgacattcctaaggagaagcggctgcgggcttcagccgccctgaattgcttaaaacgattccacgagatgaagaagcgtggccccaagccatactctctgcacttggaccacatcattcaaaaagccatcgcaacacatcagaagcgagaccaatatttgcgcgtgcagaaggatatttttattctcaaagacactgaggaggcactgctcattaatctgcgggattcccaggttttgcagcacaaagagaatctggagtggaactggaaccttataggcacaatactcaagtggcccaatgttaacctcagaaattacaaagacgagcaactgcaccggtttgtgcgccggctactctatttttataaaccttcatcaaagctctatgccaacctggatctagatttcgcaaaggccaaacagctgactgtggtggggtgccagtttaccgaatttctccttgaaagtgaggaagacgggcaggggtacctggaggatttagtgaaggacattgtccagtggctgaatgcttcctctggcatgaagccagaacgaagcttacagaataatggtctgctaacgactctgagccagcattattttttgttcatcgggactctatcttgccatccccacggtgttaaaatgctggaaaagtgctctgtgttccagtgccttctgaacctttgttcattaaaaaaccaggatcatctcttgaagttaacagttagcagcctcgattacagtagggacggtttggcgcgcgtcattcttagcaagatcctgacggccgccaccgatgcctgtcgcctgtatgccaccaagcaccttagagtgctcctccgtgccaatgtggagttcttcaataactggggcatcgaattactggtcacacaattgcacgataagaataagacaatttcaagcgaggccctggacatcctggacgaggcctgtgaggataaggccaatctgcatgccttaatacagatgaaaccagccttgtcccatctcggagacaagggcctccttctgctcctacgcttcctctccatacctaaaggattcagctacctgaacgagagaggctatgtcgccaagcagttagaaaaatggcatagagagtacaatagcaagtacgtcgacctgatagaggaacaacttaatgaagccctaactacttatcgcaaacccgtcgacggcgataattacgtgcgcaggtctaaccagagattacagaggcctcacgtctatttgcctatccacctgtatggacagctcgttcaccataagaccggatgtcacctcctcgaggtgcaaaacataattactgaactgtgcagaaatgtgcgcactccagacctcgacaagtgggaagagattaagaagctcaaagcatcactctgggcgctggggaacatcgggtcgtctaattggggactcaacctgctgcaggaagagaatgtcatcccagatattctcaaactggcaaagcaatgcgaggtgttgagtatcagagggacctgtgtctacgtgctgggactgatcgccaagacaaagcagggatgcgacattctgaagtgtcacaactgggatgctgtcagacatagccgtaagcacttatggcctgtcgtgcctgatgatgtggagcaactgtgtaatgaactgtctagcatcccaagtaccctttctttaaactctgaaagcactagctctcgccacaactccgaatctgagagcgtccccagttccatgtttatactcgaggatgatagatttggttcgagcagcacatctacatttttccttgatataaatgaagatacagagccaaccttctatgataggtccggccccattaaagataagaactcctttcctttttttgcctcttccaagctggtgaaaaatagaattctcaatagcttaacccttcccaataagaagcaccgttccagtagcgacccaaagggcgggaaactctcctcggaaagtaagactagcaatcggaggatcagaacacttacagagccgagtgtggattttaaccattctgacgactttacccctatctccactgtacaaaagacattgcaactcgagacatcctttatgggcaacaagcacattgaggataccggctccacgccgtcaataggtgaaaacgatctgaagttcacgaaaaattttggaaccgagaatcaccgggaaaacacatccagggaacgcttggtcgttgagtctagtacttccagccatatgaaaatccgcagtcagagctttaatactgataccaccacgagcggcatttcttctatgtctagctctccatctagagagacggtcggcgtcgacgctaccaccatggacacagactgtgggtccatgagtaccgtcgtatccacgaagacgatcaaaacatctcactacctgacacctcagagtaatcatctctcattgagcaaaagcaactctgtctctctggtgcctcccggctcatctcacacgctgcctcgaagggctcagagtctgaaagcccccagtatcgcaactattaagtctctggcagattgtaatttctcgtataccagttctcgagatgcctttggctatgccaccctcaagcgactacagcagcagcgcatgcatccgtctctcagccacagcgaggcactagcctctcctgccaaggatgtgctgttcaccgacacaataacgatgaaggcaaactccttcgagtcccggcttacacccagcagatttatgaaggccctgtcctatgcttccctcgacaaagaggaccttctgtctccaattaatcagaatactctccagagaagcagttctgttaggagtatggtcagtagtgcaacatacggaggcagtgacgactacatcgggcttgccctccctgtcgacatcaatgacatcttccaggtgaaggatatcccttattttcagaccaagaatataccaccacatgatgatcggggagcccgggcattcgcccacgatgccggcggattgcccagcggaacgggagggctcgtgaagaattcatttcacctcctgagacagcagatgtcattgacggagattatgaattctatacacagtgatgcgagcttatttctcgagtctactgaagacactggcttgcaagaacacacggatgacaactgtctgtattgcgtctgtatcgaaattctcgggttccagccttccaaccagctctctgctatctgctcccattcagatttccaggacatcccctacagcgattggtgcgagcagaccatccataacccactggaggtcgtgccatccaagttctcaggaataagcggctgctctgacggtgtttcccaggagggcagcgcctcctccaccaagtctactgagcttttgttgggagtgaaaacaatccctgatgatacaccgatgtgtcggatactgttgaggaaagaggtgcttcggcttgtgatcaacctgtctagttcagtttctacaaagtgccatgagactggactgctgacgattaaggagaagtacccacagacctttgatgatatttgtctgtactccgaagtgagccacctgctgtctcactgtacctttcggttaccttgcaggcgcttcattcaggaactctttcaggacgtgcaatttctgcagatgcacgaagaagcagaagccgtgctcgccacgcccccaaaacagcctattgtagataccagcgcggaaagctag

SEQ ID NO: 244635 - DNA, 5127 bp, Artificial Sequence
  derived and/or modified sequence
atggccgccatcggccggggccgcagcctgaagaacctgcgggtgcggggcagaaatgattctggagaggagaatgtgcccctggacctgacccgggagcccagcgacaacctgcgggagatcctgcagaatgtggcccggctgcagggcgtgagcaacatgaggaagctgggccacctgaacaacttcaccaagctgctgtgtgacatcggccacagcgaggagaagctgggcttccactatgaggacatcatcatctgcctgcggctggccctgctgaatgaggccaaggaggtgcgggccgccggcctgcgggccctgcgctacctgatccaggacagcagcatcctgcagaaggtgctgaagctgaaggtggactacctgattgcccgctgcatcgacatccagcagagcaatgaggtggagaggacccaggccctgcggctggtgaggaagatgatcaccgtgaatgccagcctcttccccagctctgtgaccaacagcctgattgctgtgggcaatgatggcctgcaggagcgggacaggatggtgcgggcctgcatcgccatcatctgtgagctggccctgcagaaccctgaggtggtggccctgcggggcggcctgaacaccatcctgaagaatgtcatcgactgccagctgagccgcatcaatgaggccctgatcaccaccatcctgcacctgctgaaccaccccaagacccggcagtatgtgcgggcagatgtggagctggagcgcatcctggccccctacacagacttccactaccgccacagcccagacacagctgagggccagctgaaggaggaccgggaggcccgcttcctggccagcaagatgggcatcatcgccaccttccgctcctgggccggcatcatcaacctgtgcaagccaggcaacagcggcatccagagcctgattggagtgctgtgcatccccaacatggagatccggcggggcctgctggaggtgctgtatgacatcttccggctgcccctgcctgtggtgacagaggagttcatcgaggccctgctgtctgtggaccccggccgcttccaggacagctggaggctgagtgatggctttgtggccgctgaggccaagaccatcctgccccaccgggcccggagcaggccagacctgatggacaactacctggccctgatcctgagcgccttcatcagaaatggcctgctggagggcctggtggaggtgatcaccaacagtgatgaccacatctctgtgcgggccaccatcctgctgggggagctgctgcacatggccaacaccatcctgccccacagccacagccaccacctgcactgcctgcccaccctgatgaacatggccgccagctttgacatccccaaggagaagaggctgcgggccagcgctgccctgaactgcctgaagcgcttccacgagatgaagaagaggggccccaagccctacagcctgcacctggaccacatcatccagaaggccatcgccacccaccagaagagggaccagtacctgcgggtgcagaaggacatcttcatcctgaaggacacagaggaggccctgctgatcaacctgcgggacagccaggtgctgcagcacaaggagaacctggagtggaactggaacctgattggcaccatcctgaagtggcccaacgtgaacctgaggaactacaaggatgagcagctgcacagatttgtgcggcggctgctgtacttctacaagcccagcagcaagctgtatgccaacctggacctggactttgccaaggccaagcagctgactgtggtgggctgccagttcacagagttcctgctggagagtgaagaagatggccagggctacctggaggacctggtgaaggacatcgtgcagtggctgaatgccagcagcggcatgaagccagagaggagcctgcagaacaacggcctgctgaccaccctgagccagcactacttcctgttcatcggcaccctgagctgccacccccatggagtgaagatgctggagaagtgcagcgtcttccagtgcctgctgaacctgtgcagcctgaagaaccaggaccacctgctgaagctgactgtgagcagcctggactacagcagagatggcctggcccgggtcatcctgagcaagatcctgacagctgccacagatgcctgccgcctgtatgccaccaagcacctgcgggtgctgctgcgggccaacgtggagttcttcaacaactggggcatcgagctgctggtgacccagctgcatgacaagaacaagaccatcagcagcgaggccctggacatcctggatgaggcctgtgaggacaaggccaacctgcacgccctgatccagatgaagccagccctgagccacctgggggacaagggcctgctgctgctgctgcgcttcctgagcatccccaagggcttctcctacctgaatgaaagaggctacgtggccaagcagctggagaagtggcaccgggagtacaacagcaaatatgtggacctgattgaggagcagctgaatgaggccctgaccacctacaggaagcctgtggatggagacaactacgtgagaagaagcaaccagaggctgcagaggcctcatgtgtacctgcccatccacctgtatggccagctggtgcaccacaagacaggctgccacctgctggaggtgcagaacatcatcacagagctgtgcagaaatgtgaggaccccagacctggacaagtgggaggagatcaagaagctgaaggccagcctgtgggccctgggcaacatcggcagcagcaactggggcctgaacctgctgcaggaggagaatgtcatcccagacatcctgaagctggccaagcagtgtgaggtgctgagcatccggggcacctgtgtgtatgtgctgggcctgattgccaagaccaagcagggctgtgacatcctgaagtgccacaactgggatgctgtgcgccacagcaggaagcacctgtggcctgtggtgcctgatgatgtggagcagctgtgcaatgagctgagcagcatccccagcaccctgagcctgaacagcgagagcaccagcagccgccacaacagcgagagcgagagcgtgcccagctccatgttcatcctggaggatgaccgcttcggcagcagcagcaccagcaccttcttcctggacatcaatgaagacacagagcccaccttctatgacaggagcggccccatcaaggacaagaacagcttccccttctttgccagcagcaagctggtgaagaaccgcatcctgaacagcctgaccctgcccaacaagaagcacaggagcagcagtgaccccaagggcggcaagctgagcagcgagagcaagaccagcaacagacgcatccgcaccctgacagagcccagcgtggacttcaaccacagtgatgacttcacccccatcagcacagtgcagaagaccctgcagctggagaccagcttcatgggcaacaagcacatcgaggacaccggcagcacccccagcatcggggagaatgacctgaagttcaccaagaactttggaacagagaaccaccgggagaacaccagccgggagcggctggtggtggagagcagcaccagcagccacatgaagatccgcagccagagcttcaacacagacaccaccaccagcggcatcagctccatgagcagcagccccagccgggagaccgtgggcgtggatgccaccaccatggacacagactgtggctccatgagcacagtggtgtccaccaagaccatcaagaccagccactacctgaccccccagagcaaccacctgagcctgagcaagagcaacagcgtgtccctggtgcccccaggcagcagccacaccctgccccggcgggcccagagcctgaaggcccccagcatcgccaccatcaagagcctggccgactgcaacttctcctacaccagcagcagagatgccttcggctacgccaccctgaagaggctgcagcagcagaggatgcaccccagcctgagccacagcgaggccctggccagccctgccaaggatgtgctcttcacagacaccatcaccatgaaggccaacagctttgagagccggctgacccccagccgcttcatgaaggccctgtcctatgccagcctggacaaggaggacctgctgagccccatcaaccagaacaccctgcagaggagcagctctgtgcgctccatggtgtcctctgccacctacggcggcagtgatgactacatcggcctggccctgcctgtggacatcaatgacatcttccaggtgaaggacatcccctacttccagaccaagaacatcccccctcatgatgacagaggagcccgggcctttgcccatgatgctgggggcctgcccagcggcaccggcggcctggtgaagaacagcttccacctgctgcggcagcagatgagcctgacagagatcatgaacagcatccacagtgatgccagcctcttcctggagagcacagaggacaccggcctgcaggagcacacagatgacaactgcctgtactgtgtgtgcatcgagatcctgggcttccagcccagcaaccagctgagcgccatctgcagccacagcgacttccaggacatcccctacagcgactggtgtgagcagaccatccacaaccccctggaggtggtgcccagcaagttcagcggcatcagcggctgcagtgatggagtgtcccaggagggcagcgccagcagcaccaagagcacagagctgctgctgggcgtgaagaccatcccagatgacacccccatgtgccgcatcctgctgaggaaggaggtgctgcggctggtgatcaacctgagcagctctgtgtccaccaagtgccacgagaccggcctgctgaccatcaaggagaagtacccccagacctttgatgacatctgcctgtacagcgaggtgagccacctgctgagccactgcaccttccggctgccctgccgccgcttcatccaggagctgttccaggatgtgcagttcctgcagatgcatgaggaggccgaggccgtgctggccaccccacccaagcagcccatcgtggacaccagcgctgagagctag

SEQ ID NO: 244636 - DNA, 5127 bp, Artificial Sequence
  derived and/or modified sequence
atggccgccatcggccggggccggagcctgaagaacctgcgggtgcgcggccggaacgactcaggtgaagagaatgtaccactcgaccttacaagagaacctagtgataatttacgggagatcctgcaaaacgtggctaggttgcagggggttagtaacatgaggaaattaggacatctcaacaattttacaaaattgctttgtgacatcggccattccgaagagaagctgggttttcattacgaggatatcatcatctgcctccgccttgctctgctgaatgaagccaaggaagtgcgcgctgcgggtctgcgcgccctccgctacctgatccaggattcatctattctccagaaggttctcaaactgaaggtagactaccttatcgcacgctgcatcgatatccagcaatctaacgaagtggaaagaacacaagctctgagacttgtgcgcaagatgattactgtgaacgctagtttgtttccctcttctgttacaaacagtttaatcgcagtcgggaatgatggcctgcaggaacgggatcgcatggtgcgggcgtgcatcgccatcatctgcgaacttgccctgcagaacccagaagttgtggcactgagaggcggtctgaacactatactgaagaatgtgattgactgtcagttatctcggatcaacgaggcgctgatcactaccatcttgcatctcctgaatcatccaaagacgagacagtacgtgagggccgatgtcgaactggagcgaattcttgccccctacaccgattttcattatcggcatagtcctgacactgcagaaggacagcttaaggaggaccgggaggccaggttcctcgcgagtaaaatggggattatcgctacctttaggtcatgggcgggcataatcaatctgtgtaagccgggtaacagcggaatccagagcctgatcggagtgctgtgtatccccaatatggagatccgccgggggttgctggaagtcttatacgatatcttccggctacccctgcctgtggtgaccgaggaatttatcgaagcactgctgtcagtcgatcccggaagattccaagactcatggcgattgtcagacggattcgtagctgcggaagctaagactatcctgccacacagagctagatcaagacctgatcttatggacaattacctggcattgatcctgagtgccttcatcagaaacggactgctcgagggcctggtcgaagtgattaccaatagtgacgaccacatatctgtgcgggcaactatcctgcttggggagctccttcacatggcaaatactattctgcctcattcacatagccatcacttgcactgcctcccaaccttgatgaatatggccgcatcctttgatatacccaaagagaaacggctgagggcatccgccgctttgaactgccttaagcgctttcacgaaatgaaaaagcgcggccccaaaccatacagccttcatctcgatcacattattcagaaggctatcgccacgcaccagaaacgcgaccagtacttacgcgttcagaaggatatatttatattgaaggatactgaggaagcattgttaattaacttacgggacagccaagtgttgcaacataaggaaaatctcgagtggaattggaaccttataggcaccatcctgaagtggcccaacgtcaatctgcggaattacaaggatgagcaactccacaggttcgttagacggctactgtatttctacaaaccttcctccaagctgtatgcaaacttggacctcgactttgccaaagccaaacagctcacagtagtggggtgccagtttaccgagtttctactggaaagcgaggaagacggccagggctacttggaggacttggtcaaggacatcgttcaatggctgaacgccagctccggcatgaagcctgagagaagcctacagaacaatggactgcttaccacgctgtcacaacattactttctgtttattggtaccctgtcatgccatcctcacggtgtgaaaatgttggagaagtgctctgtattccagtgtctgcttaatctgtgcagcctgaagaaccaagatcatctcctgaagctgacagtttcgagtctggattatagtcgggatgggttggccagggttattctctctaaaatactgactgccgccaccgatgcttgcagactatacgccaccaaacacctacgggtcctgctgagggctaatgtcgaattcttcaataattgggggattgagctcctcgttacccaactccacgacaagaacaaaactatctcgtcggaggcccttgatatcctcgacgaggcttgcgaagacaaagcaaacctccatgccttaatccagatgaaaccagccctgtcacaccttggcgacaaaggtcttctgctgctgctgcgcttcttgtccatcccgaagggcttctcttatttgaacgagcgtggctacgtggccaagcagctggaaaagtggcatcgagagtacaactctaagtacgtggacctcatcgaggagcagctcaatgaggccctgactacctaccgaaagccagtggatggcgacaactacgttagaagatcaaatcagcgacttcagcggccacacgtgtatctgccaatacatttgtacggccagctggtgcatcacaaaactgggtgccatctgctggaagtccagaacattatcaccgagctctgcaggaatgtccggacgccagacctggacaagtgggaagaaatcaagaaactcaaagcatctctgtgggccctcggtaatattgggagctcgaattggggacttaaccttctgcaggaagagaatgtaatcccggacatccttaagctggcaaagcagtgtgaagttcttagtattcgggggacctgcgtctatgttcttgggctaatcgctaaaacaaaacaagggtgcgacattctcaaatgtcataactgggatgctgtacggcacagtaggaagcatctctggcccgttgttcctgacgatgtcgaacagctctgcaacgaactgtcctccattccttccactctaagtttgaactccgagtcaacatcttcccggcacaacagcgaatccgagtccgttccatcaagcatgtttattcttgaggacgataggtttggcagctcgtcaacgtcaacctttttcctggatatcaacgaagatacagagccgacattttacgataggagtgggccaatcaaggacaagaacagttttccattttttgctagcagcaaattggtaaaaaatagaatcctaaattctctaactctgcccaataaaaaacaccggagttcaagtgaccccaagggaggtaagctgtccagcgagtccaaaacctccaatcggagaatccggacactaactgagcccagcgtggacttcaaccacagcgatgattttacccctatctctaccgtccaaaaaactctgcagctcgagacaagctttatgggaaataaacacatcgaggacaccggtagtaccccaagcataggagagaacgacctgaaattcacaaagaatttcggaaccgagaaccatcgggagaatacttctcgcgaacggctcgttgtcgagtcatccacgagctcccacatgaaaatccgcagtcagagtttcaacacagacacgactacatctggtatttccagcatgtcttccagcccctcaagggagacagttggggtggacgctacaaccatggataccgactgcggatctatgtctacggtcgtgagcacgaagactataaaaacatcccattacttaacccctcagtcgaaccacctctcactgtccaagagcaatagcgttagtctagtcccccctggctcttctcatacactacccaggcgcgcacagagtctgaaagctccgtctattgccaccatcaaaagcctcgctgattgtaacttctcttacaccagcagcagggacgcctttggatatgcaactctgaagaggttgcagcagcagagaatgcacccatctctctcacactcggaggccctggccagcccggccaaggatgtgctgttcaccgatacgattaccatgaaggcaaattcttttgagtccaggctgacaccgtcccgatttatgaaggccctctcatatgcctcactcgataaggaagacctgctctcacctatcaatcagaacacactgcaaagatccagtagcgtccgaagcatggtgtcttctgcaacttacggtggaagcgacgactacatcgggctggccctgcccgtagatatcaacgacatcttccaggtcaaggatattccttacttccaaaccaagaacatccctccgcacgacgaccgaggcgctagagccttcgcccacgacgccggtggcctgcccagtgggacaggagggctggtaaagaattcttttcacctgctgcggcagcagatgtctctgaccgagattatgaacagtatacattccgatgcatccctatttctcgaaagcactgaggacaccggactccaggaacatacggatgataactgcctgtactgtgtgtgcatcgagattttaggcttccagccttctaatcaactgtcagccatatgttcacattctgacttccaggatatcccatactcagattggtgtgagcaaacgatccacaacccactggaagtggtgccctcgaagtttagcggaattagtggatgctcagatggggtttcccaagaggggagcgcgtcaagtaccaagtccactgagctcctgctgggagtaaaaactataccggacgacactcccatgtgccgtattctcttaaggaaagaggtgctacgcttagtcatcaatctgagctccagcgtttctaccaagtgccacgagacaggactactgacaataaaggagaaatacccccaaacatttgacgacatatgtctgtatagcgaggtctctcacctgctcagccactgtacttttaggcttccatgcaggcggtttattcaagagctgttccaggatgttcagttcctgcaaatgcatgaggaagccgaggccgtgctcgcgacaccgccaaagcagccaatcgtcgataccagtgctgagtcctag

SEQ ID NO: 244637 - DNA, 5126 bp, Artificial Sequence
  derived and/or modified sequence
atggccgctattggaagggggagatcactcaaaaacctgagggtccggggtagaaatgactcaggagaagagaacgtaccgctcgacctcaccagagaaccatccgacaacctccgagaaatactccagaatgtggccaggctccagggcgtgagcaatatgcggaagcttggccatctaaacaattttaccaagctactctgtgacattgggcactctgaggaaaagcttggatttcactatgaagatatcataatctgtctacgacttgcattgctgaatgaggctaaagaggtccgagccgcaggcctgagggcccttcgctacttgatacaagatagcagcatactccagaaggtgcttaaactgaaagtagattacctcattgctcggtgtattgatatccagcagtccaatgaagtggagaggacacaagctctgcgcttggtgcggaagatgattactgtgaacgcatcgttattcccatcatctgtgaccaacagtttgatcgctgtcggtaacgatggactgcaagagcgcgaccgaatggttcgtgcctgcatagcaataatatgtgaactcgctctccagaatcccgaggtcgttgcactgcgaggtggcctcaatacgattcttaaaaacgttattgattgtcagctgtccagaatcaacgaggctctgatcaccaccattctccacctgctcaaccaccctaagaccaggcagtatgtgagggcagacgtagagctggaacgtatactcgcaccttacaccgacttccattaccgccatagcccagatacggctgaaggccagttgaaggaagacagggaggcaaggttcctggcgagtaagatgggaatcatcgctacctttcgctcctgggccggtatcataaacctctgtaagcccggtaatagcggcatccaatctttgataggcgtcctatgtattcccaacatggagatccgacgtggactgctcgaggtcctctatgatatatttcggttgcctctgcccgtagtgactgaagagttcatagaggctctgttgagtgtcgaccccggtcgttttcaggattcatggcgcctttctgatgggtttgtagctgcggaggccaaaactatcctaccacatagggccaggagccgtccagatctgatggataattacctggccctcatcctgagcgcctttatccgtaacgggctattggaaggcctggtggaggttatcaccaatagtgacgaccatatcagtgtaagagccacgatcctcctgggagaactattgcatatggccaacacaattctcccccacagtcacagccaccatctgcactgtctgccaaccttgatgaacatggcagcatctttcgatattccaaaagagaaacgcctgcgggcatccgcggcactcaattgtctcaaacgtttccacgagatgaagaaacgaggtcctaagccttacagtctgcatctggaccatatcatccaaaaggcaattgctacccatcagaaacgagaccagtatttgcgggtgcagaaagatattttcatactcaaagataccgaggaggcccttctgataaacctgagagattcgcaggtcctgcagcacaaagaaaatttagagtggaattggaacctaatagggactattctaaaatggcccaatgttaatctgagaaactacaaggacgagcagttgcatagattcgtaagaaggttattatatttctacaaaccgagctccaagctttatgctaatctcgatctagatttcgccaaagccaaacaacttactgtggtgggatgtcagttcaccgagttcctcctcgaatcggaggaggatgggcaaggatacctagaagatctggtcaaagacatcgtgcagtggctgaatgcctcgtcagggatgaagccagaaagaagcctgcagaataacggactcctgaccacgctctcccagcactattttctgtttattggcacattgtcttgtcacccacatggggtgaaaatgttggagaagtgttccgtgttccagtgcctcctgaatttgtgctccctaaaaaaccaggaccacctactgaaactgacagtgtcatccctggactactcaagggatggcctggctcgcgttatcctgagcaaaattctgaccgctgcaacagacgcatgccgcttgtatgcgaccaaacacctgcgagtgctcttacgggctaacgtggagtttttcaacaactggggcatcgagttactggttactcagctgcatgataagaataagacaatctcatctgaagctctggatattctggatgaggcttgtgaggataaggctaatctgcacgcactgatccaaatgaagccagccctctcccacctcggagacaagggtttgctccttctgctcagatttctgtccatcccaaaaggattcagctacctgaacgagcggggttatgtcgcaaagcaactggaaaaatggcaccgggagtacaactctaagtacgtcgacctgatcgaggagcaactgaacgaagccctgacgacatatcgaaaacctgttgacggagataactacgtgcgcaggtctaaccagcggttgcagaggccacatgtgtacctcccaatccatctgtacggccagttggtacaccacaagacggggtgccacttattagaggtccagaacatcattacagagctttgccgcaatgttcgaacacctgacctggacaaatgggaggaaattaaaaaacttaaagcatccctgtgggccctcggaaacattggatcctcgaattggggactcaacctgcttcaggaggagaacgtgattcctgatattttaaaactcgccaaacagtgcgaagtgttgtccattcggggaacctgtgtctacgttctgggactcatcgcaaagacaaagcaaggatgtgacatactgaaatgtcacaactgggacgcagtaaggcactcccgcaagcatctctggcccgtggttccggatgatgtcgagcagctctgcaacgagctctcctcgatcccctctactttgagtcttaacagcgagtctacatcctcccgccataactctgaaagtgaatcagtgcccagtagcatgttcatcctggaagatgatcgcttcggaagctcgtccacctctacattctttctggatattaatgaagacacagagcccaccttctatgatcgcagtgggcctataaaagataaaaattctttcccgtttttcgcatcctcaaagctcgttaagaacagaatactcaacagtctcacactgcccaataagaaacaccggtcaagctcagatcccaaggggggaaagctatcttccgagtctaagaccagcaaccgtcgtattcggactctgactgaaccatcagtcgacttcaaccatagcgatgattttactccgattagtacggtacagaaaacgctacagctcgaaacatcgttcatgggaaacaaacacattgaagacacaggctcaacgccttcgattggggaaaacgatcttaaattcaccaagaattttgggaccgaaaatcaccgtgaaaatacatctagagagcggctcgtggtagagtcaagcacttcttcccatatgaaaattcgatcccagagctttaacacagacactacgacttctggaatctcgagcatgtcctctagccctagtcgcgaaacagtcggcgtcgacgccactaccatggataccgactgtggcagtatgtcaactgtggtttccactaagactatcaaaaccagccactacttgaccccacagagcaaccacctgagcttgtccaagtctaactccgtaagtttggtccctcctgggtcctcgcataccctgcctaggcgggcacagagcctcaaggcaccttccattgctactataaagtcactcgcagattgcaattttagctatactagctctcgcgacgcatttggatatgcgaccctcaaacggctacaacagcagcgcatgcatccttcactgtcacattccgaggcccttgcaagtcctgcaaaagacgtgttgttcactgacactatcaccatgaaggccaacagctttgaatcacgactgacgccctcccgttttatgaaggccctgtcatacgcctctctcgacaaagaggatcttctgtccccgattaaccagaatacccttcaacggtctagttctgtgagatctatggtgagctctgcgacatacggcggatctgatgactatatagggctggccttgcccgttgacattaatgacatcttccaggttaaggacattccttatttccagactaaaaacattcctcctcatgatgaccgaggcgcaagggcatttgcccacgatgctggaggactgccctctggcaccgggggactagtcaaaaatagctttcatttactccgccagcagatgtccctcaccgagataatgaatagtattcattctgatgccagcctgtttctggagtctacagaggacaccggcctccaagagcacaccgatgacaactgcctatactgcgtctgtatcgagatcctaggctttcagccctccaaccagctcagcgccatctgctctcacagcgactttcaggacattccatattctgactggtgcgagcaaaccatccataatccactcgaggtcgtgccgagtaagtttagcggaatttcgggctgttcggatggggtgagtcaggaggggagcgcgagcagcacaaagtctacagaacttctgctaggtgtcaagacaatcccagatgatactcccatgtgtcgcattctcttgcggaaagaagtcctgaggttggtcatcaatctttcttctagcgtgtccaccaaatgtcacgagaccggactgctgaccatcaaggaaaaatatcctcagacatttgacgacatctgcctctatagcgaagtgagccacctgctgagtcactgcaccttccggctcccgtgtagacggtttattcaggaactgttccaggatgtgcagtttctccaaatgcacgaggaggcagaggccgtgctcgctactcccccaaagcaacccatcgtggatacctccgcagagtccta

SEQ ID NO: 244638 - protein, 207 aa, Artificial Sequence
  derived and/or modified sequence
MMHQIYSCSDENIEVFTTVIPSKVSSPARRRAKSSQHLLTKNVVIESDLYTHQPLELLPHRGDRRDPGDRRRFGRLQTARPPTAHPAKASARPVGISEPKTSNLCGNRAYGKSLIPPVPRISVKTSASASLEATAMGTEKGAVLMRGSRHLKKMTEEYPALPQGAEASLPLTGSASCGVPGILRKMWTRHKKKSEYVGATNSAFEAD

SEQ ID NO: 244639 - DNA, 624 bp, Artificial Sequence
  derived and/or modified sequence
atgatgcaccagatctacagctgcagcgacgagaacatcgaggtgttcaccaccgtgatccccagcaaggtgagcagccccgccagaagaagagccaagagcagccagcacctgctgaccaagaacgtggtgatcgagagcgacctgtacacccaccagcccctggagctgctgccccacagaggcgacagaagagaccccggcgacagaagaagattcggcagactgcagaccgccagaccccccaccgcccaccccgccaaggccagcgccagacccgtgggcatcagcgagcccaagaccagcaacctgtgcggcaacagagcctacggcaagagcctgatcccccccgtgcccagaatcagcgtgaagaccagcgccagcgccagcctggaggccaccgccatgggcaccgagaagggcgccgtgctgatgagaggcagcagacacctgaagaagatgaccgaggagtaccccgccctgccccagggcgccgaggccagcctgcccctgaccggcagcgccagctgcggcgtgcccggcatcctgagaaagatgtggaccagacacaagaagaagagcgagtacgtgggcgccaccaacagcgccttcgaggccgactag

SEQ ID NO: 244640 - DNA, 3513 bp, Artificial Sequence
  derived and/or modified sequence
atttctgaaatgagaaagggaattgctggtaccaaaattcacgtttcctttttggtggaaattctccagccaagcttggcgctaacagagtaggcgatttcacttcgtcgtcacctcacaaaaggcttccaaattcactgcggcagacaccgcaaaataaaaatgttaaatacatcctagctgggaggggattgaagcctccaggctcaatcaaaggtttgcaataataggattcatttaaaaaaaaaaaaaaaaaaaaggacagatgggtttagaaaatgttgcagtgaagactggaacgagatgagctcatagcaccagcctgtcttttgtggacccgcacaatgatccctgagccagactggattaggatgcctcgcgactaggggtccagagacagaggcctccagttcccaggcacttcgggaagaggaggctgaaatgatgcatcagatttacagctgcagtgacgagaacatagaagttttcaccaccgtgattccttccaaggtatccagtccagccagaagaagagccaaaagctctcagcacctcttgaccaagaatgtggtgatcgagtcggacctgtacacgcaccagcccctggagctgctgccccaccgcggagaccgcagggaccctggcgaccgccgcaggtttgggcggctccagaccgcgcggccgcccacagcccacccggccaaagcctctgccagacccgtggggatttctgaacccaaaacatcaaatctgtgtgggaatcgagcatatggaaaatctctgataccgccagtgccccggatctcagtgaaaacttcagcctctgcctcattggaggcgacagccatgggcacagagaagggagctgttctgatgagaggatccagacatctcaagaagatgactgaagagtatccagcccttccccaaggagcagaagcctctctaccactgacaggcagtgcttcctgcggcgtccccggcatcctccggaaaatgtggacaaggcacaagaagaagtctgaatatgtgggagccaccaacagcgcctttgaggccgactaaaggtgaccctcttcaagtgccctgtgttggccaaggttccccggacaagaggaaaaaccttcaggattgaaactgagccacacgcacctctgctagtagctggtccaaacccattatcctccctcactcattgattaccctgggatagggcacaggaaagaaatgtccctcgaaggcaatataaaactgccccttcttagaattgctaaagccattggtctgaaagtgactttgggaggtcataaagtttgtatctctatctttaagcaaaaaattaaactttcccagctcattttaaagacctccaaggaaggaaaaaagcaattcctctgtcttccttgtgagttgctctaaagtgtgtgattttctagtgtaaatggactttgaggcacttgtaaacacaatggttcttactgtttccattactgcatttacttcaccttgacaaggtacaattttcaaggacaaagcactatatataaagttagtagttctaatatccacttgagagtatactcaagattgattttcatggccatttggcatgattgcatgaattctctattcttttatgtgcagtttttctatagaaaaacattaaaagttaaatgttgactgctaatgttttctgaagtggcatagtctagtggaatcaataatcccttgctttggtataataatttgaacttttgaaagtgctttctcatccgttatctcttatcttcacaaaacccctgtggaagaaagcacaattattcccaatctgcagagggggaaatggaggccttcagagattacaggaccagataccaggtagtggaaccagacagcaggtccttaacttctctccagtggactccctgctttgcctactctctagcaactgacttggggaagtttttaaatggtgagagtgtgtctctgggggcaaccattgaaaagaagactctgatatgttggaacaagtaagggatttgaatgaaatacactattatatcttatatgttagcttgaaccagaaaaagttgacatttttgtaggtcaaaaacaattgagcatcaatttcatatggttcaacctcatatatgatactatgcttttcttctatcagtgaaaatgtcatcatcaattccattgtcaacattagtagccttaaaacaataacataataataatgatgataatgatacttatagctatcatctattaaatgcctatgtttcaggcatgatactaggcaatttatatatatcatcctaatctttctaaaaactctattaggtggccctatccacttaatagatgccaattcaaagaggttaaatgattagactaaggcacctaacttatgtgagtgtcaggcttcaatgcctgtgttagagctactccttcacacaaaatagttcagaacatagagaaggaccaaggttaataaatgattttcatcccaaacactaaacatgattgatgggtagaggctgcccgaagtactgtgtaaagatggaatctgagatagaagaatgctgtggtcaattagtaattcttgcccatggagggattagtgacacatgccttgtatatttgtcatctgtggcctaaactctgcccctgaaggtttgttttctaattcagaggtttaaattaatctagcccacttaataaaaccagagatcctatgggaaatttagcctaagacagtgctggaaattgccatatgttgatacaaagaagtgtttggccacattacaggtctcagactcaactgctatgtgtgactgccgctctgtgcctatgtcttgcttttttgctgagttccctatttccatatctccaggtgaatccatgagaagcgagagggtggctgagaggcctgggcctctgggattccaccttgctatctctgctcttcaaccattgttttagactctgaacaccagatcctcatatctgaaagtgatttggagacctgggcatcaagtgctcttttaagaaggggctatcccagaggactgttcaaaagtctcattcaatagagatgttggagtccagaacaaagttagggagcaaaccagtaacctatgctggtcgtaacagaggatcctacaattacgtttgtttttaagacaggattttgctgtgttgcccagactggtctcaaactcctgggttcaagagatccatcctcccacctcagtctcctgaaagctgggatgacaggcacatgccaccacacctagctccttacaaccatttattttaacttatttcatttataactggtatctttcatttgtatgtggcagctagagatttatataggatggaagtaatttatttttaatttaaatatttcatgttgaactgtttgccttgtatggaacattttacttggccaattcaaataaaaataaagtcagctttgtttgtgacattcatgcaccaccataa

SEQ ID NO: 244641 - DNA, 624 bp, Artificial Sequence
  derived and/or modified sequence
atgatgcaccagatctactcctgcagcgatgaaaacatagaggtattcacaacggtgatcccttctaaagtgtcctcccccgcccggagaagggccaagtcaagccagcatctcctgacaaagaatgtggtaatagaatccgacctctatacccaccagcccctggaattgctgccgcacagaggagacaggcgcgacccgggggaccgcaggcggtttggccgcctgcagaccgcaagacccccgaccgcgcatccagcgaaagcctccgccaggccagttgggatttctgagcccaagacatctaatctgtgtggaaaccgcgcgtacggtaaatcactgatcccgcctgttccacggatcagcgtgaagacatccgcaagcgccagcttggaagcaacagctatgggaaccgaaaaaggagcagttttgatgaggggcagcagacacctgaaaaagatgaccgaagaatatcctgctcttccacaaggggcagaagcatccttacccctcacagggtctgcctcctgcggtgtccccggtattctgagaaagatgtggacacgtcacaagaaaaagagtgaatatgtgggtgctaccaacagcgcctttgaagcagattag

SEQ ID NO: 244642 - DNA, 624 bp, Artificial Sequence
  derived and/or modified sequence
atgatgcaccagatctacagctgcagtgatgaaaatattgaggtgttcaccaccgtcatccccagcaaggtgagcagccctgcccggcggcgggccaagagcagccagcacctgctgaccaagaatgtggtgattgaaagtgacctgtacacccaccagcccctggagctgctgccccacagaggagaccggcgggaccccggggacagaagaagatttggccgcctgcagacagcccggcccccaacagcccacccagccaaggccagcgcccggcctgtgggcatcagcgagcccaagaccagcaacctgtgtggcaacagagcctacggcaagagcctcatcccccctgtgccccgcatctctgtgaagaccagcgccagcgccagcctggaggccacagccatgggcacagagaagggagctgtgctgatgaggggcagccgccacctgaagaagatgacagaggagtacccagccctgccccagggcgctgaggccagcctgcccctgaccggcagcgccagctgtggggtgcccggcatcctgaggaagatgtggaccaggcacaagaagaagtcagaatatgtgggcgccaccaacagcgcctttgaggccgactag

SEQ ID NO: 244643 - DNA, 624 bp, Artificial Sequence
  derived and/or modified sequence
atgatgcaccagatctacagctgcagcgacgagaacatcgaggtgtttaccacggtgattccaagtaaggtctctagccccgcccggaggagggccaaatccagccaacatctgttgaccaagaacgttgtgattgagtctgatctctatacgcaccaacctctggagctactcccgcaccggggtgaccggcgcgaccctggcgaccggaggaggtttggcaggcttcaaactgcgcgaccacctacggcgcatcctgctaaagcaagtgctagaccagtgggaattagcgagcccaaaacctccaacttatgtgggaatcgggcgtacggcaagtccttaataccaccggtcccacggatctccgttaagacatctgcttcagccagcctcgaagcaacagcaatgggcactgaaaagggagccgtcctgatgcgggggagtcgacaccttaagaaaatgactgaagagtatcctgctttgccacagggggcagaggctagtctgccactcacaggcagcgcctcatgcggagtacctggaatcctgaggaaaatgtggacaaggcacaagaagaagtcagagtacgtcggcgctaccaacagcgcgtttgaggcggactag

SEQ ID NO: 244644 - DNA, 624 bp, Artificial Sequence
  derived and/or modified sequence
atgatgcaccaaatctactcctgcagcgacgaaaacattgaggtgtttacgacagtgatcccaagtaaagtgtctagcccagcaagacggagagcaaaatcctcccagcacctcctgacaaagaatgtggttatcgaaagcgatctgtatacccaccagcccctcgagctcctgcctcacagaggcgatcgccgtgaccccggtgacaggcggaggtttggcagactgcaaaccgcaagacccccaactgcccacccggctaaagctagtgcacgacctgtcgggatttctgagcccaaaacttccaatttatgtggaaacagggcttacggaaagtccttgatcccacccgtgccgcgaatcagtgtgaaaacctctgcgtccgcctctttggaggccaccgcgatggggacagagaagggggctgtgctgatgcgtggttcccgacacctgaaaaaaatgacggaggaatatccagctctgccgcagggcgctgaggcatctctgcccctgaccgggagtgcaagttgtggcgtccctgggattctgagaaagatgtggactaggcacaaaaagaaaagcgagtacgtgggggcaacgaattccgcttttgaggccgactag

SEQ ID NO: 244645 - protein, 725 aa, Artificial Sequence
  derived and/or modified sequence
MATAATTTTTTTATVALTTSWDNATGRPTAEPDPILDNYVLLVVVMSLFVGGTLVVLSGVLLLCKRCWDVHQRLNRAMEEAEKTTTTYLDNGTHPAQDPDFRGEDPECQDAETERFLSTSSTGRRVSFNEAALFEQSRKTQDKGRQGGWQSTAAGASGMGGGRALMARCCRRYTLTEGDFHHLKNARLTHLHLPPLKIVTIHECDSGEASSATTPHPATSPKATLAIFQPPGKALTGRSVGPSSALPGDPYNSAAGATDFAEISPSASSDSGEGTSLDAGTRSTKAGGPGAAAGPGEAGPGSGAGTVLQFLTRLRRHASLDGASPYFKVKKWKLEPSQRAASLDTRGSPKRHHFQRQRAASESTEQEEGDAPQEDFIQYIARAGDAVAFPHPRPFLASPPPALGRLEAAEAAGGASPDSPPERGAGSAGPEQQQPPLEPDAERDAGPEQAQTSYRDLWSLRASLELHAAASDHSSSGNDRDSVRSGDSSGSGSGGAAPAFPPPSPPAPRPKDGEARRLLQMDSGYASIEGRGAGDDTEPPAAPARPRSPRAWPRRPRRDYSIDEKTDALFHEFLRHDPHFDDTPAAARHRARAHPHARKQWQRGRQHSDPGARAAPALAGTPAPPAGAARPARAPLRRGDSVDGPPDGRTLGGAGDDPAIPVIEEEPGGGGCPGSGLCVLPSGSVLDKLAAGLDERLFPPRLAEPVVATPALVAAAPTSPDHSPA

SEQ ID NO: 244646 - protein, 447 aa, Artificial Sequence [sequence omitted]

SEQ ID NO: 244647 - DNA, 2453 bp, Artificial Sequence
  derived and/or modified sequence
gcgcagcgggggcggcgggccggggaccgggcagcaccgggcgcgcggagcgggcgcgccgccaacgcggtcacgtgcgcggcccctcctctcgcgccggcctcccccgcgccgcgctctccattcataaattctccgcctgctccgcggccaccgggcgccggagccagccgcgagcgccacgcagccgcccgccgccagcccgccgcccatgggccgctcgtcccggcgctgagggccctcctccccagttcagaatgcagcccacagccaccatggccacagccgccaccaccaccaccaccaccactgccacagtagccctgacgacgtcgtgggacaatgccactggacgccccacggcagagccagaccccatcctggacaactacgtgctgctggtggtggtgatgtcgctgttcgtggggggcacgctggtggtgttgtctggcgtcctgctcctctgcaagcgctgctgggacgtccaccagcgcctcaacagggccatggaggaagcggagaagaccaccaccacctacctggacaacggcacccacccagcccaagaccccgacttccggggagaggaccccgagtgccaggatgcggagaccgaacgcttcctgtccaccagctccacgggccgccgggtctccttcaatgaggcggcgctgtttgagcagagccgcaagacgcaggacaagggccggcagggtggatggcagagcacggcagctggggcatcgggcatgggaggtgggcgggctctgatggccagatgctgtcgcaggtacacactgacggagggggacttccaccacctgaagaatgcccggctcacgcacctgcacctgccgcccctcaagattgtcaccatccacgagtgtgactcaggcgaggccagctcagccaccacgccccacccggccacctctcccaaggccactctggccatcttccagcccccggggaaggccctcaccggccgctctgtgggccccagctccgccctgccaggtgacccctacaactcagccgcgggcgccactgacttcgcagagatcagcccctcggcatctagcgactctggggaaggcacctcgttggatgccggtaccaggagcaccaaggctggagggcccggggctgcagcagggcctggggaggcgggcccgggatccggggcaggtaccgttctgcagttcctcacccgcctgcgccgccatgccagcctggatggggccagcccctatttcaaggtcaagaagtggaagctggagcccagccagcgggcagccagtctggacacgagaggttcccccaagcggcaccacttccagcggcagcgggcagccagtgagagcacggagcaggaggagggggatgccccccaggaggacttcatccagtacattgcccgggcgggcgacgccgtggccttcccgcacccccgcccctttctggccagcccgccccctgctctcggcaggctagaggcggccgaggcagcgggaggagcgagccccgattcccccccggagcgcggcgcgggcagcgcggggcctgagcagcagcagccgccactggagccggacgccgagcgggacgcgggccccgagcaggcccagaccagctaccgcgacctgtggagcctgcgcgcctcgcttgagctgcatgcggccgcctcggaccacagcagcagcggcaacgaccgcgactcggtgcgcagcggcgacagctcgggctcaggctccgggggcgcggcgcccgccttcccgccgccctccccgcccgcgccgcggcccaaggacggcgaggcgcgccggctgctgcagatggacagtggctacgccagcatcgagggccgcggcgcaggcgacgacaccgagccacctgccgcgcccgcccggccccgcagcccgcgcgcctggccccgccgcccgcgccgcgactacagcatcgacgagaagacggacgcgctgttccacgagttcctgcgccacgacccgcacttcgacgacacgccggctgccgcgcgacaccgcgcccgcgcgcacccgcacgcccgcaaacagtggcagcgtggccggcagcacagcgaccccggcgcccgcgcggccccggccctggccggaaccccggcaccgcctgccggcgcggcccgacccgcgcgtgcgcccttgcggcgcggcgacagcgtggacggcccgcccgacggtcgcaccctgggcggcgccggcgacgaccccgccatccccgtcatcgaggaggagccgggcggcggggggtgccccggctcgggcctgtgcgtcctaccatccgggtcggtgctggacaagctggcggctggcctcgacgagagactctttccgccgcgcctcgccgagcccgtcgtggcgactcccgcgttggtcgccgccgcccccacgtcccccgaccacagcccggcctaa

SEQ ID NO: 244648 - DNA, 2178 bp, Artificial Sequence
  derived and/or modified sequence
atggccaccgccgccaccaccaccaccaccaccaccgccaccgtggccctgaccaccagctgggacaacgccaccggcagacccaccgccgagcccgaccccatcctggacaactacgtgctgctggtggtggtgatgagcctgttcgtgggcggcaccctggtggtgctgagcggcgtgctgctgctgtgcaagagatgctgggacgtgcaccagagactgaacagagccatggaggaggccgagaagaccaccaccacctacctggacaacggcacccaccccgcccaggaccccgacttcagaggcgaggaccccgagtgccaggacgccgagaccgagagattcctgagcaccagcagcaccggcagaagagtgagcttcaacgaggccgccctgttcgagcagagcagaaagacccaggacaagggcagacagggcggctggcagagcaccgccgccggcgccagcggcatgggcggcggcagagccctgatggccagatgctgcagaagatacaccctgaccgagggcgacttccaccacctgaagaacgccagactgacccacctgcacctgccccccctgaagatcgtgaccatccacgagtgcgacagcggcgaggccagcagcgccaccaccccccaccccgccaccagccccaaggccaccctggccatcttccagccccccggcaaggccctgaccggcagaagcgtgggccccagcagcgccctgcccggcgacccctacaacagcgccgccggcgccaccgacttcgccgagatcagccccagcgccagcagcgacagcggcgagggcaccagcctggacgccggcaccagaagcaccaaggccggcggccccggcgccgccgccggccccggcgaggccggccccggcagcggcgccggcaccgtgctgcagttcctgaccagactgagaagacacgccagcctggacggcgccagcccctacttcaaggtgaagaagtggaagctggagcccagccagagagccgccagcctggacaccagaggcagccccaagagacaccacttccagagacagagagccgccagcgagagcaccgagcaggaggagggcgacgccccccaggaggacttcatccagtacatcgccagagccggcgacgccgtggccttcccccaccccagacccttcctggccagccccccccccgccctgggcagactggaggccgccgaggccgccggcggcgccagccccgacagcccccccgagagaggcgccggcagcgccggccccgagcagcagcagccccccctggagcccgacgccgagagagacgccggccccgagcaggcccagaccagctacagagacctgtggagcctgagagccagcctggagctgcacgccgccgccagcgaccacagcagcagcggcaacgacagagacagcgtgagaagcggcgacagcagcggcagcggcagcggcggcgccgcccccgccttccccccccccagcccccccgcccccagacccaaggacggcgaggccagaagactgctgcagatggacagcggctacgccagcatcgagggcagaggcgccggcgacgacaccgagccccccgccgcccccgccagacccagaagccccagagcctggcccagaagacccagaagagactacagcatcgacgagaagaccgacgccctgttccacgagttcctgagacacgacccccacttcgacgacacccccgccgccgccagacacagagccagagcccacccccacgccagaaagcagtggcagagaggcagacagcacagcgaccccggcgccagagccgcccccgccctggccggcacccccgccccccccgccggcgccgccagacccgccagagcccccctgagaagaggcgacagcgtggacggcccccccgacggcagaaccctgggcggcgccggcgacgaccccgccatccccgtgatcgaggaggagcccggcggcggcggctgccccggcagcggcctgtgcgtgctgcccagcggcagcgtgctggacaagctggccgccggcctggacgagagactgttcccccccagactggccgagcccgtggtggccacccccgccctggtggccgccgcccccaccagccccgaccacagccccgcctag

SEQ ID NO: 244649 - DNA, 2178 bp, Artificial Sequence
  derived and/or modified sequence
atggccactgccgctacaacaactactacaactacagctactgtggcgctcaccacatcctgggataacgctaccgggaggcctacagcagaacccgatcctattcttgataattatgtcttgctggtagtcgttatgtcccttttcgtcggcggcaccctggtggtgctgagcggagtcttgctactctgcaagaggtgctgggatgtgcatcagcggcttaatcgagcgatggaggaagccgagaagacaactacaacctacctggacaacgggacgcatcccgcccaggaccctgactttcggggtgaagacccagagtgccaagatgcggaaactgagcgctttttatctacctcctcgaccgggcggcgggttagcttcaacgaggccgctctattcgaacagtcacgcaaaacccaggacaagggccggcaggggggttggcaatctaccgctgccggtgcctcaggcatgggtggaggacgcgctcttatggcacggtgttgcagacgctatacactgaccgagggcgattttcaccacctcaaaaatgctaggctgacccatctccacctgcctcctctcaagatcgtaaccatccatgagtgcgacagcggcgaggcatcctccgcaacaacaccacatccagctaccagtccgaaggccacgctggccattttccagccacccggcaaggctctgactgggagatcagttgggccctcttcagctctgcctggcgacccctataatagcgctgcaggagctacagattttgcagaaatttctccttcagctagttccgatagcggggaaggaacgagtttagacgccgggacgcggagcacaaaagccgggggtcccggagccgctgcaggaccaggggaagcaggtcctggatccggtgccggtaccgtgctccagttcctgacgaggctccggcggcacgcaagcctggatggtgcatctccatacttcaaagtcaaaaaatggaaacttgagccaagccagcgagctgcatccctggacacccgggggtccccaaagaggcaccactttcagcggcagcgggccgcttccgagtctaccgaacaggaagaaggagacgctcctcaggaggatttcatacagtacatagcacgcgccggagacgccgtggcctttccgcacccacgtccgttcctcgccagcccaccaccagctctgggccgccttgaggcagctgaggccgccggtggcgcatcacccgatagccctccagaacggggagccggatctgcaggtcccgaacaacaacagccgcctctcgaaccagacgccgagagggacgccggaccagagcaggcgcagacttcatacagagacctctggtctctgagggcatcactggagctccacgctgctgcgtcggaccatagcagttccgggaacgatcgggactctgtaaggagcggggactcatccggaagtgggagtggcggagcagcgcccgcattcccgcctccatcaccccccgccccacggcccaaggacggcgaggctcggcgcctgttacagatggattccggctacgccagcattgaagggaggggggcgggagacgatactgagcctccggcagcccctgccagacctagatcccctcgagcctggcccaggagacctaggcgagattactcgattgatgagaagactgatgcactttttcacgaattccttaggcacgacccccacttcgacgatactcctgctgcagcccgacatcgggccagagcacatcctcacgcgaggaaacagtggcagaggggtaggcagcacagtgaccctggcgcgcgggccgcccccgctcttgccggcactcccgccccacccgcaggcgcagctcgaccagcaagggcacccctgcgacgcggggacagcgtggatggccctccagatgggcggactttgggcggagccggtgacgaccctgctattcccgtaattgaggaagagccgggcggcggaggatgcccaggctctgggctgtgcgtactgccgtctggttcagttctggacaaactcgcagccggtctggacgagagattgtttcctccccgtctggccgagccagtggttgccactccagccctggtcgccgccgcccctacttcaccagaccacagccctgcatag

SEQ ID NO: 244650 - DNA, 2178 bp, Artificial Sequence
  derived and/or modified sequence
atggccacagctgccaccaccaccaccaccaccacagccaccgtggccctgaccacctcctgggacaatgccaccggccggcccacagctgagccagaccccatcctggacaactacgtgctgctggtggtggtgatgagcctgtttgtgggcggcaccctggtggtgctgagcggcgtgctgctgctgtgcaagcgctgctgggatgtgcaccagaggctgaacagagccatggaggaggccgagaagaccaccaccacctacctggacaatggcacccacccagcccaggaccctgacttccggggggaggaccctgagtgccaggatgctgagacagagcgcttcctgagcaccagcagcacaggccggcgggtgtccttcaatgaagctgccctgtttgagcagagcaggaagacccaggacaagggccggcagggcggctggcagagcacagctgctggggccagcggcatgggcggcggccgggccctgatggcccgctgctgccgccgctacaccctgacagaaggagacttccaccacctgaagaatgcccggctgacccacctgcacctgccccccctgaagatcgtgaccatccatgaatgtgacagcggggaggccagcagcgccaccaccccccacccagccaccagccccaaggccaccctggccatcttccagcccccaggcaaggccctgaccggccgctctgtgggccccagcagcgccctgcccggggacccctacaacagcgctgctggggccacagactttgctgagatcagccccagcgccagcagtgacagcggggagggcaccagcctggatgctggcaccaggagcaccaaggccggcggccctggagctgctgctggccctggagaggccggccctggcagcggggccggcaccgtgctgcagttcctgacccggctgcggagacatgccagcctggatggagccagcccctacttcaaggtgaagaagtggaagctggagcccagccagagagctgccagcctggacacccggggcagccccaagaggcaccacttccagaggcagagagctgccagcgagagcacagagcaggaggagggagatgccccccaggaggacttcatccagtacatcgcccgggctggagatgctgtggccttcccccacccccggcccttcctggccagccccccaccagccctgggccgcctggaggccgctgaggccgccggcggggccagcccagacagccccccagagagaggagctggcagcgctggccctgagcagcagcagccccccctggagccagatgctgagagagatgctggccctgagcaggcccagaccagctacagagacctgtggagcctgcgggccagcctggagctgcacgccgccgccagtgaccacagcagcagtggaaatgaccgggacagcgtgcgcagcggggacagcagcggcagcggcagcggcggggccgccccagccttccccccacccagccccccagccccccggcccaaggatggagaggcccggcggctgctgcagatggattctggctacgccagcattgagggcagaggagctggagatgacacagagcccccagctgccccagcccggcccaggagcccccgggcctggccccggcggccccggcgggactacagcattgatgagaagacagatgccctcttccacgagttcctgcggcatgacccccactttgatgacaccccagctgctgcccggcaccgggcccgggcccacccccacgccaggaagcagtggcagaggggccggcagcacagcgaccccggggcccgggccgccccagccctggccggcaccccagcccccccagctggggccgcccggcctgcccgggcccccctgcggcggggggacagcgtggatggccccccagatggccgcaccctgggcggcgctggagatgatcctgccatccctgtgattgaggaggagcccggcggcggcggctgccccggcagcggcctgtgtgtgctgcccagcggctctgtgctggacaagctggccgccggcctggatgagcggctcttccccccccggctggccgagcctgtggtggccaccccagccctggtggccgccgcccccaccagcccagaccacagccctgcctag

SEQ ID NO: 244651 - DNA, 2178 bp, Artificial Sequence
  derived and/or modified sequence
atggccaccgccgccaccaccaccaccaccaccaccgccaccgtggcattgactaccagttgggataacgctacaggaagaccgactgccgagcccgatcccatccttgacaattatgttctgttagttgttgtgatgtcgctgttcgtgggtgggactctggtcgtgttaagcggcgtactgctgctttgtaagaggtgttgggacgttcaccagcgactcaaccgtgcgatggaggaagcagaaaaaacaaccacaacatatctggataatggtacacacccggcccaggaccctgatttccgcggggaagatccagaatgccaggacgcagagacagagaggtttctttccacttcttccactgggagacgcgtctcctttaatgaagccgccttgttcgaacaaagcaggaaaacacaggacaaaggtcgtcagggtggatggcagtctacggctgctggtgcaagcggaatgggtggcggaagagcccttatggcacggtgttgtcgccgctacacgctgaccgaaggagacttccatcacctgaaaaatgcacgtctgacacacctgcatctgcctccgttaaagattgtgactatccacgaatgcgactcgggagaggcctcctctgccaccacacctcatccggcaacgagcccaaaggccacactagccattttccaacctccaggcaaagcgcttacaggaagaagtgtaggaccgtcgtctgcactgcctggagacccgtacaactcggccgcaggtgcaaccgattttgccgagatttcccccagtgcctcttctgattccggtgagggcacatccttagatgccggcaccaggtctaccaaggccggcggacctggggcagcggcagggcccggcgaggctgggccagggtctggggcgggcactgtacttcagttcctgactagactgaggcgtcacgcaagcctggacggcgcctccccctattttaaagtgaagaaatggaaactggagccaagccaacgggcagcaagcctggatacacgcggctcacctaagcggcatcacttccagagacagagggccgcatctgagagcaccgagcaggaggagggcgacgctccccaggaggacttcatccagtacattgcccgagctggggacgccgtggccttcccacatccacggcctttcctcgcctcaccacccccagcgcttgggcgccttgaagccgctgaggcagcaggaggtgcttcaccagactcccctccagaacgcggggctggatccgccgggccagagcagcagcagcctcccctggaacccgacgctgaacgcgacgccggccccgagcaggctcagacatcttacagagatctttggtctctgcgagccagcttggagttgcatgcagccgctagcgaccattcatcctccgggaacgaccgtgacagcgttaggtcaggcgacagcagcggttctggttcagggggtgccgcgcccgcattcccccccccaagtccccccgctcctaggcccaaagatggcgaggcccgtagacttctgcagatggacagtgggtatgcaagcatcgaagggcgcggcgccggagacgataccgagcccccagccgcccccgcccggcctcggtctcctagagcctggccaaggaggccacgccgcgactatagtatcgatgagaagaccgacgccctgttccacgagtttctgcggcatgacccccacttcgacgacacgccagccgcagcgagacacagagcgcgagcacacccacacgcgcgaaagcagtggcagagaggaagacaacactcagatccaggggcgcgggctgcccctgccctcgctggaacaccggctccacccgctggagcagcccgcccagctagagctcccttaagacgcggcgactctgtagacggaccacctgatgggagaaccttggggggcgccggagacgatcccgccattcccgtaattgaggaggagccagggggcggggggtgtcctggaagcgggctgtgcgtcctccccagcgggtcagtcttggacaaacttgccgcaggtctggatgaacgccttttcccaccccgcctggcagagccagttgtggcgacacccgccctcgtggctgccgctcccacaagccccgaccactctccagcctag

SEQ ID NO: 244652 - DNA, 2178 bp, Artificial Sequence
  derived and/or modified sequence
atggcaactgctgcaacaaccaccaccacaactacagcaacggtagctctgacaacctcgtgggataatgcaacaggtcggcctaccgccgagcccgatccaattcttgacaattatgtcctgctggtcgtagtaatgagcctgtttgtgggagggactcttgtggttctttcaggagttttgctactctgtaaacggtgctgggacgtgcatcaaagactcaaccgagccatggaggaggccgagaaaactacaacaacatacctggataacggtacacatccagcccaggatcccgactttcggggagaggaccctgaatgccaggacgcggaaaccgaacggttcttgtctacctccagcaccggccgtagggtttccttcaacgaggctgcattgttcgagcagtcacgaaagacccaggataagggtagacagggaggatggcaatcaaccgccgcaggagctagcggcatgggagggggacgtgccctgatggctcgttgctgtcgtcggtatacgctgacagagggtgatttccatcatctgaagaatgccagactgacccatctacacctcccaccactcaagattgttacaatccatgaatgtgactccggtgaagctagctcggccacaacgccacacccagctacttctccaaaagccacactggcgatttttcagccccctggtaaagcgttaaccggcagaagtgttggcccaagctcggcccttccaggcgacccatacaactcggctgctggcgcaactgactttgctgagatatcccctagtgcgtctagtgatagcggtgagggcaccagcctggacgccggtaccaggagcacaaaggctgggggacccggagccgctgccggaccaggggaggctggccctggcagcggagcaggtacagtgctgcagttcctgacacggctcagacggcacgcgagcctggatggggcttcaccctacttcaaagtcaagaagtggaaactggaaccatcacagagagccgctagcctggatacaagaggttccccaaaacggcaccacttccagcgacagcgggcagcttccgagtccaccgaacaggaggagggagacgctcctcaggaggactttattcagtacatcgctcgcgcaggcgacgccgtagccttcccccacccgaggcccttcctggcctcacccccacctgccttgggtcgacttgaggctgctgaggccgcaggaggcgcttccccggacagcccacctgagaggggggctggcagcgctgggcctgagcagcagcagcctccgttggaacctgacgcggaaagagatgcagggccagaacaagcccaaacgagctacagggacttgtggtctttgagagcttccctggagcttcacgctgctgcttccgaccactccagctccggcaatgatcgggatagtgtgcggtctggtgattcctccggcagcgggtctggaggcgctgcaccagcctttcctccaccttcccctccagcccctcggccaaaggatggggaggctagaagactgctgcaaatggattctgggtacgccagtatcgagggcaggggggcaggcgacgatacagagcctcctgctgcacccgcacgccctcgttccccaagagcttggcccaggcgccctaggcgcgactacagtatcgatgaaaaaactgacgccctattccacgaattcctgcgacacgacccacattttgatgatacgccagctgctgcccgtcatagggccagggctcacccccacgccagaaagcagtggcagcgcggaagacagcattcggaccccggagcacgtgccgctcctgcccttgcgggtaccccagcaccccctgctggtgcagctaggcctgccagagcacccctgcggagaggggactctgtggatggtccgcctgatggtcgaacgctgggaggggctggtgacgaccctgcaattcctgtgattgaggaagagccaggcggaggaggatgccccggttcgggcctgtgcgtgctcccaagtggtagtgtgcttgacaagctggccgcagggctcgatgaacggcttttccccccaaggctggctgagcccgtagtggccactcccgctctggtcgcggcagcacctacatcacccgatcatagtccggcttag

SEQ ID NO: 244653 - DNA, 2564 bp, Artificial Sequence
  derived and/or modified sequence
gcgcagcgggggcggcgggccggggaccgggcagcaccgggcgcgcggagcgggcgcgccgccaacgcggtcacgtgcgcggcccctcctctcgcgccggcctcccccgcgccgcgctctccattcataaattctccgcctgctccgcggccaccgggcgccggagccagccgcgagcgccacgcagccgcccgccgccagcccgccgcccatgggccgctcgtcccggcgctgagggccctcctccccagttcagaatgcagcccacagccaccatggccacagccgccaccaccaccaccaccaccactgccacagtagccctgacgacgtcgtgggacaatgccactggacgccccacggcagagccagaccccatcctggacaactacgtgctgctggtggtggtgatgtcgctgttcgtggggggcacgctggtggtgttgtctggcgtcctgctcctctgcaagcgctgctgggacgtccaccagcgcctcaacagggccatggaggaagcggagaagaccaccaccacctacctggacaacggcacccacccagcccaagaccccgacttccggggagaggaccccgagtgccaggatgcggagaccgaacgcttcctgtccaccagctccacgggccgccgggtctccttcaatgaggcggcgctgtttgagcagagccgcaagacgcaggacaagggtcgccggtacacactgacggagggggacttccaccacctgaagaatgcccggctcacgcacctgcacctgccgcccctcaagattgtcaccatccacgagtgtgactcaggcgaggccagctcagccaccacgccccacccggccacctctcccaaggccactctggccatcttccagcccccggggaaggccctcaccggccgctctgtgggccccagctccgccctgccaggtgacccctacaactcagccgcgggcgccactgacttcgcagagatcagcccctcggcatctagcgactctggggaaggcacctcgttggatgccggtaccaggagcaccaaggctggagggcccggggctgcagcagggcctggggaggcgggcccgggatccggggcaggtaccgttctgcagttcctcacccgcctgcgccgccatgccagcctggatggggccagcccctatttcaaggtcaagaagtggaagctggagcccagccagcgggcagccagtctggacacgagaggttcccccaagcggcaccacttccagcggcagcgggcagccagtgagagcacggagcaggaggagggggatgccccccaggaggacttcatccagtacattgcccgggcgggcgacgccgtggccttcccgcacccccgcccctttctggccagcccgccccctgctctcggcaggtatttttcagtagatggaggtgctaggggtggacctgtgggcccttgccccccttcgcccccccctaggcggcccagggagcgctctccaggccccgtggacacgcgctcgcctgcctccagcggcaaggcccctcccagaggcggactcactggggccacctctccagcatggaccagaggagggaagcagggagagactgggtaagggtagggcggtgggtggggaggaggggccccccgaggatggcgctggtactgctgcttgctggtggagtccgaggcctgaagggttctgctgtggtcccaggccctctcccacccccgccccgcccatgctcccaaggctgggcagactcctctcagaagctgctgtgaccactccggccagcagcacccctcccccaacccaagggcaacttccctgaagcccagggcccacgtcggtgggatgggaatggggcgtggggctggggcagagcagggttcctggggcagccctggtatggcgggtgaccctcacgtctgtgcactgtcctcctgctggttatccagcatgggtgggcagagagccctagcctggagcaggggctgagctggactcaaccgcgtccagtccatcccctgcggctcccacgtccactgggaggctgggaaaacgtgactcccggagagaagcatgttgacttttcctgggggcttccaagggagggggccccgccgtctgcagtccagcatggaggcaccctgcttaataagcaggcgccacagctcagggtcaatgcaagacgcatcccctgcaaaacacactggctcattttaaagctctcaccttccaaggcccgcccgagtcccaagtcccacccgcgtccaccctccctgatccagaggcgggatggccggccgggtagggggcgcggggctcggcggggctctgacggcgcggcctggcttgcaggctagaggcggccgaggcagcgggaggagcgagccccgattcccccccggagcgcggcgcgggcagcgcggggcctgagcagcagcagccgccactggagccggacgccgagcgggacgcgggccccgagcaggcccagaccagctaccgcgacctgtggagcctgcgcgcctcgcttgagctgcatgcggccgc

SEQ ID NO: 244654 - DNA, 1344 bp, Artificial Sequence
  derived and/or modified sequence
atggcgaccgccgccacaactactaccaccacaacagctaccgtggcgctaactacctcctgggataacgcaaccggcaggccaaccgccgagccagatccaattctcgacaattatgtgctcctggtcgttgttatgtccctcttcgtggggggaacccttgtcgtgctgagcggagtactgctcctgtgcaagagatgttgggacgtgcaccagcgcctgaacagagctatggaggaagctgagaagactaccaccacatatctcgacaacgggactcaccccgcccaggacccagattttagaggcgaagaccctgaatgtcaagacgccgagactgaaaggttcctctctaccagctctaccggtagacgcgtctccttcaatgaggccgccctctttgaacaaagccgcaagacccaggacaaagggaggagatatacactcaccgagggagacttccaccacctcaaaaacgcgcgactaacacatctgcacttaccccctctgaaaatcgtgacgatacacgagtgcgatagcggcgaggcttcttcagctacaactcctcacccggctacttcccccaaagctactttagctatttttcagccaccaggtaaggcacttactgggagaagtgtagggcccagctctgccctgccaggtgatccttacaattccgctgcgggggccaccgacttcgccgaaatcagtccaagcgcaagttctgacagcggggagggtacgagcctggacgcaggtacaaggtctaccaaagccggcggccctggggccgcggcaggacccggtgaggctggtcctgggtccggtgcaggaacggtcttacaattcttgaccaggttaagacggcatgcatcacttgacggagcatccccatattttaaagttaaaaaatggaagctggagcctagccagcgtgctgctagtcttgacacccggggatcccccaaacggcaccatttccaacgccagcgcgccgcctcggagagcacagagcaggaggagggggacgcccctcaggaagacttcatccagtatatcgcccgtgccggagacgccgtggcctttccacacccacgcccgttcctggcgagccctccacctgcccttggcaggtatttctccgtcgacggcggcgctagagggggccccgtgggaccatgtcccccatctccaccccctcgacggcccagagagcgctctccgggccccgtggatacccggtcaccagcttctagcggtaaagccccacctagagggggactcactggtgccacgtctccggcttggacaagaggagggaaacaaggggagacaggatag

SEQ ID NO: 244655 - DNA, 1344 bp, Artificial Sequence
  derived and/or modified sequence
atggccacagctgccaccaccaccaccaccaccacagccaccgtggccctgaccacctcctgggacaatgccaccggccggcccacagctgagccagaccccatcctggacaactacgtgctgctggtggtggtgatgagcctgtttgtgggcggcaccctggtggtgctgagcggcgtgctgctgctgtgcaagcgctgctgggatgtgcaccagaggctgaacagagccatggaggaggccgagaagaccaccaccacctacctggacaatggcacccacccagcccaggaccctgacttccggggggaggaccctgagtgccaggatgctgagacagagcgcttcctgagcaccagcagcacaggccggcgggtgtccttcaatgaagctgccctgtttgagcagagcaggaagacccaggacaagggccgccgctacaccctgacagaaggagacttccaccacctgaagaatgcccggctgacccacctgcacctgccccccctgaagatcgtgaccatccatgaatgtgacagcggggaggccagcagcgccaccaccccccacccagccaccagccccaaggccaccctggccatcttccagcccccaggcaaggccctgaccggccgctctgtgggccccagcagcgccctgcccggggacccctacaacagcgctgctggggccacagactttgctgagatcagccccagcgccagcagtgacagcggggagggcaccagcctggatgctggcaccaggagcaccaaggccggcggccctggagctgctgctggccctggagaggccggccctggcagcggggccggcaccgtgctgcagttcctgacccggctgcggagacatgccagcctggatggagccagcccctacttcaaggtgaagaagtggaagctggagcccagccagagagctgccagcctggacacccggggcagccccaagaggcaccacttccagaggcagagagctgccagcgagagcacagagcaggaggagggagatgccccccaggaggacttcatccagtacatcgcccgggctggagatgctgtggccttcccccacccccggcccttcctggccagccccccaccagccctgggccgctacttctctgtggatggaggagcccggggcggccctgtgggcccctgcccccccagccccccaccccggcggccccgggagaggagccctggccctgtggacaccaggagccctgccagcagcggcaaggccccaccccggggcggcctgaccggggccaccagccctgcctggacccggggcggcaagcagggcgagaccggctag

SEQ ID NO: 244656 - DNA, 1344 bp, Artificial Sequence
  derived and/or modified sequence
atggccaccgccgccaccaccaccaccaccaccaccgccaccgtggcgctaacaacctcctgggacaacgccaccgggagaccgaccgccgaaccagatcctatactcgataattacgttttgctggtagtggtaatgagtctgttcgttgggggaacgcttgtcgtgttgtctggcgtcctgctcctatgtaagaggtgttgggatgttcatcaaaggttgaacagggctatggaagaagcggaaaaaactaccactacgtacttagacaacggtactcatccagcccaggacccggacttccgtggcgaagacccagagtgtcaagacgcagagacagaacgcttcctgtccacatcctcaaccggcaggcgggttagcttcaacgaagcagcactcttcgaacagtcccgaaagacccaggacaagggacgccggtatactcttaccgagggtgactttcatcacttaaaaaatgcaaggttaacccacttgcacttacctccactgaagatcgtgactatacacgagtgcgacagtggcgaggcatcgagtgctacaaccccacaccctgcaacctctccaaaggccacactggccatcttccagcctcccggaaaggccttgacggggcgctccgtcggccctagtagtgctctacccggggatccatataacagcgccgctggggcgaccgacttcgccgaaatctcaccatccgcaagttcagattctggcgagggcacttcgcttgacgctggcacacgaagcacaaaagccggcggcccaggcgcagcggctgggcccggggaggcaggtcctggatccggagccggcacagtccttcagtttcttacgaggcttcgacggcatgcttctctggatggggcgtctccgtattttaaagtgaagaaatggaaacttgagccatcccagagggcagcttccttggacacacgcggctcccccaagcgacaccacttccagcgtcagagagccgcttctgagtcgacagagcaggaggagggagacgcacctcaggaggatttcatccaatatatcgccagagccggcgacgcagtggccttcccgcatccaagaccctttttagcctctcccccccctgccttggggaggtacttttctgttgacggtggggccagaggggggcccgtgggcccttgcccacccagtcctcctcccagacggcccagagaaagatcccctgggcctgtggatacccggagccccgccagtagcggcaaagcaccgccccggggcggactgacaggggctacttctcccgcctggacacgcggcgggaaacagggtgagacgggatag

SEQ ID NO: 244657 - DNA, 1344 bp, Artificial Sequence
  derived and/or modified sequence
atggcaaccgccgctaccacaaccacgactaccacggctacagtggcactgaccactagttgggataatgccacggggaggcctacagcggaacctgatcccatcctggacaattatgttcttctggtggtggttatgtcactgtttgtgggcggaacccttgttgttctctcaggggtgctgcttttgtgcaaaaggtgttgggatgtccaccagcgtctgaatcgtgcaatggaggaggctgaaaaaaccactaccacctacctggataatggcacacacccagcccaggatcctgacttccggggagaagaccccgaatgccaggatgcggagactgaacgctttctaagtacttcatccacagggaggagagtatcctttaatgaagctgctctgttcgaacaatcccgcaagactcaagataagggccgacgctacaccctcactgaaggtgactttcatcacctcaaaaatgctagattgacacacctgcatctgccaccactgaaaattgtgacaatccacgagtgcgacagtggcgaggcctcttccgcgacaactccacacccagctacttcccccaaggccaccctggccattttccagccacccggtaaagccctgacgggcaggagcgtgggcccatcgtccgctctccccggagacccctataattccgccgctggcgcaaccgatttcgctgaaatcagcccctccgcctcaagcgactccggtgagggcacctctctggatgctgggactcggtccaccaaagcgggaggtcccggagccgcagcgggaccgggagaggcaggacctggaagcggagccggaaccgtgttgcagttcttgactaggctgcgaagacatgcttcactggacggcgcttcaccctattttaaagttaagaagtggaaactggagccctcccaacgcgctgccagcctggacacccggggtagcccgaagcggcaccatttccaacgccaaagagccgcttccgaatctactgaacaggaggagggggacgcaccgcaagaagattttatccagtatattgctcgggcaggagatgcggtggcgttccctcatccaaggccatttctggcctccccgccaccggcactcgggcgatatttctctgtagacgggggtgccagaggtggacctgtgggcccttgccctccctccccccctccacgaaggcccagagagaggtcgccaggaccagtggatactagaagcccagccagttccggtaaggctcccccacgtggaggccttactggcgctaccagcccagcctggactagagggggaaagcaaggagagacgggttag

SEQ ID NO: 244658 - DNA, 1344 bp, Artificial Sequence
  derived and/or modified sequence
atggccaccgccgccaccaccaccaccaccaccaccgccaccgtggccctgaccaccagctgggacaacgccaccggcagacccaccgccgagcccgaccccatcctggacaactacgtgctgctggtggtggtgatgagcctgttcgtgggcggcaccctggtggtgctgagcggcgtgctgctgctgtgcaagagatgctgggacgtgcaccagagactgaacagagccatggaggaggccgagaagaccaccaccacctacctggacaacggcacccaccccgcccaggaccccgacttcagaggcgaggaccccgagtgccaggacgccgagaccgagagattcctgagcaccagcagcaccggcagaagagtgagcttcaacgaggccgccctgttcgagcagagcagaaagacccaggacaagggcagaagatacaccctgaccgagggcgacttccaccacctgaagaacgccagactgacccacctgcacctgccccccctgaagatcgtgaccatccacgagtgcgacagcggcgaggccagcagcgccaccaccccccaccccgccaccagccccaaggccaccctggccatcttccagccccccggcaaggccctgaccggcagaagcgtgggccccagcagcgccctgcccggcgacccctacaacagcgccgccggcgccaccgacttcgccgagatcagccccagcgccagcagcgacagcggcgagggcaccagcctggacgccggcaccagaagcaccaaggccggcggccccggcgccgccgccggccccggcgaggccggccccggcagcggcgccggcaccgtgctgcagttcctgaccagactgagaagacacgccagcctggacggcgccagcccctacttcaaggtgaagaagtggaagctggagcccagccagagagccgccagcctggacaccagaggcagccccaagagacaccacttccagagacagagagccgccagcgagagcaccgagcaggaggagggcgacgccccccaggaggacttcatccagtacatcgccagagccggcgacgccgtggccttcccccaccccagacccttcctggccagccccccccccgccctgggcagatacttcagcgtggacggcggcgccagaggcggccccgtgggcccctgcccccccagccccccccccagaagacccagagagagaagccccggccccgtggacaccagaagccccgccagcagcggcaaggccccccccagaggcggcctgaccggcgccaccagccccgcctggaccagaggcggcaagcagggcgagaccggctag

SEQ ID NO: 244659 - protein, 233 aa, Artificial Sequence
  derived and/or modified sequence
MDQEEGLKALDNIVTQFNAYEDFLDSQITTVDLYYLEDETLARQLVELGYRGTGERVKREDFEARKAAIEIARLAERAQQKTLTSAGKDLQDNFLTALAMREEDNRSGKLSSVIFIRDRNSHGQEISGYIDYAHRLKTEDFEVYFTGKKRLLPRPTDISFYNWDADIAVSNSSPNYQVIADNPEGLLFRYKRDRKILNVDPKAQPGDNSTRITILTELYVQAVIFDHISRRKT

SEQ ID NO: 244660 - DNA, 895 bp, Artificial Sequence
  derived and/or modified sequence
ctgccctcctgcttccgttgctagggacgcttcggccgaggataccgcaatggatcaggaagaggggctgaaggccttggacaatattgtcactcaattcaacgcctatgaagatttcctggactcgcagatcactactgtggacttgtactacctggaggatgaaaccctggcccgccagttggtggagctaggctaccgagggactggagagagagtgaaaagggaagattttgaagcaaggaaagcggctatagagattgcaagactggctgaaagagctcagcaaaagacgctaacaagtgctggtaaagacctacaagataattttctgacggccctggcaatgagagaagaagacaatcgcagtggaaaactgagttccgtgatctttattcgtgacagaaattctcatgggcaagagatatcaggatacatcgactatgcccacaggctaaagacggaagattttgaagtctactttactggaaaaaaaagacttcttccaaggcctacagatataagcttttacaactgggacgctgatattgctgttagtaattcaagtcccaactatcaagtgattgccgataatccagaaggcttacttttcagatacaaaagagacagaaaaattcttaatgtggacccaaaggcgcagccaggtgacaactctactagaatcactatcctgacagaactctacgtacaagctgtcatttttgaccacatttccagaaggaagacttaagtaccaacatgttaatttcctaataatttgctaaatttaaataaattccgtagacagagcaaattagaataataaatgagccctgtagctggaaggcaaattagaacaataaagttaataaagaagttagaaagaaaactgtaa

SEQ ID NO: 244661 - DNA, 702 bp, Artificial Sequence
  derived and/or modified sequence
atggaccaggaggagggcctgaaggccctggacaacatcgtgacccagttcaacgcctacgaggacttcctggacagccagatcaccaccgtggacctgtactacctggaggacgagaccctggccagacagctggtggagctgggctacagaggcaccggcgagagagtgaagagagaggacttcgaggccagaaaggccgccatcgagatcgccagactggccgagagagcccagcagaagaccctgaccagcgccggcaaggacctgcaggacaacttcctgaccgccctggccatgagagaggaggacaacagaagcggcaagctgagcagcgtgatcttcatcagagacagaaacagccacggccaggagatcagcggctacatcgactacgcccacagactgaagaccgaggacttcgaggtgtacttcaccggcaagaagagactgctgcccagacccaccgacatcagcttctacaactgggacgccgacatcgccgtgagcaacagcagccccaactaccaggtgatcgccgacaaccccgagggcctgctgttcagatacaagagagacagaaagatcctgaacgtggaccccaaggcccagcccggcgacaacagcaccagaatcaccatcctgaccgagctgtacgtgcaggccgtgatcttcgaccacatcagcagaagaaagacctag

SEQ ID NO: 244662 - DNA, 702 bp, Artificial Sequence
  derived and/or modified sequence
atggatcaagaagaagggttgaaagctctcgataacatagtcacacagttcaacgcatacgaggattttctggattctcaaatcactacagtcgatttgtattatctggaggatgaaacactggcacgacaactggtggagctcggatacagggggactggggaaagggtcaaacgggaagatttcgaggcccgcaaagctgcaatcgaaattgctagactggccgaaagggcccaacagaagaccttgacttccgccggcaaggatttgcaagacaatttccttaccgccttagcaatgcgagaagaggacaaccgcagcgggaagttatcctccgtgatcttcattagggataggaacagtcatgggcaggaaatctctggatatatcgattacgcccaccggctgaagacagaggatttcgaggtgtatttcaccggaaagaaaagactgctgccacgccctaccgatatatctttttacaattgggatgcagacatcgccgtgagtaactcctcccccaactaccaagttattgctgacaatccggagggactgctgttccgctataaaagagatcgcaaaatcctcaatgtggaccccaaggcacagcccggtgataattccacacggatcactatcctgacagagctctacgtgcaggccgtgatttttgaccatatttcgaggcggaaaacgtag

SEQ ID NO: 244663 - DNA, 702 bp, Artificial Sequence
  derived and/or modified sequence
atggaccaggaggagggcctgaaggccctggacaacatcgtgacccagttcaatgcctatgaggacttcctggacagccagatcaccaccgtggacctgtactacctggaggatgagaccctggcccggcagctggtggagctgggctaccggggcactggagagcgggtgaagcgggaggactttgaggccaggaaggccgccattgaaattgcccggctggccgagcgggcccagcagaagaccctgaccagcgctgggaaggacctgcaggacaacttcctgacagccctggccatgagggaggaggacaacagaagtggcaagctgagcagcgtcatcttcatccgggacaggaacagccacggccaggagatcagcggctacatcgactatgcccaccggctgaagacagaagattttgaggtgtacttcaccgggaagaagaggctgctgccccggcccacagacatctccttctacaactgggatgctgacattgctgtgagcaacagcagccccaactaccaggtgattgctgacaaccctgagggcctgctcttccgctacaagagggacaggaagatcctgaatgtggaccccaaggcccagcccggggacaacagcacccgcatcaccatcctgacagagctgtatgtgcaggccgtcatctttgaccacatcagcaggaggaagacctag

SEQ ID NO: 244664 - DNA, 702 bp, Artificial Sequence
  derived and/or modified sequence
atggaccaggaggagggcctgaaggccctggacaacatcgtgacccagtttaacgcctatgaagacttcctcgacagccagattacaactgtggacctttactacctcgaagatgaaaccctagcccgccagctcgtagaattaggctaccggggcaccggggaacgggtgaaacgcgaggacttcgaggcgcgtaaagctgccatagaaattgctcgactggctgaacgggcccagcaaaaaactctgacatcagcgggcaaggacctgcaggataacttcctgactgcccttgctatgcgggaggaggacaaccggtctggcaagttatcttctgttatcttcatacgggatcgaaacagccatggccaggagatatccggctacatcgattacgctcatcggttaaaaacagaggactttgaggtctattttaccggcaagaagaggctgctgcccagacctactgacatatctttttacaattgggacgccgacatcgccgtgagcaattcctcaccaaactatcaggtgatcgcagataacccagaaggtttgctattccgctataagagggataggaaaattctcaacgttgatcccaaggcccagccaggtgacaatagcacacgaatcacaatcctgaccgaattgtacgtgcaggctgtcatcttcgaccatattagccgccggaaaacatag

SEQ ID NO: 244665 - DNA, 702 bp, Artificial Sequence
  derived and/or modified sequence
atggaccaggaagagggactcaaagctctggacaacatcgtgactcagtttaatgcttacgaagactttctggacagtcagattaccaccgtcgatttgtattacctggaggacgaaaccctcgccaggcagctggtggagttggggtatcgcggtaccggagagcgagtgaaacgcgaagattttgaagccagaaaagctgccattgaaattgctcgcctggcagaacgggcacagcagaaaactcttaccagtgcaggtaaggacctgcaagataatttcctgactgcacttgccatgagagaagaagataacagaagcggtaagctcagtagtgtgatcttcattagagatcggaactcgcatgggcaggagatctccgggtatatagattacgcacatcgtctgaagactgaggacttcgaggtgtattttacaggtaagaaacgcctgctgccacggccaactgatatttccttttacaattgggacgccgacattgccgtcagcaattccagccctaattatcaggtcatcgctgacaatcctgaaggcctgctgtttagatataaacgggaccggaagatcctgaatgttgaccccaaagcgcagccaggcgataatagtactcggatcactatcctgactgagctgtatgttcaggccgtgatttttgaccacataagtaggcgcaagacctag

SEQ ID NO: 244666 - protein, 518 aa, Artificial Sequence
  derived and/or modified sequence
MAGLRNESEQEPLLGDTPGSREWDILETEEHYKSRWRSIRILYLTMFLSSVGFSVVMMSIWPYLQKIDPTADTSFLGWVIASYSLGQMVASPIFGLWSNYRPRKEPLIVSILISVAANCLYAYLHIPASHNKYYMLVARGLLGIGAGNVAVVRSYTAGATSLQERTSSMANISMCQALGFILGPVFQTCFTFLGEKGVTWDVIKLQINMYTTPVLLSAFLGILNIILILAILREHRVDDSGRQCKSINFEEASTDEAQVPQGNIDQVAVVAINVLFFVTLFIFALFETIITPLTMDMYAWTQEQAVLYNGIILAALGVEAVVIFLGVKLLSKKIGERAILLGGLIVVWVGFFILLPWGNQFPKIQWEDLHNNSIPNTTFGEIIIGLWKSPMEDDNERPTGCSIEQAWCLYTPVIHLAQFLTSAVLIGLGYPVCNLMSYTLYSKILGPKPQGVYMGWLTASGSGARILGPMFISQVYAHWGPRWAFSLVCGIIVLTITLLGVVYKRLIALSVRYGRIQE

SEQ ID NO: 244667 - DNA, 1557 bp, Artificial Sequence
  derived and/or modified sequence
atggctggtcttaggaatgagagcgagcaagaaccactgttgggggacactcctgggtcccgggaatgggacatcctcgagactgaggaacattacaaatccaggtggcgaagtattcggattctttacctgacaatgttcctctcatcagtggggtttagtgtggtgatgatgtcaatctggccatatttacaaaaaatcgatcccaccgctgacacctctttcctggggtgggtcattgcatcctattctctgggccagatggtggcgagcccaatattcggactatggtcgaactacagaccccgaaaagaaccactgatagtgtccattttgattagcgtggcggcgaattgtctgtacgcatatttgcatatccctgcgtctcataacaagtactatatgctcgtcgctcgtgggctcctgggaatcggtgccggaaacgtggcagtcgtgcgcagttacaccgctggtgcaacaagtctccaggaacgaacttcctctatggccaatatcagtatgtgtcaggctcttggatttatactcggcccggtcttccagacctgttttaccttcttgggagagaagggcgtgacgtgggatgtgatcaagctacagattaatatgtatactactccagtgttactgtcagcgtttctaggcattctcaacataatcctgattttagctatcctccgggaacacagagtggacgactcaggaaggcagtgcaaatcaattaacttcgaggaagcctcaacagatgaagcacaggtccctcaaggaaacatagatcaagttgccgtggttgcgataaatgtcctgtttttcgttacattgttcattttcgccctttttgaaactattatcacccctttaacaatggatatgtacgcctggactcaggagcaggccgtgttatataatggaatcatcttggctgcgctgggcgtggaagcagtcgtgatcttcctcggcgtcaagttgttatcaaagaaaattggagaaagggctattctgttaggcggtctgattgtagtttgggtgggtttctttattttactcccctgggggaaccaattccctaaaatccagtgggaggatttgcacaataacagcatcccgaacacgacttttggcgaaataattattggcttatggaaatcgcccatggaagatgacaacgaacgcccaaccgggtgttcaatcgagcaggcctggtgcctctacacacctgtcattcatctggcccagtttctaacatccgcggtcctcatcggcctcggctatcccgtgtgcaatttgatgtcatacacactctactccaagatactgggtcccaagccacagggcgtctacatgggctggctgacagcaagcggctcaggagcccgaattctcggccctatgtttatctctcaggtctacgctcattggggacctcggtgggctttctctctggtgtgcggtataatcgtcctgactatcactctcctaggtgtcgtttacaaacgcctgatagcactcagtgtacgatatgggcgcattcaggaatag

SEQ ID NO: 244668 - DNA, 1557 bp, Artificial Sequence
  derived and/or modified sequence
atggccggcctgagaaatgaaagtgagcaggagcccctgctgggggacaccccaggcagccgggagtgggacatcctggagacagaggagcactacaagagccgctggaggagcatccgcatcctgtacctgaccatgttcctgagctctgtgggcttctctgtggtgatgatgagcatctggccctacctgcagaagattgaccccacagctgacaccagcttcctgggctgggtgattgccagctacagcctgggccagatggtggccagccccatcttcggcctgtggagcaactaccggcccaggaaggagcccctcatcgtgtccatcctgatctctgtggccgccaactgcctgtatgcctacctgcacatcccagccagccacaacaagtactacatgctggtggcccggggcctgctgggcatcggggctggaaatgtggccgtggtgcgcagctacacagctggggccaccagcctgcaggagaggaccagctccatggccaacatctccatgtgccaggccctgggcttcatcctgggccctgtgttccagacctgcttcaccttcctgggggagaagggcgtgacctgggatgtgatcaagctgcagatcaacatgtacaccacccctgtgctgctgagcgccttcctgggcatcctgaacatcatcctgatcctggccatcctgcgggagcaccgggtggatgacagcggccggcagtgcaagagcatcaactttgaggaggccagcacagatgaggcccaggtgccccagggcaacatcgaccaggtggccgtggtggccatcaacgtgctcttctttgtgaccctcttcatctttgccctgtttgagaccatcatcacccccctgaccatggacatgtatgcctggacccaggagcaggccgtgctgtacaacggcatcatcctggccgccctgggcgtggaggccgtggtgatcttcctgggcgtgaagctgctgagcaagaagatcggggagcgggccatcctgctgggcggcctgattgtggtgtgggtgggcttcttcatcctgctgccctggggcaaccagttccccaagatccagtgggaggacctgcacaacaacagcatccccaacaccacctttggagagatcatcatcggcctgtggaagagccccatggaggatgacaatgaaagacccaccggctgcagcattgagcaggcctggtgcctgtacacccctgtgatccacctggcccagttcctgaccagcgctgtgctgattggcctgggctaccctgtgtgcaacctgatgagctacaccctgtacagcaagatcctgggccccaagccccagggcgtgtacatgggctggctgacagccagcggcagcggggcccgcatcctgggccccatgttcatcagccaggtgtatgcccactggggcccccgctgggccttcagcctggtgtgtggcatcatcgtgctgaccatcaccctgctgggcgtggtgtacaagaggctgattgccctgtctgtgcgctatggccgcatccaggagtag

SEQ ID NO: 244669 - DNA, 4510 bp, Artificial Sequence
  derived and/or modified sequence
aggttacaagcagcagatcccaccttcagtcctggctctgacaagccctccagcttcacgccacccgggatgggagaaagcaggtgtcgcgagagttgggcgcaagacgccttgtagggagtgtaactatggccggcctgcggaacgaaagtgaacaggagccgctcttaggcgacacacctggaagcagagaatgggacattttagagactgaagagcattataagagccgatggagatctattaggattttatatcttactatgtttctcagcagtgtagggttttctgtagtgatgatgtccatatggccatatctccaaaagattgatccgacagctgatacaagttttttgggctgggttattgcttcatatagtcttggccaaatggtagcttcacctatatttggtttatggtctaattatagaccaagaaaagagcctcttattgtctccatcttgatttccgtggcagccaactgcctctatgcatatctccacatcccagcttctcataataaatactacatgctggttgctcgtggattgttgggaattggagcaggaaatgtagcagttgttagatcatatactgctggtgctacttcccttcaggaaagaacaagttccatggcaaacataagcatgtgtcaagcattaggttttattctaggtccagtttttcagacttgttttacattccttggagaaaaaggtgtgacatgggatgtgattaaactgcagataaacatgtatacaacaccagttttacttagcgccttcctgggaattttaaatattattctgatccttgccatactaagagaacatcgtgtggatgactcaggaagacagtgtaaaagtattaattttgaagaagcaagtacagatgaagctcaggttccccaaggaaatattgaccaggttgctgttgtggccatcaatgttctgttttttgtgactctatttatctttgccctttttgaaaccatcattactccattaacaatggatatgtatgcctggactcaagaacaagctgtgttatataatggcataatacttgctgctcttggggttgaagccgttgttattttcttaggagttaagttgctttccaaaaagattggcgagcgtgctattctactgggaggactcatcgttgtatgggttggcttctttatcttgttaccttggggaaatcaatttcccaaaatacagtgggaagatttgcacaataattcaatccctaataccacatttggggaaattattattggtctttggaagtctccaatggaagatgacaatgaaagaccaactggttgctcgattgaacaagcctggtgcctctacaccccggtgattcatctggcccagttccttacatcagctgtgctaataggattaggctatccagtctgcaatcttatgtcctatactctatattcaaaaattctaggaccaaaacctcagggtgtatacatgggctggttaacagcatctggaagtggagcccggattcttgggcctatgttcatcagccaagtgtatgctcactggggaccacgatgggcattcagcctggtgtgtggaataatagtgctcaccatcaccctcctgggagtggtttacaaaagactcattgctctttctgtaagatatgggaggattcaggaataaactagctaagactgtgatggaaactacttgctgtgtggcacttcctggtctaaagctctgctagacaattgcggtgagccagtctccaagaatcagactacagatattgcagattttgaagaacaagaacatatgttgaataacagagagaattctacatgtcattgtgaatagtaggttatataaaaacatactagatgataatttccttacctcagaaatgaaatattattcttataatacctttttgtggttgcatgaactaatgagtgaatggacaatgatgaataaatgtgaagctgtattcttaatacccactgcagaagtgtcattaaaataatatacagtggaaccagaaagagggttctgtaagaattagccatagcagaacaaaattatagaattttaaatacctctacccaagtagaggtatttttattcagacacctactttttatttataaaaaaatgcattttctattatcaagttcacttatgaaataaaaattataacacatattttccatttagcgtgcctaacatcctaccttgccttctatgagtctttcttctaatactacacctctgccttattttagttcagggtttcactaagtaacccctacattaataaatgagtatggataatgctaatatttgagcaatacagaggattaagagatcaagatacttcactgcctattagcctaatagggatacctactttctttcaaatgccaaaaattcacattagaaacataatccagatatgtgttattttatatatatatatacaaaacagtaaatggtttcttaaaattattgctatttttcaacccccttaaactggagaaaaacatttaattagtaaaacattaattaatttactttaatttttcccatctctcagtagtggcggggaggaacacaacagttttcaatctatgtctgcatagttgtgtagagctgcagaattttagttggatttttaatttggatgatccctgacagccccaaactagtcaggctaataagtatttgaggcaaaatggctttaatctaacaatttactgagtttacctgaagttggctaaataacactgtatgtttaacttctacctctacataagttgaatgctgataaaaggaactagtagataactatgtatattgataagcactgttaagaaaatgcaaaaatatttctaaacacttttccaaatgttttctactttaagttagaaatagtttcaaatctgagaataaacactatataatctgcactttataggttgggtgcagtgtctcatgcctgtaatcccagcactttggaaggccaaggcaggaggattgcttgaggccaggaattcaagaccagcctgggaaacaaagtgagaccctgtctttacaaaaaataaaaacaaaaatttaaaactgtataatctgcactttatgctaaactagctgtgctcttaaactcaattttttcagctctaataaagggcttaatttgatagaattattctacgattaaattttgaagactgttttcactctcctctgccgcccatagcaagactgcttccatagatttctcagaaccgtagccagttctggctatttggtcaagtctgggatccctcttacctgctattctgcagctgctttctctgtcttacattttttgggccacgtctaatcttaaagagtaaactctacccttggtttgcatagtgtgcatgacaaaaataacaagaataatggtaatgatgaaaatgataagagcaaaatttgtggagtgctttccacattccaggtaatgtgtaacatacaatttaattcttacagcagtcttatggagtgaaaatactattatgattcccgttttacagatgaaagaatggaggcacagaaaagttacttgtctaagtaacagtctatccttaaagtccacagtcttaaccacttgatttttcatagtgaggaaaatatcccagaaagttgcagtttcaattaatcactaattgtagggtaatttaactataccagtgagtcctactagcagaaatatttgggcaacataagcccactgactggagcttttgtcttagcataataacctgtttccagcaagaatataacagaaaaaagtttcccagctttcaaaggtttataatattgattaaaatttagataaacttaaccttacacaaatgactcttactttcctttttattgagagcattttctttggagcattttcttctttggaggattataccttgctcatcttggcacaaaagaaggcgaaaggaagtaacatgggattgggaaaagagcaaggagataaagtttgaggaaaaaaaatcaccatgttgatgtcttcttgagtaggccaagttgcgtataaagagaaaatgacaacaggagattttaaggtatgatatattgttaagagtagtacatatttaagaagagaaaatatgtttttgaaaacaaatttaaacttgaaaggatgattttcatattttgaagggatttataacttcacaaagcatctccattctatcttgttcagctttacatttaaaaataaactcttcttgttcatataaaccttatctcttacataaagtgaaatctgttaattttttgttttgacaaggataaactacttacctgcatctgtttaagaatagattaacttattttgagaagaaattctgggcaccatttttgaccattgaagacttatttgtaatttaatttctactttacattgtgaatgttcattttctaataaacaagattattttgcatatgta

SEQ ID NO: 244670 - DNA, 1557 bp, Artificial Sequence
  derived and/or modified sequence
atggccggcctgcggaacgagagcgagcaggagcccctgctgggcgacacacctggcagtcgcgaatgggacatcctcgaaacagaggaacactacaaatcaaggtggcggagcatccgaattctgtacttgaccatgtttctctccagtgttggtttcagcgtagttatgatgagcatctggccctatctacagaagatcgacccaactgctgacacatcatttctgggatgggtcattgcctcctacagtctgggtcagatggtcgcctcccccatctttggcctgtggtctaattacaggccaagaaaggagcctctgatcgtgtccatattgatttctgtagcggcgaattgcttgtacgcctaccttcatattcctgcctctcataacaaatattacatgctggtcgcccgcggtctactcggcattggtgctgggaacgtagcagtggtgagaagctatactgcgggtgcgacctccctgcaggaacgcacttcctcaatggccaatatcagtatgtgtcaggcattagggttcatcctggggccagttttccagacctgtttcaccttcctaggcgaaaagggcgtgacttgggatgtaatcaaactacagataaatatgtacacaacccccgttctcctcagcgcctttcttggaattctgaatatcatcctcatcttggctattctgcgggaacatagagtcgacgacagcgggcgccaatgtaaaagcatcaatttcgaggaggccagtacagacgaagcccaggtgcctcagggcaacatcgaccaggtagctgttgttgctatcaatgttctgtttttcgtaactttgtttatatttgcattgtttgagacaatcattacccccctgactatggacatgtacgcatggacacaggaacaggccgttttgtacaatgggattattctcgccgcactgggtgtcgaggcagtcgttatcttccttggcgttaagctcctgtcgaagaaaatcggggagagggccatcctgttgggggggctcatagtcgtctgggtaggcttctttatactgttgccttgggggaaccaattcccaaagattcagtgggaggatctgcataataattctatcccgaatacgacgttcggcgaaattatcatagggctgtggaaatctccaatggaggacgacaacgagcgcccaacgggttgcagcattgagcaggcctggtgcttatacacccccgtgatccacttggcacagtttctaacaagcgcagtgctgatcggtctggggtaccctgtttgcaacctaatgtcctacacactgtactctaaaattctcggcccaaagccccaaggcgtgtacatgggatggctgacagccagtggcagcggggcccggattctagggccaatgtttatttcacaggtatatgcgcactggggccctcgatgggccttctcacttgtctgtggcattattgttttaaccatcacattactgggggtggtgtataaaagacttattgccctgtctgttaggtacgggagaatacaggagtag

SEQ ID NO: 244671 - DNA, 1557 bp, Artificial Sequence
  derived and/or modified sequence
atggcaggtctgcggaacgagtcagagcaggagcctcttctcggcgatacacccggatctcgggaatgggacatattggagaccgaggagcattataagtcaagatggcgctcgattcggatcctttatcttaccatgtttctttcttccgtaggtttctctgtggttatgatgagcatctggccttacctacaaaagattgatccaaccgcagatactagtttcctgggttgggtgattgcctcgtattcactcggtcagatggtggccagcccaatttttggattgtggtcaaactatcgtcctaggaaagagcccctcatagtatctatccttatttccgttgctgctaactgtctgtatgcgtatctgcatatccctgcctcacataacaagtattatatgcttgtagcgagaggcttgctcggcatcggcgcaggaaatgtcgctgtagtgagaagctataccgctggcgcaacttcactgcaagaacgtactagttctatggccaacatcagtatgtgtcaggccctcggattcatcctcggacccgtgttccagacctgctttacgttcttgggcgagaagggagtcacatgggacgtgataaaactgcagataaatatgtataccacacccgtcctgttaagtgcattcttgggcattctcaacatcatcttgatcctggccattcttcgcgagcaccgagtagatgatagtgggcgtcaatgcaagagtatcaattttgaggaggcgagcacagacgaagcccaagtgccacagggaaatatcgatcaggtggctgtcgtggccatcaacgtcctgttctttgtcacactgttcatatttgcacttttcgaaaccattataactcccctgacaatggacatgtacgcatggacccaggagcaagcggtgctgtacaacggcatcatactggctgctctcggggtcgaggcagtggtgatttttctgggagttaaattactttccaagaaaatcggagagcgggcaatactgttgggaggcctgattgtcgtttgggttggattcttcattctcctgccctggggaaaccagttcccaaagatccaatgggaagacttgcacaataattctatccctaacactacattcggtgagatcatcatcggattgtggaaatccccaatggaggatgacaatgagcgacctacggggtgtagtattgagcaagcctggtgtctgtacactcccgtgatccacctagcacagtttctgacatctgctgttctgatcggactaggataccctgtctgcaacctaatgtcgtatactctttacagcaaaattctgggaccaaagccacagggggtgtacatggggtggctgacggcatccgggtctggtgctagaatcttgggccctatgtttatctcccaggtttacgctcactggggccctcgatgggccttctccctagtgtgtggaatcatcgttctcactatcactctccttggcgttgtgtacaaacgtctgattgcccttagcgtgcgttatggtcggatacaagagtag

SEQ ID NO: 244672 - DNA, 1557 bp, Artificial Sequence
  derived and/or modified sequence
atggccggcctgagaaacgagagcgagcaggagcccctgctgggcgacacccccggcagcagagagtgggacatcctggagaccgaggagcactacaagagcagatggagaagcatcagaatcctgtacctgaccatgttcctgagcagcgtgggcttcagcgtggtgatgatgagcatctggccctacctgcagaagatcgaccccaccgccgacaccagcttcctgggctgggtgatcgccagctacagcctgggccagatggtggccagccccatcttcggcctgtggagcaactacagacccagaaaggagcccctgatcgtgagcatcctgatcagcgtggccgccaactgcctgtacgcctacctgcacatccccgccagccacaacaagtactacatgctggtggccagaggcctgctgggcatcggcgccggcaacgtggccgtggtgagaagctacaccgccggcgccaccagcctgcaggagagaaccagcagcatggccaacatcagcatgtgccaggccctgggcttcatcctgggccccgtgttccagacctgcttcaccttcctgggcgagaagggcgtgacctgggacgtgatcaagctgcagatcaacatgtacaccacccccgtgctgctgagcgccttcctgggcatcctgaacatcatcctgatcctggccatcctgagagagcacagagtggacgacagcggcagacagtgcaagagcatcaacttcgaggaggccagcaccgacgaggcccaggtgccccagggcaacatcgaccaggtggccgtggtggccatcaacgtgctgttcttcgtgaccctgttcatcttcgccctgttcgagaccatcatcacccccctgaccatggacatgtacgcctggacccaggagcaggccgtgctgtacaacggcatcatcctggccgccctgggcgtggaggccgtggtgatcttcctgggcgtgaagctgctgagcaagaagatcggcgagagagccatcctgctgggcggcctgatcgtggtgtgggtgggcttcttcatcctgctgccctggggcaaccagttccccaagatccagtgggaggacctgcacaacaacagcatccccaacaccaccttcggcgagatcatcatcggcctgtggaagagccccatggaggacgacaacgagagacccaccggctgcagcatcgagcaggcctggtgcctgtacacccccgtgatccacctggcccagttcctgaccagcgccgtgctgatcggcctgggctaccccgtgtgcaacctgatgagctacaccctgtacagcaagatcctgggccccaagccccagggcgtgtacatgggctggctgaccgccagcggcagcggcgccagaatcctgggccccatgttcatcagccaggtgtacgcccactggggccccagatgggccttcagcctggtgtgcggcatcatcgtgctgaccatcaccctgctgggcgtggtgtacaagagactgatcgccctgagcgtgagatacggcagaatccaggagtag

SEQ ID NO: 244673 - protein, 521 aa, Artificial Sequence
  derived and/or modified sequence
MLPRRPLAWPAWLLRGAPGAAGSWGRPVGPLARRGCCSAPGTPEVPLTRERYPVRRLPFSTVSKQDLAAFERIVPGGVVTDPEALQAPNVDWLRTLRGCSKVLLRPRTSEEVSHILRHCHERNLAVNPQGGNTGMVGGSVPVFDEIILSTARMNRVLSFHSVSGILVCQAGCVLEELSRYVEERDFIMPLDLGAKGSCHIGGNVATNAGGLRFLRYGSLHGTVLGLEVVLADGTVLDCLTSLRKDNTGYDLKQLFIGSEGTLGIITTVSILCPPKPRAVNVAFLGCPGFAEVLQTFSTCKGMLGEILSAFEFMDAVCMQLVGRHLHLASPVQESPFYVLIETSGSNAGHDAEKLGHFLEHALGSGLVTDGTMATDQRKVKMLWALRERITEALSRDGYVYKYDLSLPVERLYDIVTDLRARLGPHAKHVVGYGHLGDGNLHLNVTAEAFSPSLLAALEPHVYEWTAGQQGSVSAEHGVGFRKRDVLGYSKPPGALQLMQQLKALLDPKGILNPYKTLPSQA

SEQ ID NO: 244674 - DNA, 1566 bp, Artificial Sequence
  derived and/or modified sequence
atgctgcctcgcagacctctggcctggccagcttggctgctgcgcggtgctccgggtgccgctggcagctggggccggcccgtgggccccctcgcccgtaggggctgctgcagcgcccctgggacgccggaggtgccactcacaagagagcggtatcctgtacgacgacttcccttcagcactgtcagcaaacaagacctcgccgcttttgaaaggatcgtgcccggtggagtcgttaccgaccccgaagccctgcaggcccctaatgtggactggcttaggactttacgcgggtgttccaaggttcttctccgacctcgaaccagcgaagaggtctcccacatcctccggcattgccatgaaaggaacctggcggtgaaccctcaggggggcaacactggcatggtcggaggaagcgtaccagtgtttgatgaaatcatactctctacggcacgcatgaatagggttctgtcttttcattctgtgagtggtattcttgtttgtcaggccgggtgtgttttggaggagctctcgaggtacgtagaggagcgggacttcattatgccccttgatctcggggcaaaaggcagctgtcacatcggtggcaatgtggctacaaatgccggcgggctccgatttctgcgttatggttctctccacgggactgtgctgggactagaggtggtgctggccgacggcacagtgctggactgtctgacgtcgctccggaaggataacaccgggtacgaccttaagcagctcttcattggctctgagggaacattaggaatcatcactacagtttcaatcctgtgccctccaaaacctcgcgccgtgaatgttgcttttctaggatgcccaggtttcgccgaggtgttacagacattcagtacatgtaagggtatgctaggcgagattctttctgccttcgagttcatggacgcagtctgtatgcagcttgtaggcaggcacctccacctggcgtcccctgtgcaggaaagcccattctacgtgctgattgaaacctcaggcagtaatgcaggccacgatgccgaaaaattaggacactttcttgagcacgcacttggaagtggcctggtgactgacggaacaatggctacagatcagaggaaggtaaagatgttgtgggctcttcgagagcggattactgaggcgctgagtagggatggatatgtttataaatatgacctctcactgcctgtggagcggctgtatgacattgtcacagatctgcgtgcgcgcctgggacctcacgccaagcacgtggtgggatatggtcacttaggagatggaaatttacatctaaacgttacagcagaagccttctctccttctttgctcgccgcactcgagccacatgtctacgaatggacagccgggcagcaggggagcgtctctgctgaacatggcgttggtttccgcaagcgggatgtgctaggatattccaaacccccaggtgccctccagctgatgcagcagttaaaggcccttctggaccctaaggggattttaaatccatataaaacattgcccagccaggcttag

SEQ ID NO: 244675 - DNA, 1566 bp, Artificial Sequence
  derived and/or modified sequence
atgctgccccggcggcccctggcctggccagcctggctgctgcggggggcccctggagctgctggctcctggggccggcctgtgggccccctggcccggcggggctgctgcagcgcccctggcaccccagaggtgcccctgacccgggagcgctaccctgtgcggcggctgcccttcagcacagtgtccaagcaggacctggccgcctttgaaagaattgtgcctggaggagtggtgacagatcctgaggccctgcaggccccaaatgtggactggctgcggaccctgcggggctgcagcaaggtgctgctgcggcccaggaccagcgaggaggtgagccacatcctgcggcactgccacgagaggaacctggccgtgaacccccagggcggcaacacaggcatggtgggcggctctgtgcctgtgtttgatgagatcatcctgagcacagccaggatgaacagagtgctgtccttccacagcgtgtctggcatcctggtgtgccaggccggctgtgtgctggaggagctgagccgctacgtggaggagcgggacttcatcatgcccctggacctgggcgccaagggcagctgccacatcggcggcaatgtggccaccaatgctgggggcctgcgcttcctgcgctatggcagcctgcacggcaccgtgctgggcctggaggtggtgctggctgatggcaccgtgctggactgcctgaccagcctgaggaaggacaacacaggctatgacctgaagcagctgttcatcggcagcgagggcaccctgggcatcatcaccaccgtgtccatcctgtgcccccccaagcccagggctgtgaatgtggccttcctgggctgccccggctttgctgaggtgctgcagaccttcagcacctgcaagggcatgctgggggagatcctgagcgcctttgagttcatggatgctgtgtgcatgcagctggtgggccgccacctgcacctggccagccctgtgcaggagagccccttctacgtgctgattgagaccagcggcagcaatgccggccatgatgctgagaagctgggccacttcctggagcacgccctgggcagcggcctggtgacagatggcaccatggccacagaccagaggaaggtgaagatgctgtgggccctgcgggagcgcatcacagaggccctgagcagagatggctacgtgtacaagtatgacctgagcctgcctgtggagcggctgtatgacatcgtgacagacctgcgggcccggctgggcccccacgccaagcacgtggtgggctacggccacctgggagatggcaacctgcacctgaatgtgacagctgaggccttcagccccagcctgctggccgccctggagccccacgtgtatgagtggacagctggccagcagggctctgtgtctgctgagcacggcgtgggcttcaggaagagagatgtgctgggctacagcaagcccccaggggccctgcagctgatgcagcagctgaaggccctgctggaccccaagggcatcctgaacccctacaagaccctgcccagccaggcctag

SEQ ID NO: 244676 - DNA, 1566 bp, Artificial Sequence
  derived and/or modified sequence
atgctgccccggcggcccctggcctggcccgcctggctgctgcggggagcacctggggccgctgggagttggggccggccagtcgggccacttgctcgacgtgggtgctgttctgcacctgggaccccagaggtgccgctcacaagagaaaggtacccggttagaagattgccatttagtacagtcagtaaacaggacctggccgcgtttgaacgaatcgtccctggaggcgtagttactgaccctgaagcactgcaggcccctaatgttgactggcttcgtaccctacggggttgctccaaagttctattgcggccccgcacgtctgaagaggtgtcacacatcctgcgccactgccacgagagaaacttagcagttaatccccagggcgggaacaccgggatggttgggggatcagtgcctgtgtttgacgagatcatactttcaaccgcccggatgaatagagtcctgtcgtttcacagcgtgagtgggatcctagtgtgccaggctggctgtgttctcgaagagctgtcaagatatgtcgaggaacgggacttcatcatgccattagacctgggggcaaagggatcatgccacattggtgggaacgtcgctaccaacgctggaggattaaggttccttagatacgggagtttgcacggtaccgtgctaggactcgaagtcgtccttgctgacgggaccgtccttgattgcttaaccagcctcaggaaagacaacaccgggtacgacctgaaacagctctttatcggtagtgaaggcacgctgggcatcatcaccacggtgtctattttatgtcctcctaaaccgcgggccgtgaacgttgcctttctaggatgtcctggcttcgccgaggtgctgcaaactttctctacatgtaaaggaatgctcggggagatcttatccgcattcgagtttatggacgctgtgtgcatgcaattggtcggtcggcatctccatctggcctcaccagtgcaagagagccctttctacgtcttgatcgagacctctggctctaacgccggccatgacgccgaaaagctgggccactttctggaacacgcactaggcagtggtctcgtgacagacggaaccatggccacagatcaacgaaaagttaaaatgctatgggctctgcgcgagcgcattacggaagctttaagcagggacgggtatgtgtacaaatatgatctatcgctgccggtggagcgcctgtacgacatcgtcaccgatctccgagctcggctgggccctcatgccaagcacgtggtcggatacggccaccttggggatggcaatctccacctgaatgtgactgcagaggccttcagccccagccttctcgccgccctggagccccacgtgtatgaatggacagctggtcagcagggttcggtttctgctgagcatggagttggctttcgcaaacgggatgttcttggctacagcaaaccgcccggggctcttcagctgatgcagcagctcaaggcactcctcgatcctaaagggattctaaacccctacaagaccctgccatctcaagcctag

SEQ ID NO: 244677 - DNA, 1566 bp, Artificial Sequence
  derived and/or modified sequence
atgctgccccgaagacccctagcctggcctgcatggctcctgcgaggggctccaggtgccgctggtagctggggacgtcctgtcggccctctcgcccgtaggggatgctgcagcgccccaggtacccccgaggtaccccttacaagagaacggtatccagtgcggagactgccgttctccaccgtgagtaaacaggatctggcagcgtttgaacgcatcgtgccaggcggagtggtgaccgacccggaggctttgcaagcacccaacgtggattggctgagaacccttcgcggatgtagtaaggtgctcttgcgccctcgcaccagcgaagaagtgagtcatattctgcggcactgccacgagcgcaacctggcagtaaaccctcaaggcggtaacacaggtatggtgggcggaagcgtgccggtgttcgacgaaatcatactgtccactgcccgaatgaatcgggtgctctctttccacagcgttagcggcatacttgtctgtcaagcagggtgtgttcttgaagagctatcacggtacgttgaagaacgtgactttataatgcctcttgatctgggggctaaagggtcctgtcatattggtggaaacgtggccactaatgcaggcggactcaggttcttgcgctatggttctctgcacggcactgtcctggggctggaggtggtcttggctgacggaacggtgctggattgtttgacctctctccgcaaggacaataccggatatgacctgaagcagttgtttatcggatctgaaggaacattaggcatcatcaccacagtctctatattatgccccccaaagccacgcgcagtgaatgtggccttcctcggatgtcctgggttcgcagaggtgctacagaccttttcaacctgcaaagggatgctgggggagatcttgtcggcctttgaattcatggacgcagtctgcatgcagctcgtggggagacatttacacctggcatcccctgtgcaggagtctccattctatgtgctcatcgaaacctcaggctcaaacgccggacacgacgccgagaaactgggtcactttctagagcacgcactgggatctggcctggtcaccgacggcacaatggcgactgatcaacgcaaggtcaagatgttgtgggcactccgggagaggatcaccgaggccctgagccgggacgggtacgtatacaaatatgacctgagtttacccgtggagcgactgtatgacattgtcacagaccttcgggcaaggctgggtccccatgccaaacatgtggtcgggtatggccatctgggagacggaaatctgcatctgaacgttacagccgaagctttttcacccagcctcctagccgctctagaaccccacgtgtatgaatggacagctggccaacagggctctgtgtcggccgaacacggagtggggtttcgaaaaagagacgtgttggggtattccaagccacctggagcccttcagcttatgcagcaactgaaggcactgctggatcccaaagggattctgaacccatataaaacactgcccagccaggcctag

SEQ ID NO: 244678 - DNA, 2617 bp, Artificial Sequence
  derived and/or modified sequence
ttcggccgctgggcggagccgtcaatgcgcaggcgcggcgtcgccccgcccactccggctcggcggctctgggcctgcggcgggcgctgcgggttggagctcgggacgtgatcgtgggcgcgcagccagcggctccctgcccttcccctccgggccctgagtaccggccccccaccaaggaggagcccgaggtctccgtcccggcggcgatgctgccccgtcggcctctggcgtggcccgcgtggctgttgcggggtgctccgggagccgcgggttcttggggtcggccggttggccccctggcccgcagaggctgctgctccgccccggggacccccgaggtgccgctgacccgggagcgctaccccgtgcggcgcttgccgttctccacggtgtctaagcaggacctggccgcctttgagcgcatcgtgcccggcggggtcgtcacggacccggaagcgctgcaggctcccaacgtggactggttgcggacgctgcgaggctgtagcaaggtgctgctgaggccacggacgtcggaggaggtgtcccacatcctcaggcactgccacgagaggaacctggccgtgaacccacaggggggcaacacaggcatggtgggtggcagcgtccccgtctttgacgagatcatcctctccactgcccgcatgaaccgggtcctcagcttccacagcgtgtctggaattctggtttgccaggcgggctgcgtcctggaggagctgagccggtatgtggaggaacgggacttcatcatgccgctggacttaggagccaagggcagctgccacatcgggggaaacgtggcaaccaacgctggaggcctgcggtttcttcgatatggctcactgcatgggactgtcctgggcctggaagtggtgctggccgacggcactgtcctggactgcctgacctccctgaggaaggacaacacgggctatgacctgaagcagctgttcatcgggtcggagggcactttggggatcatcaccacggtgtccatcttgtgtccacccaagcccagggctgtgaacgtggctttcctcggctgcccaggctttgctgaggttctgcagaccttcagcacctgcaaggggatgctgggtgagatcctgtctgcattcgagttcatggatgctgtgtgcatgcagctggtcgggcgccatctccacctggccagcccggtgcaagagagtccgttttacgtcctcatcgagacttcaggctccaacgcaggccatgacgctgagaagctgggccacttcctggagcacgcgctgggctccggcctggtgaccgatgggaccatggccaccgaccagaggaaagtcaagatgctgtgggccctgagggaaaggatcacagaggcgctgagccgggatggctacgtgtacaagtacgacctctccctccctgtggagcggctctacgacatcgtgactgacctgcgcgcccgcctcggcccgcacgccaagcacgtggtgggctatggccaccttggagatggtaacctgcacctcaatgtgacggcggaggccttcagcccctcgctcctggctgccctggagccccacgtgtacgagtggacggccgggcagcagggcagcgtcagcgcggagcacggagtgggcttcaggaagagggacgtcctgggctacagcaagccaccgggggccctgcagctcatgcagcagctcaaggccctgctggaccccaagggcatcctcaacccctacaagacgctgcccagccaggcctgacggccactcctgctgctgccaaggcccactgggggtcggcgggtggctctcgggcgggggtgttgcggtggctctgagggatgagccggcagtgggcaggggaccaggcacctggttgaagggactgggagcccgcactggggaactgccggacgcaggccctcgggcaggagcatctggcagagtggggggcgtggcaggcaccctcctttgcagggcgaggtggggcctctgcagccatcctggacaggccggggtggcggcagctttgcccacgtggaagcggggtgggtctcacttgcgtggtggcccctggccccatcttgcctgctgcggcctggggagcaggcgctgggtggtggttctgcctgcttgctgctcgttccccgggcatgcgtgggcagcggggggcatgcgtgggcagcagggggcgtgggcagcgggggcacgggcaggaccacgtgggccgtgatcgtgggttgccgagaggacctgagcgctgcggctctgctgaatggagccgggtccctcaggccgtggacgccctcgggaggggggtgactgtggcttgtgtctggacaggaatgtgtcatttcccacatcttctagagggctgccagctgggaagacagttatcagggcaagctgtgctctgagtttcgggttctgctcctacaaagaacgtgcggtgctgcgggcgagggccccggcacggacaagggccactgcagagtgtgtttctgctcgtcagctgccctgggcagcggatgggctgggcgatgcagctggatgcacatctcattctgtcatgaatgtccagtaaaaatctgaattggttgcaa

SEQ ID NO: 244679 - DNA, 2208 bp, Artificial Sequence
  derived and/or modified sequence
aatgcgcaggcgcggcgtcgccccgcccactccggctcggcggctctgggcctgcggcgggcgctgcgggttggagctcgggacgtgatcgtgggctgtagcaaggtgctgctgaggccacggacgtcggaggaggtgtcccacatcctcaggcactgccacgagaggaacctggccgtgaacccacaggggggcaacacaggcatggtgggtggcagcgtccccgtctttgacgagatcatcctctccactgcccgcatgaaccgggtcctcagcttccacagcgtgtctggaattctggtttgccaggcgggctgcgtcctggaggagctgagccggtatgtggaggaacgggacttcatcatgccgctggacttaggagccaagggcagctgccacatcgggggaaacgtggcaaccaacgctggaggcctgcggtttcttcgatatggctcactgcatgggactgtcctgggcctggaagtggtgctggccgacggcactgtcctggactgcctgacctccctgaggaaggacaacacgggctatgacctgaagcagctgttcatcgggtcggagggcactttggggatcatcaccacggtgtccatcttgtgtccacccaagcccagggctgtgaacgtggctttcctcggctgcccaggctttgctgaggttctgcagaccttcagcacctgcaaggggatgctgggtgagatcctgtctgcattcgagttcatggatgctgtgtgcatgcagctggtcgggcgccatctccacctggccagcccggtgcaagagagtccgttttacgtcctcatcgagacttcaggctccaacgcaggccatgacgctgagaagctgggccacttcctggagcacgcgctgggctccggcctggtgaccgatgggaccatggccaccgaccagaggaaagtcaagatgctgtgggccctgagggaaaggatcacagaggcgctgagccgggatggctacgtgtacaagtacgacctctccctccctgtggagcggctctacgacatcgtgactgacctgcgcgcccgcctcggcccgcacgccaagcacgtggtgggctatggccaccttggagatggtaacctgcacctcaatgtgacggcggaggccttcagcccctcgctcctggctgccctggagccccacgtgtacgagtggacggccgggcagcagggcagcgtcagcgcggagcacggagtgggcttcaggaagagggacgtcctgggctacagcaagccaccgggggccctgcagctcatgcagcagctcaaggccctgctggaccccaagggcatcctcaacccctacaagacgctgcccagccaggcctgacggccactcctgctgctgccaaggcccactgggggtcggcgggtggctctcgggcgggggtgttgcggtggctctgagggatgagccggcagtgggcaggggaccaggcacctggttgaagggactgggagcccgcactggggaactgccggacgcaggccctcgggcaggagcatctggcagagtggggggcgtggcaggcaccctcctttgcagggcgaggtggggcctctgcagccatcctggacaggccggggtggcggcagctttgcccacgtggaagcggggtgggtctcacttgcgtggtggcccctggccccatcttgcctgctgcggcctggggagcaggcgctgggtggtggttctgcctgcttgctgctcgttccccgggcatgcgtgggcagcggggggcatgcgtgggcagcagggggcgtgggcagcgggggcacgggcaggaccacgtgggccgtgatcgtgggttgccgagaggacctgagcgctgcggctctgctgaatggagccgggtccctcaggccgtggacgccctcgggaggggggtgactgtggcttgtgtctggacaggaatgtgtcatttcccacatcttctagagggctgccagctgggaagacagttatcagggcaagctgtgctctgagtttcgggttctgctcctacaaagaacgtgcggtgctgcgggcgagggccccggcacggacaagggccactgcagagtgtgtttctgctcgtcagctgccctgggcagcggatgggctgggcgatgcagctggatgcacatctcattctgtcatgaatgtccagtaaaaatctgaattggttgc

SEQ ID NO: 244680 - DNA, 1566 bp, Artificial Sequence
  derived and/or modified sequence
atgctgcccagaagacccctggcctggcccgcctggctgctgagaggcgcccccggcgccgccggcagctggggcagacccgtgggccccctggccagaagaggctgctgcagcgcccccggcacccccgaggtgcccctgaccagagagagataccccgtgagaagactgcccttcagcaccgtgagcaagcaggacctggccgccttcgagagaatcgtgcccggcggcgtggtgaccgaccccgaggccctgcaggcccccaacgtggactggctgagaaccctgagaggctgcagcaaggtgctgctgagacccagaaccagcgaggaggtgagccacatcctgagacactgccacgagagaaacctggccgtgaacccccagggcggcaacaccggcatggtgggcggcagcgtgcccgtgttcgacgagatcatcctgagcaccgccagaatgaacagagtgctgagcttccacagcgtgagcggcatcctggtgtgccaggccggctgcgtgctggaggagctgagcagatacgtggaggagagagacttcatcatgcccctggacctgggcgccaagggcagctgccacatcggcggcaacgtggccaccaacgccggcggcctgagattcctgagatacggcagcctgcacggcaccgtgctgggcctggaggtggtgctggccgacggcaccgtgctggactgcctgaccagcctgagaaaggacaacaccggctacgacctgaagcagctgttcatcggcagcgagggcaccctgggcatcatcaccaccgtgagcatcctgtgcccccccaagcccagagccgtgaacgtggccttcctgggctgccccggcttcgccgaggtgctgcagaccttcagcacctgcaagggcatgctgggcgagatcctgagcgccttcgagttcatggacgccgtgtgcatgcagctggtgggcagacacctgcacctggccagccccgtgcaggagagccccttctacgtgctgatcgagaccagcggcagcaacgccggccacgacgccgagaagctgggccacttcctggagcacgccctgggcagcggcctggtgaccgacggcaccatggccaccgaccagagaaaggtgaagatgctgtgggccctgagagagagaatcaccgaggccctgagcagagacggctacgtgtacaagtacgacctgagcctgcccgtggagagactgtacgacatcgtgaccgacctgagagccagactgggcccccacgccaagcacgtggtgggctacggccacctgggcgacggcaacctgcacctgaacgtgaccgccgaggccttcagccccagcctgctggccgccctggagccccacgtgtacgagtggaccgccggccagcagggcagcgtgagcgccgagcacggcgtgggcttcagaaagagagacgtgctgggctacagcaagccccccggcgccctgcagctgatgcagcagctgaaggccctgctggaccccaagggcatcctgaacccctacaagaccctgcccagccaggcctag

SEQ ID NO: 244681 - protein, 178 aa, Artificial Sequence
  derived and/or modified sequence
MGNSLLRENRRQQNTQEMPWNVRMQSPKQRTSRCWDHHIAEGCFCLPWKKILIFEKRQDSQNENERMSSTPIQDNVDQTYSEELCYTLINHRVLCTRPSGNSAEEYYENVPCKAERPRESLGGTETEYSLLHMPSTDPRHARSPEDEYELLMPHRISSHFLQQPRPLMAPSETQFSHL

SEQ ID NO: 244682 - DNA, 537 bp, Artificial Sequence
  derived and/or modified sequence
atggggaattcattactgcgagaaaaccgaaggcagcagaacacccaggaaatgccgtggaacgtgcgcatgcaaagcccaaaacagcgtacatctagatgctgggaccaccacatcgcagaagggtgtttctgtctgccctggaagaaaattctgatcttcgagaagcggcaggattcccagaatgaaaacgagaggatgagctccacgcccattcaggacaatgtggaccagacctacagcgaggagctgtgttacacgctcataaatcatagagtgctgtgtaccaggcccagtggaaatagtgccgaagaatactacgaaaatgtgccgtgcaaagctgagcggcctagggagtccctgggaggcactgagaccgagtattctctgctgcacatgccaagcacagaccctcgtcatgctcggagtccagaagacgagtacgaactgttgatgccccacagaatcagcagccacttcctgcagcagccacgacctttgatggccccgagcgaaacgcaattctctcatctgtag

SEQ ID NO: 244683 - DNA, 3336 bp, Artificial Sequence
  derived and/or modified sequence
ctctaacactcctcccccagcctcttccttccctctgcagagacacccttctcctttctgctgtctctgcacgggtggccagagccacacagccctttctttaagtcaggagttgccctgtcagagcacaaggcaagaaggaagtggtaaagggacggaggggaagccctgagaggactgagaggatgggaaattctctgctgagagaaaacaggcggcagcagaacactcaagagatgccttggaatgtgagaatgcaaagccccaaacagagaacatccagatgctgggatcaccatatcgctgaagggtgtttctgccttccatggaaaaaaatactcatttttgaaaagaggcaagattcccaaaacgaaaatgaaagaatgtcatctactcccatccaggacaatgttgaccagacctactcagaggagctgtgctataccctcatcaatcatcgggttctctgtacaaggccatcagggaactctgctgaagagtactatgagaatgttccctgcaaagctgagagacccagagagtccttgggaggaactgagactgagtattcacttctacatatgccttctacagaccccaggcatgcccgatccccagaagatgaatatgaacttctcatgcctcacagaatctcctctcactttctgcaacagccacgtccacttatggccccttctgagactcagttttcccatttatagtgaagtggctggactagcatttgtttagcaccaacaaataaaaggtgggatgggggatctgcctgaagcagggatgggacacaaagtccctccagcttatctcccacaacaaccctttccctgcagagcatggtttgtataccacaagccctcttagcacgcaaaagccaaaatctaaagatcaaccatttatcctgaacaacaccatttgagaaagaggtaaccatctttggttctacatggtttggagagtatagtggtaggaggggctccctgattcccctaaagctatgcacaccacaaggggctctgctcttctgtctgggatcttcttataaagtgttcccatgatcattctctaaagtcacaaggaagctttactcatcatactaagtgtgcccaagggggagttcactcattactgtgaccttccagctcagtccccacccatgggagcctgtgttgctcctctcactccatgtgtctaagtcatgtcttttacatagtgtcctttgacctgttggcccccatggtctggttagttatgtgagttgaatcaagaggctctaggccagatgtttacataattttaacctatatgattttatttttaactttgtatttctccctagaaatcttaataagacaattatgccatcagacaatgttaagaagaacgatccttggagatcccgtaatcccactacccttctttggctcagagaggataatttgcctaatgatacattaaagttagtggcaaaacttaatttggagcctgatttcctactgacttccaatttagtgctcccccagtatgctaaatagaaagccctctgcaatatattaaatgtatactaaatgtatatatttaataatgtcatgtataaaatatgaataaaatgtccacataggaaattaacacatatataccttctctgataagcactcctctatgtgtcctgattatttactttctcttatcttttccttagtgttcctcaaattatatctatcctctaaaccagggatcagcaaactataacccccaggccaaatctagcccactccctgtttttatagataaagatttgttggaacacagccacactcatttgtttacctactatctatgattgttcaaccatgggagagttgagtaattgtgacatggaccataggccctaaagagccaaaataaatatactttggcactttttggaaaaaaagtttgcagacacctgccctaaatgattatagtttgagagaaacttaacagaaatgtgtttggttactgatgcataagagcaagcaccaataaaatggcataaaaatattaaatcacaaatggataagtgagaccaaggcaatttagcaaattctactatttctgtattcacacctgtgtcttccacttgctgttttatttaactcacggctactgtcctaattttagggatgctaaaatagtttgttttaaaagaggtttgtttaagaaagcagtaggtacattatgtttactagacaggcccttggaccagctaagcgacagggaacctggtacattatgtttagttactgttttcttctcaaagttaaccaaagctaaataactttcctatgtaaaatgtgctgactcccaaaagaggagaaatgcaatggcttgagcttgcatgtgtcacaggtttgtggagccttcagccaggtgatggtcttcagctaaagagccagctgcatcttggtatctcttcctctgctaacttcctacttttagcaaaattctttcacttggaactctagctgatccttggccaggatcagatcctcaaaaggaaatattcagttagcagtggatattgtacaagatgtaacatggcttagaggaaagagtgtagacccagcgacagatcatcagtcactcaaatcctggttctctctcttcctccatctgtgactttgaacatgctacttggaggctcagcttcttcaccatcaacaggaggattacatctaatgcaggcaatcatctattacagatgccgaataaatgatatcaaagagcatagagaaacaaaaatcttttatgatgtacggaaaaaaaccatgctgatacagctggctattcagggtcacccagcagtcctccagcaaggtagaaacaccaaatcaatgagtttatgctagaatttttcacatggccactggaccattgtggaagtagactggttgaaatattcttagtatgacatagtaagttatatttgtttgaaccttatcctgtgaaagcattatctgtcccaaacagtatatgccttttatcagggacacattaaatataaatgtttaaccaaagaaagttgttcttataatgtaattataacagggatttataagagggaattataagagggattatgaaagggaattacttttgagcaaggggagccatttgggagtgcttcaagatacccaatatgatatacacaattatgatttgtcagtcaaaaataatattaagaacaaaaaaagagttaaaaaattctgatatgagtgtaatatacttaatatgtaggatgtctcaaatttccagtaaataaattttaatgtcccaaaa

SEQ ID NO: 244684 - DNA, 537 bp, Artificial Sequence
  derived and/or modified sequence
atgggcaacagcctgctgcgggagaacagacggcagcagaacacccaggagatgccctggaatgtgaggatgcagagccccaagcagaggaccagccgctgctgggaccaccacatcgccgagggctgcttctgcctgccctggaagaagatcctgatctttgagaagaggcaggacagccagaatgaaaatgaaagaatgagcagcacccccatccaggacaacgtggaccagacctacagcgaggagctgtgctacaccctcatcaaccaccgggtgctgtgcacccggcccagcggcaacagcgctgaggagtactatgaaaatgtgccctgcaaggccgagcggccccgggagagcctgggcggcacagaaacagagtacagcctgctgcacatgcccagcacagaccccaggcatgcccggagcccagaagatgaatatgagctgctgatgccccaccgcatcagcagccacttcctgcagcagccccggcccctgatggcccccagcgagacccagttcagccacctgtag

SEQ ID NO: 244685 - DNA, 537 bp, Artificial Sequence
  derived and/or modified sequence
atgggcaacagcctgctgcgggagaaccggcggcagcagaacacccaggagatgccttggaacgtgaggatgcagagccctaaacaacgcacttcaagatgctgggatcaccatattgccgaagggtgcttctgcctgccatggaaaaaaattcttatatttgagaagagacaggatagccagaatgaaaacgaaaggatgtccagtactccgatacaggataacgtggatcagacttacagcgaggagttatgttataccttgattaaccatcgggttctttgcacccgcccaagtggcaactccgcggaggagtattacgaaaacgtgccctgcaaggcagaaagaccacgcgagagccttgggggaaccgaaaccgagtattctctcttgcacatgccctccaccgatccccgtcatgcaagatcgccggaggacgagtacgagctcctgatgccgcaccgaatctctagccatttcttacagcaaccacgccccctcatggctccttctgagacacagttttctcacttatag

SEQ ID NO: 244686 - DNA, 537 bp, Artificial Sequence
  derived and/or modified sequence
atggggaatagcctgctgcgagaaaacaggcggcaacaaaatacccaggagatgccatggaatgtgaggatgcagtcccctaagcagaggacatctaggtgttgggatcaccacatcgctgagggctgcttctgcctgccatggaaaaagatcctcatttttgagaaacgacaggactcgcagaacgaaaatgaacgcatgtcttctacccccatccaagataacgtggaccagacttattcagaagagctgtgctacacacttatcaatcaccgcgtgctgtgtacccggcctagcgggaacagcgctgaagaatactacgaaaacgtgccttgcaaagcggagcgcccaagagagtccctgggcggaaccgaaaccgaatactccttgctgcacatgccttccacagacccaaggcatgccagatccccagaggacgagtacgaactgctaatgccacatcgcattagcagccacttcctgcagcaacctaggccactcatggccccaagtgagacgcagttctctcatttatag

SEQ ID NO: 244687 - DNA, 537 bp, Artificial Sequence
  derived and/or modified sequence
atgggcaacagcctgctgagagagaacagaagacagcagaacacccaggagatgccctggaacgtgagaatgcagagccccaagcagagaaccagcagatgctgggaccaccacatcgccgagggctgcttctgcctgccctggaagaagatcctgatcttcgagaagagacaggacagccagaacgagaacgagagaatgagcagcacccccatccaggacaacgtggaccagacctacagcgaggagctgtgctacaccctgatcaaccacagagtgctgtgcaccagacccagcggcaacagcgccgaggagtactacgagaacgtgccctgcaaggccgagagacccagagagagcctgggcggcaccgagaccgagtacagcctgctgcacatgcccagcaccgaccccagacacgccagaagccccgaggacgagtacgagctgctgatgccccacagaatcagcagccacttcctgcagcagcccagacccctgatggcccccagcgagacccagttcagccacctgtag

SEQ ID NO: 244688 - protein, 1248 aa, Artificial Sequence
  derived and/or modified sequence
MGKDQELLEAARTGNVALVEKLLSGRKGGILGGGSGPLPLSNLLSIWRGPNVNCTDSSGYTALHHAALNGHKDIVLKLLQYEASTNVADNKGYFPIHLAAWKGDVEIVKILIHHGPSHSRVNEQNNENETALHCAAQYGHSEVVAVLLEELTDPTIRNSKLETPLDLAALYGRLRVVKMIISAHPNLMSCNTRKHTPLHLAARNGHKAVVQVLLEAGMDVSCQTEKGSALHEAALFGKVDVVRVLLETGIDANIKDSLGRTVLDILKEHPSQKSLQIATLLQEYLEGVGRSTVLEEPVQEDATQETHISSPVESPSQKTKSETVTGELSKLLDEIKLCQEKDYSFEDLCHTISDHYLDNLSKISEEELGKNGSQSVRTSSTINLSPGEVEEEDDDENTCGPSGLWEALTPCNGCRNLGFPMLAQESYPKKRNYTMEIVPSASLDTFPSENENFLCDLMDTAVTKKPCSLEIARAPSPRTDNASEVAVTTPGTSNHRNSSTGPTPDCSPPSPDTALKNIVKVIRPQPKQRTSIVSSLDFHRMNHNQEYFEINTSTGCTSFTASPPASPPTSSVGTTEVKNEGTNHTDDLSRQDDNDPPKEYDPGQFAGLLHGSSPACESPENPFHLYGKREQCEKGQDEVSLANSPLPFKQSPIENNSEPLVKKIKPKVVSRTIFHKKSNQLENHTIVGTRSTRSGSRNGDQWVMNAGGFVERACTLGRIRSLPKALIDMHLSKSVSKSDSDLIAYPSNEKTSRVNWSESSTAEHSSKGNSERTPSFTSEWEEIDKIMSSIDVGINNELKEMNGETTRPRCPVQTVGQWLESIGLPQYENHLMANGFDNVQFMGSNVMEDQDLLEIGILNSGHRQRILQAIQLLPKMRPIGHDGYHPTSVAEWLDSIELGDYTKAFLINGYTSMDLLKKIWEVELINVLKINLIGHRKRILASLGDRLHDDPPQKPPRSITLREPSGNHTPPQLSPSLSQSTYTTGGSLDVPHIIMQGDARRRRNENYFDDIPRSKLERQMAQTGDWGEPSITLRPPNEATASTPVQYWQHHPEKLIFQSCDYKAFYLGSMLIKELRGTESTQDACAKMRVMCVKSTEQMKKVPTIILSVSYKGVKFIDATNKNIIAEHEIRNISCAAQDPEDLSTFAYITKDLKSNHHYCHVFTAFDVNLAYEIILTLGQAFEVAYQLALQARKGGHSSTLPESFENKPSKPIPKPRVSIRKSVDLLHASHTGQEPSERHTEEALRKF

SEQ ID NO: 244689 - protein, 254 aa, Artificial Sequence
  derived and/or modified sequence
MQGDARRRRNENYFDDIPRSKLERQMAQTGDWGEPSITLRPPNEATASTPVQYWQHHPEKLIFQSCDYKAFYLGSMLIKELRGTESTQDACAKMRANCQKSTEQMKKVPTIILSVSYKGVKFIDATNKNIIAEHEIRNISCAAQDPEDLSTFAYITKDLKSNHHYCHVFTAFDVNLAYEIILTLGQAFEVAYQLALQARKGGHSSTLPESFENKPSKPIPKPRVSIRKSVDLLHASHTGQEPSERHTEEALRKF

SEQ ID NO: 244690 - protein, 1248 aa, Artificial Sequence
  derived and/or modified sequence
MGKDQELLEAARTGNVALVEKLLSGRKGGILGGGSGPLPLSNLLSIWRGPNVNCTDSSGYTALHHAALNGHKDIVLKLLQYEASTNVADNKGYFPIHLAAWKGDVEIVKILIHHGPSHSRVNEQNNENETALHCAAQYGHSEVVAVLLEELTDPTIRNSKLETPLDLAALYGRLRVVKMIISAHPNLMSCNTRKHTPLHLAARNGHKAVVQVLLEAGMDVSCQTEKGSALHEAALFGKVDVVRVLLETGIDANIKDSLGRTVLDILKEHPSQKSLQIATLLQEYLEGVGRSTVLEEPVQEDATQETHISSPVESPSQKTKSETVTGELSKLLDEIKLCQEKDYSFEDLCHTISDHYLDNLSKISEEELGKNGSQSVRTSSTINLSPGEVEEEDDDENTCGPSGLWEALTPCNGCRNLGFPMLAQESYPKKRNYTMEIVPSASLDTFPSENENFLCDLMDTAVTKKPCSLEIARAPSPRTDNASEVAVTTPGTSNHRNSSTGPTPDCSPPSPDTALKNIVKVIRPQPKQRTSIVSSLDFHRMNHNQEYFEINTSTGCTSFTASPPASPPTSSVGTTEVKNEGTNHTDDLSRQDDNDPPKEYDPGQFAGLLHGSSPACESPENPFHLYGKREQCEKGQDEVSLANSPLPFKQSPIENNSEPLVKKIKPKVVSRTIFHKKSNQLENHTIVGTRSTRSGSRNGDQWVMNAGGFVERACTLGRIRSLPKALIDMHLSKSVSKSDSDLIAYPSNEKTSRVNWSESSTAEHSSKGNSERTPSFTSEWEEIDKIMSSIDVGINNELKEMNGETTRPRCPVQTVGQWLESIGLPQYENHLMANGFDNVQFMGSNVMEDQDLLEIGILNSGHRQRILQAIQLLPKMRPIGHDGYHPTSVAEWLDSIELGDYTKAFLINGYTSMDLLKKIWEVELINVLKINLIGHRKRILASLGDRLHDDPPQKPPRSITLREPSGNHTPPQLSPSLSQSTYTTGGSLDVPHIIMQGDARRRRNENYFDDIPRSKLERQMAQTGDWGEPSITLRPPNEATASTPVQYWQHHPEKLIFQSCDYKAFYLGSMLIKELRGTESTQDACAKMRANCQKSTEQMKKVPTIILSVSYKGVKFIDATNKNIIAEHEIRNISCAAQDPEDLSTFAYITKDLKSNHHYCHVFTAFDVNLAYEIILTLGQAFEVAYQLALQARKGGHSSTLPESFENKPSKPIPKPRVSIRKSVDLLHASHTGQEPSERHTEEALRKF

SEQ ID NO: 244691 - DNA, 3747 bp, Artificial Sequence
  derived and/or modified sequence
atgggtaaagaccaggaactgctggaagccgctcgaacagggaacgtggctctggtggagaagctgctgagtggccggaagggggggattcttggtggtggcagcgggcctttgccgttgagcaacctgctctcaatctggagagggcccaatgtcaattgcaccgacagcagtggttataccgcacttcatcatgccgcactcaacgggcacaaggacatcgtgctcaagctgctacagtatgaagcctctaccaatgtggctgacaacaagggttacttcccaattcatcttgccgcttggaagggcgacgtggaaatcgtgaaaatcctcatccaccatgggccgagccactcaagagtgaacgagcagaacaatgaaaatgaaactgcgttgcactgcgctgcacagtacggccacagcgaagtcgtcgcggtgttgctggaagagctgacggacccaaccatccgtaactctaaattggaaactccgcttgatctggccgccctgtacggccggcttcgtgtcgtgaaaatgataatatctgcccaccccaatctcatgtcttgtaatacacgcaaacatacacctttgcacctggcagccagaaatgggcataaagccgtggtgcaggtgctcctggaggccggcatggacgtatcctgtcagaccgaaaagggctcagcactgcacgaagctgctttattcggcaaagtcgacgtggtcagggtcctgttggagacaggtattgatgccaacatcaaggactcgctgggtagaactgttcttgatatcctgaaagaacatccatctcaaaagtcgctgcagatcgctacactgctgcaggaatacctggaaggagtggggcggtccacagtgttggaggagccagtgcaagaggatgccactcaggagacacatatatcaagccctgtcgagtctccttcccagaagacgaaatctgagacagtgacgggggaattgagtaagctcctggacgagataaagctatgccaagaaaaggactatagttttgaggacctatgtcacactatcagtgaccactacctagacaacttgagcaagatttctgaagaagaactggggaagaatggtagccagtccgtgagaacaagttcgaccatcaatttgagtcctggcgaggtggaggaagaagatgacgatgaaaatacctgcgggccatcaggtctttgggaagccctgacaccctgcaatggatgccgtaacctgggcttcccaatgctagcacaggagagttatccgaagaagcgcaattataccatggaaatcgtgccgtccgcttccctggataccttcccaagtgaaaatgaaaattttctctgcgaccttatggataccgcagtcaccaagaagccctgtagcctcgagatagcacgtgctcctagcccacgcacagacaacgctagtgaagtggccgtgacaacccccggtacctctaatcaccggaacagtagtaccgggcctactcctgactgttcaccccccagtcccgatacagctctgaagaacatcgtgaaggtgattcgaccccaacctaaacagcggacaagcattgtatctagcttagactttcatcgtatgaaccataatcaagaatactttgagattaacacgtcaaccgggtgcacttccttcacagcttcgccacccgcgagtccacccacctcctcggtgggcaccactgaggttaagaacgaaggcacgaatcataccgacgacctctctcgccaggacgataatgatccgcctaaggagtatgaccctgggcagttcgccggactgcttcacggttcaagccccgcctgcgagagcccagagaaccccttccacttgtacggcaagcgagagcagtgtgaaaaaggacaggacgaggtgtctcttgcgaattctccactcccattcaaacagtcacccatagaaaacaattcggagcccttggtgaagaaaataaaacctaaggttgtgtcacggaccattttccataaaaagagcaatcagctggagaatcacacaattgtcggtacaagatccacacggtccggaagccggaacggagaccagtgggtgatgaatgctggggggtttgtggagcgcgcctgtacgttaggccgcatcaggagcctgcctaaggccctgattgatatgcacctgtccaagtctgtgtccaagagcgatagcgacctgatagcatacccctccaacgaaaaaacgagtcgagttaattggagcgagtctagcacggccgaacactctagtaaaggcaactccgagcgaactccctcatttacgtcagagtgggaagaaattgataagatcatgagtagtatagatgtgggcattaataacgagctgaaagagatgaacggggaaaccactcggcctcgttgccctgtccaaacagtggggcagtggctcgaatctatcggcctgccacagtatgaaaatcacctgatggctaacgggttcgacaacgtacaattcatgggaagcaatgtgatggaagaccaagatctgctcgagattgggatccttaatagcgggcaccgtcagcgtattctccaggccattcaactgttgccaaaaatgcgcccaataggtcatgatggctaccaccccacttctgtggctgagtggctcgactctatcgagttgggcgactatacgaaggcctttcttatcaatggctatacctccatggacctgctcaaaaaaatctgggaagtggagctaataaatgttctgaaaatcaatctcatcgggcaccgaaagcgcattcttgcgtctttaggcgatagactgcatgacgatccaccgcagaaaccccccagatctatcactcttagagagccttcgggtaaccacacgcccccccaacttagcccttccttgagccagtccacatacactactggaggttccttggacgtcccccacattataatgcagggggacgcccggagacgccgcaatgaaaattacttcgacgacattcctcggagtaagctggagcgtcaaatggcgcagactggagattggggcgaaccttcaattacgctcagacctcccaatgaagcaacagctagcacacccgtacagtattggcagcatcaccccgagaagctgatcttccagtcctgcgattacaaagccttctacctgggctctatgttgattaaggagctgagagggaccgaaagcacccaagacgcctgcgccaagatgcgggtgatgtgcgtgaagtccactgaacagatgaagaaggtcccgaccattatactctcggtttcctacaaaggggtcaagttcatagatgcgacaaacaaaaatattattgccgagcatgagattaggaatatttcctgcgccgctcaagatccagaagacttatctaccttcgcctacatcacaaaagacttaaaatcaaaccatcactattgccacgtgtttactgcgttcgatgtaaacctggcctatgaaatcatccttactttgggtcaggcattcgaagtcgcctaccagctggcactccaggctcgtaagggagggcactctagtactttgcccgaaagcttcgaaaacaagccgtcaaaacccataccaaaaccaagggttagtattaggaaatcggtagacctgctgcacgctagccatacagggcaagagccgtcggagaggcatactgaggaggccctgcgtaaattttag

SEQ ID NO: 244692 - DNA, 3747 bp, Artificial Sequence
  derived and/or modified sequence
atgggcaaggaccaagagctgctcgaagctgcgagaaccggtaacgtggctctagtggaaaaactcctgagcggtagaaaaggggggattcttgggggtggttcgggcccactgccactgagcaacctgctctcaatttggaggggcccaaatgtgaactgcacagactcctccggctacaccgctttacaccatgccgcccttaacggccataaagatatcgtactcaaactattacagtacgaggccagtaccaatgtggccgataacaagggttacttccctattcacctcgccgcctggaagggagatgtggagattgtcaagatcctaatccatcacgggccatcccacagcagggtgaatgagcagaataacgagaatgaaaccgccctacattgtgcggcacagtacggacactccgaggttgtggcggtccttcttgaggagctgacagatcccaccatcaggaacagcaagctggagactcccctggacctggctgcgctgtatggacgactgcgcgtggttaaaatgataatttcagcccacccgaacctgatgtcttgtaatacccgcaagcacacaccactgcacttggccgccagaaacggtcataaagccgtggttcaggtgttactggaggccggcatggatgtgagctgtcagaccgagaagggttcggccctccatgaggccgctttgttcggcaaggtggacgtagtccgggtacttctcgagacagggatagacgctaatataaaggattctctcgggagaacagttctggacatactcaaagagcatccttcccagaagagcttgcaaatagcaacattgctgcaggagtatcttgagggagtggggcgcagtaccgtactggaggaaccagtgcaggaagacgcaacccaagaaactcacatctcctcacctgtggagtctccttctcagaaaacgaaaagcgaaaccgttaccggcgagctgtcaaagctgctggatgaaattaagctatgccaagaaaaggattatagttttgaggatctatgtcacacaattagcgaccattacctagataatctttccaaaatttcggaggaggagctcggaaagaacgggtctcagagcgtgcgaacgagttcgacgatcaacctctctcccggcgaggtcgaggaagaggatgacgatgagaatacttgtggcccaagtggcctgtgggaggccttgacaccctgcaacggatgccgaaatctcggatttcccatgttagcacaggaatcatatcccaagaagcggaattacactatggagatcgtgccttctgctagtctcgacacttttcccagcgagaacgaaaatttcctttgtgacctgatggacacagctgtcacaaagaagccatgcagcctggagattgccagggctcctagccctcgaacggacaacgcaagtgaagtagccgtgacgacaccagggactagtaaccacaggaacagcagcactgggccaacccccgattgcagcccacccagtcctgataccgctctaaaaaacatcgttaaggttattagaccgcagcccaaacagcggacctccatagtgtccagcctggacttccatcggatgaatcataatcaggaatattttgagattaacacatcaacaggttgtaccagtttcactgcatccccccccgctagcccgccaacttctagcgtgggaactactgaggtaaagaatgaaggtaccaatcacacagatgatctaagcaggcaggacgacaacgacccaccaaaagaatacgatcctggccagttcgccgggttacttcatggctcttcccctgcatgtgaaagtcctgagaaccccttccacttgtatggaaagcgggaacaatgcgagaaaggacaggacgaggtgagtctcgcaaattctccgctgccattcaaacagtcacccatagagaataactcggagcccttggtgaaaaaaatcaagccgaaggtagtgtctcgtacgatcttccacaaaaagagtaaccagctggaaaaccacaccattgttggcacacggtcaactaggtcaggtagccgaaacggggatcaatgggtgatgaacgcaggaggcttcgtcgaaagagcatgcactctgggaagaatcaggtcactacctaaagctttgattgatatgcaccttagtaaatctgtctctaaatccgacagcgatcttatcgcatacccaagcaatgaaaagacatcccgcgtaaattggagtgaatctagcacggccgaacactcaagcaagggcaacagcgagcggacacccagcttcactagtgagtgggaagaaattgacaagattatgtcttccatcgacgtaggtatcaataacgagcttaaggagatgaatggtgagactacaagaccgagatgtcccgtacagacggtgggacaatggttagagtctatcgggttgccacaatacgaaaaccacctcatggctaacggattcgataacgtgcagttcatggggtctaacgtcatggaggaccaagatttgctcgagataggaattcttaattccggtcatagacagcgcatccttcaggctattcagttgctgcccaaaatgaggcctatcgggcacgacggctaccaccccaccagtgtggcagaatggcttgacagcatcgaactcggagattacacgaaggcttttcttatcaatggttacactagcatggatctgctcaagaaaatttgggaagtggaattaatcaatgttttaaaaatcaatttgatcggtcatcggaagagaatcctcgcaagtctcggcgacaggctacatgacgatccacctcagaaacctcctagatctataaccttgagagagccaagtgggaaccatactccaccccagctgtccccctctctcagccagagcacgtataccacaggggggtctttggacgtgccgcatatcatcatgcagggggacgcaaggagaaggcgcaatgaaaattacttcgacgacatcccacggtctaagttagaaaggcagatggctcagacaggcgactggggcgagccttctataaccctacgcccgcccaacgaagcaaccgcttccactcccgtccagtactggcaacaccaccctgagaagctcatcttccagtcttgtgattacaaggctttttatctcgggagcatgttgattaaggagctgcgcggcacggaaagcactcaggacgcatgtgctaagatgagagctaactgtcagaaaagtactgagcagatgaagaaggttccaactattatcctctcggtgtcatataagggcgtaaagtttattgacgcaaccaacaaaaacataattgcagagcacgagattcgtaatatcagctgcgccgcccaggatcctgaggacctgtctacctttgcgtacatcaccaaagatctgaagtccaatcaccactattgtcatgtctttacggcctttgatgtgaatctcgcttacgagattatcttaacgctgggacaagcttttgaggtcgcctaccagctcgctctgcaggcaaggaaggggggccactcctccactctgcccgaatccttcgagaataaaccgtccaaacctattcctaagcctcgcgtgagtatcagaaaatccgttgacctgctccatgcaagccacacaggacaggagccttccgagaggcacactgaagaagcacttaggaagttctag

SEQ ID NO: 244693 - DNA, 3747 bp, Artificial Sequence
  derived and/or modified sequence
atgggcaaggaccaggagctgctggaggccgccaggactggaaatgtggccctggtggagaagctgctgagcggcaggaaaggaggcatcctgggcggcggcagcggccccctgcccctgagcaacctgctgagcatctggaggggccccaacgtgaactgcacagacagcagcggctacacagccctgcaccacgccgccctgaatggccacaaggacatcgtgctgaagctgctgcagtatgaggccagcaccaacgtggccgacaacaagggctacttccccatccacctggccgcctggaagggagatgtggagatcgtgaagatcctgatccaccacggccccagccacagccgggtgaatgagcagaacaatgaaaatgaaacagccctgcactgtgccgcccagtatggccacagcgaggtggtggccgtgctgctggaggagctgacagaccccaccatccggaacagcaagctggagacccccctggacctggccgccctgtatggccgcctgcgggtggtgaagatgatcatcagcgcccaccccaacctgatgagctgcaacaccaggaagcacacccccctgcacctggccgccagaaatggccacaaggctgtggtgcaggtgctgctggaggccggcatggatgtgtcctgccagacagagaagggcagcgccctgcatgaagctgccctgtttgggaaggtggatgtggtgcgggtgctgctggagaccggcattgatgccaacatcaaggacagcctgggccgcacagtgctggacatcctgaaggagcaccccagccagaagagcctgcagatcgccaccctgctgcaggagtacctggagggcgtgggccgcagcacagtgctggaggagcctgtgcaggaggatgccacccaggagacccacatcagcagccctgtggagagccccagccagaagaccaagtcagaaacagtgactggagagctgagcaagctgctggatgagatcaagctgtgccaggagaaggactacagctttgaggacctgtgccacaccatcagtgaccactacctggacaacctgagcaagatcagcgaggaggagctgggcaagaatggcagccagagcgtgaggaccagcagcaccatcaacctgagccctggagaggtggaggaggaggatgatgatgagaacacctgtggccccagcggcctgtgggaggccctgaccccctgcaatggctgcaggaacctgggcttccccatgctggcccaggagagctaccccaagaagaggaactacaccatggagatcgtgcccagcgccagcctggacaccttccccagtgaaaatgaaaacttcctgtgtgacctgatggacacagctgtgaccaagaagccctgcagcctggagatcgcccgggcccccagccccaggacagacaatgccagcgaggtggccgtgaccaccccaggcaccagcaaccacaggaacagcagcacaggccccaccccagactgcagcccccccagcccagacacagccctgaagaacatcgtgaaggtgatccggccccagcccaagcagaggaccagcatcgtgagcagcctggacttccacaggatgaaccacaaccaggagtactttgagatcaacaccagcacaggctgcaccagcttcaccgccagccccccagccagcccccccaccagctctgtgggcaccacagaggtgaagaatgaaggcaccaaccacacagatgacctgagccggcaggatgacaatgacccccccaaggagtatgaccccggccagtttgctggcctgctgcacggcagcagccctgcctgtgagagccctgagaaccccttccacctgtatggcaagcgggagcagtgtgagaagggccaggatgaggtgtccctggccaacagccccctgcccttcaagcagagccccatcgagaacaacagcgagcccctggtgaagaagatcaagcccaaggtggtgtccaggaccatcttccacaagaagagcaaccagctggagaaccacaccatcgtgggcaccaggagcaccaggagcggcagcagaaatggagaccagtgggtgatgaatgctgggggctttgtggagcgggcctgcaccctgggccgcatccgcagcctgcccaaggccctgattgacatgcacctgagcaagtctgtgtccaagagtgacagcgacctgattgcctaccccagcaatgagaagaccagccgggtgaactggagcgagagcagcacagctgagcacagcagcaaaggaaacagcgagaggacccccagcttcaccagcgagtgggaggagattgacaagatcatgagcagcattgatgtgggcatcaacaatgagctgaaggagatgaatggagagaccacccggccccgctgccctgtgcagacagtgggccagtggctggagagcatcggcctgccccagtatgagaaccacctgatggccaacggctttgacaacgtgcagttcatgggcagcaatgtgatggaggaccaggacctgctggagatcggcatcctgaacagcggccaccggcagaggatcctgcaggccatccagctgctgcccaagatgaggcccatcggccatgatggctaccaccccacctctgtggccgagtggctggacagcattgagctgggggactacaccaaggccttcctgatcaatggctacacctccatggacctgctgaagaagatctgggaggtggagctgatcaacgtgctgaagatcaacctgattggccacaggaagaggatcctggccagcctgggggaccggctgcatgatgatcctccccagaagcccccaagaagcatcaccctgcgggagcccagcggcaaccacaccccaccccagctgagccccagcctgagccagagcacctacaccaccggcggcagcctggatgtgccccacatcatcatgcagggagatgccaggagaagaagaaatgaaaactactttgatgacatccccaggagcaagctggagcggcagatggcccagacaggagactggggcgagcccagcatcaccctgcggcccccaaatgaggccacagccagcacccctgtgcagtactggcagcaccaccctgagaagctgatcttccagagctgtgactacaaggccttctacctgggctccatgctgatcaaggagctgcggggcacagagagcacccaggatgcctgtgccaagatgagggtgatgtgtgtgaagagcacagagcagatgaagaaggtgcccaccatcatcctgtctgtgtcctacaagggcgtgaagttcattgatgccaccaacaagaacatcatcgccgagcacgagatccggaacatcagctgtgccgcccaggaccctgaggacctgagcacctttgcctacatcaccaaggacctgaagagcaaccaccactactgccacgtgttcaccgcctttgatgtgaacctggcctatgagatcatcctgaccctgggccaggcctttgaggtggcctaccagctggccctgcaggccaggaagggcggccacagcagcaccctgcctgagagctttgagaacaagcccagcaagcccatccccaagccccgggtgtccatcaggaagtctgtggacctgctgcacgccagccacacaggccaggagcccagcgagcggcacacagaggaggccctgaggaagttctag

SEQ ID NO: 244694 - DNA, 3747 bp, Artificial Sequence
  derived and/or modified sequence
atgggcaaggaccaggagctgctggaggccgccaggactggaaatgtggccctggtggagaagctgctgagcggcaggaaaggaggcatcctgggcggcggcagcggccccctgcccctgagcaacctgctgagcatctggaggggccccaacgtgaactgcacagacagcagcggctacacagccctgcaccacgccgccctgaatggccacaaggacatcgtgctgaagctgctgcagtatgaggccagcaccaacgtggccgacaacaagggctacttccccatccacctggccgcctggaagggagatgtggagatcgtgaagatcctgatccaccacggccccagccacagccgggtgaatgagcagaacaatgaaaatgaaacagccctgcactgtgccgcccagtatggccacagcgaggtggtggccgtgctgctggaggagctgacagaccccaccatccggaacagcaagctggagacccccctggacctggccgccctgtatggccgcctgcgggtggtgaagatgatcatcagcgcccaccccaacctgatgagctgcaacaccaggaagcacacccccctgcacctggccgccagaaatggccacaaggctgtggtgcaggtgctgctggaggccggcatggatgtgtcctgccagacagagaagggcagcgccctgcatgaagctgccctgtttgggaaggtggatgtggtgcgggtgctgctggagaccggcattgatgccaacatcaaggacagcctgggccgcacagtgctggacatcctgaaggagcaccccagccagaagagcctgcagatcgccaccctgctgcaggagtacctggagggcgtgggccgcagcacagtgctggaggagcctgtgcaggaggatgccacccaggagacccacatcagcagccctgtggagagccccagccagaagaccaagtcagaaacagtgactggagagctgagcaagctgctggatgagatcaagctgtgccaggagaaggactacagctttgaggacctgtgccacaccatcagtgaccactacctggacaacctgagcaagatcagcgaggaggagctgggcaagaatggcagccagagcgtgaggaccagcagcaccatcaacctgagccctggagaggtggaggaggaggatgatgatgagaacacctgtggccccagcggcctgtgggaggccctgaccccctgcaatggctgcaggaacctgggcttccccatgctggcccaggagagctaccccaagaagaggaactacaccatggagatcgtgcccagcgccagcctggacaccttccccagtgaaaatgaaaacttcctgtgtgacctgatggacacagctgtgaccaagaagccctgcagcctggagatcgcccgggcccccagccccaggacagacaatgccagcgaggtggccgtgaccaccccaggcaccagcaaccacaggaacagcagcacaggccccaccccagactgcagcccccccagcccagacacagccctgaagaacatcgtgaaggtgatccggccccagcccaagcagaggaccagcatcgtgagcagcctggacttccacaggatgaaccacaaccaggagtactttgagatcaacaccagcacaggctgcaccagcttcaccgccagccccccagccagcccccccaccagctctgtgggcaccacagaggtgaagaatgaaggcaccaaccacacagatgacctgagccggcaggatgacaatgacccccccaaggagtatgaccccggccagtttgctggcctgctgcacggcagcagccctgcctgtgagagccctgagaaccccttccacctgtatggcaagcgggagcagtgtgagaagggccaggatgaggtgtccctggccaacagccccctgcccttcaagcagagccccatcgagaacaacagcgagcccctggtgaagaagatcaagcccaaggtggtgtccaggaccatcttccacaagaagagcaaccagctggagaaccacaccatcgtgggcaccaggagcaccaggagcggcagcagaaatggagaccagtgggtgatgaatgctgggggctttgtggagcgggcctgcaccctgggccgcatccgcagcctgcccaaggccctgattgacatgcacctgagcaagtctgtgtccaagagtgacagcgacctgattgcctaccccagcaatgagaagaccagccgggtgaactggagcgagagcagcacagctgagcacagcagcaaaggaaacagcgagaggacccccagcttcaccagcgagtgggaggagattgacaagatcatgagcagcattgatgtgggcatcaacaatgagctgaaggagatgaatggagagaccacccggccccgctgccctgtgcagacagtgggccagtggctggagagcatcggcctgccccagtatgagaaccacctgatggccaacggctttgacaacgtgcagttcatgggcagcaatgtgatggaggaccaggacctgctggagatcggcatcctgaacagcggccaccggcagaggatcctgcaggccatccagctgctgcccaagatgaggcccatcggccatgatggctaccaccccacctctgtggccgagtggctggacagcattgagctgggggactacaccaaggccttcctgatcaatggctacacctccatggacctgctgaagaagatctgggaggtggagctgatcaacgtgctgaagatcaacctgattggccacaggaagaggatcctggccagcctgggggaccggctgcatgatgatcctccccagaagcccccaagaagcatcaccctgcgggagcccagcggcaaccacaccccaccccagctgagccccagcctgagccagagcacctacaccaccggcggcagcctggatgtgccccacatcatcatgcagggagatgccaggagaagaagaaatgaaaactactttgatgacatccccaggagcaagctggagcggcagatggcccagacaggagactggggcgagcccagcatcaccctgcggcccccaaatgaggccacagccagcacccctgtgcagtactggcagcaccaccctgagaagctgatcttccagagctgtgactacaaggccttctacctgggctccatgctgatcaaggagctgcggggcacagagagcacccaggatgcctgtgccaagatgagggccaactgccagaagagcacagagcagatgaagaaggtgcccaccatcatcctgtctgtgtcctacaagggcgtgaagttcattgatgccaccaacaagaacatcatcgccgagcacgagatccggaacatcagctgtgccgcccaggaccctgaggacctgagcacctttgcctacatcaccaaggacctgaagagcaaccaccactactgccacgtgttcaccgcctttgatgtgaacctggcctatgagatcatcctgaccctgggccaggcctttgaggtggcctaccagctggccctgcaggccaggaagggcggccacagcagcaccctgcctgagagctttgagaacaagcccagcaagcccatccccaagccccgggtgtccatcaggaagtctgtggacctgctgcacgccagccacacaggccaggagcccagcgagcggcacacagaggaggccctgaggaagttctag

SEQ ID NO: 244695 - DNA, 3747 bp, Artificial Sequence
  derived and/or modified sequence
atgggcaaggaccaggagctgctggaggccgcccggaccggcaacgtagccttagtagagaagctcctctccggacgcaagggcgggatactgggtggagggtctggacccctgcctctctcaaatctgctgagcatttggagaggtcctaatgtgaattgtaccgatagcagtgggtatactgccctccatcacgcggctctgaacggccacaaagatatcgtcttgaagctgcttcagtacgaggctagcactaatgtggcggataacaagggatacttcccaatacacttggctgcttggaaaggggatgtcgaaatcgtcaagattctgattcaccatggcccaagccactcaagggtgaatgagcagaacaatgagaatgagaccgcattacattgcgcagcccagtacgggcactccgaggttgtggccgtgctgcttgaagagttgaccgaccctaccataaggaattccaaattagagacaccgctggacctggcggctctttatgggcggttgcgcgtcgtgaagatgattatcagcgcccacccaaaccttatgagctgcaacacacgcaaacatacgccactgcatctagctgcccggaatggccacaaggccgtggttcaggtgctccttgaggccggcatggacgtctcttgtcagaccgagaaaggctccgccttgcatgaggccgccttgttcggaaaggtcgacgttgttcgcgtgctcttggaaaccggtatcgatgctaatataaaagacagcctcggacgcaccgtactagatatcttgaaagaacacccctcccagaaatccctccagattgccactctgctgcaggagtatctggaaggggtggggcgttcaaccgttctggaagagcccgttcaggaagatgctacacaggagactcatatctcctcgcccgtggaatcaccaagccagaagaccaaatctgagaccgttactggggaattgtccaagctgctcgacgagataaagttgtgtcaggaaaaagattatagtttcgaagacctctgccataccataagcgatcactatttagacaacctttcaaagatcagcgaggaggagctggggaaaaacggctctcagagcgtgcgaacttccagcactatcaatcttagtcccggcgaagtggaggaagaggatgatgatgagaacacctgcggtcctagtggcctgtgggaggccttaactccttgtaatggatgtcgtaacttgggatttcccatgttggctcaagagagctatccgaagaaacggaattacacgatggagatcgtgcccagtgctagccttgatacgtttccaagtgaaaatgaaaatttcttgtgtgacctgatggatactgccgttaccaaaaaaccttgctcgctagaaattgccagagccccaagtccacggaccgataatgcttctgaagtagccgtgacgacccccggcacaagcaaccaccggaacagttccactggcccgacaccagactgctctccaccctcgcctgacactgccctgaaaaacattgtgaaggtgattcggccacagcctaagcaaaggacatcgatcgtaagcagcttagattttcataggatgaaccacaatcaggagtactttgaaattaatacttcaacagggtgtaccagcttcactgcttcccccccggcttctcctcctacctcttccgtagggactaccgaagtgaaaaacgagggtacaaaccacaccgacgacctgtccagacaggatgataatgacccgcctaaggaatatgaccccggtcagttcgctggcttgctgcacgggtcttctcccgcctgcgaaagtccagaaaacccatttcacctgtatggaaaacgagaacagtgtgaaaaaggtcaggatgaagttagcctggcaaactctccgctgcctttcaaacaaagtcctattgagaataactctgagccactcgttaaaaagatcaagcccaaagtcgtatctagaaccatctttcacaagaagtcaaatcagctcgagaaccacaccatcgtgggtactaggagcacacgctcgggctctaggaatggcgaccagtgggttatgaatgccggtggctttgtggaaagggcttgtaccctcggaagaattaggtccctccccaaagctctgatcgatatgcatttgtccaagagtgtttctaaatcggatagcgacttgattgcctatccttccaatgagaaaactagccgcgtgaattggagcgagtctagtacagccgaacatagctcgaaggggaattctgaacgtacaccaagtttcacctcagaatgggaagagatcgacaagattatgtcttctatagatgtcggcatcaataatgagttgaaggaaatgaacggcgaaactactcgaccccgatgccctgtgcagacagtcggccagtggctggagagtattgggctgccccagtacgaaaaccatctcatggctaatggttttgacaatgttcaattcatggggagcaatgtgatggaggatcaggacctcctcgagattggaattttgaacagtggccatagacagagaatcctgcaggctatccagttattaccaaaaatgcgccccataggccatgacggataccatcccacttcggtcgcagaatggttggatagcatcgaacttggtgactacactaaggcttttctaattaatgggtacacaagtatggatctgctcaaaaagatctgggaagtggaactgattaatgtcctcaaaataaacctgattggacaccggaaaaggattttagcatccctgggcgaccgcttacacgacgacccccctcaaaagcctccaaggtctatcaccctgcgagagcccagtggtaaccacaccccaccacaactgagtccgagtcttagccaatcaacatatacaaccggaggatccttggacgtgcctcatatcattatgcagggagacgcaagacggcgacgcaatgagaattatttcgacgacattccccgatctaagctggaacggcagatggcccagactggggactggggcgagccttccataaccctcagaccccctaacgaagctactgcgagtacacccgtgcagtactggcaacaccatcccgagaagttgattttccagtcatgtgattacaaagcattctatctgggaagcatgcttattaaagaactccgcggtacggagagtacacaagacgcatgtgcgaagatgcgcgtgatgtgcgttaaaagcacagaacagatgaagaaggttccaactatcatcctctcggtgagttacaaaggcgttaaattcatagatgccactaacaagaacatcatcgcagaacacgaaattcgtaacattagctgtgccgcgcaggaccccgaggatctgtccacttttgcctatataaccaaggacctgaagtccaatcaccactattgccatgttttcacagcatttgatgtgaatctggcttatgaaattatactcaccctgggccaggccttcgaggtggcctatcagttggctctccaggctaggaagggtggccactcttccacgctgcccgagagtttcgaaaataagccctcgaaaccaatccctaaaccaagggtgtctatccggaaatctgttgatctgttgcacgcctcccacaccggacaggagccatccgagcgccacaccgaggaggcacttaggaagttctag

SEQ ID NO: 244696 - DNA, 3747 bp, Artificial Sequence
  derived and/or modified sequence
atgggcaaggaccaggagctgctggaggccgcccggaccggcaacgtcgcactggtggagaagctcctgtctggacgaaagggcggcattctaggcgggggatccgggcctctcccactgtccaaccttcttagtatttggagggggcccaatgtgaattgcaccgacagtagcggttacactgccctgcaccatgccgcccttaacggccacaaggacatcgtcttaaagttgctccagtatgaggcatccactaacgtggctgataacaaaggctatttccctattcacctggctgcgtggaagggcgacgtggagatcgtcaagatcctaatccaccacggaccgtctcacagtagggtgaatgagcagaacaacgaaaacgaaacagctttacactgtgctgcccagtacggccattcagaggtcgtggcagtcctgctggaagagctgactgacccaaccatcaggaatagtaagctcgaaacacccttagacctggcagcgttgtatggcagactacgcgttgttaaaatgataatctcagcccaccctaaccttatgagctgtaacacccggaaacatacacccttgcacctggcggctaggaatggccataaggccgtcgtgcaggtgctgctggaagccgggatggatgtgtcttgccagactgagaagggctccgccctgcacgaggctgcactgttcggtaaagtcgacgtcgtgagagtcctcctagagaccgggatagacgctaatatcaaggacagtctcggaaggacggttctcgatattttaaaggagcatccttctcagaagtcgctgcagattgctaccctcctgcaagaatacttagagggagtcggtagatctaccgtcctggaggagccagtacaggaggatgccactcaagaaactcacatatcaagccccgtggaatcaccctctcagaaaaccaaaagtgagaccgtaacaggagaactctcaaagctacttgatgaaattaagctgtgccaggagaaggactacagctttgaggacttgtgccatacaatctccgaccactatctcgataatctatccaaaatttctgaggaagagctgggcaagaacggctctcagtcggttcgtacatcgagtaccatcaatctgagtcctggggaggtcgaagaggaggatgatgacgagaacacctgtgggccctctggcttgtgggaagcactgaccccatgtaatggatgtcggaatctcggcttcccaatgctggctcaggaatcctaccccaagaagagaaactatactatggaaatagtccccagcgcttcgctcgacacctttccatctgagaatgaaaattttctttgcgatctgatggataccgccgtcactaagaagccatgcagcttagaaatcgctcgtgccccttcaccgaggacagataacgcctctgaagtggcagttactacccctggtacctcgaaccacaggaactccagtactggtcccactcctgactgtagcccaccatctccagacacagctcttaaaaacatcgtgaaggtgattaggccacagcctaaacagaggacgtcgattgtgagttcactcgacttccaccgcatgaaccacaatcaggagtactttgaaatcaacacaagcaccggctgcactagctttacggcctctcccccagcaagtccaccaacctcaagcgttggaactacagaggtgaaaaacgaaggcactaaccacacggatgacttgtcgagacaggacgataacgatccccccaaagaatatgaccctggacagtttgctgggttactgcatgggagctctccggcatgtgagagtccagaaaatccattccacttgtacggaaaacgagaacagtgcgagaaagggcaggacgaagtttctctagcaaactctcctcttccctttaaacagtccccaattgagaataatagtgagccactagtgaaaaagatcaaaccgaaggtggtatcaagaactatctttcataagaagagcaatcagctagagaaccatactatagtgggcacacgctctactagatcaggctcaaggaatggggaccaatgggtaatgaatgctggaggcttcgtcgagcgcgcctgtactcttggccgcattagatcacttccgaaagcgctgattgacatgcatctcagtaagtcagtgtcaaaatctgattctgacctgattgcctatccaagcaatgagaagactagtcgggtcaactggtccgagagttctaccgccgaacattcctccaaaggaaactcagagcgaaccccaagtttcacttccgagtgggaagaaatagacaagatcatgagttctatcgatgtgggtatcaacaacgagcttaaggagatgaatggcgagacgacccgcccacgctgccctgtacaaaccgtgggtcagtggttggagagcattggcctgcctcagtacgagaaccacctaatggccaatggattcgataacgtgcaattcatgggctccaacgtcatggaagaccaagatctgctagagatcgggatcctgaactcaggtcaccgccagaggatactgcaagccatccagctgttacccaaaatgcgtcctattggccacgacgggtaccacccaaccagcgtggccgaatggctggactcaattgaattgggtgactatacaaaggcgtttctgattaatggctacaccagtatggacctgcttaaaaaaatttgggaggttgagttaattaacgtactgaagatcaacctgattggacaccggaagagaattctggcttccctcggagaccgccttcacgatgaccctcctcagaagccgccccggagcatcacccttcgggagcctagcggtaatcatactcccccccaacttagcccctccctgagtcagtcaacgtacaccacaggggggtcacttgacgtcccgcacatcataatgcagggagacgcacggagaagaaggaatgagaattatttcgatgatatacctcgcagcaagcttgaaagacagatggcgcagacgggtgattggggtgaaccctcaattacactgcgccctccaaatgaagctaccgcatccaccccggttcagtactggcagcaccatcccgagaagctaatttttcagtcttgcgactacaaggccttctatctgggtagcatgctcattaaagagctccgtggcacggagtcaacccaggatgcctgcgccaaaatgcgagccaattgtcagaagagcacagagcaaatgaagaaggtgccgacaatcatattgagtgtctcttacaaaggggtcaagtttatcgatgctacgaataagaatataatcgcagagcacgagatcagaaacattagctgtgccgctcaagacccagaggatttgtccacctttgcatatattactaaggacctcaaaagtaaccaccactattgtcatgtgtttacggcgttcgatgttaacttagcgtatgaaattatcctgacgttaggccaggcgttcgaagtggcatatcagctggctctgcaggcgcgtaaaggtgggcactcaagcactttgcccgaaagcttcgagaataaaccttccaaacccatccccaaacctcgagtcagcatccgcaagtccgttgacctgttgcatgcttctcacactggccaagagccttctgaacggcataccgaagaggctcttcggaagttctag

SEQ ID NO: 244697 - DNA, 3747 bp, Artificial Sequence
  derived and/or modified sequence
atggggaaggaccaggagctgctggaagctgctcgcactggaaatgtggctctggtggagaaactcctgtctggcaggaaaggagggatcctgggcggtggatccggacccctgcccctgtctaatctgctaagcatctggcgaggccccaatgtgaactgcacagacagttcgggttacactgctttacaccacgcagccttaaatggacataaggacatagttctcaaactacttcagtatgaggcatcaacaaatgtagcagacaacaaagggtattttcctattcacctggctgcctggaaaggagatgtggaaattgtgaagattcttattcatcatggaccatcacattccagggtcaatgaacagaacaatgaaaatgaaactgccctacactgtgcagctcaatatggacactcagaagtagttgctgttctcctagaagagctcactgacccgacaattagaaatagcaagctggaaacacctttggacttggcggcactctacggacggcttagagtggtaaaaatgatcatcagtgcacatcctaacttaatgagctgcaacactcgcaagcacacgccacttcaccttgctgcgcgcaatggccacaaagcagtcgtgcaggtgctgctggaggcaggaatggatgtgagctgtcaaacagaaaaggggagtgcacttcatgaagcagctttgtttggaaaggtggatgttgtacgagttctgttagaaacaggaattgatgccaacataaaggatagcttaggtagaactgtcttggacattctgaaagaacatccatctcagaaatctctccagattgcaacactcttacaagagtatttagaaggcgtgggaagatctacagtcctcgaagagcctgtacaggaagatgcaacacaagaaacacacatttcatctcctgttgagtctccttcccaaaagaccaaaagtgaaaccgtcactggagaattatcaaaactcttggatgaaataaaactctgtcaagaaaaggattattcgtttgaagacttgtgccacacaatatcagaccactacttagataatttgagcaagatttcagaggaagaacttgggaaaaatggaagccagagtgtaagaacctcatctacaatcaatttgtcaccaggagaagtggaagaagaggatgatgatgaaaatacgtgtgggccatcaggactttgggaagcattaactccgtgtaatggatgtaggaaccttggcttccccatgcttgcccaggagtcctatccaaagaagagaaattacactatggaaattgtaccatctgcttctctggatacatttccttcagaaaatgagaactttctgtgtgatctcatggacacagctgttacaaagaaaccttgctccttagaaattgcaagggcaccttccccaagaactgataatgcctctgaggtagcagttactactccaggaactagtaaccatagaaacagctcaacaggcccaacacctgattgttcacctccatcccctgatactgccctcaaaaatattgtaaaagtcattcgaccccagcctaaacagcgaacatccattgtgtcttctctggattttcaccgaatgaatcacaaccaagaatattttgaaatcaacacatctacagggtgcacaagctttactgccagtcctcctgctagtccacccacctcttctgtgggaaccacagaagtcaagaatgagggaactaaccatacagatgacctctcccgacaggatgacaatgatcccccaaaagaatatgatcctgggcaatttgcaggcctgctccatggatcctctccagcctgtgagtcccctgaaaatccatttcatctctatgggaaaagagaacaatgtgaaaaaggacaagatgaagtcagtttggcaaacagtcctttgcctttcaagcagtctccaatagaaaataactcagaacctttggtaaagaaaattaaacccaaagtggtcagtagaacaatttttcacaaaaaaagcaaccaactcgaaaaccataccattgttggcacaagatcaaccaggagtggatctcggaatggggaccagtgggttatgaacgcagggggatttgtggagagagcctgtactctggggagaataaggtcattgcctaaagccttgatcgacatgcatttgtcaaaaagtgtctctaaatctgattctgatctcattgcctatccttccaatgagaaaacatcaagagttaactggagtgaatcttccactgctgaacacagttctaaagggaattctgaaagaacaccatccttcacatcggaatgggaagaaattgacaaaataatgagttccatagatgttggaatcaacaacgaacttaaagagatgaatggtgagaccacaagacccagatgccctgtccaaacagtgggacaatggttggaaagcattgggctacctcagtacgagaaccacctgatggctaatggatttgacaatgtgcagtttatgggaagcaatgttatggaagatcaggatttgttggaaattggaatccttaattctgggcacagacaaagaattctacaggcaatccagctccttccaaagatgagacccattgggcatgatggctaccatcccacctctgtagctgagtggctggattccattgaactgggcgactacaccaaagcctttctaattaatggctacacttcgatggacctgttgaaaaaaatctgggaggttgaacttattaatgttttaaaaatcaatttgattggccacaggaaacgtattttggcatctctgggagacaggctgcacgacgatcccccacagaagccccctcggtccatcaccctcagggaacccagtggtaatcacactcctcctcagttgtctccatcacttagccaaagcacttacaccactggtggctccctagacgttcctcacattatcatgcagggcgatgcaaggaggagaagaaatgaaaactactttgatgatattccccgatcaaaactggagaggcagatggctcagacaggagactggggagaaccttccattaccttgcgacctccgaatgaagccacagcctctaccccggtacagtactggcagcatcacccagaaaagcttatcttccagtcgtgtgattacaaagctttttatttaggttctatgctgataaaagagcttagggggacagaatcaacccaagatgcttgtgcaaaaatgcgggtaatgtgcgtgaagtctacagagcaaatgaagaaggtccctactattattctttctgtctcatataaaggagtcaaatttattgatgcaacaaataagaacataattgctgagcatgaaattcgtaatatctcctgtgctgcccaggacccagaagacctctcaacatttgcctatatcacaaaagatttgaagtctaatcaccactactgtcatgtgtttactgcctttgatgtgaatttagcctatgaaatcatcctaaccctgggacaggcattcgaagtcgcttaccagctagcactacaagcaagaaaagggggacactcctccacacttccagaaagctttgaaaacaaaccctccaaacccatccccaagccccgcgttagcattcgcaagtccgtggatcttcttcatgccagccataccgggcaggaaccatcagagagacacactgaggaggcactcagaaaattttga

SEQ ID NO: 244698 - DNA, 1984 bp, Artificial Sequence
  derived and/or modified sequence
attcgctgggggcgcccagaaagatgcacagaggcaacggctaggggagcggaggttcaagccacatgtctgcgtcctcgggggccagagcccgccagccctcgcggatcccggctcgcggccagcccgagcggctcgggttttaaaaatcaatttgattggccacaggaaacgtattttggcatctctgggagacaggctgcacgacgatcccccacagaagccccctcggtccatcaccctcagggaacccagtggtaatcacactcctcctcagttgtctccatcacttagccaaagcacttacaccactggtggctccctagacgttcctcacattatcatgcagggcgatgcaaggaggagaagaaatgaaaactactttgatgatattccccgatcaaaactggagaggcagatggctcagacaggagactggggagaaccttccattaccttgcgacctccgaatgaagccacagcctctaccccggtacagtactggcagcatcacccagaaaagcttatcttccagtcgtgtgattacaaagctttttatttaggttctatgctgataaaagagcttagggggacagaatcaacccaagatgcttgtgcaaaaatgcgggctaactgtcagaagtctacagagcaaatgaagaaggtccctactattattctttctgtctcatataaaggagtcaaatttattgatgcaacaaataagaacataattgctgagcatgaaattcgtaatatctcctgtgctgcccaggacccagaagacctctcaacatttgcctatatcacaaaagatttgaagtctaatcaccactactgtcatgtgtttactgcctttgatgtgaatttagcctatgaaatcatcctaaccctgggacaggcattcgaagtcgcttaccagctagcactacaagcaagaaaagggggacactcctccacacttccagaaagctttgaaaacaaaccctccaaacccatccccaagccccgcgttagcattcgcaagtccgtggatcttcttcatgccagccataccgggcaggaaccatcagagagacacactgaggaggcactcagaaaattttgatagaattgaatttacatatagctgataaagcctaaatagaaaggttgatgtatttagcttgaatccttcactttagtggtctaatcaacagataaatgacaagcaaagaatgaaacaatccaaaaatgtttttcaaaacaattttgtgaattttatttttacaaaaattttttaaattcatattttaaaatgtataccaaggcaaaaaaatcatataagctatatcataaatacaagagtttcaaaacatacaagagacatataatgtaaaaaaaaattatatatatgaagtccaatgtaatttataatacaaaaaaatacagcaagggaaaatgctttagaaatgctcatctgcaaactacaaaacaaaatcctcctcttgaccgactgcatgaactgccatgaaatttgcagctccatcatactaggtatctcttctttcttcatgttaccttgtctttcttcccatttttcttttaagacagggtcttgctatgtcacccaggctggactcaaactccagggctcaaggaatcctcctgtcttagcctcccaaggagctgggattacaggcacgtgccaccgcacctggctcctaatttctttttaagacaagggccattcaaggctttttaaaacctgatgtgtgttgttatactttataacagtcagtggcttttaattccaaaaggtaatactttatactctgcctacatgagatgagcccctaacagtgtgtacaaataaaattatgatttgggtattctaaggagacataccatttacagaaatttcttttgataaaattaaggtttcacttttcacatttgcttaaatcacagtaagcctgtaaactagctccttgacccaccattt

SEQ ID NO: 244699 - DNA, 3885 bp, Artificial Sequence
  derived and/or modified sequence
atggggaaggaccaggagctgctggaagctgctcgcactggaaatgtggctctggtggagaaactcctgtctggcaggaaaggagggatcctgggcggtggatccggacccctgcccctgtctaatctgctaagcatctggcgaggccccaatgtgaactgcacagacagttcgggttacactgctttacaccacgcagccttaaatggacataaggacatagttctcaaactacttcagtatgaggcatcaacaaatgtagcagacaacaaagggtattttcctattcacctggctgcctggaaaggagatgtggaaattgtgaagattcttattcatcatggaccatcacattccagggtcaatgaacagaacaatgaaaatgaaactgccctacactgtgcagctcaatatggacactcagaagtagttgctgttctcctagaagagctcactgacccgacaattagaaatagcaagctggaaacacctttggacttggcggcactctacggacggcttagagtggtaaaaatgatcatcagtgcacatcctaacttaatgagctgcaacactcgcaagcacacgccacttcaccttgctgcgcgcaatggccacaaagcagtcgtgcaggtgctgctggaggcaggaatggatgtgagctgtcaaacagaaaaggggagtgcacttcatgaagcagctttgtttggaaaggtggatgttgtacgagttctgttagaaacaggaattgatgccaacataaaggatagcttaggtagaactgtcttggacattctgaaagaacatccatctcagaaatctctccagattgcaacactcttacaagagtatttagaaggcgtgggaagatctacagtcctcgaagagcctgtacaggaagatgcaacacaagaaacacacatttcatctcctgttgagtctccttcccaaaagaccaaaagtgaaaccgtcactggagaattatcaaaactcttggatgaaataaaactctgtcaagaaaaggattattcgtttgaagacttgtgccacacaatatcagaccactacttagataatttgagcaagatttcagaggaagaacttgggaaaaatggaagccagagtgtaagaacctcatctacaatcaatttgtcaccaggagaagtggaagaagaggatgatgatgaaaatacgtgtgggccatcaggactttgggaagcattaactccgtgtaatggatgtaggaaccttggcttccccatgcttgcccaggagtcctatccaaagaagagaaattacactatggaaattgtaccatctgcttctctggatacatttccttcagaaaatgagaactttctgtgtgatctcatggacacagctgttacaaagaaaccttgctccttagaaattgcaagggcaccttccccaagaactgataatgcctctgaggtagcagttactactccaggaactagtaaccatagaaacagctcaacaggcccaacacctgattgttcacctccatcccctgatactgccctcaaaaatattgtaaaagtcattcgaccccagcctaaacagcgaacatccattgtgtcttctctggattttcaccgaatgaatcacaaccaagaatattttgaaatcaacacatctacagggtgcacaagctttactgccagtcctcctgctagtccacccacctcttctgtgggaaccacagaagtcaagaatgagggaactaaccatacagatgacctctcccgacaggatgacaatgatcccccaaaagaatatgatcctgggcaatttgcaggcctgctccatggatcctctccagcctgtgagtcccctgaaaatccatttcatctctatgggaaaagagaacaatgtgaaaaaggacaagatgaagtcagtttggcaaacagtcctttgcctttcaagcagtctccaatagaaaataactcagaacctttggtaaagaaaattaaacccaaagtggtcagtagaacaatttttcacaaaaaaagcaaccaactcgaaaaccataccattgttggcacaagatcaaccaggagtggatctcggaatggggaccagtgggttatgaacgcagggggatttgtggagagagcctgtactctggggagaataaggtcattgcctaaagccttgatcgacatgcatttgtcaaaaagtgtctctaaatctgattctgatctcattgcctatccttccaatgagaaaacatcaagagttaactggagtgaatcttccactgctgaacacagttctaaagggaattctgaaagaacaccatccttcacatcggaatgggaagaaattgacaaaataatgagttccatagatgttggaatcaacaacgaacttaaagagatgaatggtgagaccacaagacccagatgccctgtccaaacagtgggacaatggttggaaagcattgggctacctcagtacgagaaccacctgatggctaatggatttgacaatgtgcagtttatgggaagcaatgttatggaagatcaggatttgttggaaattggaatccttaattctgggcacagacaaagaattctacaggcaatccagctccttccaaagatgagacccattgggcatgatggctaccatcccacctctgtagctgagtggctggattccattgaactgggcgactacaccaaagcctttctaattaatggctacacttcgatggacctgttgaaaaaaatctgggaggttgaacttattaatgttttaaaaatcaatttgattggccacaggaaacgtattttggcatctctgggagacaggctgcacgacgatcccccacagaagccccctcggtccatcaccctcagggaacccagtggtaatcacactcctcctcagttgtctccatcacttagccaaagcacttacaccactggtggctccctagacgttcctcacattatcatgcagggcgatgcaaggaggagaagaaatgaaaactactttgatgatattccccgatcaaaactggagaggcagatggctcagacaggagactggggagaaccttccattaccttgcgacctccgaatgaagccacagcctctaccccggtacagtactggcagcatcacccagaaaagcttatcttccagtcgtgtgattacaaagctttttatttaggttctatgctgataaaagagcttagggggacagaatcaacccaagatgcttgtgcaaaaatgcgggctaactgtcagaagtctacagagcaaatgaagaaggtccctactattattctttctgtctcatataaaggagtcaaatttattgatgcaacaaataagaacataattgctgagcatgaaattcgtaatatctcctgtgctgcccaggacccagaagacctctcaacatttgcctatatcacaaaagatttgaagtctaatcaccactactgtcatgtgtttactgcctttgatgtgaatttagcctatgaaatcatcctaaccctgggacaggcattcgaagtcgcttaccagctagcactacaagcaagaaaagggggacactcctccacacttccagaaagctttgaaaacaaaccctccaaacccatccccaagccccgcgttagcattcgcaagtccgtggatcttcttcatgccagccataccgggcaggaaccatcagagagacacactgaggaggcactcagaaaattttgatagaattgaatttacatatagctgataaagcctaaatagaaaggttgatgtatttagcttgaatccttcactttagtggtctaatcaacagataaatgacaagcaaagaatgaaacaatccaaaaatgtttttcaaaa

SEQ ID NO: 244700 - DNA, 3747 bp, Artificial Sequence
  derived and/or modified sequence
atgggtaaagatcaagaactgctcgaggccgcaagaaccggtaatgttgcattggtggaaaagttgctgagtggtagaaaaggagggatccttgggggtgggagcggtcccctaccgctgagcaacctgctttcaatctggcggggaccaaacgtcaactgcaccgactcaagcggatacactgccttacaccacgctgccctgaatgggcataaagatattgtgctcaagttactgcaatacgaagctagcaccaacgtggccgacaacaagggatatttccccatacacctcgcagcgtggaagggcgacgtggagattgttaagatactaatccatcacggacctagtcacagccgggtgaacgagcagaataacgagaatgaaaccgccttacattgcgccgctcaatacggtcactcagaagtagtggctgtattgctagaggaactgaccgaccccacaataagaaacagtaagctggagactccgttagatctcgcagccctgtatggcagactccgtgtcgtgaagatgattatttcagctcatccaaacttaatgagctgtaatactaggaagcacacacctctccacttagcagctagaaacggccacaaggccgttgtccaggtcttactggaagcaggaatggatgtgagctgccaaacagagaagggcagcgcactccacgaggctgccctctttggaaaggtcgacgtcgttcgcgtgctgctcgagaccggaatcgatgccaacatcaaagacagcttgggccgtactgtcttggacatcctcaaggaacatccgagccagaaatcattacagattgcaaccctgctccaggaataccttgaaggagtcggcagaagcacagtgttagaagagcctgtacaagaggatgctacccaggaaactcacatctcaagcccagtggagagtccctcgcagaagacaaagagcgaaacagtgacgggcgagttatctaagctcctcgacgagattaagttgtgccaggaaaaggattactcgttcgaagacttgtgtcacacaatctccgaccactacttggacaatctgtcaaaaatcagcgaggaagaactgggaaaaaacggctcacagagcgtgagaacatcaagtactattaatctcagtcctggggaagtggaagaagaagatgatgatgagaacacgtgcgggccttcgggtctgtgggaggctctgacaccctgcaatggatgtcgcaacttggggttccctatgctggctcaggagtcttatcccaagaaacgaaactacaccatggaaatagtcccaagcgcttcgctggacacattcccaagtgagaacgagaatttcctgtgcgatctgatggatacggcagttaccaaaaagccatgctccctcgaaatcgcaagggctccttctcctagaaccgacaatgccagtgaggttgcagtgaccactcctgggaccagcaaccacaggaatagcagtactggcccaacgcccgattgctcaccaccatctccagatacagctctcaagaatatcgtgaaagtgatacgacctcagcctaaacagcgtacttccatcgtgtcgtcactagattttcatagaatgaaccacaaccaggagtactttgagatcaatacctcgacgggttgtacttctttcacagcctcgcctcctgcaagcccaccaacatcgtccgtgggaacaactgaggtgaagaatgaaggcaccaatcatactgatgatctctcccggcaggatgacaacgacccacccaaggaatacgaccctggccagtttgcgggattgcttcacgggtcctccccggcatgtgagtctcctgagaacccttttcatctctacgggaagcgcgagcagtgcgaaaagggacaagatgaggttagcctggccaattcccccctgccctttaagcaaagtcccatagagaacaatagcgagccgctggtaaagaaaattaagcctaaagtggttagccggaccatttttcataaaaagtctaaccaactggaaaaccacaccatcgtgggaactaggagtactaggagtggcagcaggaacggcgatcagtgggtgatgaatgccggaggctttgtagagcgcgcatgcactctggggagaattcggtcactgcccaaagctctcatcgatatgcatttatctaaatcagtgagcaagtccgactcagatctgattgcctatcccagcaatgagaagacatctagagtgaattggagcgaaagttctaccgccgaacattccagcaaggggaactccgagcgaaccccgagcttcacttctgagtgggaggagatcgataaaattatgtcaagcatagatgtcgggattaacaatgagctgaaagagatgaacggggaaacaacccgccctaggtgccctgtgcagacagtgggtcaatggttggaaagcataggactgcctcagtacgaaaaccacctcatggcaaacggattcgataacgtgcagtttatgggctccaacgtcatggaggatcaggatttgcttgagatcggaatcctcaattccggacacaggcagcgcatactacaggcgatacagctgctccccaagatgcgcccaataggccacgatggttaccaccccactagcgtggctgagtggctggactccatcgaactgggggattataccaaggccttcctgattaacggatatacctccatggatctcttgaagaagatatgggaagtagaattaataaacgtactaaaaattaatttaatcgggcatcgcaagcgaattctggcttctctgggtgatcgcctgcacgatgatcctccgcagaaaccgcctcgctccatcacactccgagaaccctctggcaatcacacccctccccaactgagcccgagcttgagccagtccacttacactaccggcggatccctggatgtcccgcacatcatcatgcaaggagatgccagacgtcgacgaaatgagaactatttcgatgatattcccagaagtaagttggagcgtcagatggctcaaacgggggactggggtgagcctagcatcacccttagaccgccaaacgaagccaccgcctctacacctgtgcagtactggcagcaccatccagaaaagttgatctttcagagttgtgattacaaggccttctacttgggaagcatgctcatcaaggagttacggggaaccgaaagcactcaggatgcttgcgcaaaaatgcgggtgatgtgtgtgaagtcgacggagcagatgaaaaaggttccgacaattatcctgtcagtgtcatacaagggggtaaaattcatagatgcaacaaacaagaacatcattgctgaacatgagattcgaaacatttcctgtgccgctcaggatcctgaggacctgagtacatttgcctatatcaccaaggatttgaaaagcaaccaccattattgtcatgtgttcactgcgtttgacgtgaacctggcttacgaaatcatcctcactttggggcaggctttcgaggtggcatatcaactggcccttcaggctagaaagggaggacatagcagcactctgccagaaagctttgagaataaaccttccaagcctattcctaaaccgcgagtctcaatccgaaagtctgtcgacttgctgcacgcgtcccacaccggacaggagccttctgagagacacactgaagaggccttaagaaagttctag

SEQ ID NO: 244701 - DNA, 3747 bp, Artificial Sequence
  derived and/or modified sequence
atgggcaaagaccaggaactgctcgaggccgcaaggaccggaaatgtcgctcttgttgagaagcttctatcagggcgaaaaggcggtattctcgggggaggctccggcccacttccacttagtaaccttctatcaatttggcgaggaccaaacgtgaactgcacagatagttccggatatacagccctccatcatgcagctcttaacgggcacaaagacattgtcctgaaactgttacagtacgaagcctctactaatgttgccgataacaaagggtattttcctatccatctggctgcttggaaaggcgacgtcgagatagtgaaaatcctcatccaccatgggccttcgcattccagagttaatgaacagaataatgaaaacgagacagcactccactgtgctgcccagtacgggcatagtgaggtggtggcggtgttgctagaggaacttacagacccaacaattcggaatagcaaactcgagactcccctcgatctggccgcactctatgggagactaagagtagttaagatgattatctccgcgcatcccaacctgatgtcttgcaacacaagaaagcatacaccattgcatctcgccgcacggaatggacataaagcagtggtgcaggtcctgctggaagctgggatggatgtcagttgtcagacagagaagggtagcgccctgcacgaggcagccctcttcgggaaggtagacgttgtgcgcgtattgcttgagacagggattgacgccaacattaaggatagtctcggtaggaccgtcctcgatattctcaaggagcacccttcacagaagtcacttcaaatagcgacattgctgcaggagtacctggaaggtgtgggccgatccacagtgctggaggagcccgttcaggaagacgcaacccaggaaactcacatctcgtcccctgtcgagtccccctcccagaagaccaaaagcgagaccgtaactggcgagctttccaaactattagacgagattaaactgtgccaggagaaagactatagctttgaagatctttgccacactatctctgaccactacctcgacaacttgtccaagatcagtgaggaggagctgggcaagaacgggtcacagagcgtgaggacgagttccactatcaacctgagtccaggcgaagtggaagaggaagatgatgatgagaacacatgcggacccagcggattgtgggaggcattgacaccttgcaacggctgtcgcaatctcgggttccctatgctagctcaggagtcataccccaaaaagaggaattataccatggagatagtacccagtgcatcactggacacgttcccctctgaaaatgaaaatttcttatgtgatctgatggataccgcggtcaccaagaagccttgcagtctagaaattgcacgggcaccttcacccagaaccgacaatgcttctgaagtggctgtcacaactcctggcacttctaaccaccggaatagtagtactgggccaacccccgattgttccccgccatctcctgatactgctttgaagaacattgtgaaagttattcggccacagcccaaacaacgcacttccatcgtatcctcacttgacttccaccgcatgaatcataatcaggaatatttcgaaataaataccagtaccggctgcactagcttcacagctagccctcctgcatctcccccaaccagtagtgtcggaaccactgaggttaaaaacgagggtactaaccataccgacgatctctctcgtcaggatgacaatgatcctcctaaagagtacgacccaggccagtttgctggtctgctacacggcagctctcccgcttgtgaatctcctgaaaaccccttccacctgtatggtaaaagagagcagtgcgagaaaggtcaagacgaagtttctttggctaattcaccactgccctttaaacagtcccccatagaaaacaactctgagcctttggtgaaaaaaattaagccaaaggtcgtgtcaagaaccatatttcacaagaaaagcaatcaacttgagaatcacacgatcgtaggaaccagatccacaaggtcaggttcacgcaatggcgaccagtgggtcatgaacgctggcggttttgtggagcgagcctgcactttagggagaatcaggtctttacccaaagccctgatagacatgcacttgagcaagagcgtctcaaagagcgatagtgacctgatcgcctatccatctaacgaaaagacaagccgggttaactggtcagagtcgtcaacagctgaacactcttccaaagggaacagtgagcgtacaccctcttttacgagcgaatgggaggagatcgacaagatcatgagcagcattgacgtcggcataaataatgaattgaaagaaatgaacggagagaccaccagacccagatgcccggttcagacagtagggcagtggctggaaagcatcggactgcctcagtacgagaatcacttgatggccaacggttttgataacgtgcagtttatgggtagcaatgtcatggaggatcaggatctgctcgaaatcgggatattgaacagcgggcatagacagagaatccttcaggctatccagcttctgcccaagatgagacctataggccacgacggataccatccaacgtcagtggcggagtggctggacagtattgagttaggagattacactaaggctttcctcattaatggctacacaagtatggacctgcttaagaagatctgggaagtcgagcttatcaatgtgctgaagatcaatctaatcggccacaggaagagaatactggcatcattgggcgaccggctgcacgacgatccaccccagaagccacccaggtccatcactctaagagagccttccggtaatcacacgccccctcagctttcaccttctctgtcgcagtcaacatatactaccggcggaagcctggacgtgccccacattataatgcaaggagatgctcgacgcagacgaaacgagaattattttgacgacatcccaagatcaaagcttgagcggcagatggcccagacaggcgactggggcgagccctccattacattacggccaccaaatgaggctacagcatcgacgccagtgcaatactggcagcaccatccggagaaattgattttccagagctgcgattataaagctttctatctcggaagtatgctgattaaagaactgagagggaccgaatccactcaagatgcgtgtgcgaaaatgagggcgaattgtcaaaaaagtaccgagcagatgaagaaagtgcctacaatcatcctgagtgttagttacaagggggttaagtttatagatgcaactaacaagaacatcatcgcggagcatgagattagaaatatcagctgcgccgcacaggacccggaggatttatccacattcgcatacattacaaaggacttaaagtcaaatcaccattactgccacgtgttcactgcatttgatgtgaatctcgcctacgagattattctgactcttgggcaggcctttgaggtcgcgtatcagctggctttgcaggccagaaaagggggacacagttccaccttgcccgaaagttttgagaataaacctagcaagcctatccctaaacccagagtgtccattagaaaaagcgtcgacctgctacatgcatcacacacaggtcaggaaccctcagaaaggcatacggaggaagccctgaggaaattctag

SEQ ID NO: 244702 - DNA, 3747 bp, Artificial Sequence
  derived and/or modified sequence
atgggcaaggaccaggagctgctggaggccgccagaaccggcaacgtggccctggtggagaagctgctgagcggcagaaagggcggcatcctgggcggcggcagcggccccctgcccctgagcaacctgctgagcatctggagaggccccaacgtgaactgcaccgacagcagcggctacaccgccctgcaccacgccgccctgaacggccacaaggacatcgtgctgaagctgctgcagtacgaggccagcaccaacgtggccgacaacaagggctacttccccatccacctggccgcctggaagggcgacgtggagatcgtgaagatcctgatccaccacggccccagccacagcagagtgaacgagcagaacaacgagaacgagaccgccctgcactgcgccgcccagtacggccacagcgaggtggtggccgtgctgctggaggagctgaccgaccccaccatcagaaacagcaagctggagacccccctggacctggccgccctgtacggcagactgagagtggtgaagatgatcatcagcgcccaccccaacctgatgagctgcaacaccagaaagcacacccccctgcacctggccgccagaaacggccacaaggccgtggtgcaggtgctgctggaggccggcatggacgtgagctgccagaccgagaagggcagcgccctgcacgaggccgccctgttcggcaaggtggacgtggtgagagtgctgctggagaccggcatcgacgccaacatcaaggacagcctgggcagaaccgtgctggacatcctgaaggagcaccccagccagaagagcctgcagatcgccaccctgctgcaggagtacctggagggcgtgggcagaagcaccgtgctggaggagcccgtgcaggaggacgccacccaggagacccacatcagcagccccgtggagagccccagccagaagaccaagagcgagaccgtgaccggcgagctgagcaagctgctggacgagatcaagctgtgccaggagaaggactacagcttcgaggacctgtgccacaccatcagcgaccactacctggacaacctgagcaagatcagcgaggaggagctgggcaagaacggcagccagagcgtgagaaccagcagcaccatcaacctgagccccggcgaggtggaggaggaggacgacgacgagaacacctgcggccccagcggcctgtgggaggccctgaccccctgcaacggctgcagaaacctgggcttccccatgctggcccaggagagctaccccaagaagagaaactacaccatggagatcgtgcccagcgccagcctggacaccttccccagcgagaacgagaacttcctgtgcgacctgatggacaccgccgtgaccaagaagccctgcagcctggagatcgccagagcccccagccccagaaccgacaacgccagcgaggtggccgtgaccacccccggcaccagcaaccacagaaacagcagcaccggccccacccccgactgcagcccccccagccccgacaccgccctgaagaacatcgtgaaggtgatcagaccccagcccaagcagagaaccagcatcgtgagcagcctggacttccacagaatgaaccacaaccaggagtacttcgagatcaacaccagcaccggctgcaccagcttcaccgccagcccccccgccagcccccccaccagcagcgtgggcaccaccgaggtgaagaacgagggcaccaaccacaccgacgacctgagcagacaggacgacaacgacccccccaaggagtacgaccccggccagttcgccggcctgctgcacggcagcagccccgcctgcgagagccccgagaaccccttccacctgtacggcaagagagagcagtgcgagaagggccaggacgaggtgagcctggccaacagccccctgcccttcaagcagagccccatcgagaacaacagcgagcccctggtgaagaagatcaagcccaaggtggtgagcagaaccatcttccacaagaagagcaaccagctggagaaccacaccatcgtgggcaccagaagcaccagaagcggcagcagaaacggcgaccagtgggtgatgaacgccggcggcttcgtggagagagcctgcaccctgggcagaatcagaagcctgcccaaggccctgatcgacatgcacctgagcaagagcgtgagcaagagcgacagcgacctgatcgcctaccccagcaacgagaagaccagcagagtgaactggagcgagagcagcaccgccgagcacagcagcaagggcaacagcgagagaacccccagcttcaccagcgagtgggaggagatcgacaagatcatgagcagcatcgacgtgggcatcaacaacgagctgaaggagatgaacggcgagaccaccagacccagatgccccgtgcagaccgtgggccagtggctggagagcatcggcctgccccagtacgagaaccacctgatggccaacggcttcgacaacgtgcagttcatgggcagcaacgtgatggaggaccaggacctgctggagatcggcatcctgaacagcggccacagacagagaatcctgcaggccatccagctgctgcccaagatgagacccatcggccacgacggctaccaccccaccagcgtggccgagtggctggacagcatcgagctgggcgactacaccaaggccttcctgatcaacggctacaccagcatggacctgctgaagaagatctgggaggtggagctgatcaacgtgctgaagatcaacctgatcggccacagaaagagaatcctggccagcctgggcgacagactgcacgacgaccccccccagaagccccccagaagcatcaccctgagagagcccagcggcaaccacacccccccccagctgagccccagcctgagccagagcacctacaccaccggcggcagcctggacgtgccccacatcatcatgcagggcgacgccagaagaagaagaaacgagaactacttcgacgacatccccagaagcaagctggagagacagatggcccagaccggcgactggggcgagcccagcatcaccctgagaccccccaacgaggccaccgccagcacccccgtgcagtactggcagcaccaccccgagaagctgatcttccagagctgcgactacaaggccttctacctgggcagcatgctgatcaaggagctgagaggcaccgagagcacccaggacgcctgcgccaagatgagagtgatgtgcgtgaagagcaccgagcagatgaagaaggtgcccaccatcatcctgagcgtgagctacaagggcgtgaagttcatcgacgccaccaacaagaacatcatcgccgagcacgagatcagaaacatcagctgcgccgcccaggaccccgaggacctgagcaccttcgcctacatcaccaaggacctgaagagcaaccaccactactgccacgtgttcaccgccttcgacgtgaacctggcctacgagatcatcctgaccctgggccaggccttcgaggtggcctaccagctggccctgcaggccagaaagggcggccacagcagcaccctgcccgagagcttcgagaacaagcccagcaagcccatccccaagcccagagtgagcatcagaaagagcgtggacctgctgcacgccagccacaccggccaggagcccagcgagagacacaccgaggaggccctgagaaagttctag

SEQ ID NO: 244703 - DNA, 3747 bp, Artificial Sequence
  derived and/or modified sequence
atgggcaaggaccaggagctgctggaggccgccagaaccggcaacgtggccctggtggagaagctgctgagcggcagaaagggcggcatcctgggcggcggcagcggccccctgcccctgagcaacctgctgagcatctggagaggccccaacgtgaactgcaccgacagcagcggctacaccgccctgcaccacgccgccctgaacggccacaaggacatcgtgctgaagctgctgcagtacgaggccagcaccaacgtggccgacaacaagggctacttccccatccacctggccgcctggaagggcgacgtggagatcgtgaagatcctgatccaccacggccccagccacagcagagtgaacgagcagaacaacgagaacgagaccgccctgcactgcgccgcccagtacggccacagcgaggtggtggccgtgctgctggaggagctgaccgaccccaccatcagaaacagcaagctggagacccccctggacctggccgccctgtacggcagactgagagtggtgaagatgatcatcagcgcccaccccaacctgatgagctgcaacaccagaaagcacacccccctgcacctggccgccagaaacggccacaaggccgtggtgcaggtgctgctggaggccggcatggacgtgagctgccagaccgagaagggcagcgccctgcacgaggccgccctgttcggcaaggtggacgtggtgagagtgctgctggagaccggcatcgacgccaacatcaaggacagcctgggcagaaccgtgctggacatcctgaaggagcaccccagccagaagagcctgcagatcgccaccctgctgcaggagtacctggagggcgtgggcagaagcaccgtgctggaggagcccgtgcaggaggacgccacccaggagacccacatcagcagccccgtggagagccccagccagaagaccaagagcgagaccgtgaccggcgagctgagcaagctgctggacgagatcaagctgtgccaggagaaggactacagcttcgaggacctgtgccacaccatcagcgaccactacctggacaacctgagcaagatcagcgaggaggagctgggcaagaacggcagccagagcgtgagaaccagcagcaccatcaacctgagccccggcgaggtggaggaggaggacgacgacgagaacacctgcggccccagcggcctgtgggaggccctgaccccctgcaacggctgcagaaacctgggcttccccatgctggcccaggagagctaccccaagaagagaaactacaccatggagatcgtgcccagcgccagcctggacaccttccccagcgagaacgagaacttcctgtgcgacctgatggacaccgccgtgaccaagaagccctgcagcctggagatcgccagagcccccagccccagaaccgacaacgccagcgaggtggccgtgaccacccccggcaccagcaaccacagaaacagcagcaccggccccacccccgactgcagcccccccagccccgacaccgccctgaagaacatcgtgaaggtgatcagaccccagcccaagcagagaaccagcatcgtgagcagcctggacttccacagaatgaaccacaaccaggagtacttcgagatcaacaccagcaccggctgcaccagcttcaccgccagcccccccgccagcccccccaccagcagcgtgggcaccaccgaggtgaagaacgagggcaccaaccacaccgacgacctgagcagacaggacgacaacgacccccccaaggagtacgaccccggccagttcgccggcctgctgcacggcagcagccccgcctgcgagagccccgagaaccccttccacctgtacggcaagagagagcagtgcgagaagggccaggacgaggtgagcctggccaacagccccctgcccttcaagcagagccccatcgagaacaacagcgagcccctggtgaagaagatcaagcccaaggtggtgagcagaaccatcttccacaagaagagcaaccagctggagaaccacaccatcgtgggcaccagaagcaccagaagcggcagcagaaacggcgaccagtgggtgatgaacgccggcggcttcgtggagagagcctgcaccctgggcagaatcagaagcctgcccaaggccctgatcgacatgcacctgagcaagagcgtgagcaagagcgacagcgacctgatcgcctaccccagcaacgagaagaccagcagagtgaactggagcgagagcagcaccgccgagcacagcagcaagggcaacagcgagagaacccccagcttcaccagcgagtgggaggagatcgacaagatcatgagcagcatcgacgtgggcatcaacaacgagctgaaggagatgaacggcgagaccaccagacccagatgccccgtgcagaccgtgggccagtggctggagagcatcggcctgccccagtacgagaaccacctgatggccaacggcttcgacaacgtgcagttcatgggcagcaacgtgatggaggaccaggacctgctggagatcggcatcctgaacagcggccacagacagagaatcctgcaggccatccagctgctgcccaagatgagacccatcggccacgacggctaccaccccaccagcgtggccgagtggctggacagcatcgagctgggcgactacaccaaggccttcctgatcaacggctacaccagcatggacctgctgaagaagatctgggaggtggagctgatcaacgtgctgaagatcaacctgatcggccacagaaagagaatcctggccagcctgggcgacagactgcacgacgaccccccccagaagccccccagaagcatcaccctgagagagcccagcggcaaccacacccccccccagctgagccccagcctgagccagagcacctacaccaccggcggcagcctggacgtgccccacatcatcatgcagggcgacgccagaagaagaagaaacgagaactacttcgacgacatccccagaagcaagctggagagacagatggcccagaccggcgactggggcgagcccagcatcaccctgagaccccccaacgaggccaccgccagcacccccgtgcagtactggcagcaccaccccgagaagctgatcttccagagctgcgactacaaggccttctacctgggcagcatgctgatcaaggagctgagaggcaccgagagcacccaggacgcctgcgccaagatgagagccaactgccagaagagcaccgagcagatgaagaaggtgcccaccatcatcctgagcgtgagctacaagggcgtgaagttcatcgacgccaccaacaagaacatcatcgccgagcacgagatcagaaacatcagctgcgccgcccaggaccccgaggacctgagcaccttcgcctacatcaccaaggacctgaagagcaaccaccactactgccacgtgttcaccgccttcgacgtgaacctggcctacgagatcatcctgaccctgggccaggccttcgaggtggcctaccagctggccctgcaggccagaaagggcggccacagcagcaccctgcccgagagcttcgagaacaagcccagcaagcccatccccaagcccagagtgagcatcagaaagagcgtggacctgctgcacgccagccacaccggccaggagcccagcgagagacacaccgaggaggccctgagaaagttctag

SEQ ID NO: 244704 - protein, 628 aa, Artificial Sequence
  derived and/or modified sequence
MDSVVFEDVAVDFTLEEWALLDSAQRDLYRDVMLETFQNLASVDDETQFKASGSVSQQDIYGEKIPKESKIATFTRNVSWASVLGKIWDSLSIEDQTTNQGRNLSRNHGLERLCESNDQCGEALSQIPHLNLYKKIPPGVKQYEYNTYGKVFMHRRTSLKSPITVHTGHKPYQCQECGQAYSCRSHLRMHVRTHNGERPYVCKLCGKTFPRTSSLNRHVRIHTAEKTYECKQCGKAFIDFSSLTSHLRSHTGEKPYKCKECGKAFSYSSTFRRHTITHTGEKPYKCKECAEAFSYSSTFRRHMISHTGEKPHKCKECGEAFSYSSAFRRHMITHTGEKPYECKQCGKTFIYLQSFRRHERIHTGEKPYECKQCGKTFIYPQSFRRHERTHGGEKPYECNQCGKAFSHPSSFRGHMRVHTGEKPYECKQCGKTFNWPISLRKHMRTHTREKPYECKQCGKAFSLSACFREHVRMHPEDKSYECKLCGKAFYCHISLQKHMRRHTAEKLYKCKQCGKAFSWPELLQQHVRTHTVEKPYECKECGKVFKWPSSLPIHMRLHTGEKPYQCKHCGKAFNCSSSLRRHVRIHTTEKQYKCNVGHPPANEFMCSASEKSHQERDLIKVVNMVLPL

SEQ ID NO: 244705 - DNA, 1887 bp, Artificial Sequence
  derived and/or modified sequence
atggacagcgtggtgttcgaggacgtggccgtggacttcaccctggaggagtgggccctgctggacagcgcccagagagacctgtacagagacgtgatgctggagaccttccagaacctggccagcgtggacgacgagacccagttcaaggccagcggcagcgtgagccagcaggacatctacggcgagaagatccccaaggagagcaagatcgccaccttcaccagaaacgtgagctgggccagcgtgctgggcaagatctgggacagcctgagcatcgaggaccagaccaccaaccagggcagaaacctgagcagaaaccacggcctggagagactgtgcgagagcaacgaccagtgcggcgaggccctgagccagatcccccacctgaacctgtacaagaagatcccccccggcgtgaagcagtacgagtacaacacctacggcaaggtgttcatgcacagaagaaccagcctgaagagccccatcaccgtgcacaccggccacaagccctaccagtgccaggagtgcggccaggcctacagctgcagaagccacctgagaatgcacgtgagaacccacaacggcgagagaccctacgtgtgcaagctgtgcggcaagaccttccccagaaccagcagcctgaacagacacgtgagaatccacaccgccgagaagacctacgagtgcaagcagtgcggcaaggccttcatcgacttcagcagcctgaccagccacctgagaagccacaccggcgagaagccctacaagtgcaaggagtgcggcaaggccttcagctacagcagcaccttcagaagacacaccatcacccacaccggcgagaagccctacaagtgcaaggagtgcgccgaggccttcagctacagcagcaccttcagaagacacatgatcagccacaccggcgagaagccccacaagtgcaaggagtgcggcgaggccttcagctacagcagcgccttcagaagacacatgatcacccacaccggcgagaagccctacgagtgcaagcagtgcggcaagaccttcatctacctgcagagcttcagaagacacgagagaatccacaccggcgagaagccctacgagtgcaagcagtgcggcaagaccttcatctacccccagagcttcagaagacacgagagaacccacggcggcgagaagccctacgagtgcaaccagtgcggcaaggccttcagccaccccagcagcttcagaggccacatgagagtgcacaccggcgagaagccctacgagtgcaagcagtgcggcaagaccttcaactggcccatcagcctgagaaagcacatgagaacccacaccagagagaagccctacgagtgcaagcagtgcggcaaggccttcagcctgagcgcctgcttcagagagcacgtgagaatgcaccccgaggacaagagctacgagtgcaagctgtgcggcaaggccttctactgccacatcagcctgcagaagcacatgagaagacacaccgccgagaagctgtacaagtgcaagcagtgcggcaaggccttcagctggcccgagctgctgcagcagcacgtgagaacccacaccgtggagaagccctacgagtgcaaggagtgcggcaaggtgttcaagtggcccagcagcctgcccatccacatgagactgcacaccggcgagaagccctaccagtgcaagcactgcggcaaggccttcaactgcagcagcagcctgagaagacacgtgagaatccacaccaccgagaagcagtacaagtgcaacgtgggccacccccccgccaacgagttcatgtgcagcgccagcgagaagagccaccaggagagagacctgatcaaggtggtgaacatggtgctgcccctgtag

SEQ ID NO: 244706 - DNA, 1887 bp, Artificial Sequence
  derived and/or modified sequence
atggacagtgtcgtgttcgaggacgttgcggtggatttcactttagaggagtgggccctgttagattctgcacagcgcgacctctaccgagatgtcatgctggagacattccaaaacctggccagcgtagacgatgagacacagttcaaagcaagtgggagtgtgtcccagcaggacatatatggcgagaagattcccaaggaatccaaaatcgccaccttcacgcgcaacgtgtcatgggccagtgttctcggcaaaatttgggactcactcagcatagaagaccagaccaccaaccagggaagaaacttatcacggaatcacggcctcgagaggttgtgtgagagtaacgatcaatgcggggaggcactgtctcaaatcccccacctgaatctgtataagaaaatcccgccaggggtcaaacaatacgaatataatacgtatgggaaggtttttatgcatcgccggaccagcctgaaatccccaatcaccgtgcacacgggtcacaaaccttatcagtgtcaggagtgtggccaggcatactcttgtaggagccatttgaggatgcacgtgaggactcacaacggtgagagaccgtacgtgtgtaagttatgtggcaaaacttttccccgcacctcctcactgaaccggcacgtgcggatacacacagcggagaagacatatgagtgcaagcaatgtggtaaagcctttattgacttcagtagtctcacgagtcatctacggtcacacacaggagagaaaccatataaatgtaaagaatgcgggaaggcgttttcatacagctccacatttagaaggcacaccatcacgcacaccggggagaagccttacaagtgcaaggagtgtgctgaagcattctcttactctagtacttttagacggcacatgatcagtcatacaggcgagaagccacacaagtgtaaagagtgcggcgaggcattcagttattcttctgcattcagaagacacatgattacccacacaggagagaaaccatatgagtgtaagcagtgcggcaaaacatttatttatctacagagtttcaggagacatgaaaggatacacactggagaaaaaccttacgaatgcaaacagtgtggcaagaccttcatttatccacagagctttcgaagacacgaaaggactcacggaggcgaaaagccctacgaatgtaatcagtgcggcaaggctttcagtcacccctcatcttttcggggtcacatgagagtgcataccggcgaaaagccttatgagtgcaagcagtgcggcaaaacattcaattggcccatcagtctgagaaagcacatgcgcacccacactagggaaaagccatatgagtgcaagcagtgcgggaaggccttctcattgtccgcctgctttcgagagcacgtacgcatgcaccccgaggataaaagctatgagtgcaaactgtgcggcaaggccttctattgccatatctcccttcagaagcacatgcggcgccatacagccgagaagctatacaaatgcaaacaatgcggcaaggctttttcatggccagagttactccagcaacatgtgcgcacgcatactgttgagaagccctacgagtgcaaggagtgtggcaaggttttcaagtggcctagttcattgcctatccacatgagactgcacaccggcgaaaagccttaccagtgcaagcattgtggcaaggcatttaactgttcttcatctctgcggcgacatgtgcgcattcacaccactgaaaaacagtacaagtgcaatgtagggcacccacccgctaacgagttcatgtgtagcgcttctgagaaaagccaccaggagagggatctgatcaaagtggtcaacatggtgctgcccctgtag

SEQ ID NO: 244707 - DNA, 1887 bp, Artificial Sequence
  derived and/or modified sequence
atggattctgtggtgtttgaagatgtggccgtggacttcaccctggaggagtgggccctgctggacagcgcccagagggacctgtacagagatgtgatgctggagaccttccagaacctggcctctgtggatgatgagacccagttcaaggccagcggctctgtgtcccagcaggacatctatggagagaagatccccaaggagagcaagatcgccaccttcaccagaaatgtgtcctgggcctctgtgctgggcaagatctgggacagcctgagcattgaggaccagaccaccaaccagggcaggaacctgagcaggaaccacggcctggagcggctgtgtgagagcaatgaccagtgtggggaggccctgagccagatcccccacctgaacctgtacaagaagatccccccaggagtgaagcagtatgagtacaacacctacggcaaggtgttcatgcacaggaggaccagcctgaagagccccatcaccgtgcacacaggccacaagccctaccagtgccaggagtgtggccaggcctacagctgccgcagccacctgaggatgcacgtgaggacccacaatggagagcggccctacgtgtgcaagctgtgtgggaagaccttccccaggaccagcagcctgaacagacatgtgcgcatccacacagctgagaagacctatgagtgcaagcagtgtgggaaggccttcatcgacttcagcagcctgaccagccacctgcggagccacactggagagaagccctacaagtgcaaggaatgtgggaaggccttctcctacagcagcaccttccgccgccacaccatcacccacactggagagaagccctacaagtgcaaggaatgtgccgaggccttctcctacagcagcaccttccgccgccacatgatcagccacactggagagaagccccacaagtgcaaggaatgtggggaggccttctcctacagcagcgccttccgccgccacatgatcacccacactggagagaagccctatgagtgcaagcagtgtgggaagaccttcatctacctgcagagcttcagaagacatgagcgcatccacactggagagaagccctatgagtgcaagcagtgtgggaagaccttcatctacccccagagcttcagaagacatgagaggacccacggcggggagaagccctatgagtgcaaccagtgtgggaaggccttcagccaccccagcagcttccggggccacatgagggtgcacactggagagaagccctatgagtgcaagcagtgtgggaagaccttcaactggcccatcagcctgaggaagcacatgaggacccacacccgggagaagccctatgagtgcaagcagtgtgggaaggccttcagcctgagcgcctgcttccgggagcacgtgaggatgcaccctgaggacaagagctatgagtgcaagctgtgtgggaaggccttctactgccacatcagcctgcagaagcacatgaggaggcacacagctgagaagctgtacaagtgcaagcagtgtgggaaggccttctcctggccagagctgctgcagcagcacgtgaggacccacacagtggagaagccctatgagtgcaaggaatgtgggaaggtgttcaagtggcccagcagcctgcccatccacatgaggctgcacactggagagaagccctaccagtgcaagcactgcggcaaggccttcaactgcagcagcagcctgcggcggcacgtgcgcatccacaccacagagaagcagtacaagtgcaatgtgggccaccccccagccaatgagttcatgtgcagcgccagcgagaagagccaccaggagcgggacctgatcaaggtggtgaacatggtgctgcccctgtag

SEQ ID NO: 244708 - DNA, 1887 bp, Artificial Sequence
  derived and/or modified sequence
atggacagcgtggtgttcgaggacgtggccgtggacttcaccctggaggaatgggcattactcgattccgctcagcgagatctgtatagggatgtcatgctggagaccttccaaaatctggcctccgttgacgatgagacgcaatttaaggcatccgggtccgtgagtcagcaagacatttacggagaaaaaatccccaaggagagtaaaatcgccaccttcacaagaaacgttagctgggctagtgtgttaggtaaaatttgggacagcctcagtatagaggatcaaacaacaaatcagggacgcaacctgtctcgaaaccatggcctggagcggctctgcgagagcaatgaccagtgtggagaggctctgtctcagatcccccatttgaacctgtacaagaagattcccccaggtgtcaagcagtacgagtacaacacatacggaaaagtgttcatgcacagacgtaccagcctcaaatctccaattacggtgcatactggccataaaccgtatcagtgtcaggagtgtgggcaggcctattcatgccgtagccacctcagaatgcatgtgcggactcacaacggggagaggccatacgtctgcaaactatgcggcaaaacatttccgcggacatcaagtttgaatagacacgtgcggattcacaccgccgagaagacctatgaatgtaagcagtgcggcaaggcatttatcgatttctcatctcttacttcgcacttacgctcccatacaggcgagaaaccctacaaatgtaaagaatgtgggaaagcgttcagttactcctccacatttaggaggcacacgataactcacacaggtgaaaagccctacaagtgcaaggagtgcgcagaggctttcagctactcatctactttccgccgtcacatgatctcacacacaggagagaaaccacataaatgcaaagagtgtggcgaggcttttagctattctagcgcatttcgcaggcatatgatcactcatacaggggaaaaaccatatgagtgtaagcagtgcggaaaaaccttcatatatctacaaagcttccggagacacgaacgtatacatactggagaaaagccctatgagtgcaagcagtgcggaaaaacttttatttatccccagagcttcagacgacacgaacgcacgcacggtggggagaagccctacgaatgcaaccagtgcggtaaagccttctcccacccctccagttttaggggtcacatgcgcgtccatacaggcgagaagccctacgagtgcaaacagtgtggtaagacctttaattggccgattagccttagaaagcatatgcggacacacactcgggaaaagccctatgaatgtaagcaatgtggaaaggcattctctttaagcgcctgctttcgggagcatgtccggatgcaccctgaggacaaatcttacgaatgtaagctgtgtggtaaggcattttattgtcacatatcgctccagaagcacatgcgccgtcacactgcggagaagttgtataagtgcaagcagtgtggaaaagcgttttcttggcccgagctgctgcagcagcatgtgaggactcatactgtcgagaagccgtacgaatgcaaggagtgcgggaaggtgttcaaatggccctcttcgctgcctatccatatgagattacatacaggggaaaaaccttaccagtgcaagcactgcggtaaagcttttaattgcagcagctctctgcggcgtcacgtgcgcatccatactaccgaaaaacaatacaaatgcaatgtggggcatccgccagcgaacgaatttatgtgcagcgcttctgagaaatcacaccaggagagagacctgatcaaggtagtgaacatggtccttccactgtag

SEQ ID NO: 244709 - DNA, 1887 bp, Artificial Sequence
  derived and/or modified sequence
atggactccgtcgtctttgaggacgtggccgttgattttactcttgaggagtgggccctgctggattctgcccagcgagacctgtaccgcgacgtgatgctggaaacattccaaaacttggccagcgtcgacgatgagacccagtttaaagctagcgggtcggtcagtcaacaagacatctatggcgaaaagatccctaaggaatcaaagatcgccacctttacaagaaacgtgtcctgggccagcgtgctgggaaaaatctgggactcactcagtattgaggaccaaaccactaaccaggggcgtaacctttccaggaatcacgggctagagcgcctctgtgagtctaatgatcaatgcggcgaggctctttcacagatacctcatctcaacctgtacaagaaaatcccacccggtgtcaaacagtacgagtataatacttatggtaaggtgtttatgcaccggaggacgtccctcaagtccccaatcaccgtgcatacaggtcacaagccataccagtgtcaggagtgcggtcaggcatactcttgtcgcagtcacctgcgaatgcatgtacgcacccacaatggcgagcgtccttacgtatgtaagctatgcgggaagacttttccgcgaacctcctccttgaataggcacgtccgcatccatacagctgagaaaacttacgaatgtaaacagtgtggaaaggcttttatcgacttcagtagtctgacttcccatctacgaagtcatactggcgaaaagccctataagtgcaaggaatgtggcaaagccttcagctattcctctaccttccgcagacacaccatcacacatacgggagaaaaaccgtataagtgtaaggagtgtgccgaggcattctcttactcgtcaacattccgaagacacatgatctcgcataccggagagaaacctcacaagtgtaaggaatgtggtgaggccttctcttatagctctgcgttccgcagacacatgatcactcataccggggaaaagccatacgaatgcaagcagtgcggcaagacatttatataccttcagagtttccgaagacatgagcggatccacaccggcgaaaagccttatgagtgtaagcaatgtggaaagacctttatataccctcaaagcttcaggaggcacgagaggactcacggtggcgaaaaaccatacgaatgtaatcagtgcggtaaggccttttcccaccccagctcatttagaggacacatgagagtccacactggcgagaaaccttatgagtgcaagcaatgcggcaagactttcaattggcccattagtctaagaaaacatatgcgtactcatactagggaaaagccctacgaatgtaaacaatgcggcaaggccttcagtctgagtgcctgttttcgcgagcatgtgcgcatgcatcccgaggacaaaagttacgagtgtaagctgtgtggtaaagccttttattgccacattagcttgcagaagcacatgagacgccacaccgccgaaaaactgtacaagtgcaaacagtgcgggaaagcattttcttggcccgagctgctgcaacagcatgtgagaacccacaccgtggagaaaccctatgaatgcaaagaatgcggcaaggtcttcaagtggccgtcgtctctgcccatccacatgcggctgcatactggagagaagccttaccagtgcaagcactgcggaaaagccttcaactgttcttcttcactgcggagacacgtgcgcatccatactacagaaaaacagtacaagtgtaacgtgggccatcccccagctaacgagttcatgtgcagtgcatcggaaaagtctcaccaagagcgagacctaataaaggtcgtgaacatggtcctgcctctctag

SEQ ID NO: 244710 - DNA, 8547 bp, Artificial Sequence
  derived and/or modified sequence
cgagctctgtctaatcaggcccctgggacgggacgcctctgtcctagccgtgagtgccccgcctgcccctagcggtccctggcgtcccggttcctgtcgcgctcacctgcgccggtagcgaagaaatcgccccgggacatggactcagtggtctttgaggatgtggctgtggacttcaccctggaggagtgggctttgctggattctgctcagagggacctctacagagatgtgatgctggagacctttcagaacctggcctcagtagatgatgaaactcaatttaaggccagtgggtcagtttctcagcaggatatttatggagagaaaatacccaaggaatctaaaatagccacgttcaccagaaatgtttcctgggcctctgttttaggaaaaatttgggacagtcttagcatcgaagatcaaaccacaaaccaggggagaaatctcagtagaaatcatgggttggagagactctgtgaaagtaatgatcaatgtggagaagccctcagccagattccacatcttaatctgtacaagaaaattccacctggagtaaaacagtatgaatacaacacgtacggaaaagtcttcatgcatcgccgcacatccctcaagagtcccatcacagttcacactggacacaaaccatatcagtgccaggaatgtgggcaggcctacagttgtcgttcacacctaagaatgcatgtgagaacccacaatggagagagaccctatgtgtgtaaattatgtgggaaaacctttcctcgtacttcctccctcaatcggcatgtaaggattcacactgctgagaaaacctacgaatgtaagcaatgtgggaaagcctttattgacttctcaagtcttactagtcatctcagaagtcacaccggagagaagccatataagtgtaaggaatgtgggaaagctttcagttattcctcaacgtttcgaagacacacaataacacacactggcgagaagccatataaatgtaaggaatgtgcggaagcctttagttattcctcaacttttcgaagacatatgatttcacacactggagagaagccacataaatgtaaagaatgtggggaggccttcagttattcttcggcttttcgaagacacatgataacacacactggagagaaaccctacgaatgcaaacaatgtgggaaaaccttcatttatctccagtcctttcgaagacatgaaaggattcacactggagagaaaccctacgaatgcaaacagtgtgggaagaccttcatttatccccagtcctttcgaagacatgaaaggactcatggtggagagaaaccctatgaatgcaaccagtgcgggaaagcattcagtcacccctcctcctttcgaggacacatgagggtgcacactggagagaaaccctatgagtgcaagcaatgtgggaaaactttcaattggcccatatctttacgaaaacatatgagaacacatactagagagaaaccctatgaatgtaagcagtgtgggaaagccttcagcttgtctgcttgctttcgagaacatgtgagaatgcaccctgaagacaaatcctatgaatgcaagctatgtgggaaagctttctattgccacatatccttacaaaaacatatgagaagacataccgcagagaaactctataaatgcaagcagtgtgggaaagctttcagttggcctgaacttttgcaacaacatgtgagaacgcacactgtagagaagccctatgaatgtaaggaatgtgggaaggtcttcaaatggccatcatctttaccaatacatatgagactgcacactggagagaaaccttatcaatgtaagcattgtgggaaagcattcaattgttcctcatccttaaggcgacatgtgagaatacacactacagaaaaacagtataagtgtaatgtaggacatcctcctgcaaatgaattcatgtgcagtgcttcagaaaagtcacaccaggagagagatctgatcaaagttgtaaatatggtgttgcctttatgagttccttatcctgaaagtggacactcaaggagtgtgtctgtagttcatttgcaaataaacatttagttgaaaaataattctccaaatactctcagctatcctacatgaatttgaacaggtagtttcttacgattcagtaaataaaactttcatcttagagtgttttggactcatggatgatttgaagtgtatttttaatatgcaagtaggttcaagttttatttaatttcttaaattgtaactgacttagtgtgacaggtattggatattacgtatctattatattttccaccttttttactgggagtatttttattgtttggccagaggagccttattccattttttaagaagtagttggcagaattttgtaattatgcaaagttgtttaaggagtatagcctcaaatgaattgtaatttttaatgtttgcccattgctgtttgtctttgcttgtgattgtgaattggacagtaggctttgacttgtgatgtgacggagaaatccagagttgcagatagttcttctgcattgttgtcagtgtgggtagtgttaggaacttcatttgctggaatgcatttcctttatggttccatgtccaaatttaccaatagcaataacttgaatgaaatttagaatgaagaagaagtaagtcatcgctgagcttttggggtcacattaaatggagatggacagatgcataggggctttgtgaacatcaaccttcagcttattttccagattcttattcctgccaatcaagagtaccatcaaaagaaacacttaagtgcttgatttccactgtgtcagaggtgtagtcttcctcagacatctccattaacttgatattagggatattcctgtgtggtcagtcacctagagtctggatttttctcaaaaccctgcatgacctcttgaccactgattcagactgtcttgtttggcagtctctgagcttctgattctcccgttctgtagatcttaacatatttgcatggggtctaatttatatagtgaacaccttgttatcttaatacttccagtggctctgtgatcctgattccaccacgaaagccacagtgttgcagtcaaagaagaaaaacaacacatgggactttgtaccctattgcatttttaagtgtgcctgccgagtcctatgtgagaacaaataccttcctcatatattagatttagggagatttctgttactcagaactaaatgcagtttcttgatataggttaaattattaggtttgattatgtatcattaaaaataatgtggattttgtttcaaggaaaaccttctgtagatatttcttagaaatatcctgtttagctgggcacagtagctcatgcctgtaatccctgcactttgggaggcttgaggtcaggagtttgagaccagcctggttaacatggtgaaaccctgtctctactaaaaacacaaaaattagccaggcatggtggtgagtacctgtaaccccagctacttgggaggctgagacaggagaagtgcttgaacctaggaggcggaggttgcagtgagccaagatcacaccactgcactccagcctgggagacggggaaagactccatcacacaagcaagaaaagaaaaaaaaatcctatttactgtgctttcaaattagttgtttagagactatattaatttcccagggctgccataacaaagtacaaaaactgggtgacataggaaaacaaactttttgtttctcagttctggacccagaaatccagaaacaaggcattggcaggaccatgctttttctgaagatgctagggaaggatctgtttcagaactcacctagcttctggtagttccttagcttgtggcagcataactctaattttcacatggcattctccctgtgtgtgtgtctctccatgtgacaatatttttatacatacacaccactcattgggttaggccccactctacttcagtatgattttaccttaactaattacattggcaacagctctcttttcgcatactgaggcaccgcgaattaagatttcaacgtaaaaattttaggagacccaattcaacccataacactaagaaatgttattttttgtttaccgagagaattacagatttcaaatcaactttgtaattttgataatttaagcatgttacattttgaatcagtattaccaagtatatacaaatacaggtattttttcatataaatgttatttttaattgctgtatacttaacatttgccattaaaatgattttttttttttgagacagagtctcgctctgtcacccaggctggagtgcagtggcacgaccttagctcactgcaaccttcatctcccaggttcagttgattctcctgcctcagcctcccgagtagttgggattacaggcatgcaccaccacacccagctaatttttttatttttggtagagatggggtttcaccatgttggccaggctggtcttgaactcctgacctcaggtgatctgcccaccttggcctcccaaagtgttgggattacaggcatgagccaccacacccggcctaaaatgatttcttatttgtggttaataacaattaaaaagcggaaataatggttttgtcaaggccctctacccagaaaccaccaggatcacactggtagtcaaagaaaatttgctgtgttgagttgaagtttgaacacatgatcaagaaagggctgtggcttgtatcagagggtgtttaaaaggatttactatcagatttggccttgtgttctgtgattttggtgagcgttcaaggaagccaggctttggtctggattggatgttctcaggtcatgaatataattctctgggaactcccaaagttctcatctacaaagcagaagttaattggagctgaaaactaatcagtaaagccacagcagccagtcatatgggggagaagaggggaatgtttgatggtttttgtggtttagaggtgagttccggaaaaaaagaagacatgtttgacatcctcaaacgagaaaatttttcatgtgttttataggccaaggaggcagaagcttttgttttaatgagccagaaagccccaaaagcctatttaagttttctcaggtatcatttcaacctctgaacttccagaattaactagggaagaggaaaaacatgtaacaccttagagttttattaaagagcaaacaatatccagtaatctccattactttccatgttaacataagttttcataacgctctatagatgaatgtgatttggcagtcacttgtatttcttaacacccacttacccatcattccctcttagatgaaaaaagttaagcacggggacaacagagtcttgtatattcatgtagctcatgatgatggaatcaagtttgaaggcttaacctgtgcttaacctatattgggcattgtcaagacttaaatttagaacactggaaagcaagtataattaattttacaaatagggcatcaaattttacaaagactcctaaggctatatggtattccttttataagacatggaaaaggcaaagataagggaaacgaacaaatcgctggttagaagtaggggatttgagtacatatgggcttaagagtgttctgtcatgattgtagtggtgaaaacaagcatttgcaaaaactcataaggctactcttaaaatagcaaattttgttgtatgtatattttaaagttaaacaataaaaatgctttcagtttattaaagaactcaagaccaggtgcagtggctcatgcctataatcccagcactttgggaagctgaggcgggaggattgcttgtggccaggaggttgaggctgcagtgaactatgatcatgcactgcactctacactgggcgacagagcaagaccctgtctcaaaaaaaaaggaatacaaaacattcctgaaacttgacatgtaagttcgcaataagacttttccctagctgggcgcggtgactcatgcctgtaatctcaacattttgggagactgaggcaagaggatcacttgaagtcaggagctagacaccagtctgggcaacatagcgagacctcaactctaccaaaaaattaaaaagtgagccaggcggggtggtgcacgtctgtggtcccagctacttggcaggctgaagcaggaggatcacttgaggccttgaggagccatgatcgtgccactgcactccagcttgggtgacagagcaagactgtctcaaaaaataaaaataaaaaaacaagacttcccccaccatcttggaattctctggaggaaatgtagggctggttgacaaggacttgtgcctcgtcagaccctgtttgaaacccagtctgaagttttgaaacacccacaagggccatacctgactttatctcacgcacataacaggagagaagaaggaggtcttccagaatctgtctttgagtttacaccaggttcttcccatctgatctttgggaatgctgtggttctgaaacataaaacggggaccctacacttcttcccaggaatatcctgcctgggagcatcctgatcctgtcttcagacaaggggcatccgcatcttgttttctagggcctttcctgaggccacttccagctccaaagttctcatctcaagctcagctctgtgtcttcatgctgggaaacgtctttatggatccccaaactcctcttgctgttgggaacacgtggcagccctgcgttgtgaggtgagagaagaggcagtggcagaacccatgccatggagacacgcccatcagccacagcagctcctgctactgcataaatccataggcacaatcacacgcctcacggtgtcaacatctcccatgacatcacaaagatgcccagctgggacccacctacagtgatggggtgatggggtttcacctataagcgggcaaacaggcactcctcctcactgtccagtcacctgacgtgctttttctgcgcactcaggtcgtgacaccccaggaggtgcctatcgcgccccaagctcctcacgtgcctcctccccacagtccaggacgcgtcttactaacgcctcaccagagcgcatgcgccctcctcaggagcagcctcaaagcgcgcagcctcagcccattggcctgcgggaagtggagttcccgaacagaagcccctcagtctccggaagccccgcccggcagactgttcccaggatgcaacacgggctcgcgtctaaaagagctgtgctttgttggggctatctgggagtttccgccttccatgaagtgcgcaggcgcacttaggcgaggcggggcgactctaggaagtggagacatcaagagtggtactggaagtggcggaagctctcctcttgccctcttcagcttccggtgtggtgggtcccggatatcgcgtggctgtggcaggtagacagcccgtgctccagaggccttcatcttgtgatggcagatgtacttgagtagacacgacagacggggaaggaccctgatggtccgagggaccttccacagcaagtagaaggcactgctgtgaatatgatggcgtcagaggtgactgcaaaaaaggacagggcagctgggcgaggaagagataccagtgatgtcctaactgagctccctgggtctggtagtgaggagctcagtcttagaatatgagccgtgtcaggggctacagcatcatcactcttgtcctgtcgcagactcaggctccctgttctcaggttcttatgtagacagtgagggctcagggaggctcccaccaccaccaccaccagcaccaccactccatcaaaacggctgaaggaccttcctttagggttcgggggatctcctccttccacaagggatggatgtgaagacaactcattctttgatgttcagatggttgtggccctctgatgagatgtgtgcacaccttgccaaatgcatatgtctgttgagcctggacattaagtatttcttgatgttcttctgtgtaacaggtgatgtcctaggtgctgcagtgaacagaagagacaaaatatccttgttcccttgaagctaatgtcgtaggggcccaaaacaaagcaaacaaacaaaaaaaaggaatgcaagtcaagtacactttgtatggacagtggtaattcctaagaaggaaaacaaagatggacttaaggggtgcagagggcctggactatgtgtgtctgtgggatagtctgttactacctctgggactctcatctcttgagtgtgcttgggtgtgtccaaccgtttttcctagtgacaaagtctgggtaattctgtggggacatatattggtgtatctgggaggtcccatgtgtctcagtggtggtccctgttttcaggaaagagtgtctgtgaatgtccatgtgtctcactgcacagctgtgatttttctgtgtctctgtgttttccagtctttgtgtgatgaaatataaaggcctagcaggctcagagttattaatgaattgtacttaagcgttgagaggcatatatttattgcactattaaattcttccaaaatatagtt

SEQ ID NO: 244711 - protein, 343 aa, Artificial Sequence
  derived and/or modified sequence
MGSPGASLGIKKALQSEQATALPASAPAVSQPTAPAPSCLPKAGQVIPTLLREAPFSSVIAPTLLCGFLFLAWVAAEVPEESSRMAGSGARSEEGRRQHAFVPEPFDGANVVPNLWLHSFEVINDLNHWDHITKLRFLKESLRGEALGVYNRLSPQDQGDYGTVKEALLKAFGVPGAAPSHLPKEIVFANSMGKGYYLKGKIGKVPVRFLVDSGAQVSVVHPNLWEEVTDGDLDTLQPFENVVKVANGAEMKILGVWDTAVSLGKLKLKAQFLVANASAEEAIIGTDVLQDHNAILDFEHRTCTLKGKKFRLLPVGGSLEDEFDLELIEEDPSSEEGRQELSH

SEQ ID NO: 244712 - DNA, 1032 bp, Artificial Sequence
  derived and/or modified sequence
atggggtccccgggtgcttctctgggcatcaaaaaagcattgcagtctgagcaggccactgcccttccggcgagcgcccccgccgtctcacaacctaccgcccctgctccaagctgtttacctaaggccggccaggtgattccgacactcttgcgagaggcaccattctcgtccgttattgctcccaccctactttgcggctttctttttctggcgtgggtcgcagccgaagtgcccgaggaatcgtcccggatggccggaagcggtgcccggagcgaggagggacgccgacaacacgcctttgtaccggagccattcgacggagccaacgttgtgccaaatctatggctgcattctttcgaagttataaacgacctgaatcactgggatcatatcactaaactgcggtttcttaaagaatcattaagaggtgaggcccttggcgtatataatcggctgtctccgcaagaccagggagattatggaactgttaaggaagcactcctaaaagccttcggggtgcctggtgcagctccgagccatctgcctaaggaaatagtttttgccaactcaatgggcaaggggtattatcttaagggcaaaatcggtaaggtgccggtcaggttcttagtagattcaggcgcacaagtgagcgtggttcatcccaacctgtgggaggaggtgacagacggggatctcgacacattgcagccttttgaaaatgtcgtcaaagtggccaatggggcagaaatgaaaatactcggcgtgtgggacaccgccgtctccctcggcaaactcaagctcaaagctcagtttctggttgctaacgcaagtgcagaggaggcaattatcgggaccgatgtcctgcaggatcataatgccatcctggacttcgaacaccgcacatgcactctgaaaggaaagaagtttcgactgctgccagtgggaggatcactggaggatgaatttgatttggagctcatcgaggaagacccatcaagcgaagaggggagacaggaattgagccactag

SEQ ID NO: 244713 - DNA, 1032 bp, Artificial Sequence
  derived and/or modified sequence
atgggcagccctggggccagcctgggcatcaagaaggccctgcagagcgagcaggccacagccctgcctgccagcgccccagctgtgtcccagcccacagccccagcccccagctgcctgcccaaggccggccaggtgatccccaccctgctgcgggaggcccccttcagcagcgtcatcgcccccaccctgctgtgtggcttcctgttcctggcctgggtggccgctgaggtgcctgaggagagcagcaggatggccggcagcggggcccggtctgaggagggccggcggcagcacgcctttgtgcctgagccctttgatggagccaacgtggtgcccaacctgtggctgcacagctttgaggtgatcaatgacctgaaccactgggaccacatcaccaagctgcgcttcctgaaggagagcctgcggggggaggccctgggcgtgtacaaccggctgagcccccaggaccagggcgactatggaacagtgaaggaggccctgctgaaggccttcggcgtgcctggagctgcccccagccacctgcccaaggagatcgtgtttgccaacagcatgggcaagggctactacctgaagggcaagattggcaaggtgcctgtgcgcttcctggtggacagcggggcccaggtgtctgtggtgcaccccaacctgtgggaggaggtgacagatggagacctggacaccctgcagccctttgaaaatgtggtgaaggtggccaatggagctgagatgaagatcctgggcgtgtgggacacagctgtgtccctgggcaagctgaagctgaaggcccagttcctggtggccaatgccagcgctgaggaggccatcatcggcacagatgtgctgcaggaccacaatgccatcctggactttgagcacaggacctgcaccctgaagggcaagaagttccggctgctgcctgtgggcggcagcctggaggatgaatttgacctggagctgattgaggaggaccccagcagcgaggagggccggcaggagctgagccactag

SEQ ID NO: 244714 - DNA, 1032 bp, Artificial Sequence
  derived and/or modified sequence
atgggcagccccggcgccagcctgggcatcaagaaggccctgcagagcgagcaggccactgctctgcctgcaagcgctcccgccgtaagccagccaacagcgcccgcgccttcttgtctccccaaggcgggacaggttataccgaccctgctcagagaagcccctttttcttcagtgatcgcaccgaccctgctttgtgggttcttgtttctggcatgggtagccgcggaggttccagaggaaagctcccggatggccggctctggcgctagaagtgaggaaggcaggagacaacatgcattcgtgcccgagccctttgatggcgctaacgtcgtgcctaacctgtggcttcactcgtttgaggtcatcaacgacctgaaccattgggaccatatcaccaaactcaggttcttaaaagagtcacttaggggcgaggcactgggagtgtataacagactgagcccccaggaccagggagactacggtactgtgaaggaggcccttctcaaggcttttggagtcccaggcgcagcacccagtcatcttcctaaagaaatcgtgttcgctaactccatgggcaaggggtactacctcaaagggaagatcggtaaggtgccagtgcgtttcttggtcgacagcggtgcccaggtaagcgttgtacatcctaacctctgggaggaagttacggacggggacctcgatactctccaacctttcgaaaatgtggtgaaggtggccaatggggccgagatgaaaattctgggggtgtgggacactgcagttagtctggggaagttaaagctgaaagcccagtttctcgtggccaacgcctccgcagaagaagcaatcattggtaccgacgtgctccaggaccacaacgctattctggacttcgaacatcggacctgcaccctgaaaggaaaaaaatttcgtctgttacctgtcggggggtcgctggaggatgagtttgatctggagctaattgaggaggaccccagctcggaagagggcaggcaggagctgtcacattag

SEQ ID NO: 244715 - DNA, 1032 bp, Artificial Sequence
  derived and/or modified sequence
atgggctcccctggtgcttcccttggtattaagaaggcactacagagtgagcaggcgaccgcactgccagcgtctgcccctgctgtcagccagcctacagctcctgctccatcctgcctacccaaagctggccaagtgatcccaaccctattgcgtgaggccccattctcctctgttatagctccaacgctcctttgtgggtttctcttcctggcgtgggtagctgctgaagtgcctgaggagagctcgcgcatggctggctcaggcgctcgatctgaagaaggcaggcgacagcacgctttcgtcccagagcctttcgacggagcaaatgttgtacccaacctgtggttacattcctttgaagtgatcaacgaccttaaccattgggaccacatcacgaaattacggtttcttaaagagtcactcagaggtgaggccctcggcgtttataatcggctttcaccacaggaccagggcgattacgggacagtgaaggaggcattgctcaaggcttttggcgttcctggcgctgcgccatcgcacctgccgaaggagatcgtctttgctaactcaatgggtaagggctactacctgaagggaaagatcggcaaagtaccggtgaggttcctggtcgatagtggcgctcaagtatccgtggtgcaccctaatttatgggaggaagtcactgacggagatcttgacacactgcagcccttcgagaatgttgtgaaagttgcaaacggggctgagatgaagatattaggcgtgtgggacacggctgttagcctgggtaagttgaagcttaaggcccagtttctggtcgccaacgctagtgctgaggaagctattattggcacagatgtgctccaggaccacaacgcaattctggactttgaacataggacctgcaccctgaaagggaagaaattccgcctactccccgtgggcggttcactggaggacgaattcgacctagaattaattgaggaggatcctagcagtgaagaaggtagacaagagttaagccactag

SEQ ID NO: 244716 - DNA, 2172 bp, Artificial Sequence
  derived and/or modified sequence
gcagcagttgagtccatgtaagatgattgtgcacgtgtgtgtgtgtgtgtgtgtgtgtgtgtgtgtcctcactcacttaaaaaagaccatttctgtgcattctttatgctggaaccctcctctgcctccctctccaggaaatcccataggatcccatacctgctttagaatgtgtgtgagacacttcccagtgcctggcatgtggtaggagctcagtacatgtaaactgttttcctttgaccactcaaagtagtcacttgttggggaggccaatggcggcttccccggtctctgagctgatgggcgtctggtccctgcctccccttccttcactggctgatgacaaatacctgaatgtcatcacatcctccgtgtcctcatctgttattctggaacacaggccagggagggtacagggtagtcccccttcaacagaggctggcctttcttgggatgtgggctggctggtgttggtccaaggatggatgcagagggtgaggcacccatcctgctagtccggccggatgctggcaggagggcggggtgaggaggggcggagcttccagaacaaaggagaatggggagcccaggggccagcctaggcatcaaaaaggctctgcagagtgaacaggccacagcactgcctgcctctgccccagcagtcagccagccgaccgcgcctgctccctcctgcttgcccaaggccgggcaagtcatccccactctgcttcgagaggccccgttttccagcgtgattgcgccgacactgctctgtgggtttctcttcttggcgtgggttgctgctgaggttccagaggagagcagcaggatggccgggagcggagccaggagtgaggaaggccgccggcagcatgccttcgtcccggaaccttttgatggggccaatgtcgtcccaaacctctggctgcacagctttgaagtcatcaatgacctcaaccattgggaccatatcaccaagctaaggttcctgaaagagtccctcagaggagaggccctgggtgtctacaataggctcagtccccaggaccagggagactatgggactgtgaaagaggccctcctgaaggcctttggggtccctggggctgcccccagccacctgcccaaagagatcgtctttgccaacagcatgggtaagggctactatctcaaggggaagattggcaaagtgcccgtgaggttcctggtggactctggggcccaggtctctgtggtccacccaaacttgtgggaggaggtcactgatggcgatctggacaccctgcagccctttgagaatgtggtaaaggtggccaatggtgctgaaatgaagatcctgggtgtctgggatacagcggtgtccctaggcaagctgaagctgaaggcacagttcctagtggccaatgcgagtgccgaggaagccatcattggcactgatgtgctccaggaccacaatgctatcctggactttgagcaccgcacatgcaccctgaaagggaagaagtttcgccttctgcctgtgggagggtccctggaagatgagtttgacctggagctcatagaggaggacccctcctcagaagaagggcggcaggagctatcccactgagaagccaccttttctttaacctcctaaatattggtgggaagacccaccgctgtggggggggttgcatatcctcatgggggtcactgggcttggccagtctgcttatcaactcttgctcttctctcccctttgcctccctctgcaggggccttaatctgcccctggtaggggaggcttccactgaacaggcacaggtgagggagagcaggctggcttagagggacagggtccccatggtcatcaagctgctgttgatgacaaagactcaaaggctggaagagctcccaaggaagctagaaatgcttgtctttgaaagaactgtgggaccccttcagattccctgaggtatggcttggtcactctcaggtcctcaaagcctgtcttagttgggctgggtcctagctgcagggtctttgtgagggtcacagttgctctgggacacctccctgaagagcctttccacctgtacaatcgtattttctttctgtcatttgctttgaagcccattgtgccttatgccaataattcaattgctgcaaacaccaataaagattgattcatgg

SEQ ID NO: 244717 - DNA, 1032 bp, Artificial Sequence
  derived and/or modified sequence
atgggcagccccggcgccagcctgggcatcaagaaggccctgcagagcgagcaggccaccgccctgcccgccagcgcccccgccgtgagccagcccaccgcccccgcccccagctgcctgcccaaggccggccaggtgatccccaccctgctgagagaggcccccttcagcagcgtgatcgcccccaccctgctgtgcggcttcctgttcctggcctgggtggccgccgaggtgcccgaggagagcagcagaatggccggcagcggcgccagaagcgaggagggcagaagacagcacgccttcgtgcccgagcccttcgacggcgccaacgtggtgcccaacctgtggctgcacagcttcgaggtgatcaacgacctgaaccactgggaccacatcaccaagctgagattcctgaaggagagcctgagaggcgaggccctgggcgtgtacaacagactgagcccccaggaccagggcgactacggcaccgtgaaggaggccctgctgaaggccttcggcgtgcccggcgccgcccccagccacctgcccaaggagatcgtgttcgccaacagcatgggcaagggctactacctgaagggcaagatcggcaaggtgcccgtgagattcctggtggacagcggcgcccaggtgagcgtggtgcaccccaacctgtgggaggaggtgaccgacggcgacctggacaccctgcagcccttcgagaacgtggtgaaggtggccaacggcgccgagatgaagatcctgggcgtgtgggacaccgccgtgagcctgggcaagctgaagctgaaggcccagttcctggtggccaacgccagcgccgaggaggccatcatcggcaccgacgtgctgcaggaccacaacgccatcctggacttcgagcacagaacctgcaccctgaagggcaagaagttcagactgctgcccgtgggcggcagcctggaggacgagttcgacctggagctgatcgaggaggaccccagcagcgaggagggcagacaggagctgagccactag

SEQ ID NO: 244718 - protein, 131 aa, Artificial Sequence
  derived and/or modified sequence
MDFQQLADVAEKWCSNTPFELIATEETERRMDFYADPGVSFYVLCPDNGCGDNFHVWSESEDCLPFLQLAQDYISSCGKKTLHEVLEKVFKSFRPLLGLPDADDDAFEEYSADVEEEEPEADHPQMGVSQQ

SEQ ID NO: 244719 - protein, 98 aa, Artificial Sequence
  derived and/or modified sequence
MATHCPLYCVGADLMMNRAGEHVWSESEDCLPFLQLAQDYISSCGKKTLHEVLEKVFKSFRPLLGLPDADDDAFEEYSADVEEEEPEADHPQMGVSQQ

SEQ ID NO: 244720 - DNA, 825 bp, Artificial Sequence
  derived and/or modified sequence
cggcctccctatactggctgctatctctaagccacaggacagacaagagaaaaacaattagtcatcccaggttttgcccaccttccccaccgcccctgttattctaaacacaatcaccatagaaaacaagctgtggtgagaagccaagcaggcacctacaggtctgaaagacttgaagactttttccaggacttcgtggagcgtcttcttgccgcaggaggagatgtaatcctgtgctagctgcaagaaaggcaggcagtcctcgctctcactccacacgtgctgcgtgcccacgggcgacggaaggagaaaacaaagacacacagtcactacactcagtgtgaagttcagaaaagccaagcagattttcttaataacatcaatttgaagaaggcctccattctacagtaaaattcatacatgcgttcttgatttgtttgcgttgaaagggaagaaaaaatgtctaatctatagaagcccccgagcttttggtccatacctcacctgctctgttcatcatcagatctgctcctacacagtaaagagggcagtgggtggccattcctcaccaatgatttccactgttcaccttgtgcaggctaagggcggttttcagacatggggaaggagaaaccagagcctttgccttcaaaatccttaactttgctttcagctacggctgaaagattaattaagcatagtttgtaagcattaacttggaacaagacattctttacccagatcggcctgtgagtaggcgtggtggtaaatttacttccaaatgcaaataacttaagagaacccaccaagtcaccactatgtcac

SEQ ID NO: 244721 - DNA, 396 bp, Artificial Sequence
  derived and/or modified sequence
atggacttccagcagctggccgacgtggccgagaagtggtgcagcaacacccccttcgagctgatcgccaccgaggagaccgagagaagaatggacttctacgccgaccccggcgtgagcttctacgtgctgtgccccgacaacggctgcggcgacaacttccacgtgtggagcgagagcgaggactgcctgcccttcctgcagctggcccaggactacatcagcagctgcggcaagaagaccctgcacgaggtgctggagaaggtgttcaagagcttcagacccctgctgggcctgcccgacgccgacgacgacgccttcgaggagtacagcgccgacgtggaggaggaggagcccgaggccgaccacccccagatgggcgtgagccagcagtag

SEQ ID NO: 244722 - DNA, 297 bp, Artificial Sequence
  derived and/or modified sequence
atggccacccactgccccctgtactgcgtgggcgccgacctgatgatgaacagagccggcgagcacgtgtggagcgagagcgaggactgcctgcccttcctgcagctggcccaggactacatcagcagctgcggcaagaagaccctgcacgaggtgctggagaaggtgttcaagagcttcagacccctgctgggcctgcccgacgccgacgacgacgccttcgaggagtacagcgccgacgtggaggaggaggagcccgaggccgaccacccccagatgggcgtgagccagcagtag

SEQ ID NO: 244723 - DNA, 5937 bp, Artificial Sequence
  derived and/or modified sequence
gggagcgcccaggaaaatccgggcgcccgcgggggtgccggccgctcctcccgccgccccgcgtcccggcccggccgcgccaacccccacggcggcccgcaagggggcggggggaggcggggcggaggaggagccgcgggcgcggcgccgcgctgtccccggccgccgcccgccccactccgcaccgcatgtaaacagtcccagccggcccagcccggccccggaggagcccgcgcaggccgagccgagcgccgcgctgcccgcccgggaggagggcgcctaggagcgggagggcgggcggcggcgggaggcgggcgcggggccgcgatggatttccagcagctggccgacgttgcggagaaatggtgctccaacacgcccttcgagctcatcgccaccgaggagaccgaacgcaggatggatttctacgccgaccccggcgtctccttctatgtgctgtgtccggacaacggctgcggcgacaattttcacgtgtggagtgagagcgaggactgcctgcctttcttgcagctagcacaggattacatctcctcctgcggcaagaagacgctccacgaagtcctggaaaaagtcttcaagtctttcagacctttactggggcttccggatgcagatgacgatgcgtttgaagagtacagtgctgacgtggaagaagaggagccagaggcggaccacccccagatgggggtcagccagcagtaaatctgggggctcccctgagaaggagagtgagccccacagtaacctaggtggggtcactgcccctcctgggttagcattttgcattagcacttcgaaataggacatctggctcccagcatccaaattaaaatgaaatacctttttaacgaccacaaaatatctgtgatgagctttgctcagaagtgacctgaatttcactcccgcttcagtggggtttctatggagttgtcttggtagcctttgccattttgaatttagagtccattttgtggctgactattctcttaagtttatgttggagaattaacattcgctgactcgaatgtagagaactctgaatgtattaaggataggttttgagtcctcacaggtgaccttactgagggaaagcatggcagagaagaaatgcagtctgcactttttatgtactttttaagtgtccgtaagtgaaaggttttgcttataaagcatgaattttaatatctagtcattaaactgcacaagtgcaaatacaagggcaggaaaggataatcacttagctttggactaagagggtaagagaggcccagaagcctttaagtgttttgccattactgagttacctgggtatgtagcgactggttcgtggttaggtgtaaatgttacttgcttgttcgactgtttcaaaacatgctaattccaaagccacttttgaagtctatagtggaaaatatagatggggtgaaagatataatgtattgatttttaaagctgtttataagccgtcccacgtataaaatgaaacattttaccttctctctttctaatgagatggccgcttgttaaatcatgaaaacatccagaattcaagtgccgcttaaactttgaagccatagataaatttgttagaaaagtaaaccaggattaaaagtttttaaaaatatggtagaatccttctttactttttaagtcttttatttaaaaaaaaaaagtcaaaaaaaggattccattgtgtaatttatttaaaaatttaatcacatgtttcgagggacttaattgtggtgtatttgtaaagggacacgaaggtaggaatcttttaatcgtgggttagcttggttaacagggaacgttttaataatcaagatactcagacaactcacagaaacaacttctgtaataactggaaatactgctgttatcgtttagccaacaattacttactggggacatcctttgtaatgctaacatggaattattcctggacccttctgcatccctggttttagttaacctaggatgcggaatgcctcctttacaacactagattaaacctagcatctggggtgggtacgtttaaacagtcacacatgtgcctgttaggttgtgaaagttttgaattaaaaacaagcagtagcagcagaggccacagaacttatgggagtcttgtatatcttccaggcatgtcggtgtaaacctgattgtctcgacattttctgtttaattgattggtgctgtgaggagttcggctgctcgtggtaaaacagcgtactccagttttaagtcatcgggtaaaataataggacagtgatttccatctgtgcttcagtacccactttgtgttcttttcttgaaaagtcatactaaaggttaatttcaagtaaaatgaatttccttccaagtagcctattagtaaaacacaacttagtgtttcatccattggggtgagcatatactgccctttgcagccctgcctgtgttctgattggctccattcatgagcaaaggtgattgtgagctgtatattacacaggtgtcgcccaggtttcgtaacctccactttaatgcagtaagccgcaagaatgacttctgcaagtgaaatgaggaagcttcactagcttgctccattggaaggtaaactgaaattttatacgttgaagcttaaaatctaaatttatgtatgtttggaaatggaatggacattaacataaaatgtattttatcaaaaaagtgtttagactttgaccaaatacatgttggtattatcatgttaatgttctctgtttataaaaattgagtggagatagatagactcggccattctgtgggctgatgagaattctgggctttgttttgcaccaggggtaggaaacagagaacatgtctgtatgttacttaatctccatagcaaaatcccaaacagcattagcagatcgaattgtttcttctaagacttcctttttctgaatgtgtgcacatcccttctcgtgctcacacacttgcccacacactcacttcttcctgcgctgtggctgctctaagcagggctgtgcatggtgcaaagctgcagtcagtgagcctggcagcctgtggtttctgttatggaaatggttccatggtgaaacacatccctgacccttcacagacttacacatttactcaccaggaggtggcagcggtgtgggaggaggagtgttgaccttggacgcaggagagacacctgggttctagttcaagtcggccaaggactgtgtgaccttgacaagtctaactggtctgtgaacaaggggcatttgcccttccagctgtaaacactgcccttctgtgcctgccttatgtgtgtgtgtgagtaaggagcaacagtcaaggaaacttttagggattcgagaagaaaatacatgtgggatcttgccaaggtgctgcctttaggatgctgacccctgcactaccttagaacatgttgatctgtgagtgcccaagcccctgagggctcgatctcatggggcagatgaaattctcttccttagaggaaagggaaaggtgaggccccagaggacttatctcagctgtacatgctctgcctgtggagacatggcttttctttgtgctgtggcagactggggctttggaagtggtgtatgtttaacttacctgagagtgagagatgtgtaggaagaatagctggaagaaagtgaaagatgagtgccagtacttttggcctgttatccagtagagagaaagtgacagtgaaagtaacgtgagagagaaagagtgtgtgtgtatatgtgagagagagaaagaaagagaaaggaatgcttgattgcttgttgttcactgggccagctctgaaatccaaaatcatgccttgataacattacaaaaccgtgatcctgggtttgagtgaatcctagagacattgttcttatggccgcctggtttccgcagcctgatcaccatatcgagcagacgtcaaggaatcagagtgaagtacggagccagggagggaggtgaggccccgtgtagtgcctgtcaccactgtggattcacctgcactcaggtgtccactcctgtctcccaggcccaaagcagcacatggtgcaatggaaaagtctcttatgtagggatcctccttgtgtcctggtgccagaattagatttccagtgtacttcaacgaaaacctctctcctttatagttgctgtcatctttcatgtataaacagaaaccgtctctagcacaatatatttctgaatattgtttctgtttcataagagcacaatgtacatggacctaggggagctgtggtcccaagtgtcattggaatttatattttaggaataggctttgcatgttaaaattcacaagttgggaaactggtatgaacagatctgatttcttacagagaggcatgaaggaataggcaggacttaacttggggtgggaggagatgaataagggagaatgggagagttggggtctgacagttaccacctgagccccaggaaaactgttttcattttcacggctgtctcactgggggcctgctttcctcaaaggaactgactgtatgttgagaggcaatgccttgtgttggcatggctttgccactttaaaagtgccccccagccaaggagaccaacaggaaccctgctcatctggtagggctctttccttcagtaaaaccagctgccagcctgagaagcctgtctttcccaaatgcaggcagatctgagaggggctccaggcacccggcaggtaaatcacaaagcaaacttgggtgtccttggcagcggggaggaagcaggagtgccccctcaggccagagggcagggccaacctcctcactgtgcttcaaggttgtagaaagagcacaattaatgcttaagcgatcacagacccctctcccctgcagtgggtgttagctccaaagagatgccattgctgatcacccagtcttcggagaagcctaaaatttctttgaattaaaaactgatcctttttcataaagacccagtcacttctcccagtttagtgataacaggtatgacacaagaagctgaagtcttttagattttatagagagtaattctgaaacctgccagaatgctggtagcctgtggtgtccatggcaatgggtgtccatggtaaaatatctatagcttctgctcactgggcaaatataaaagacaacatattatttaacataatatgttgtcttttatatttttatttaaatctggattacgaaaatatagtacccatgagcatttcatgttagaaaccccatttaaagcactataaggctgaataggcacaagcgattaaaagtagatgccaggccacataaaaataaatgttttaatttacttagagctgtattcaagttgtttgataccagacagaaagctgacagtctgttctttgtaaactgcctttccctgtttttctgttttgttttgtttctcaagtttcattttttactaagccccttctgacacctaggcagataaagataagagtagtgcgcagtacaaatgtcagctctgaagaggaggaagtaaatcttcaatgctagggcagatcttcactatccgtgatccagtcttaatttgagcatgagagcaaaatttagtcatctacacaagaagcaaaagcaaggaatagttgttgggtttttgttttttggttgttgtttttttttttttttaggcaagaagtgttgccggtagggtatgtgtgctttctttgccttcctatttcctttcaaagaaatctcttgtaaattacaaaactgtgaattgggttgccaaaaactgttgcccttcgttagatgcttcaaacagtgtaaatcctatactgcaccctgtccacctctgctccctcctccctcccctgagagtgaggacctcatccgaccatgtaattaccattcgcttgctattaaagagcctttcaaactc

SEQ ID NO: 244724 - DNA, 5605 bp, Artificial Sequence
  derived and/or modified sequence
aggattttgaaggcaaaggctctggtttctccttccccatgtctgaaaaccgcccttagcctgcacaaggtgaacagtggaaatcattggtgaggaatggccacccactgccctctttactgtgtaggagcagatctgatgatgaacagagcaggtgagcacgtgtggagtgagagcgaggactgcctgcctttcttgcagctagcacaggattacatctcctcctgcggcaagaagacgctccacgaagtcctggaaaaagtcttcaagtctttcagacctttactggggcttccggatgcagatgacgatgcgtttgaagagtacagtgctgacgtggaagaagaggagccagaggcggaccacccccagatgggggtcagccagcagtaaatctgggggctcccctgagaaggagagtgagccccacagtaacctaggtggggtcactgcccctcctgggttagcattttgcattagcacttcgaaataggacatctggctcccagcatccaaattaaaatgaaatacctttttaacgaccacaaaatatctgtgatgagctttgctcagaagtgacctgaatttcactcccgcttcagtggggtttctatggagttgtcttggtagcctttgccattttgaatttagagtccattttgtggctgactattctcttaagtttatgttggagaattaacattcgctgactcgaatgtagagaactctgaatgtattaaggataggttttgagtcctcacaggtgaccttactgagggaaagcatggcagagaagaaatgcagtctgcactttttatgtactttttaagtgtccgtaagtgaaaggttttgcttataaagcatgaattttaatatctagtcattaaactgcacaagtgcaaatacaagggcaggaaaggataatcacttagctttggactaagagggtaagagaggcccagaagcctttaagtgttttgccattactgagttacctgggtatgtagcgactggttcgtggttaggtgtaaatgttacttgcttgttcgactgtttcaaaacatgctaattccaaagccacttttgaagtctatagtggaaaatatagatggggtgaaagatataatgtattgatttttaaagctgtttataagccgtcccacgtataaaatgaaacattttaccttctctctttctaatgagatggccgcttgttaaatcatgaaaacatccagaattcaagtgccgcttaaactttgaagccatagataaatttgttagaaaagtaaaccaggattaaaagtttttaaaaatatggtagaatccttctttactttttaagtcttttatttaaaaaaaaaaagtcaaaaaaaggattccattgtgtaatttatttaaaaatttaatcacatgtttcgagggacttaattgtggtgtatttgtaaagggacacgaaggtaggaatcttttaatcgtgggttagcttggttaacagggaacgttttaataatcaagatactcagacaactcacagaaacaacttctgtaataactggaaatactgctgttatcgtttagccaacaattacttactggggacatcctttgtaatgctaacatggaattattcctggacccttctgcatccctggttttagttaacctaggatgcggaatgcctcctttacaacactagattaaacctagcatctggggtgggtacgtttaaacagtcacacatgtgcctgttaggttgtgaaagttttgaattaaaaacaagcagtagcagcagaggccacagaacttatgggagtcttgtatatcttccaggcatgtcggtgtaaacctgattgtctcgacattttctgtttaattgattggtgctgtgaggagttcggctgctcgtggtaaaacagcgtactccagttttaagtcatcgggtaaaataataggacagtgatttccatctgtgcttcagtacccactttgtgttcttttcttgaaaagtcatactaaaggttaatttcaagtaaaatgaatttccttccaagtagcctattagtaaaacacaacttagtgtttcatccattggggtgagcatatactgccctttgcagccctgcctgtgttctgattggctccattcatgagcaaaggtgattgtgagctgtatattacacaggtgtcgcccaggtttcgtaacctccactttaatgcagtaagccgcaagaatgacttctgcaagtgaaatgaggaagcttcactagcttgctccattggaaggtaaactgaaattttatacgttgaagcttaaaatctaaatttatgtatgtttggaaatggaatggacattaacataaaatgtattttatcaaaaaagtgtttagactttgaccaaatacatgttggtattatcatgttaatgttctctgtttataaaaattgagtggagatagatagactcggccattctgtgggctgatgagaattctgggctttgttttgcaccaggggtaggaaacagagaacatgtctgtatgttacttaatctccatagcaaaatcccaaacagcattagcagatcgaattgtttcttctaagacttcctttttctgaatgtgtgcacatcccttctcgtgctcacacacttgcccacacactcacttcttcctgcgctgtggctgctctaagcagggctgtgcatggtgcaaagctgcagtcagtgagcctggcagcctgtggtttctgttatggaaatggttccatggtgaaacacatccctgacccttcacagacttacacatttactcaccaggaggtggcagcggtgtgggaggaggagtgttgaccttggacgcaggagagacacctgggttctagttcaagtcggccaaggactgtgtgaccttgacaagtctaactggtctgtgaacaaggggcatttgcccttccagctgtaaacactgcccttctgtgcctgccttatgtgtgtgtgtgagtaaggagcaacagtcaaggaaacttttagggattcgagaagaaaatacatgtgggatcttgccaaggtgctgcctttaggatgctgacccctgcactaccttagaacatgttgatctgtgagtgcccaagcccctgagggctcgatctcatggggcagatgaaattctcttccttagaggaaagggaaaggtgaggccccagaggacttatctcagctgtacatgctctgcctgtggagacatggcttttctttgtgctgtggcagactggggctttggaagtggtgtatgtttaacttacctgagagtgagagatgtgtaggaagaatagctggaagaaagtgaaagatgagtgccagtacttttggcctgttatccagtagagagaaagtgacagtgaaagtaacgtgagagagaaagagtgtgtgtgtatatgtgagagagagaaagaaagagaaaggaatgcttgattgcttgttgttcactgggccagctctgaaatccaaaatcatgccttgataacattacaaaaccgtgatcctgggtttgagtgaatcctagagacattgttcttatggccgcctggtttccgcagcctgatcaccatatcgagcagacgtcaaggaatcagagtgaagtacggagccagggagggaggtgaggccccgtgtagtgcctgtcaccactgtggattcacctgcactcaggtgtccactcctgtctcccaggcccaaagcagcacatggtgcaatggaaaagtctcttatgtagggatcctccttgtgtcctggtgccagaattagatttccagtgtacttcaacgaaaacctctctcctttatagttgctgtcatctttcatgtataaacagaaaccgtctctagcacaatatatttctgaatattgtttctgtttcataagagcacaatgtacatggacctaggggagctgtggtcccaagtgtcattggaatttatattttaggaataggctttgcatgttaaaattcacaagttgggaaactggtatgaacagatctgatttcttacagagaggcatgaaggaataggcaggacttaacttggggtgggaggagatgaataagggagaatgggagagttggggtctgacagttaccacctgagccccaggaaaactgttttcattttcacggctgtctcactgggggcctgctttcctcaaaggaactgactgtatgttgagaggcaatgccttgtgttggcatggctttgccactttaaaagtgccccccagccaaggagaccaacaggaaccctgctcatctggtagggctctttccttcagtaaaaccagctgccagcctgagaagcctgtctttcccaaatgcaggcagatctgagaggggctccaggcacccggcaggtaaatcacaaagcaaacttgggtgtccttggcagcggggaggaagcaggagtgccccctcaggccagagggcagggccaacctcctcactgtgcttcaaggttgtagaaagagcacaattaatgcttaagcgatcacagacccctctcccctgcagtgggtgttagctccaaagagatgccattgctgatcacccagtcttcggagaagcctaaaatttctttgaattaaaaactgatcctttttcataaagacccagtcacttctcccagtttagtgataacaggtatgacacaagaagctgaagtcttttagattttatagagagtaattctgaaacctgccagaatgctggtagcctgtggtgtccatggcaatgggtgtccatggtaaaatatctatagcttctgctcactgggcaaatataaaagacaacatattatttaacataatatgttgtcttttatatttttatttaaatctggattacgaaaatatagtacccatgagcatttcatgttagaaaccccatttaaagcactataaggctgaataggcacaagcgattaaaagtagatgccaggccacataaaaataaatgttttaatttacttagagctgtattcaagttgtttgataccagacagaaagctgacagtctgttctttgtaaactgcctttccctgtttttctgttttgttttgtttctcaagtttcattttttactaagccccttctgacacctaggcagataaagataagagtagtgcgcagtacaaatgtcagctctgaagaggaggaagtaaatcttcaatgctagggcagatcttcactatccgtgatccagtcttaatttgagcatgagagcaaaatttagtcatctacacaagaagcaaaagcaaggaatagttgttgggtttttgttttttggttgttgtttttttttttttttaggcaagaagtgttgccggtagggtatgtgtgctttctttgccttcctatttcctttcaaagaaatctcttgtaaattacaaaactgtgaattgggttgccaaaaactgttgcccttcgttagatgcttcaaacagtgtaaatcctatactgcaccctgtccacctctgctccctcctccctcccctgagagtgaggacctcatccgaccatgtaattaccattcgcttgctattaaagagcctttcaaac

SEQ ID NO: 244725 - DNA, 1376 bp, Artificial Sequence
  derived and/or modified sequence
atggatttccagcagctggccgacgttgcggagaaatggtgctccaacacgcccttcgagctcatcgccaccgaggagaccgaacgcaggatggatttctacgccgaccccggcgtctccttctatgtgctgtgtccggacaacggctgcggcgacaattttcacgtgtggagtgagagcgaggactgcctgcctttcttgcagctagcacaggattacatctcctcctgcggcaagaagacgctccacgaagtcctggaaaaagtcttcaagtctttcagacctttactggggcttccggatgcagatgacgatgcgtttgaagagtacagtgctgacgtggaagaagaggagccagaggcggaccacccccagatgggggtcagccagcagtaaatctgggggctcccctgagaaggagagtgagccccacagtaacctaggcatgtcggtgtaaacctgattgtctcgacattttctgtttaattgattggtgctgtgaggagttcggctgctcgtggtaaaacagcgtactccagttttaagtcatcgggtaaaataataggacagtgatttccatctgtgcttcagtacccactttgtgttcttttcttgaaaagtcatactaaaggttaatttcaagtaaaatgaatttccttccaagtagcctattagtaaaacacaacttagtgtttcatccattggggtgagcatatactgccctttgcagccctgcctgtgttctgattggctccattcatgagcaaaggtgattgtgagctgtatattacacaggtgtcgcccaggtttcgtaacctccactttaatgcagtaagccgcaagaatgacttctgcaagtgaaatgaggaagcttcactagcttgctccattggaaggtaaactgaaattttatacgttgaagcttaaaatctaaatttatgtatgtttggaaatggaatggacattaacataaaatgtattttatcaaaaaagtgtttagactttgaccaaatacatgttggtattatcatgttaatgttctctgtttataaaaattgagtggagatagatagactcggccattctgtgggctgatgagaattctgggctttgttttgcaccaggggtaggaaacagagaacatgtctgtatgttacttaatctccatagcaaaatcccaaacagcattagcagatcgaattgtttcttctaagacttcctttttctgaatgtgtgcacatcccttctcgtgctcacacacttgcccacacactcacttcttcctgcgctgtggctgctctaagcagggctgtgcatggtgcaaagctgcagtcagtgagcctggcagcctgtggtttctgttatggaaatggttc

SEQ ID NO: 244726 - DNA, 1277 bp, Artificial Sequence
  derived and/or modified sequence
atggccacccactgccctctttactgtgtaggagcagatctgatgatgaacagagcaggtgagcacgtgtggagtgagagcgaggactgcctgcctttcttgcagctagcacaggattacatctcctcctgcggcaagaagacgctccacgaagtcctggaaaaagtcttcaagtctttcagacctttactggggcttccggatgcagatgacgatgcgtttgaagagtacagtgctgacgtggaagaagaggagccagaggcggaccacccccagatgggggtcagccagcagtaaatctgggggctcccctgagaaggagagtgagccccacagtaacctaggcatgtcggtgtaaacctgattgtctcgacattttctgtttaattgattggtgctgtgaggagttcggctgctcgtggtaaaacagcgtactccagttttaagtcatcgggtaaaataataggacagtgatttccatctgtgcttcagtacccactttgtgttcttttcttgaaaagtcatactaaaggttaatttcaagtaaaatgaatttccttccaagtagcctattagtaaaacacaacttagtgtttcatccattggggtgagcatatactgccctttgcagccctgcctgtgttctgattggctccattcatgagcaaaggtgattgtgagctgtatattacacaggtgtcgcccaggtttcgtaacctccactttaatgcagtaagccgcaagaatgacttctgcaagtgaaatgaggaagcttcactagcttgctccattggaaggtaaactgaaattttatacgttgaagcttaaaatctaaatttatgtatgtttggaaatggaatggacattaacataaaatgtattttatcaaaaaagtgtttagactttgaccaaatacatgttggtattatcatgttaatgttctctgtttataaaaattgagtggagatagatagactcggccattctgtgggctgatgagaattctgggctttgttttgcaccaggggtaggaaacagagaacatgtctgtatgttacttaatctccatagcaaaatcccaaacagcattagcagatcgaattgtttcttctaagacttcctttttctgaatgtgtgcacatcccttctcgtgctcacacacttgcccacacactcacttcttcctgcgctgtggctgctctaagcagggctgtgcatggtgcaaagctgcagtcagtgagcctggcagcctgtggtttctgttatggaaatggttc

SEQ ID NO: 244727 - DNA, 396 bp, Artificial Sequence
  derived and/or modified sequence
atggatttccagcagctggccgatgtagctgaaaagtggtgttccaatacccccttcgagctaatcgcaacggaggagacagagagaaggatggatttctacgcagatccaggtgtcagtttttatgtactgtgtccagataatggctgcggagataatttccatgtgtggtcggaatcggaagattgtctgccttttctccagctagcccaagactatatttcgtcctgtggtaagaagacactgcacgaggttctcgaaaaggtcttcaagtccttccggccgcttctaggtctcccagatgccgacgacgatgccttcgaagaatatagcgccgacgtcgaggaagaggagcccgaggcagaccatccccaaatgggagtcagtcagcagtag

SEQ ID NO: 244728 - DNA, 297 bp, Artificial Sequence
  derived and/or modified sequence
atggccacccactgtccactgtattgcgttggggccgacctgatgatgaacagagcaggggagcatgtctggagcgaatccgaggattgcctgccctttttacaattagcccaagactatattagctcgtgcggtaaaaagaccttacatgaagtgctcgaaaaagtttttaaatcattccgccccctgcttgggctgccggacgccgatgatgacgcattcgaggagtatagcgcagatgtggaagaggaggaaccggaagctgatcaccctcagatgggcgtgtcccaacagtag

SEQ ID NO: 244729 - DNA, 396 bp, Artificial Sequence
  derived and/or modified sequence
atggatttccagcagctggccgacgtagctgaaaagtggtgcagcaatactccattcgaactgattgcaactgaggaaacagaacggcgaatggacttctacgctgaccctggggtcagcttctacgtcctgtgcccagataatggttgcggagacaactttcatgtgtggtccgaatctgaggattgcctcccattcctgcaactggctcaggattacatatctagctgtgggaagaaaactctccatgaggtgttagagaaggtctttaagtctttccgcccccttctcggcctgccagatgccgacgacgacgcatttgaggagtatagcgctgacgtggaggaggaagagcccgaggcagatcaccctcagatgggcgtgtcccagcagtag

SEQ ID NO: 244730 - DNA, 297 bp, Artificial Sequence
  derived and/or modified sequence
atggcgacacactgcccgctatactgtgttggggcagacctaatgatgaaccgggccggagaacacgtctggtctgaaagtgaagattgtctcccattcctgcagcttgcccaggattatatctcatcatgcggcaaaaaaacgctgcatgaagttctcgaaaaagtgttcaaatcttttaggccactcctgggcttgccagacgctgacgacgacgctttcgaggagtatagcgcagatgttgaagaagaggaacccgaagccgatcaccctcagatgggtgtgagccaacagtag

SEQ ID NO: 244731 - DNA, 396 bp, Artificial Sequence
  derived and/or modified sequence
atggacttccagcagctggctgatgtggccgagaagtggtgcagcaacaccccatttgagctgattgccacagaggagacagaaagaaggatggacttctatgctgaccccggggtgtccttctacgtgctgtgcccagacaatggctgtggggacaacttccacgtgtggagcgagagcgaggactgcctgcccttcctgcagctggcccaggactacatcagcagctgtgggaagaagaccctgcacgaggtgctggagaaggtgttcaagagcttccggcccctgctgggcctgcctgatgctgatgatgatgcctttgaggagtacagcgcagatgtggaggaggaggagcctgaggccgaccacccccagatgggcgtgtcccagcagtag

SEQ ID NO: 244732 - DNA, 297 bp, Artificial Sequence
  derived and/or modified sequence
atggccacccactgccccctgtactgtgtgggcgctgacctgatgatgaacagagctggggagcacgtgtggagcgagagcgaggactgcctgcccttcctgcagctggcccaggactacatcagcagctgtgggaagaagaccctgcacgaggtgctggagaaggtgttcaagagcttccggcccctgctgggcctgcctgatgctgatgatgatgcctttgaggagtacagcgcagatgtggaggaggaggagcctgaggccgaccacccccagatgggcgtgtcccagcagtag

SEQ ID NO: 244733 - DNA, 396 bp, Artificial Sequence
  derived and/or modified sequence
atggacttccagcagctggccgacgtggccgagaagtggtgcagcaacactccctttgaactgattgccaccgaggagacagagagacgaatggacttctacgcggaccctggagtcagtttctatgttttgtgccccgacaatggatgcggggataatttccatgtctggagcgagagcgaagactgccttccatttttgcagctcgcgcaggactacatctcttcctgtggcaagaaaactctgcatgaagttctcgaaaaagtgttcaagagtttcagaccacttcttggcctgcccgacgcagacgatgatgccttcgaggagtacagtgccgatgtagaggaagaagagcctgaagctgaccatccacagatgggtgtttcgcagcagtag

SEQ ID NO: 244734 - DNA, 297 bp, Artificial Sequence
  derived and/or modified sequence
atggccacccactgccccctgtactgcgtgggcgccgacctgatgatgaatcgggcaggagaacatgtctggtctgagtctgaggattgccttccattccttcagctggcccaggattacatctcatcctgcggtaagaagaccctccatgaggtgctggagaaggtatttaaaagctttaggcctctgctcgggctcccagatgctgacgatgacgcctttgaagaatatagcgctgacgtggaggaggaggagcccgaagccgaccacccccaaatgggcgtgtcccagcagtag

SEQ ID NO: 244735 - DNA, 396 bp, Artificial Sequence
  derived and/or modified sequence
atggacttccagcagctggccgacgtggccgagaagtggtgcagcaatacacctttcgagcttattgcaacagaggagactgagcgtcgtatggatttctatgcagatcctggggtgtccttttacgtactttgccctgataacggatgtggggataacttccacgtgtggtcagagagcgaagactgcctgccattcttacagttggctcaagattacatctcatcctgcggtaaaaagaccctacatgaggtcttagagaaggtgtttaaatcttttagacctttgcttggcctgccagacgccgacgatgatgccttcgaggagtactccgcggacgtggaagaggaggagccggaggccgatcatccccaaatgggggtgtcccagcagtag

SEQ ID NO: 244736 - DNA, 297 bp, Artificial Sequence
  derived and/or modified sequence
atggccacccactgccccctgtactgcgtgggcgccgacctgatgatgaaccgggctggagaacacgtctggtctgaatccgaagactgcctgccgtttctccagttggctcaggattacattagtagctgcggtaagaagacactccacgaagtactcgagaaggtgttcaagagttttcggccgttgctgggtctgccagatgcggacgatgacgcctttgaggagtatagcgctgatgtcgaggaagaagaacctgaagcggatcacccccagatgggtgtgtcacagcagtag

SEQ ID NO: 244737 - DNA, 396 bp, Artificial Sequence
  derived and/or modified sequence
atggactttcagcaactggccgatgtcgcagagaagtggtgctccaacaccccattcgagctgatcgcaacagaggagactgagcgcaggatggacttttacgcagatccaggcgtatctttttacgtgctctgtcccgataacggctgtggcgacaacttccacgtgtggagcgagtcagaggactgtctgccgtttctgcagctggcacaggattacatctcttcctgcggaaagaagacactacacgaagtcttagagaaggtttttaaaagcttccggcctttgctgggattgcctgatgcggacgacgacgcttttgaggagtattccgcagacgtagaggaggaggagccagaggccgatcacccgcagatgggggtgagccagcagtag

SEQ ID NO: 244738 - DNA, 297 bp, Artificial Sequence
  derived and/or modified sequence
atggccacacattgccctctctactgtgtgggagctgacttaatgatgaatcgcgctggtgagcatgtttggtccgagtcagaagattgcctcccattcctacagctggcccaggactatatatcaagttgcggcaaaaagactttacatgaggtcctggaaaaggtttttaaaagttttaggcccttgctaggcttgccagatgctgatgatgatgccttcgaggagtatagcgcagacgtagaggaggaagagcccgaggccgaccacccccagatgggcgtgtcccaacagtag

SEQ ID NO: 244739 - DNA, 396 bp, Artificial Sequence
  derived and/or modified sequence
atggatttccagcaattggccgatgttgccgaaaagtggtgctccaacaccccgttcgaacttatcgccactgaggagacagaacgtcgaatggacttctatgccgatccaggagtcagtttttatgtcctgtgccccgacaatggctgtggggacaactttcacgtatggtctgagagtgaagactgtttaccattcttacaattggcccaagattacatatcaagctgcggaaagaagactttgcatgaagttttggagaaagttttcaaatctttcagacctcttctgggacttcctgatgccgacgacgacgcatttgaagagtactccgcagacgttgaggaagaagaaccggaagccgatcacccgcagatgggtgtgagtcagcagtag

SEQ ID NO: 244740 - DNA, 297 bp, Artificial Sequence
  derived and/or modified sequence
atggctacacactgcccactgtactgcgtgggggctgatctaatgatgaatagagccggtgaacatgtgtggtcagagagtgaagactgcttgccttttttacagctggctcaggactacattagttcttgcgggaagaagactttgcatgaagtgttagagaaagtctttaaatctttccgaccactgctaggactgccagatgctgacgacgacgcgttcgaagagtactccgcggacgtggaagaagaggagcctgaggccgatcacccccagatgggcgtaagtcagcagtag

SEQ ID NO: 244741 - protein, 667 aa, Artificial Sequence
  derived and/or modified sequence
MDWQDHRSTTELRKEKSRDAARSRRSQETEVLYQLAHTLPFARGVSAHLDKASIMRLTISYLRMHRLCAAGEWNQVGAGGEPLDACYLKALEGFVMVLTAEGDMAYLSENVSKHLGLSQLELIGHSIFDFIHPCDQEELQDALTPQQTLSRRKVEAPTERCFSLRMKSTLTSRGRTLNLKAATWKVLNCSGHMRAYKPPAQTSPAGSPDSEPPLQCLVLICEAIPHPGSLEPPLGRGAFLSRHSLDMKFTYCDDRIAEVAGYSPDDLIGCSAYEYIHALDSDAVSKSIHTLLSKGQAVTGQYRFLARSGGYLWTQTQATVVSGGRGPQSESIVCVHFLISQVEETGVVLSLEQTEQHSRRPIQRGAPSQKDTPNPGDSLDTPGPRILAFLHPPSLSEAALAADPRRFCSPDLRRLLGPILDGASVAATPSTPLATRHPQSPLSADLPDELPVGTENVHRLFTSGKDTEAVETDLDIAQDADALDLEMLAPYISMDDDFQLNASEQLPRAYHRPLGAVPRPRARSFHGLSPPALEPSLLPRWGSDPRLSCSSPSRGDPSASSPMAGARKRTLAQSSEDEDEGVELLGVRPPKRSPSPEHENFLLFPLSLSFLLTGGPAPGSLQDPSTPLLNLNEPLGLGPSLLSPYSDEDTTQPGGPFQPRAGSAQAD

SEQ ID NO: 244742 - DNA, 2004 bp, Artificial Sequence
  derived and/or modified sequence
atggattggcaggatcacaggtcgacgacggagttgcggaaagagaaaagtagagatgcagcgagaagcagacgatcacaggaaaccgaggttctataccagttggctcacaccctgcctttcgcccggggggtgtcagcccacttggacaaggcgagcattatgcgactcactatcagctacctgcggatgcaccgattatgcgctgcaggggagtggaatcaagtaggagcaggaggggaacccctggacgcttgctacctgaaggccctagaaggctttgtcatggtgctgactgctgaaggggacatggcttatctctctgagaacgtcagcaaacatctggggttgtcccagctagagctgatcggccacagcattttcgacttcattcatccttgcgatcaggaggagctgcaggacgccctcacccctcagcagacactgagcaggcggaaagttgaagcgccgacggagagatgcttctccttaaggatgaaaagtacgttgacgtcaaggggacgcacactgaatctcaaagcagcaacgtggaaggtgctgaactgctcagggcacatgcgggcctataagccccccgcccaaacctcccccgccggctcgcccgactctgagcctcctcttcagtgtttggtccttatctgcgaagcaattcctcacccaggcagtctggagcctcctctcgggaggggtgccttcctgtcccgacactccctggatatgaaatttacctattgcgacgatcgcattgctgaggtggccggctatagccccgacgacctcattggttgtagcgcttacgagtatattcacgccctcgactccgacgcagtgagtaagagcattcatactttactctccaagggccaggccgttactggccagtatcgctttctggctcggtcggggggctatctctggacccagacgcaggctaccgtagttagcggcggcagagggcctcagtccgaatcaatagtttgcgtacatttcctcatttctcaggtggaggaaacgggggtggtgctgtctctggaacaaacggagcagcactccaggcggcctatccagagaggtgcgccatcccaaaaggacacccccaaccctggagactctttggacacaccaggcccccgtatcctggcttttctccacccccccagcctgtcagaagctgccctcgccgcagacccccgcagattttgctctccagacctcaggcggctcctcggccctatacttgacggcgctagtgtagcggccactccctctacacccctggcaactagacatcctcaaagccccctcagcgccgacctgccggacgagcttccagtaggcaccgaaaatgtgcacagactcttcacaagtggcaaagatacagaggccgttgaaaccgacctggatatcgcccaggatgcggatgccttggacttggaaatgctggctccctatatcagcatggatgacgatttccagcttaatgcctcagagcagttgcccagggcctaccatagacctctgggtgcggtcccgaggccacgtgcacgttcgttccatggtctatctccgcccgccttagaaccaagtttactgccccgctgggggtcagacccgagactctcttgttcatcacccagccggggggatcctagtgcgtctagccccatggccggggcccgcaagagaactttagctcagagttctgaggatgaagatgaaggtgtcgagttactgggcgtaagacccccaaaacgcagtccctcgcctgagcacgagaacttcctcctctttcccctttcactaagttttctcctcaccggaggtcctgcaccggggagcctccaggatccatccacgccgctgctcaacctaaatgaacctctgggcctagggccctcactcttaagtccatactccgatgaggatactactcaaccagggggcccattccagcccagggctggttcagcgcaggcagactag

SEQ ID NO: 244743 - DNA, 2551 bp, Artificial Sequence
  derived and/or modified sequence
agataagtcagggaggggacagagcggccctaggcgcgccacagagaggagcgaggcgccagaggcaccatggactggcaagaccacaggtcgaccacggagctgcgcaaggaaaagtcccgggatgcggcccgcagccggcgcagccaggagaccgaggtgctgtaccagctggctcacacgctgcccttcgcccgcggcgtcagcgcccacctggacaaggcctctatcatgcgcctcaccatcagctacctgcgcatgcaccgcctctgcgccgcaggggagtggaaccaggtgggagcagggggagaaccactggatgcctgctacctgaaggccctggagggcttcgtcatggtgctcaccgccgagggagacatggcttacctgtcggagaatgtcagcaaacacctgggcctcagtcagctggagctcattggacacagcatctttgatttcatccacccctgtgaccaagaggagcttcaggacgccctgaccccccagcagaccctgtccaggaggaaggtggaggcccccacggagcggtgcttctccttgcgcatgaagagtacactcaccagccgcgggcgcaccctcaacctcaaggcggccacctggaaggtgctgaactgctctggacatatgagggcctacaagccacctgcgcagacttctccagctgggagccctgactcagagcccccgctgcagtgcctggtgctcatctgcgaagccatcccccacccaggcagcctggagcccccactgggccgaggggccttcctcagccgccacagcctggacatgaagttcacctactgtgacgacaggattgcagaagtggctggctatagtcccgatgacctgatcggctgttccgcctacgagtacatccacgcgctggactccgatgcggtcagcaagagcatccacaccttgctgagcaagggccaggcagtaacagggcagtatcgcttcctggcccggagtggtggctacctgtggacccagacccaggccacagtggtgtcagggggacggggcccccagtcggagagtatcgtctgtgtccattttttaatcagccaggtggaagagaccggagtggtgctgtccctggagcaaacggagcaacactctcgcagacccattcagcggggcgccccctctcagaaggacacccctaaccctggggacagccttgacacccctggcccccggatccttgccttcctgcacccgccttccctgagcgaggctgccctggccgctgacccccgccgtttctgcagccctgacctccgtcgcctcctgggacccatcctggatggggcttcagtagcagccactcccagcaccccgctggccacacggcacccccaaagtcctctttcggctgatctcccagatgaactacctgtgggcaccgagaatgtgcacagactcttcacctccgggaaagacactgaggcagtggagacagatttagatatagctcaggatgctgatgctctggatttggagatgctggccccctacatctccatggatgatgacttccagctcaacgccagcgagcagctacccagggcctaccacagacctctgggggctgtcccccggccccgtgctcggagcttccatggcctgtcacctccagcccttgagccctccctgctaccccgctgggggagtgacccccggctgagctgctccagcccttccagaggggacccctcagcatcctctcccatggctggggctcggaagaggaccctggcccagagctcagaggacgaggacgagggagtggagctgctgggagtgagacctcccaaaaggtcccccagcccagaacacgaaaactttctgctctttcctctcagcctgagtttccttctgacaggaggaccagccccagggagcctgcaggaccccagcaccccactcctgaacctgaatgagcccctgggcctgggcccctcactgctctctccgtactcagacgaggacactacccagcccgggggccccttccagccaagggcaggctcagcccaggctgactgagccggctcctctccccatctgccttctcctcccccagaaaggacctcaaccacactccacgccggcagccaacgcacaggatgggggcgccaggagaggggcccctctctcctctatgtaccccctgcccacctcgggcctacctcagccctcacccctctgcctgctcccaatctgggggctctctggggtggtctcagctcagtgacctctgggaggtggtccctggccccctcctccttctctcaggatttctcttggggttctcaatacttggttacctcattatccctttctctgcctctcttggctttattttggggaatcaggggtgaggagggttgggggggtcatatctgtgtttccaggttctggggagaacaatgatccacgggtcaacgtgatcacatttccttctatccttcttgtattattatttttatttttgtcaatttcatgatatggtttttaatcatga

SEQ ID NO: 244744 - DNA, 2004 bp, Artificial Sequence
  derived and/or modified sequence
atggactggcaggaccacaggagcaccacagagctgaggaaggagaagagcagagatgctgcccggagccgccgcagccaggagacagaggtgctgtaccagctggcccacaccctgccctttgcccggggcgtgtctgcccacctggacaaggccagcatcatgaggctgaccatctcctacctgaggatgcaccggctgtgtgccgccggggagtggaaccaggtgggcgctggaggagagcccctggatgcctgctacctgaaggccctggagggctttgtgatggtgctgacagctgagggggacatggcctacctgtctgaaaatgtgtccaagcacctgggcctgagccagctggagctgattggccacagcatctttgacttcatccacccctgtgaccaggaggagctgcaggatgccctgaccccccagcagaccctgagcaggaggaaggtggaggcccccacagagcgctgcttcagcctgaggatgaagagcaccctgaccagccggggccgcaccctgaacctgaaggccgccacctggaaggtgctgaactgcagcggccacatgagggcctacaagcccccagcccagaccagccctgctggcagcccagacagcgagccccccctgcagtgcctggtgctgatctgtgaggccatcccccaccctggcagcctggagccccccctgggccgcggggccttcctgagccgccacagcctggacatgaagttcacctactgtgatgacagaattgctgaggtggccggctacagcccagatgacctgattggctgcagcgcctatgagtacatccacgccctggacagtgatgctgtgtccaagagcatccacaccctgctgagcaagggccaggccgtgacaggccagtaccgcttcctggcccggagcggcggctacctgtggacccagacccaggccaccgtggtgtctgggggccggggcccccagagcgagagcatcgtgtgtgtgcacttcctgatcagccaggtggaggagactggagtggtgctgagcctggagcagacagagcagcacagcagaagacccatccagagaggagcccccagccagaaggacacccccaaccctggggacagcctggacaccccaggcccccgcatcctggccttcctgcacccccccagcctgtctgaggccgccctggccgctgacccccggcgcttctgcagcccagacctgcggcggctgctgggccccatcctggatggagcctctgtggccgccacccccagcacccccctggccaccaggcacccccagagccccctgtctgctgacctgcctgatgagctgcctgtgggcacagaaaatgtgcacaggctcttcaccagcggcaaggacacagaagctgtggagacagacctggacatcgcccaggatgctgatgccctggacctggagatgctggccccctacatctccatggatgatgacttccagctgaatgccagcgagcagctgccccgggcctaccaccggcccctgggcgctgtgccccggccccgggcccggagcttccacggcctgagccccccagccctggagcccagcctgctgccccgctggggcagtgacccccggctgagctgcagcagccccagcagaggagaccccagcgccagcagccccatggccggggccaggaagaggaccctggcccagagcagtgaagatgaagatgaaggagtggagctgctgggcgtgcggccccccaagaggagccccagccctgagcacgagaacttcctgctcttccccctgagcctgtccttcctgctgactggaggccctgcccctggcagcctgcaggaccccagcacccccctgctgaacctgaatgagcccctgggcctgggccccagcctgctgagcccctacagtgatgaggacaccacccagcccggcggccccttccagcccagggctggcagcgcccaggccgactag

SEQ ID NO: 244745 - DNA, 2004 bp, Artificial Sequence
  derived and/or modified sequence
atggactggcaggaccaccggagcaccaccgagctgcggaaggagaagtctagggacgcggccaggtccaggcgatcacaagaaacggaagtgctgtaccagttggcacatacactgcccttcgcccgaggtgtcagcgcccatcttgacaaggcatcaattatgcgcctgacgatttcatatctgagaatgcacagactctgtgcagctggcgagtggaatcaagtgggggcaggtggagagcccctcgacgcgtgctacctaaaagctctcgagggattcgttatggtgttaactgccgagggcgacatggcctatttaagcgagaacgttagtaagcatttaggcctctcacaattagagctgattggccatagtattttcgatttcattcatccctgtgaccaagaggaattgcaggatgcactgaccccacagcagacactgtcacgccggaaggtggaggccccaactgaaagatgtttcagcttgcgcatgaagtcaaccctcacctcaaggggaagaaccctgaacctgaaagccgctacgtggaaggtgttgaactgtagcggccatatgagggcgtataaaccaccggcccaaacaagcccagcaggctctcccgatagtgagccacccctgcagtgtcttgtgctgatttgtgaagccatcccgcaccctggctcgctcgagcctccactaggaaggggcgcctttctgagccgccactcactcgatatgaaattcacatactgcgatgacaggatcgcagaagtggcagggtacagccctgatgacctcatcgggtgtagcgcctacgaatatattcatgctctcgacagcgacgccgtctccaagtctatccatactctgctttccaagggccaggccgtgacagggcagtacaggtttctagctcgctcagggggctacctgtggacccagactcaggctacggtggtctccggcggccggggaccccaaagtgaatcaattgtatgcgtgcacttcttgatctcccaagttgaggaaaccggcgtggtgctatcactggaacagactgagcagcacagcaggagacctatccagaggggcgccccatcccaaaaggatacccccaacccgggagattcactcgatacccccggtcctcgcatcctggcgttccttcacccaccatccctgagcgaagcagctctggctgcagatccccggaggttttgttcacccgatctgcggcgccttttgggtccaatattagatggtgcatccgtggccgctacaccttcgaccccattggccacgaggcaccctcagagccctttgagtgcagatttgccggacgagttgccagtcggaaccgagaatgtccacaggctgtttacctctggaaaagacacggaagctgttgagaccgatctcgatatagcgcaggatgccgatgcacttgatctggagatgttagcaccctacatctctatggacgacgattttcaattaaatgcaagcgagcagctgcctagagcttaccatcgaccgctgggggccgtacccagacccagagcgaggtccttccatggacttagcccccccgccctcgagccctctcttctcccccgttggggatcagatccacggctgtcatgctccagcccctcccgcggtgacccctcagctagctcacctatggccggggcgcggaaaagaaccctcgcacagagctctgaagatgaggatgaaggagtggagctcctgggtgttcgcccacccaagcgtagtccatcaccagagcatgagaatttccttctgtttcctctgagtctcagctttcttctgactggggggcccgctccaggttctctccaggacccatctactccacttttgaaccttaacgaaccactcgggctgggaccgagccttctgtccccatatagcgacgaggacactacccagccggggggtccgttccagcctcgagcgggttccgcacaggccgactag

SEQ ID NO: 244746 - DNA, 2004 bp, Artificial Sequence
  derived and/or modified sequence
atggattggcaggaccaccggagtaccactgagttgaggaaggaaaagtcacgcgacgcagccaggtcccgcagatcccaagaaacagaggtgctctatcagctcgcacatactttgccttttgcccgtggcgtgtccgcacatctagataaagcttccatcatgagactgactatctcatacctgagaatgcacaggttgtgcgcagcaggtgagtggaatcaggtgggagccggtggcgagccactggacgcatgttacctgaaagcattagagggcttcgtcatggtgctgaccgctgagggggatatggcgtatttgtcagaaaacgtgtctaaacaccttggtctgtcccagcttgagttgatcggacattccatattcgactttatccatccttgcgaccaggaggagctgcaggacgcgcttaccccccagcagacgttaagcaggagaaaggttgaggcccctacagaaaggtgctttagtctgagaatgaagagcaccctgacgagtcgcggacggactctgaacctgaaggcagccacttggaaagtgctaaattgcagcggacacatgagagcatataaacctccggcacagacgagcccagccggatccccagactccgaaccccctctgcaatgcctggtgttgatctgcgaggcaattcctcaccccggatctctggaacctcctttggggagaggcgcttttctgagcaggcacagtctcgatatgaaatttacgtattgtgatgaccgtatcgctgaagtggctggatacagccccgatgatctaattggttgttccgcctatgagtatatccacgcacttgattcagatgcagtctctaagtccatccatacactgctctcaaaagggcaggctgtcacagggcagtaccgctttttagctaggtcggggggatatctctggacgcaaacacaggcaaccgtggttagtggcggtagaggccctcagtcagagagtatagtatgcgtgcattttttaatatcccaagtcgaggagacaggcgtggtgctgtcgctggaacagaccgagcaacacagcagacggcctatccagcgtggcgcaccttcccaaaaggacacccccaatccgggagactccctggacacccctggcccaaggatactggcctttctgcatcccccatctctgtcagaggccgcacttgctgctgatcccaggcggttctgtagcccagacctgcgccgactcttgggacccatcctagacggtgctagcgtggctgcgactccatccactccattggctacccgccatcctcagtcgcccctgagcgcagatctgcctgacgaactccccgtgggaacagaaaacgtgcaccgcctttttacttcaggaaaagacaccgaagccgtggaaactgacctggacattgcccaagatgcagatgccctggacttggagatgctggcaccgtatatatcaatggacgacgacttccagctcaacgccagtgaacagttaccacgggcatatcataggccactcggtgctgtacccaggcctagggccaggagctttcatggcctcagccctcccgcactcgaaccctcccttttgcccagatggggatcagatccacggttgagctgcagctcgccttccaggggagatcctagcgcctcaagccctatggcgggagcccgtaaacggacccttgcccagagcagtgaagatgaagacgaaggtgtcgaattgttgggtgtgagacctccaaagcgctctccctcccccgagcatgagaacttcctgctcttccccctgagcctgtcatttctgctgactggagggcctgcgcctggatcgctgcaagacccaagtacacctttgctcaacctaaatgaaccactgggactgggaccctctctcctgagtccatatagcgatgaagataccacccagcccggaggcccattccagccgcgagccggtagcgcccaggccgattag

SEQ ID NO: 244747 - DNA, 2004 bp, Artificial Sequence
  derived and/or modified sequence
atggactggcaggaccacagaagcaccaccgagctgagaaaggagaagagcagagacgccgccagaagcagaagaagccaggagaccgaggtgctgtaccagctggcccacaccctgcccttcgccagaggcgtgagcgcccacctggacaaggccagcatcatgagactgaccatcagctacctgagaatgcacagactgtgcgccgccggcgagtggaaccaggtgggcgccggcggcgagcccctggacgcctgctacctgaaggccctggagggcttcgtgatggtgctgaccgccgagggcgacatggcctacctgagcgagaacgtgagcaagcacctgggcctgagccagctggagctgatcggccacagcatcttcgacttcatccacccctgcgaccaggaggagctgcaggacgccctgaccccccagcagaccctgagcagaagaaaggtggaggcccccaccgagagatgcttcagcctgagaatgaagagcaccctgaccagcagaggcagaaccctgaacctgaaggccgccacctggaaggtgctgaactgcagcggccacatgagagcctacaagccccccgcccagaccagccccgccggcagccccgacagcgagccccccctgcagtgcctggtgctgatctgcgaggccatcccccaccccggcagcctggagccccccctgggcagaggcgccttcctgagcagacacagcctggacatgaagttcacctactgcgacgacagaatcgccgaggtggccggctacagccccgacgacctgatcggctgcagcgcctacgagtacatccacgccctggacagcgacgccgtgagcaagagcatccacaccctgctgagcaagggccaggccgtgaccggccagtacagattcctggccagaagcggcggctacctgtggacccagacccaggccaccgtggtgagcggcggcagaggcccccagagcgagagcatcgtgtgcgtgcacttcctgatcagccaggtggaggagaccggcgtggtgctgagcctggagcagaccgagcagcacagcagaagacccatccagagaggcgcccccagccagaaggacacccccaaccccggcgacagcctggacacccccggccccagaatcctggccttcctgcacccccccagcctgagcgaggccgccctggccgccgaccccagaagattctgcagccccgacctgagaagactgctgggccccatcctggacggcgccagcgtggccgccacccccagcacccccctggccaccagacacccccagagccccctgagcgccgacctgcccgacgagctgcccgtgggcaccgagaacgtgcacagactgttcaccagcggcaaggacaccgaggccgtggagaccgacctggacatcgcccaggacgccgacgccctggacctggagatgctggccccctacatcagcatggacgacgacttccagctgaacgccagcgagcagctgcccagagcctaccacagacccctgggcgccgtgcccagacccagagccagaagcttccacggcctgagcccccccgccctggagcccagcctgctgcccagatggggcagcgaccccagactgagctgcagcagccccagcagaggcgaccccagcgccagcagccccatggccggcgccagaaagagaaccctggcccagagcagcgaggacgaggacgagggcgtggagctgctgggcgtgagaccccccaagagaagccccagccccgagcacgagaacttcctgctgttccccctgagcctgagcttcctgctgaccggcggccccgcccccggcagcctgcaggaccccagcacccccctgctgaacctgaacgagcccctgggcctgggccccagcctgctgagcccctacagcgacgaggacaccacccagcccggcggccccttccagcccagagccggcagcgcccaggccgactag

SEQ ID NO: 244748 - protein, 632 aa, Artificial Sequence
  derived and/or modified sequence
MALGLQRARSTTELRKEKSRDAARSRRSQETEVLYQLAHTLPFARGVSAHLDKASIMRLTISYLRMHRLCAAGEWNQVGAGGEPLDACYLKALEGFVMVLTAEGDMAYLSENVSKHLGLSQLELIGHSIFDFIHPCDQEELQDALTPQQTLSRRKVEAPTERCFSLRMKSTLTSRGRTLNLKAATWKVLNCSGHMRAYKPPAQTSPAGSPDSEPPLQCLVLICEAIPHPGSLEPPLGRGAFLSRHSLDMKFTYCDDRIAEVAGYSPDDLIGCSAYEYIHALDSDAVSKSIHTLLSKGQAVTGQYRFLARSGGYLWTQTQATVVSGGRGPQSESIVCVHFLISQVEETGVVLSLEQTEQHSRRPIQRGAPSQKDTPNPGDSLDTPGPRILAFLHPPSLSEAALAADPRRFCSPDLRRLLGPILDGASVAATPSTPLATRHPQSPLSADLPDELPVGTENVHRLFTSGKDTEAVETDLDIAQDADALDLEMLAPYISMDDDFQLNASEQLPRAYHRPLGAVPRPRARSFHGLSPPALEPSLLPRWGSDPRLSCSSPSRGDPSASSPMAGARKRTLAQSSEDEDEGVELLGVRPPKRSPSPEHENFLLFPLSLVCWGINGILWPSLPSWLKPTVL

SEQ ID NO: 244749 - protein, 576 aa, Artificial Sequence
  derived and/or modified sequence
MRLTISYLRMHRLCAAGEWNQVGAGGEPLDACYLKALEGFVMVLTAEGDMAYLSENVSKHLGLSQLELIGHSIFDFIHPCDQEELQDALTPQQTLSRRKVEAPTERCFSLRMKSTLTSRGRTLNLKAATWKVLNCSGHMRAYKPPAQTSPAGSPDSEPPLQCLVLICEAIPHPGSLEPPLGRGAFLSRHSLDMKFTYCDDRIAEVAGYSPDDLIGCSAYEYIHALDSDAVSKSIHTLLSKGQAVTGQYRFLARSGGYLWTQTQATVVSGGRGPQSESIVCVHFLISQVEETGVVLSLEQTEQHSRRPIQRGAPSQKDTPNPGDSLDTPGPRILAFLHPPSLSEAALAADPRRFCSPDLRRLLGPILDGASVAATPSTPLATRHPQSPLSADLPDELPVGTENVHRLFTSGKDTEAVETDLDIAQDADALDLEMLAPYISMDDDFQLNASEQLPRAYHRPLGAVPRPRARSFHGLSPPALEPSLLPRWGSDPRLSCSSPSRGDPSASSPMAGARKRTLAQSSEDEDEGVELLGVRPPKRSPSPEHENFLLFPLSLVCWGINGILWPSLPSWLKPTVL

SEQ ID NO: 244750 - protein, 613 aa, Artificial Sequence
  derived and/or modified sequence
MRLTISYLRMHRLCAAGEWNQVGAGGEPLDACYLKALEGFVMVLTAEGDMAYLSENVSKHLGLSQLELIGHSIFDFIHPCDQEELQDALTPQQTLSRRKVEAPTERCFSLRMKSTLTSRGRTLNLKAATWKVLNCSGHMRAYKPPAQTSPAGSPDSEPPLQCLVLICEAIPHPGSLEPPLGRGAFLSRHSLDMKFTYCDDRIAEVAGYSPDDLIGCSAYEYIHALDSDAVSKSIHTLLSKGQAVTGQYRFLARSGGYLWTQTQATVVSGGRGPQSESIVCVHFLISQVEETGVVLSLEQTEQHSRRPIQRGAPSQKDTPNPGDSLDTPGPRILAFLHPPSLSEAALAADPRRFCSPDLRRLLGPILDGASVAATPSTPLATRHPQSPLSADLPDELPVGTENVHRLFTSGKDTEAVETDLDIAQDADALDLEMLAPYISMDDDFQLNASEQLPRAYHRPLGAVPRPRARSFHGLSPPALEPSLLPRWGSDPRLSCSSPSRGDPSASSPMAGARKRTLAQSSEDEDEGVELLGVRPPKRSPSPEHENFLLFPLSLSFLLTGGPAPGSLQDPSTPLLNLNEPLGLGPSLLSPYSDEDTTQPGGPFQPRAGSAQAD

SEQ ID NO: 244751 - protein, 669 aa, Artificial Sequence
  derived and/or modified sequence
MALGLQRARSTTELRKEKSRDAARSRRSQETEVLYQLAHTLPFARGVSAHLDKASIMRLTISYLRMHRLCAAGEWNQVGAGGEPLDACYLKALEGFVMVLTAEGDMAYLSENVSKHLGLSQLELIGHSIFDFIHPCDQEELQDALTPQQTLSRRKVEAPTERCFSLRMKSTLTSRGRTLNLKAATWKVLNCSGHMRAYKPPAQTSPAGSPDSEPPLQCLVLICEAIPHPGSLEPPLGRGAFLSRHSLDMKFTYCDDRIAEVAGYSPDDLIGCSAYEYIHALDSDAVSKSIHTLLSKGQAVTGQYRFLARSGGYLWTQTQATVVSGGRGPQSESIVCVHFLISQVEETGVVLSLEQTEQHSRRPIQRGAPSQKDTPNPGDSLDTPGPRILAFLHPPSLSEAALAADPRRFCSPDLRRLLGPILDGASVAATPSTPLATRHPQSPLSADLPDELPVGTENVHRLFTSGKDTEAVETDLDIAQDADALDLEMLAPYISMDDDFQLNASEQLPRAYHRPLGAVPRPRARSFHGLSPPALEPSLLPRWGSDPRLSCSSPSRGDPSASSPMAGARKRTLAQSSEDEDEGVELLGVRPPKRSPSPEHENFLLFPLSLSFLLTGGPAPGSLQDPSTPLLNLNEPLGLGPSLLSPYSDEDTTQPGGPFQPRAGSAQAD

SEQ ID NO: 244752 - protein, 363 aa, Artificial Sequence
  derived and/or modified sequence
MALGLQRARSTTELRKEKSRDAARSRRSQETEVLYQLAHTLPFARGVSAHLDKASIMRLTISYLRMHRLCAAGEWNQVGAGGEPLDACYLKALEGFVMVLTAEGDMAYLSENVSKHLGLSQLELIGHSIFDFIHPCDQEELQDALTPQQTLSRRKVEAPTERCFSLRMKSTLTSRGRTLNLKAATWKVLNCSGHMRAYKPPAQTSPAGSPDSEPPLQCLVLICEAIPHPGSLEPPLGRGAFLSRHSLDMKFTYCDDRIAEVAGYSPDDLIGCSAYEYIHALDSDAVSKSIHTCMYPISPGAKPAATWPPADTRTPQLPIPQDALPPHLNTSSLLPKPQGTVSFLAPSYPVPRYFSPHLPPWWP

SEQ ID NO: 244753 - DNA, 1899 bp, Artificial Sequence
  derived and/or modified sequence
atggccctcggcttacaacgggccagatccaccaccgaactacgcaaggagaaatcccgtgacgctgctcgctcacgtcgctctcaggagacagaggtactttatcaactggcgcacacactgcctttcgcccgcggcgtgtctgcacacctggacaaggcctcgattatgagattaactatctcgtaccttcgcatgcatcgcttgtgcgccgccggcgaatggaaccaagtaggggccggcggggagcctttggacgcctgctacctgaaagcactcgagggcttcgtgatggttctaacagccgagggggacatggcttatctttctgaaaacgtgagtaagcacctcggattgagtcagcttgagctgatcggtcactcaatctttgattttattcacccatgtgaccaggaggagctgcaggacgctcttacccctcagcagacactgtcccgtagaaaggtcgaggccccaaccgagcggtgcttttcactgagaatgaaatccaccctgacttctcggggacgcaccctcaacctaaaagcagccacgtggaaggtcctgaactgctcaggacatatgagggcatacaaacccccggcccagacttcgcctgcaggctccccggactctgagcccccacttcagtgcctagttcttatctgtgaagccattcctcaccccggttctttggaaccgccactcggcagaggtgcgttcctctcccggcactccctggacatgaagtttacctattgcgatgaccgtattgcagaagtggccggttacagccccgatgacctaatcgggtgttcagcctatgagtatatccacgccctggatagtgatgccgtgtcaaaatctattcacactctcctatctaagggtcaggccgttaccggccagtaccggttcttggccagatctgggggctatctttggacacagacacaggcaacagtggtgagcggggggcgagggccgcagtcagagagcattgtttgcgtgcacttcctcatctcacaagtggaggaaacgggggtcgtcctctccctcgagcagacagagcagcatagtcggagaccaattcagagaggagcaccaagccagaaagatactcctaaccctggcgattcacttgacaccccagggccgcgcattcttgcctttttacatcctccgagcctaagtgaggctgcattggccgcagaccctcgcagattttgttccccggacttgagaagattactgggaccgattctcgacggcgcttccgtggctgcgaccccatcaaccccactggcaacacggcacccacagagcccactcagtgctgacctcccggatgaactcccggtgggcaccgaaaacgtccaccggttatttacgagtggaaaggatactgaagccgtagagactgatcttgatatcgcccaagatgcagatgcccttgacttggaaatgctggccccctacatttctatggacgacgacttccagctcaacgcctccgagcagctgccccgagcctatcataggccccttggggccgtccctcgaccgcgggccagaagctttcacggcctttcgccccccgccctggagccctccctcttgcctcgatggggctccgacccaaggctgtcgtgttcatctccatctagaggtgaccctagcgcttcatctcccatggcgggagctaggaaacgaactctcgctcaatcctctgaagacgaggatgaaggggtggaactgctcggggtccgtcccccgaagaggtcaccatccccggaacacgagaactttctattgttccctctgtcccttgtttgctgggggatcaatgggatactttggcctagtctcccgtcctggttgaaaccaaccgtgctgtag

SEQ ID NO: 244754 - DNA, 2010 bp, Artificial Sequence
  derived and/or modified sequence
atggccttagggctgcagagagccagatccaccactgaactacgaaaggagaagtcgagggatgcagcacgaagccgccgcagccaagagactgaagtcctctaccagctggcccacactctgcccttcgcgcgaggcgtttctgcccacctggataaggcgtccatcatgagattaaccataagctacttaagaatgcaccggctgtgtgccgctggagaatggaatcaggtcggcgcgggaggcgaaccccttgatgcctgttacctaaaggccctggaagggtttgtgatggtgctcacagcagagggcgacatggcatatctgtcagaaaatgtgtctaagcacctgggcctgtcacagctggaactgatcggtcacagtatatttgacttcatccacccctgcgaccaagaggaattacaggacgcactgacaccacagcagacgctgtcaagacgaaaggtggaggcacctaccgagcggtgctttagtctgcggatgaaaagcactttgacatcgaggggaagaactctgaacctgaaggcagcgacatggaaggtgctgaactgtagtggccacatgagggcatacaaaccacccgcccagaccagtccagccggctcacccgatagtgagcctccattacagtgcctggtgttgatctgtgaagccatcccacatccgggtagtcttgaacctccccttggccggggtgcatttttaagtagacacagcctggacatgaagttcacgtattgcgatgaccggattgccgaggtggccggatatagccctgatgatttgatcggctgttccgcctacgagtatatccatgcactggactcagacgccgtctcaaagagtattcataccttgctaagtaagggacaggccgtgaccggccagtaccgattcttagcccgcagcggcggatacctctggacccagacgcaagccacggtcgtgagtggcggccgaggcccacaaagtgagagcatcgtctgtgtccacttccttatcagccaggttgaggaaacaggcgtcgttctctctctggaacagactgagcaacactcaaggcgcccaattcagagaggcgctccttcacaaaaggacacacctaatcccggggactccctggatactcccgggcctagaatcctggccttccttcatcctccctctttatccgaagcggctctggcggcggatcccaggcggttttgcagcccagacctgaggagactcctcgggcccatcctggacggcgcatcagttgccgcaaccccgtctaccccattagcaacacggcatccacagagtcctctgagcgcagacctgccagacgagctgcctgtgggcaccgaaaacgtgcataggcttttcacgtccggaaaagataccgaggccgtggagactgatctcgacatagctcaggatgcagacgcactagacctggagatgctggccccctacatctctatggacgatgattttcagctgaacgcctccgaacagctgcctcgggcataccacaggcctctgggtgccgtcccacgacctagggccaggagcttccatggactgtcacctcccgccctggaacccagcttgctacccaggtgggggtccgacccccggctgagctgtagcagcccgtcaagaggggatccgtccgcgagcagtcctatggctggcgcccgaaagcgaacactggcgcagtccagtgaagatgaggacgagggagttgagcttttaggagtgaggccaccaaaacggagcccttcgccagaacacgaaaacttcctactcttccccctctccctctcatttctgttgacaggaggcccggcccctggttctctgcaggacccgtcaactcccttactgaatctgaacgaacccctcggactgggccccagtcttctctctccatactccgacgaagacactactcagcctggggggccttttcaaccgcgagccggatctgctcaggctgactag

SEQ ID NO: 244755 - DNA, 1092 bp, Artificial Sequence
  derived and/or modified sequence
atggctctgggactgcagcgggcccgctccactactgagctccgaaaggaaaaatcaagggatgctgcaagaagtaggcgctcccaggagaccgaggttctttaccagcttgctcacaccctgccatttgctaggggcgtttctgcccatctggacaaggctagcataatgagactgacaatttcatacctccgcatgcatcgattgtgcgctgccggagagtggaaccaggtgggcgccggcggagagccactggatgcctgttacttaaaagccctggagggcttcgttatggtgttgaccgccgaaggcgatatggcatatctgtccgagaacgtgtcaaagcacctgggcttgtctcagctggagctcatcgggcattcaatctttgatttcatacacccctgcgaccaggaggaactgcaggatgcactgaccccccaacagacactgagccgccgcaaggttgaggcccccactgagaggtgcttcagcttgcgcatgaaaagcaccctgacaagcagaggccggaccctgaacctgaaggctgctacctggaaagtgctgaattgcagtggacacatgagggcgtataagccccccgcacagaccagccctgcaggaagcccagacagcgagccccccctgcagtgcctggtgcttatttgcgaagcaattccacatcccggatctctggaacctccgctcggtcggggcgccttcctttcccggcattctctggacatgaagtttacgtactgcgacgacaggattgcagaggtcgctgggtacagtcctgatgatttgattggatgttcagcttacgagtatatccatgccctggactctgacgctgtgtctaaatctatccacacctgtatgtatcctatatcccccggcgctaaacccgcagcaacttggcccccagctgacaccaggactcctcaactgcccataccccaagacgcccttccgccccacctaaacacatcatcactgctaccaaagccgcagggaactgtgagcttcctggccccctcctatccggttccaagatacttttcacctcacttgccaccttggtggccttag

SEQ ID NO: 244756 - DNA, 1092 bp, Artificial Sequence
  derived and/or modified sequence
atggcactgggcttgcaacgggcacgctctacaactgagttacgcaaggaaaaaagcagggatgctgccagaagccgccgttcccaagagaccgaagtcctgtaccagttggctcacactctgccgttcgcgcgcggcgttagcgctcacctggacaaggcctccatcatgcggctgacaatctcctacctgcgcatgcatagactgtgtgccgccggtgagtggaaccaagtgggcgcaggtggtgagccactggacgcttgttacttgaaggcactggagggtttcgtcatggtgctgaccgctgaaggtgacatggcttatctgtctgagaatgtttctaagcatctcgggctgagtcagctcgaacttatcggccatagtatcttcgattttattcatccttgcgaccaggaagaactgcaggatgccctgacgccacaacagacactgtctcggcgaaaggtcgaagcccctaccgaacggtgcttctctctgaggatgaagagcaccctgaccagtcgtgggagaacattgaacttgaaagccgctacatggaaggtgctcaactgtagcggacacatgcgagcctataaaccccccgctcaaacctctcccgctggctccccagattccgaaccgccactgcaatgtcttgtactcatctgcgaggcgatcccacacccgggcagccttgaaccacctctcggtagaggcgccttcttatcccggcacagcttagacatgaaatttacgtactgtgacgaccgcattgctgaagtggccggatacagcccagacgacctcatcggctgttccgcctacgaatatatccacgcactggattccgatgccgtctccaagtccatccatacttgtatgtatccgatctcgcccggagcaaagccagccgccacttggccaccggctgatacacggacacctcagctgcccatccctcaggacgcacttcccccccacctgaatacatcatcattgcttccgaagccacagggtacagtaagttttttggctccctcctacccggttcccagatacttctctccacacctgcccccatggtggccgtag

SEQ ID NO: 244757 - DNA, 2101 bp, Artificial Sequence
  derived and/or modified sequence
ccgagggctccggagcggcgactggcgagccatggcgctggggctgcagcgcgcaaggtcgaccacggagctgcgcaaggaaaagtcccgggatgcggcccgcagccggcgcagccaggagaccgaggtgctgtaccagctggctcacacgctgcccttcgcccgcggcgtcagcgcccacctggacaaggcctctatcatgcgcctcaccatcagctacctgcgcatgcaccgcctctgcgccgcaggggagtggaaccaggtgggagcagggggagaaccactggatgcctgctacctgaaggccctggagggcttcgtcatggtgctcaccgccgagggagacatggcttacctgtcggagaatgtcagcaaacacctgggcctcagtcagctggagctcattggacacagcatctttgatttcatccacccctgtgaccaagaggagcttcaggacgccctgaccccccagcagaccctgtccaggaggaaggtggaggcccccacggagcggtgcttctccttgcgcatgaagagtacactcaccagccgcgggcgcaccctcaacctcaaggcggccacctggaaggtgctgaactgctctggacatatgagggcctacaagccacctgcgcagacttctccagctgggagccctgactcagagcccccgctgcagtgcctggtgctcatctgcgaagccatcccccacccaggcagcctggagcccccactgggccgaggggccttcctcagccgccacagcctggacatgaagttcacctactgtgacgacaggattgcagaagtggctggctatagtcccgatgacctgatcggctgttccgcctacgagtacatccacgcgctggactccgatgcggtcagcaagagcatccacaccttgctgagcaagggccaggcagtaacagggcagtatcgcttcctggcccggagtggtggctacctgtggacccagacccaggccacagtggtgtcagggggacggggcccccagtcggagagtatcgtctgtgtccattttttaatcagccaggtggaagagaccggagtggtgctgtccctggagcaaacggagcaacactctcgcagacccattcagcggggcgccccctctcagaaggacacccctaaccctggggacagccttgacacccctggcccccggatccttgccttcctgcacccgccttccctgagcgaggctgccctggccgctgacccccgccgtttctgcagccctgacctccgtcgcctcctgggacccatcctggatggggcttcagtagcagccactcccagcaccccgctggccacacggcacccccaaagtcctctttcggctgatctcccagatgaactacctgtgggcaccgagaatgtgcacagactcttcacctccgggaaagacactgaggcagtggagacagatttagatatagctcaggatgctgatgctctggatttggagatgctggccccctacatctccatggatgatgacttccagctcaacgccagcgagcagctacccagggcctaccacagacctctgggggctgtcccccggccccgtgctcggagcttccatggcctgtcacctccagcccttgagccctccctgctaccccgctgggggagtgacccccggctgagctgctccagcccttccagaggggacccctcagcatcctctcccatggctggggctcggaagaggaccctggcccagagctcagaggacgaggacgagggagtggagctgctgggagtgagacctcccaaaaggtcccccagcccagaacacgaaaactttctgctctttcctctcagcctggtgtgttgggggattaatgggattctctggccctcattacctagctggcttaaacctactgttttatagataggaaaccagagaggggcaggggctggttgagggtcatacagaaagtcagtgggccagctgagactaaagcctgatcttctagtttcactaatgggtattaaaaacctctgcagtgaactgagattgcgccactgcaccccagcatgagcgacagaatgggaccttgtc

SEQ ID NO: 244758 - DNA, 2519 bp, Artificial Sequence
  derived and/or modified sequence
ccgagggctccggagcggcgactggcgagccatggcgctggggctgcagcgcgcaaggtcgaccacggagctgcgcaaggaaaagtcccgggatgcggcccgcagccggcgcagccaggagaccgaggtgctgtaccagctggctcacacgctgcccttcgcccgcggcgtcagcgcccacctggacaaggcctctatcatgcgcctcaccatcagctacctgcgcatgcaccgcctctgcgccgcaggggagtggaaccaggtgggagcagggggagaaccactggatgcctgctacctgaaggccctggagggcttcgtcatggtgctcaccgccgagggagacatggcttacctgtcggagaatgtcagcaaacacctgggcctcagtcagctggagctcattggacacagcatctttgatttcatccacccctgtgaccaagaggagcttcaggacgccctgaccccccagcagaccctgtccaggaggaaggtggaggcccccacggagcggtgcttctccttgcgcatgaagagtacactcaccagccgcgggcgcaccctcaacctcaaggcggccacctggaaggtgctgaactgctctggacatatgagggcctacaagccacctgcgcagacttctccagctgggagccctgactcagagcccccgctgcagtgcctggtgctcatctgcgaagccatcccccacccaggcagcctggagcccccactgggccgaggggccttcctcagccgccacagcctggacatgaagttcacctactgtgacgacaggattgcagaagtggctggctatagtcccgatgacctgatcggctgttccgcctacgagtacatccacgcgctggactccgatgcggtcagcaagagcatccacaccttgctgagcaagggccaggcagtaacagggcagtatcgcttcctggcccggagtggtggctacctgtggacccagacccaggccacagtggtgtcagggggacggggcccccagtcggagagtatcgtctgtgtccattttttaatcagccaggtggaagagaccggagtggtgctgtccctggagcaaacggagcaacactctcgcagacccattcagcggggcgccccctctcagaaggacacccctaaccctggggacagccttgacacccctggcccccggatccttgccttcctgcacccgccttccctgagcgaggctgccctggccgctgacccccgccgtttctgcagccctgacctccgtcgcctcctgggacccatcctggatggggcttcagtagcagccactcccagcaccccgctggccacacggcacccccaaagtcctctttcggctgatctcccagatgaactacctgtgggcaccgagaatgtgcacagactcttcacctccgggaaagacactgaggcagtggagacagatttagatatagctcaggatgctgatgctctggatttggagatgctggccccctacatctccatggatgatgacttccagctcaacgccagcgagcagctacccagggcctaccacagacctctgggggctgtcccccggccccgtgctcggagcttccatggcctgtcacctccagcccttgagccctccctgctaccccgctgggggagtgacccccggctgagctgctccagcccttccagaggggacccctcagcatcctctcccatggctggggctcggaagaggaccctggcccagagctcagaggacgaggacgagggagtggagctgctgggagtgagacctcccaaaaggtcccccagcccagaacacgaaaactttctgctctttcctctcagcctgagtttccttctgacaggaggaccagccccagggagcctgcaggaccccagcaccccactcctgaacctgaatgagcccctgggcctgggcccctcactgctctctccgtactcagacgaggacactacccagcccgggggccccttccagccaagggcaggctcagcccaggctgactgagccggctcctctccccatctgccttctcctcccccagaaaggacctcaaccacactccacgccggcagccaacgcacaggatgggggcgccaggagaggggcccctctctcctctatgtaccccctgcccacctcgggcctacctcagccctcacccctctgcctgctcccaatctgggggctctctggggtggtctcagctcagtgacctctgggaggtggtccctggccccctcctccttctctcaggatttctcttggggttctcaatacttggttacctcattatccctttctctgcctctcttggctttattttggggaatcaggggtgaggagggttgggggggtcatatctgtgtttccaggttctggggagaacaatgatccacgggtcaacgtgatcacatttccttctatccttcttgtattattatttttatttttgtcaatttcatgatatggtttttaatcatga

SEQ ID NO: 244759 - DNA, 2462 bp, Artificial Sequence
  derived and/or modified sequence
ggagcggcgactggcgagccatggcgctggggctgcagcgcgcaaggtcgaccacggagctgcgcaaggaaaagtcccgggatgcggcccgcagccggcgcagccaggagaccgaggtgctgtaccagctggctcacacgctgcccttcgcccgcggcgtcagcgcccacctggacaaggcctctatcatgcgcctcaccatcagctacctgcgcatgcaccgcctctgcgccgcaggggagtggaaccaggtgggagcagggggagaaccactggatgcctgctacctgaaggccctggagggcttcgtcatggtgctcaccgccgagggagacatggcttacctgtcggagaatgtcagcaaacacctgggcctcagtcagctggagctcattggacacagcatctttgatttcatccacccctgtgaccaagaggagcttcaggacgccctgaccccccagcagaccctgtccaggaggaaggtggaggcccccacggagcggtgcttctccttgcgcatgaagagtacactcaccagccgcgggcgcaccctcaacctcaaggcggccacctggaaggtgctgaactgctctggacatatgagggcctacaagccacctgcgcagacttctccagctgggagccctgactcagagcccccgctgcagtgcctggtgctcatctgcgaagccatcccccacccaggcagcctggagcccccactgggccgaggggccttcctcagccgccacagcctggacatgaagttcacctactgtgacgacaggattgcagaagtggctggctatagtcccgatgacctgatcggctgttccgcctacgagtacatccacgcgctggactccgatgcggtcagcaagagcatccacacctgtatgtatcccatttccccaggtgcgaagccagctgccacatggcccccagctgacaccaggaccccccagctccccataccccaggatgcactgcctccccacctcaacaccagctccctgctccccaagccccaaggaactgtctccttccttgccccctcatacccagtccccagatatttctctccccatttgcccccttggtggccctgatccctcccgatccccctcctcagtgctgagcaagggccaggcagtaacagggcagtatcgcttcctggcccggagtggtggctacctgtggacccagacccaggccacagtggtgtcagggggacggggcccccagtcggagagtatcgtctgtgtccattttttaatcaggtaagcaggaggaggggctggggtggctgtgtgtgggcctgatctgcatgtgtggacaggtgtgtgtgtgtgtgtgtgtgtgtgcgtatgagcatgcatgtgtatcatgcataagtgtatgtgagggagtgtgcacgtgtacacatatgaggaatgtgtgtcaccatgtaaatgccggtgtgtgtgtctgcatggacacaggtatgtgtatgggtgtgtagactgttaatttttttttttttttttttttttttttttgcgtgaacctctgcttaagtggattgttaattcaaattagaaaggggtctttatttggcctggcatggtggctcatgcctgtaatcctagcactttgggaggctgaggtgggcggattgcctgagctcaggagttcgaaaccagcctgggcaacatgacgaaatgctgtttctactaataataccaaaaattagccgggtgtggtgacacatgcctgtaatcccaactactcgggaggctgaggcacgagaatcattagaacccaggtggtggaggctgcagtgagccgagattgcgtcagtgcactctggcctcggcaacagagcgagactctgtctcaaacaaacaaacaaacaaacaaacaaaaggactctatattcaagttaaaataagaagtgtaacagaatcatggggtcttttttgctttttaaattttgatgtggctcacacctgtaaatcccaaagtgttgggattacaggcatgagccactgcacccggcccatgttgtggtttatatcagtagttcctttgtaaatagtgaacagtattccatggtatgaatagagcacaggttttttttttatccattcaccagttagaagacattgggctgtttccaagtttgggtgattacaaaaaaacagctactgtaaacattctcatacaagattttatgagatcacatgttttcatttctcttgggtaaacagctaggattggaatggatgggttatatagtaagtgtatatttaatctaagaaactgccatggctgggcacagtggctcacgcctgtaatcccagcactttgggaagccaaggaaggaggatgactagagcctctgaggtgaagaccagcctgggcaaagtggttaagactcaaccgcaaaaaaagaaaaacagaaaacctgaaaacaaacc

SEQ ID NO: 244760 - DNA, 1367 bp, Artificial Sequence
  derived and/or modified sequence
ccgagggctccggagcggcgactggcgagccatggcgctggggctgcagcgcgcaaggtcgaccacggagctgcgcaaggaaaagtcccgggatgcggcccgcagccggcgcagccaggagaccgaggtgctgtaccagctggctcacacgctgcccttcgcccgcggcgtcagcgcccacctggacaaggcctctatcatgcgcctcaccatcagctacctgcgcatgcaccgcctctgcgccgcaggggagtggaaccaggtgggagcagggggagaaccactggatgcctgctacctgaaggccctggagggcttcgtcatggtgctcaccgccgagggagacatggcttacctgtcggagaatgtcagcaaacacctgggcctcagtcagctggagctcattggacacagcatctttgatttcatccacccctgtgaccaagaggagcttcaggacgccctgaccccccagcagaccctgtccaggaggaaggtggaggcccccacggagcggtgcttctccttgcgcatgaagagtacactcaccagccgcgggcgcaccctcaacctcaaggcggccacctggaaggtgctgaactgctctggacatatgagggcctacaagccacctgcgcagacttctccagctgggagccctgactcagagcccccgctgcagtgcctggtgctcatctgcgaagccatcccccacccaggcagcctggagcccccactgggccgaggggccttcctcagccgccacagcctggacatgaagttcacctactgtgacgacaggattgcagaagtggctggctatagtcccgatgacctgatcggctgttccgcctacgagtacatccacgcgctggactccgatgcggtcagcaagagcatccacacctgtatgtatcccatttccccaggtgcgaagccagctgccacatggcccccagctgacaccaggaccccccagctccccataccccaggatgcactgcctccccacctcaacaccagctccctgctccccaagccccaaggaactgtctccttccttgccccctcatacccagtccccagatatttctctccccatttgcccccttggtggccctgatccctcccgatccccctcctcagtgctgagcaagggccaggcagtaacagggcagtatcgcttcctggcccggagtggtggctacctgtggacccagacccaggccacagtggtgtcagggggacggggcccccagtcggagagtatcgtctgtgtccattttttaatcaggtaagcaggaggaggggctggggtggctgtgtgtgggcctgatctgcatgtgtggacaggtgtgtgtgtgtgt

SEQ ID NO: 244761 - DNA, 1899 bp, Artificial Sequence
  derived and/or modified sequence
atggccctgggcctgcagagggcccggagcaccacagagctgaggaaggagaagagcagagatgctgcccggagccgccgcagccaggagacagaggtgctgtaccagctggcccacaccctgccctttgcccggggcgtgtctgcccacctggacaaggccagcatcatgaggctgaccatctcctacctgaggatgcaccggctgtgtgccgccggggagtggaaccaggtgggcgctggaggagagcccctggatgcctgctacctgaaggccctggagggctttgtgatggtgctgacagctgagggggacatggcctacctgtctgaaaatgtgtccaagcacctgggcctgagccagctggagctgattggccacagcatctttgacttcatccacccctgtgaccaggaggagctgcaggatgccctgaccccccagcagaccctgagcaggaggaaggtggaggcccccacagagcgctgcttcagcctgaggatgaagagcaccctgaccagccggggccgcaccctgaacctgaaggccgccacctggaaggtgctgaactgcagcggccacatgagggcctacaagcccccagcccagaccagccctgctggcagcccagacagcgagccccccctgcagtgcctggtgctgatctgtgaggccatcccccaccctggcagcctggagccccccctgggccgcggggccttcctgagccgccacagcctggacatgaagttcacctactgtgatgacagaattgctgaggtggccggctacagcccagatgacctgattggctgcagcgcctatgagtacatccacgccctggacagtgatgctgtgtccaagagcatccacaccctgctgagcaagggccaggccgtgacaggccagtaccgcttcctggcccggagcggcggctacctgtggacccagacccaggccaccgtggtgtctgggggccggggcccccagagcgagagcatcgtgtgtgtgcacttcctgatcagccaggtggaggagactggagtggtgctgagcctggagcagacagagcagcacagcagaagacccatccagagaggagcccccagccagaaggacacccccaaccctggggacagcctggacaccccaggcccccgcatcctggccttcctgcacccccccagcctgtctgaggccgccctggccgctgacccccggcgcttctgcagcccagacctgcggcggctgctgggccccatcctggatggagcctctgtggccgccacccccagcacccccctggccaccaggcacccccagagccccctgtctgctgacctgcctgatgagctgcctgtgggcacagaaaatgtgcacaggctcttcaccagcggcaaggacacagaagctgtggagacagacctggacatcgcccaggatgctgatgccctggacctggagatgctggccccctacatctccatggatgatgacttccagctgaatgccagcgagcagctgccccgggcctaccaccggcccctgggcgctgtgccccggccccgggcccggagcttccacggcctgagccccccagccctggagcccagcctgctgccccgctggggcagtgacccccggctgagctgcagcagccccagcagaggagaccccagcgccagcagccccatggccggggccaggaagaggaccctggcccagagcagtgaagatgaagatgaaggagtggagctgctgggcgtgcggccccccaagaggagccccagccctgagcacgagaacttcctgctcttccccctgagcctggtgtgctggggcatcaatggcatcctgtggcccagcctgcccagctggctgaagcccaccgtgctgtag

SEQ ID NO: 244762 - DNA, 2010 bp, Artificial Sequence
  derived and/or modified sequence
atggccctgggcctgcagagggcccggagcaccacagagctgaggaaggagaagagcagagatgctgcccggagccgccgcagccaggagacagaggtgctgtaccagctggcccacaccctgccctttgcccggggcgtgtctgcccacctggacaaggccagcatcatgaggctgaccatctcctacctgaggatgcaccggctgtgtgccgccggggagtggaaccaggtgggcgctggaggagagcccctggatgcctgctacctgaaggccctggagggctttgtgatggtgctgacagctgagggggacatggcctacctgtctgaaaatgtgtccaagcacctgggcctgagccagctggagctgattggccacagcatctttgacttcatccacccctgtgaccaggaggagctgcaggatgccctgaccccccagcagaccctgagcaggaggaaggtggaggcccccacagagcgctgcttcagcctgaggatgaagagcaccctgaccagccggggccgcaccctgaacctgaaggccgccacctggaaggtgctgaactgcagcggccacatgagggcctacaagcccccagcccagaccagccctgctggcagcccagacagcgagccccccctgcagtgcctggtgctgatctgtgaggccatcccccaccctggcagcctggagccccccctgggccgcggggccttcctgagccgccacagcctggacatgaagttcacctactgtgatgacagaattgctgaggtggccggctacagcccagatgacctgattggctgcagcgcctatgagtacatccacgccctggacagtgatgctgtgtccaagagcatccacaccctgctgagcaagggccaggccgtgacaggccagtaccgcttcctggcccggagcggcggctacctgtggacccagacccaggccaccgtggtgtctgggggccggggcccccagagcgagagcatcgtgtgtgtgcacttcctgatcagccaggtggaggagactggagtggtgctgagcctggagcagacagagcagcacagcagaagacccatccagagaggagcccccagccagaaggacacccccaaccctggggacagcctggacaccccaggcccccgcatcctggccttcctgcacccccccagcctgtctgaggccgccctggccgctgacccccggcgcttctgcagcccagacctgcggcggctgctgggccccatcctggatggagcctctgtggccgccacccccagcacccccctggccaccaggcacccccagagccccctgtctgctgacctgcctgatgagctgcctgtgggcacagaaaatgtgcacaggctcttcaccagcggcaaggacacagaagctgtggagacagacctggacatcgcccaggatgctgatgccctggacctggagatgctggccccctacatctccatggatgatgacttccagctgaatgccagcgagcagctgccccgggcctaccaccggcccctgggcgctgtgccccggccccgggcccggagcttccacggcctgagccccccagccctggagcccagcctgctgccccgctggggcagtgacccccggctgagctgcagcagccccagcagaggagaccccagcgccagcagccccatggccggggccaggaagaggaccctggcccagagcagtgaagatgaagatgaaggagtggagctgctgggcgtgcggccccccaagaggagccccagccctgagcacgagaacttcctgctcttccccctgagcctgtccttcctgctgactggaggccctgcccctggcagcctgcaggaccccagcacccccctgctgaacctgaatgagcccctgggcctgggccccagcctgctgagcccctacagtgatgaggacaccacccagcccggcggccccttccagcccagggctggcagcgcccaggccgactag

SEQ ID NO: 244763 - DNA, 1092 bp, Artificial Sequence
  derived and/or modified sequence
atggccctgggcctgcagagggcccggagcaccacagagctgaggaaggagaagagcagagatgctgcccggagccgccgcagccaggagacagaggtgctgtaccagctggcccacaccctgccctttgcccggggcgtgtctgcccacctggacaaggccagcatcatgaggctgaccatctcctacctgaggatgcaccggctgtgtgccgccggggagtggaaccaggtgggcgctggaggagagcccctggatgcctgctacctgaaggccctggagggctttgtgatggtgctgacagctgagggggacatggcctacctgtctgaaaatgtgtccaagcacctgggcctgagccagctggagctgattggccacagcatctttgacttcatccacccctgtgaccaggaggagctgcaggatgccctgaccccccagcagaccctgagcaggaggaaggtggaggcccccacagagcgctgcttcagcctgaggatgaagagcaccctgaccagccggggccgcaccctgaacctgaaggccgccacctggaaggtgctgaactgcagcggccacatgagggcctacaagcccccagcccagaccagccctgctggcagcccagacagcgagccccccctgcagtgcctggtgctgatctgtgaggccatcccccaccctggcagcctggagccccccctgggccgcggggccttcctgagccgccacagcctggacatgaagttcacctactgtgatgacagaattgctgaggtggccggctacagcccagatgacctgattggctgcagcgcctatgagtacatccacgccctggacagtgatgctgtgtccaagagcatccacacctgcatgtaccccatcagccctggggccaagccagctgccacctggcccccagctgacaccaggaccccccagctgcccatcccccaggatgccctgcccccccacctgaacaccagcagcctgctgcccaagccccagggcaccgtgtccttcctggcccccagctaccctgtgccccgctacttcagcccccacctgcccccctggtggccctag

SEQ ID NO: 244764 - DNA, 1899 bp, Artificial Sequence
  derived and/or modified sequence
atggccctgggcctgcagcgggcccggagcaccaccgagctgcggaaagagaagagcagggatgcagcccggtccagaagatctcaagaaactgaagtcctatatcaactggctcataccctaccattcgcccggggagtctctgctcacttagacaaggctagtattatgcgactcacaatatcataccttcgcatgcacagactttgtgctgccggggaatggaatcaggttggagccgggggggaaccactcgatgcatgctatctgaaggcgctcgagggattcgtgatggttcttacggcagagggcgacatggcatacctcagcgaaaatgtgagcaaacaccttgggctgtcacagcttgaactcatcggacatagcatatttgacttcattcatccctgcgatcaagaggagctccaggatgcattaactccccagcagaccttgtcccgccggaaggttgaggcacctactgagaggtgcttttcactgcgcatgaagagtacactcacaagcaggggacggacactgaatctgaaggccgcaacgtggaaggtcctgaactgcagcgggcatatgcgggcttacaagcctccagcccaaacctcccctgcagggtcccctgatagcgagcccccacttcagtgcctggtcctcatatgcgaggccatcccccatcctggcagtttagaacctcccctggggcgcggagcattcctatcaaggcactcattggatatgaaatttacttactgtgacgatcgcatcgctgaagttgcagggtattctcccgacgatctgattgggtgctccgcatacgagtatatccatgctcttgatagtgacgcggtcagcaagtctatccatactcttctttccaagggccaggcggtcactggccaatatcgctttctcgctagaagcggcggatatctttggacacaaacgcaggcgacagtggtgagcggcggaagaggtccccaaagcgagtccattgtgtgtgtgcactttttgatatcccaggtcgaggagactggcgtggtcctttcacttgagcagacagagcagcactcccgacgcccaatccagcgcggggcaccttcccagaaagacacccccaacccaggcgatagcctggacactcccggcccgaggatcctcgcatttctgcatcccccatccctctccgaagctgccctggctgctgaccctcggaggttttgctcgcccgatcttcgtagattgctcgggcccattctggacggagcctccgtagcggccaccccgagcacacctttggctactcggcatcctcagagccccctgtctgcagacctccctgatgagctccctgtagggactgagaacgtgcatcggttgtttacctccggaaaggatacagaagccgtggagacggatctggatatcgcccaggatgctgatgctctggacctggaaatgctagcaccctatatctctatggatgacgacttccagctaaatgcttctgagcagctgccgcgtgcttaccaccggcctcttggcgcagtgcccagacctagggctcggagcttccacgggctttctccccctgccctggagccctccttgcttcctcggtggggctccgacccccgcctaagctgctccagccccagtagaggggaccctagtgcttcctcccctatggcgggagcccgaaaaagaaccttggcgcagagtagcgaagacgaggacgagggtgtagagcttctgggagtgagaccaccaaagcgcagcccaagccccgaacatgaaaactttctcttattccctctcagcctcgtgtgttggggaatcaacgggattttatggccctcactcccaagctggctaaagcccactgtattgtag

SEQ ID NO: 244765 - DNA, 2010 bp, Artificial Sequence
  derived and/or modified sequence
atggccctgggcctgcagcgggcccggagcaccaccgagctgcggaaggaaaagagtagagatgccgcacggtcacgcaggagccaagaaactgaggtcttgtatcaactggctcataccttaccattcgcgaggggggtttccgcccatttggacaaggcctcaataatgcggttaactatcagttatcttcggatgcaccggttgtgcgccgccggagagtggaatcaggtcggtgcaggcggagagcccctggatgcttgctacttaaaagcacttgaagggtttgtgatggtgctcaccgcagagggtgacatggcttatctctctgaaaatgtgtcaaagcatttgggcctcagccagctagagttgatcggacattcgatctttgattttattcatccgtgtgatcaggaagagcttcaggacgccctgactccacaacagacactgagcaggcgcaaggttgaagctcccactgagagatgtttcagcttgcggatgaagtccacattgacaagtcggggacgcacccttaacttgaaagccgccacttggaaagtcctgaattgctccggccacatgcgagcctacaagccccccgcacagacctcacctgcaggctcccctgattccgagccacccctgcagtgtctggtgctgatatgcgaggccattccgcatccgggatcccttgagccaccgctggggaggggtgctttcctctcccggcactctctggacatgaagtttacttactgtgacgacagaatcgcagaagtcgcgggttatagcccagatgacctgattggatgctccgcgtatgagtatatacatgctctagattctgacgccgtgtccaagagcattcacacacttctgtctaaaggccaggccgttactggccagtatcgatttctggcgcgcagtggcggatatctctggacacagacacaagctactgtggtgtcggggggccgcggtccacagagcgaatcaattgtgtgcgttcatttcctgataagccaagtggaagagaccggggtcgtcctaagcctcgagcagacagaacagcattcccgacggcctattcagcgcggcgcgccctcacagaaggatacccctaatcccggagactcactggataccccagggcctagaatcctggccttcttgcaccctcctagcctgtccgaggcagctctcgcagctgatcctcgtcgcttctgctcacctgatttgagacgactgctaggccctatcttggacggggcaagtgtggccgccacccctagcacccctctggccacccggcacccgcagtccccactaagtgcagatctgccggatgaacttcctgttgggacggagaacgttcaccgcttgttcacctccggcaaagacacagaagctgtagaaacagacctcgatattgcccaagatgccgacgctttagacttggagatgctggctccatatatctccatggacgatgacttccagttgaatgcctctgaacaactgcctcgcgcataccatcgacccttgggtgccgtgccccgaccccgagcccgatcctttcacgggctgagcccccctgctctcgagccttccctactcccccggtggggctccgatccccggcttagctgctcaagcccaagtcggggtgatcctagtgcttcctcaccaatggccggcgccaggaagcgtacgttggcccagtcaagcgaagacgaggatgagggcgtcgagctgttgggggtacggccaccaaaaagaagccctagtcctgagcatgaaaacttcctccttttccccctgagtttgagctttctgttaacagggggtcccgctcctggctccctgcaggacccaagcacccctcttctcaatctgaatgagccactggggctgggaccatcgctgttgagcccgtactcagacgaggacactactcagcccggtgggccgtttcaacctcgagctggctccgctcaggctgactag

SEQ ID NO: 244766 - DNA, 1092 bp, Artificial Sequence
  derived and/or modified sequence
atggccctgggcctgcagcgggcccggagcaccaccgagctgcggaaagagaaatctagagatgccgctagatccagacgcagtcaggagacggaggtgctgtatcagctcgcccacacactcccatttgcccgcggggtctccgcccatttggacaaagcctcgataatgcgactgaccatttcatatctccgcatgcaccggctgtgcgctgccggggagtggaaccaggtgggagctgggggagaacccttagacgcatgttacctcaaggccctagagggctttgtcatggtgttaacggctgaaggagatatggcctacctgtcagaaaatgtaagcaagcatctgggactgtcccagctcgagctcatcggacatagtatctttgacttcatccatccatgtgatcaggaagagcttcaggatgctctcactcctcagcaaacgctgtcacgcagaaaggtggaggctcctacggagagatgtttttccttaaggatgaaatcaacactaacgtcccggggccggaccctgaacctcaaggccgccacctggaaagtgcttaattgtagtggacacatgcgcgcatataagccaccagctcagacttcccctgctggaagtcccgactccgagccacccttgcaatgcctggtgctcatctgcgaggcaattccgcaccctggtagcctggagcccccacttggtcgcggagcctttctctctcgacattcactggacatgaaatttacatactgtgacgaccgtatcgctgaggtcgcaggctatagtcctgacgatcttattgggtgttccgcctatgagtatatccatgccctggactcggatgcagtgagcaaaagcatacacacctgtatgtatcccatctcccccggcgctaagccagctgcaacatggccccccgcggatactcgtactccacaactgcccatcccgcaggatgcactacctccccacctgaacacatcttccctgctgcccaaaccccaggggactgtctcttttttggcgccctcttacccagtccctcgatacttcagcccccaccttccgccttggtggccgtag

SEQ ID NO: 244767 - DNA, 1092 bp, Artificial Sequence
  derived and/or modified sequence
atggccctgggcctgcagcgggcccggagcaccaccgagctgcggaaagaaaagagccgggacgccgcaagatcccgacgatcacaggagacagaggtgctatatcaattggcccatactctacctttcgcccgaggagtgagtgcacatcttgataaggccagtataatgcgcctcacaatcagctatctgagaatgcatagactatgcgccgccggggaatggaaccaggtgggggcaggcggcgagccattagacgcctgctacctaaaagctcttgaaggattcgttatggttctgacagctgaaggcgacatggcatatctgtccgagaatgttagcaagcatctcgggctgtcacaactagagttaattggccactctatttttgattttatccatccgtgcgatcaggaggaactacaggacgcgctgacgccccaacagaccttaagccggaggaaggtggaagctccgacagagagatgcttctctctgaggatgaaatctacgctgactagtcgggggaggaccctgaatctgaaggccgccacttggaaggttctgaattgtagcggccatatgcgggcatataagcctcctgcccagacgagtcctgccggcagtcccgatagtgagcccccgttgcagtgtttagtgcttatttgtgaagcgatcccccaccccggttctctggaaccaccattggggagaggggcattcctcagtaggcattcattagacatgaaattcacttactgtgacgataggattgctgaagtagcggggtacagtcctgacgacctcatcggttgttcagcctacgagtatatccacgcactggactcagatgccgtctccaaatctatccacacctgcatgtatcccatcagcccaggcgccaaaccagccgccacgtggccacccgcagatactcgtacccctcagttacccatcccacaagacgcgctgccaccacatcttaatacctcctccttgctgcccaagccgcagggtaccgtgtctttcttggcgccctcttatccagtacctcgttatttctccccacatctgcccccctggtggccatag

SEQ ID NO: 244768 - DNA, 1899 bp, Artificial Sequence
  derived and/or modified sequence
atggccctggggcttcaacgcgctcggtctaccacagagctgcggaaagagaagagtagggatgccgctagatcaagacgttcccaagaaaccgaggttctgtaccaactggcgcatacactgcctttcgcacgaggagttagtgcccatctggacaaagcctcaattatgcgcctcactatttcgtaccttcgcatgcataggctgtgtgctgcaggggaatggaaccaagtcggtgcaggcggagaacccctcgacgcctgttacctgaaagcactggaggggtttgtgatggttctcaccgccgagggtgatatggcctatctgagtgagaacgtttctaaacatctggggctgagtcagttggagctgatcggacatagcattttcgacttcattcacccctgcgatcaggaggagctgcaggacgcattgactccccaacagactctgtcgagaaggaaagtggaagcaccgactgagcgctgcttttcactgcggatgaagtctactctgacatcaaggggtcggaccctgaacctgaaggccgctacctggaaagtcctgaactgctccgggcatatgcgcgcatataagcctcctgctcagaccagtccagcaggcagtcccgattctgaaccccctctgcaatgcctggtccttatttgcgaagcaattccacatcctgggagcttagagcccccactgggccgtggtgcatttttgtccagacactctctggacatgaaatttacctattgcgatgatcgaatcgctgaggtggctggatattcacccgatgacttaatcggctgtagtgcttatgaatatattcatgctctggacagcgatgccgtttcaaagtccatccacacactcctttcgaaaggtcaggctgtcacaggccaatatcggttcttagccaggagcgggggatacttgtggactcaaacacaggccaccgtggtgagcgggggtcgaggtcctcagagtgagtccatcgtatgtgtccatttcctgatatcccaggtggaggagactggagtagtgctgagccttgaacaaaccgaacagcacagcaggaggcctatccagagaggagctccctcccagaaggacacaccaaatcccggtgactcattagacacaccaggacccaggatcctggcgttccttcatccgccaagtctgtccgaggccgctttggcggctgatccccgtcggttttgttctcccgaccttagaagattgctcggccctattttggatggggcatcagtcgcagcgacgccctccaccccactcgcaaccagacaccctcaaagcccgttgagcgccgatcttcccgatgagctgcctgtaggcactgaaaacgtacatcgcctgtttacctccggtaaagatacagaggcagtagagactgatttagatatcgcccaggacgcagacgccctggatctcgaaatgctcgctccctacatctcaatggatgacgattttcaactgaatgcctcagaacaacttccgagagcttaccaccggccactaggggcagttccaaggcccagagccagatcttttcacggtctgagtcctccagccctagagccaagtctgctgccccgatgggggtccgatccaagactgtcttgttcaagccccagccgaggagacccgagcgcttccagtccaatggctggtgcccgaaagaggaccctcgcacagagctccgaggacgaggatgaaggtgtggagctgcttggcgtgcgcccaccgaagcggagtccatcccctgagcacgaaaatttcctgctctttccgttgtctttggtgtgctggggcatcaatggaatcctttggcccagtctccccagctggctgaaacctacagtgctctag

SEQ ID NO: 244769 - DNA, 2010 bp, Artificial Sequence
  derived and/or modified sequence
atggcgctgggtctgcagcgggcaaggtccacgactgagctccggaaagaaaagtcgagggacgcagccagatctaggaggtcccaggaaaccgaggtactttaccagttggcacacaccctccctttcgcccgtggggtgtctgcccacctagacaaagctagtataatgaggctgaccatttcttatctcaggatgcaccggctatgtgccgctggagaatggaaccaggtaggcgcaggaggggagcccttggacgcttgttatctcaaagccctcgagggattcgtgatggttctcacagcagaaggtgacatggcgtacttgagtgagaatgtatctaagcatttgggtctttcgcaactggagctcatagggcacagcatctttgatttcattcacccctgtgaccaggaggagcttcaggatgccctaaccccccagcaaacattgtcaaggagaaaagtcgaggcaccaacagagcgttgtttcagtctcagaatgaagtctaccctcacaagcagaggtcggacactgaatctgaaagctgcaacgtggaaggtcttgaattgctcaggccatatgcgcgcttataaacctcctgcacagacatcccccgcaggatcccccgactctgagcccccactgcaatgtctggttctcatctgtgaggccataccccatccaggctcacttgaacccccacttggcaggggcgctttcctgtcccgacacagtttggatatgaaattcacctactgcgacgatcggatcgcagaggtcgcaggctacagtccagatgatttaattggctgttctgcttacgaatatatccacgccctggatagcgacgctgtgtcgaaaagcattcacacactcttgtctaaagggcaggccgtgaccggacagtaccgctttttggcccgaagcgggggatacctctggacgcaaacgcaggcaactgttgtcagtggtggaagagggccacagtcagaatccattgtgtgtgtccactttcttatttctcaggttgaggaaactggtgtggtgttatctctggagcagaccgagcagcacagtagacgcccaattcagagaggggctccatcccaaaaggacacgccaaatccaggggatagcctggacactcctggaccgaggatccttgcattcttgcaccctccttcactatccgaggctgctctggctgccgatccaaggcgattctgttcaccagatctgcggagattgctagggccaatacttgacggggcatccgtagccgctacaccttccaccccacttgctacaagacatccacagagcccactgagcgctgacctgcctgatgaactgcctgtgggaacagagaacgtacaccggctttttacttccggcaaagacaccgaagccgttgaaacagatctcgatatcgctcaggacgcggatgccttggacctggaaatgctggcgccttatatctcaatggacgatgattttcagctcaatgcgtccgaacaactgcctcgtgcttatcacaggcccctgggtgccgtcccccgtccaagggcgagatctttccatggactgagtccacccgctctcgaaccgagcctcctgcctcggtggggttccgatccaaggttgagttgctccagcccatcccgaggcgaccccagcgcatcctctcctatggcaggggctagaaaacgtacgctcgcccagagcagcgaagatgaggacgaaggggttgaactgctcggtgtgagaccacccaaaagatcgccaagtcctgagcatgagaactttctgctgtttcctctttccttgagcttcctgctgacggggggacctgcaccgggatccctgcaggacccctccacacccctgctcaacctcaacgaaccccttggactgggcccatcacttctcagtccttatagcgacgaggacacaacccagccagggggtccgttccagcctcgggcaggatctgcgcaagctgactag

SEQ ID NO: 244770 - DNA, 1092 bp, Artificial Sequence
  derived and/or modified sequence
atggctctcggtctgcaaagggctcgatctactactgaactgcggaaggaaaagtctagggacgcggcaaggtcacgcaggtcccaggaaactgaggttttgtaccagctcgcccataccctccctttcgctagaggggtcagtgcccacctcgacaaggctagcattatgcgtctgaccataagctatttgcgaatgcataggttatgtgctgccggagagtggaatcaggtaggtgcaggaggggagcctctcgatgcttgttacttgaaagcgctggaaggcttcgtgatggttctgactgctgaaggcgacatggcatatctgtccgagaatgtgtcaaaacatctcgggctctcccagctcgaactgatcggtcattccatctttgactttattcatccatgcgatcaggaggaactccaggatgccttgacaccacagcagaccctgagcagacggaaggtggaagcccctactgaaagatgcttctcgctgaggatgaagtcgactctcacgtctcgtgggagaacactgaatctcaaagcggcaacttggaaagtgctgaactgctcaggacatatgagagcctataaaccacccgctcagaccagtcctgcaggttcgcctgatagtgagcctcctctgcaatgcttggtcctgatctgtgaggccatccctcaccccggttctctggagcctccattgggaaggggggctttcctttctcggcattccttggacatgaaattcacttattgcgacgataggatagcagaagtggccggatacagccccgatgacctaatcgggtgtagcgcctatgagtacattcatgcactggattccgatgcggtcagtaagtccatccacacctgtatgtatcccatttcaccaggcgcaaaaccggcagctacatggcctcctgctgatacccgaacaccccagttgcccataccacaggatgctctcccaccccatttgaacacatcctcgctcctgcctaagccccaaggtaccgtttctttcctggccccatcgtatcctgtgcccaggtacttttctccacacctgcctccatggtggccatag

SEQ ID NO: 244771 - DNA, 1092 bp, Artificial Sequence
  derived and/or modified sequence
atggctctgggacttcagagggctagatccacaaccgagttacggaaggaaaagtctagagatgcggctaggagtaggagaagccaggaaacggaggtgctatatcagctggcccatacgctgccctttgctcggggagtctctgcacatttggacaaagcatctattatgaggctgaccatcagctatctccggatgcacaggctctgtgcagccggagagtggaaccaggtgggcgcagggggagagcccctggacgcctgctacctaaaggcgctggagggttttgtgatggtgctaaccgcagaaggagatatggcctacctgagtgaaaacgtatcaaaacatctgggcctctcacagctcgagctcattggtcactctatttttgattttatccatccttgtgaccaggaggagctccaggacgctctgactccccagcagactctctctaggcggaaggtagaggctcccaccgagcgctgtttcagtctacggatgaagtcaactctgactagccggggtcgcacactcaatctgaaagccgcaacatggaaggtgttgaactgcagcggacacatgcgagcctataagccaccggcacagacttctccggctggcagcccagacagcgaaccacccctccagtgtctggtgcttatctgtgaagcaattccgcaccccggtagcctcgaaccacccttgggaagaggagcttttctgtcaagacatagcctcgatatgaaatttacatactgtgacgaccgtatcgcagaggtggctggttatagccctgacgacctgattgggtgtagcgcttacgaatacatccacgctctggattcagatgccgtctctaagtcaatccatacctgtatgtaccccataagtcccggtgctaaaccagcagctacctggccacctgccgacacccggacaccccagctccctattccccaagacgctctgccacctcatctgaatactagcagcctcctcccaaagccgcaaggaaccgtaagctttcttgccccaagctatccggtacctcgttattttagccctcatctgcctccgtggtggccttag

SEQ ID NO: 244772 - DNA, 1899 bp, Artificial Sequence
  derived and/or modified sequence
atggccctgggcctgcagagagccagaagcaccaccgagctgagaaaggagaagagcagagacgccgccagaagcagaagaagccaggagaccgaggtgctgtaccagctggcccacaccctgcccttcgccagaggcgtgagcgcccacctggacaaggccagcatcatgagactgaccatcagctacctgagaatgcacagactgtgcgccgccggcgagtggaaccaggtgggcgccggcggcgagcccctggacgcctgctacctgaaggccctggagggcttcgtgatggtgctgaccgccgagggcgacatggcctacctgagcgagaacgtgagcaagcacctgggcctgagccagctggagctgatcggccacagcatcttcgacttcatccacccctgcgaccaggaggagctgcaggacgccctgaccccccagcagaccctgagcagaagaaaggtggaggcccccaccgagagatgcttcagcctgagaatgaagagcaccctgaccagcagaggcagaaccctgaacctgaaggccgccacctggaaggtgctgaactgcagcggccacatgagagcctacaagccccccgcccagaccagccccgccggcagccccgacagcgagccccccctgcagtgcctggtgctgatctgcgaggccatcccccaccccggcagcctggagccccccctgggcagaggcgccttcctgagcagacacagcctggacatgaagttcacctactgcgacgacagaatcgccgaggtggccggctacagccccgacgacctgatcggctgcagcgcctacgagtacatccacgccctggacagcgacgccgtgagcaagagcatccacaccctgctgagcaagggccaggccgtgaccggccagtacagattcctggccagaagcggcggctacctgtggacccagacccaggccaccgtggtgagcggcggcagaggcccccagagcgagagcatcgtgtgcgtgcacttcctgatcagccaggtggaggagaccggcgtggtgctgagcctggagcagaccgagcagcacagcagaagacccatccagagaggcgcccccagccagaaggacacccccaaccccggcgacagcctggacacccccggccccagaatcctggccttcctgcacccccccagcctgagcgaggccgccctggccgccgaccccagaagattctgcagccccgacctgagaagactgctgggccccatcctggacggcgccagcgtggccgccacccccagcacccccctggccaccagacacccccagagccccctgagcgccgacctgcccgacgagctgcccgtgggcaccgagaacgtgcacagactgttcaccagcggcaaggacaccgaggccgtggagaccgacctggacatcgcccaggacgccgacgccctggacctggagatgctggccccctacatcagcatggacgacgacttccagctgaacgccagcgagcagctgcccagagcctaccacagacccctgggcgccgtgcccagacccagagccagaagcttccacggcctgagcccccccgccctggagcccagcctgctgcccagatggggcagcgaccccagactgagctgcagcagccccagcagaggcgaccccagcgccagcagccccatggccggcgccagaaagagaaccctggcccagagcagcgaggacgaggacgagggcgtggagctgctgggcgtgagaccccccaagagaagccccagccccgagcacgagaacttcctgctgttccccctgagcctggtgtgctggggcatcaacggcatcctgtggcccagcctgcccagctggctgaagcccaccgtgctgtag

SEQ ID NO: 244773 - DNA, 2010 bp, Artificial Sequence
  derived and/or modified sequence
atggccctgggcctgcagagagccagaagcaccaccgagctgagaaaggagaagagcagagacgccgccagaagcagaagaagccaggagaccgaggtgctgtaccagctggcccacaccctgcccttcgccagaggcgtgagcgcccacctggacaaggccagcatcatgagactgaccatcagctacctgagaatgcacagactgtgcgccgccggcgagtggaaccaggtgggcgccggcggcgagcccctggacgcctgctacctgaaggccctggagggcttcgtgatggtgctgaccgccgagggcgacatggcctacctgagcgagaacgtgagcaagcacctgggcctgagccagctggagctgatcggccacagcatcttcgacttcatccacccctgcgaccaggaggagctgcaggacgccctgaccccccagcagaccctgagcagaagaaaggtggaggcccccaccgagagatgcttcagcctgagaatgaagagcaccctgaccagcagaggcagaaccctgaacctgaaggccgccacctggaaggtgctgaactgcagcggccacatgagagcctacaagccccccgcccagaccagccccgccggcagccccgacagcgagccccccctgcagtgcctggtgctgatctgcgaggccatcccccaccccggcagcctggagccccccctgggcagaggcgccttcctgagcagacacagcctggacatgaagttcacctactgcgacgacagaatcgccgaggtggccggctacagccccgacgacctgatcggctgcagcgcctacgagtacatccacgccctggacagcgacgccgtgagcaagagcatccacaccctgctgagcaagggccaggccgtgaccggccagtacagattcctggccagaagcggcggctacctgtggacccagacccaggccaccgtggtgagcggcggcagaggcccccagagcgagagcatcgtgtgcgtgcacttcctgatcagccaggtggaggagaccggcgtggtgctgagcctggagcagaccgagcagcacagcagaagacccatccagagaggcgcccccagccagaaggacacccccaaccccggcgacagcctggacacccccggccccagaatcctggccttcctgcacccccccagcctgagcgaggccgccctggccgccgaccccagaagattctgcagccccgacctgagaagactgctgggccccatcctggacggcgccagcgtggccgccacccccagcacccccctggccaccagacacccccagagccccctgagcgccgacctgcccgacgagctgcccgtgggcaccgagaacgtgcacagactgttcaccagcggcaaggacaccgaggccgtggagaccgacctggacatcgcccaggacgccgacgccctggacctggagatgctggccccctacatcagcatggacgacgacttccagctgaacgccagcgagcagctgcccagagcctaccacagacccctgggcgccgtgcccagacccagagccagaagcttccacggcctgagcccccccgccctggagcccagcctgctgcccagatggggcagcgaccccagactgagctgcagcagccccagcagaggcgaccccagcgccagcagccccatggccggcgccagaaagagaaccctggcccagagcagcgaggacgaggacgagggcgtggagctgctgggcgtgagaccccccaagagaagccccagccccgagcacgagaacttcctgctgttccccctgagcctgagcttcctgctgaccggcggccccgcccccggcagcctgcaggaccccagcacccccctgctgaacctgaacgagcccctgggcctgggccccagcctgctgagcccctacagcgacgaggacaccacccagcccggcggccccttccagcccagagccggcagcgcccaggccgactag

SEQ ID NO: 244774 - DNA, 1092 bp, Artificial Sequence
  derived and/or modified sequence
atggccctgggcctgcagagagccagaagcaccaccgagctgagaaaggagaagagcagagacgccgccagaagcagaagaagccaggagaccgaggtgctgtaccagctggcccacaccctgcccttcgccagaggcgtgagcgcccacctggacaaggccagcatcatgagactgaccatcagctacctgagaatgcacagactgtgcgccgccggcgagtggaaccaggtgggcgccggcggcgagcccctggacgcctgctacctgaaggccctggagggcttcgtgatggtgctgaccgccgagggcgacatggcctacctgagcgagaacgtgagcaagcacctgggcctgagccagctggagctgatcggccacagcatcttcgacttcatccacccctgcgaccaggaggagctgcaggacgccctgaccccccagcagaccctgagcagaagaaaggtggaggcccccaccgagagatgcttcagcctgagaatgaagagcaccctgaccagcagaggcagaaccctgaacctgaaggccgccacctggaaggtgctgaactgcagcggccacatgagagcctacaagccccccgcccagaccagccccgccggcagccccgacagcgagccccccctgcagtgcctggtgctgatctgcgaggccatcccccaccccggcagcctggagccccccctgggcagaggcgccttcctgagcagacacagcctggacatgaagttcacctactgcgacgacagaatcgccgaggtggccggctacagccccgacgacctgatcggctgcagcgcctacgagtacatccacgccctggacagcgacgccgtgagcaagagcatccacacctgcatgtaccccatcagccccggcgccaagcccgccgccacctggccccccgccgacaccagaaccccccagctgcccatcccccaggacgccctgcccccccacctgaacaccagcagcctgctgcccaagccccagggcaccgtgagcttcctggcccccagctaccccgtgcccagatacttcagcccccacctgcccccctggtggccctag

SEQ ID NO: 244775 - protein, 450 aa, Artificial Sequence
  derived and/or modified sequence
MRPAAGAARRPRCCTSWLTRCPSPAASAPTWTRPLSCASPSATCACTASAPQLELIGHSIFDFIHPCDQEELQDALTPQQTLSRRKVEAPTERCFSLRMKSTLTSRGRTLNLKAATWKVLNCSGHMRAYKPPAQTSPAGSPDSEPPLQCLVLICEAIPHPGSLEPPLGRGAFLSRHSLDMKFTYCDDRIAEVAGYSPDDLIGCSAYEYIHALDSDAVSKSIHTLLSKGQAVTGQYRFLARSGGYLWTQTQATVVSGGRGPQSESIVCVHFLISQVEETGVVLSLEQTEQHSRRPIQRGAPSQKDTPNPGDSLDTPGPRILAFLHPPSLSEAALAADPRRFCSPDLRRLLGPILDGASVAATPSTPLATRHPQSPLSADLPDELPVGTENVHRLFTSGKDTEAVETDLDIAQDPSTPLLNLNEPLGFHFVTQSGVQWHKHSSPQPRPPGLK

SEQ ID NO: 244776 - DNA, 1353 bp, Artificial Sequence
  derived and/or modified sequence
atgagacctgccgccggggctgctcggcggccccgctgttgtaccagctggctgaccagatgcccttctccagcagcctccgccccaacctggacccgtccacttagttgcgcctcacctagtgccacctgcgcatgcaccgcttccgccccccagttggagctgatcggccatagcattttcgacttcatccatccatgcgatcaagaagagcttcaagacgcacttacaccccagcaaacactgtctagacgtaaggttgaagcgcccacggagaggtgcttttccctcaggatgaagagcaccctgacgagtcgcgggcgaactctgaacctgaaggctgccacatggaaggttctcaactgctctggacacatgcgggcatataagccacctgcccagaccagtcccgccggttcgcccgattctgagcctcccttacagtgtctggtgctgatttgtgaggcgatcccacacccaggcagtctggagccacccttgggcagaggcgcattcctttcccggcatagtcttgacatgaagttcacgtattgtgacgatcgcatcgctgaagtggccggctacagtccggatgatctaatcggttgcagtgcctatgaatatattcacgcactggactcagatgctgtgtctaaatccattcacacactgctgtctaagggacaggccgtaacaggccaataccggttcctggctcgttctggagggtatctctggacccaaacccaggcaactgtggtctcaggaggcagagggccacagtctgagagcatcgtctgtgtgcattttctcatctcccaggtggaggagaccggtgtagtgctgtccctcgagcagaccgagcaacatagccggcggcctattcagcggggggccccaagtcagaaagatacacctaaccccggtgattcattagatacacctgggccaaggatcctggcttttcttcacccgccgagcctcagtgaggccgctttagcagccgaccctcgaaggttttgcagccccgacctccggcgtctgctggggccgatcctggacggagcgtcagtagccgctaccccgagtactccacttgcgacaaggcacccgcaaagcccactgagtgccgacctacctgacgagcttccggttggtactgagaatgtgcatcgtttgttcacatccggtaaggacaccgaagcagtggaaaccgacctggacatcgctcaggacccttcaacccccctgctgaatttaaatgagcctttaggttttcacttcgttacacagtccggagtgcaatggcacaagcacagctcacctcagccacgcccgcccggcctcaagtag

SEQ ID NO: 244777 - DNA, 600 bp, Artificial Sequence
  derived and/or modified sequence
atgcgcccggcggccggagcggctcgcaggccaaggtgttgcacatcttggctcactcgctgcccctcgcccgcagcgtccgcccctacgtggactcggcccttgagctgtgctagcccctcagcgacatgtgcatgcacagccagcgctccgcagttggaactgattggccatagcatctttgattttatacatccctgcgatcaggaagaactccaagacgccctgaccccccagcaaactttgtcccgcagaaaggtggaagcacctacagagaggtgttttagcctccgaatgaagtcgacattaacgagccgtggaaggaccctcaatttgaaggctgcgacatggaaagtattgaattgttccgggcacatgagggcttacaaacctcccgcccagaccagtcccgcgggctcccctgactctgaacctcctctgcagtgtctggtactgatctgtgaagctatcccccacccgggttctttggaaccgccactgggcagaggcgcttttcttagcagacacagccttgatatgaagtttacctattgtgacgataggatcgctgaggtggccggctatagtccaatgacttag

SEQ ID NO: 244778 - DNA, 714 bp, Artificial Sequence
  derived and/or modified sequence
atgagacccgctgcaggcgctgcacgcagacctcggtgttgtacaagttggcttacgcgatgtccaagtccagcagcatcagctcccacatggacccggcctttaagctgtgcaagtccatccgccacttgcgcatgcaccgcgagtgcaccacaagaggagctacaggacgctctcacaccccaacaaactctctctcgtcgtaaggtagaggctcccaccgagcgatgtttcagtctaagaatgaagtctacattgacctcaaggggacgcacactgaatctcaaagcagcgacctggaaggttctcaattgttcaggacacatgagagcgtacaaaccccctgcgcaaaccagccccgcaggctctccagattccgaacccccattacagtgcttagtactgatctgtgaggccatcccacatcccggtagcctggagagattcgtgccagtgagcagtgccgccacttctctctgcctgccctcactttccccatctaaggtggccgggtactcacctgatgacctgatcgggtgcagcgcttatgagtatatccacgctttggatagcgatgccccccaggacgcattaccccctcatctgaacaccagcagcctactgcccaagccacagggcacagtctcttttctcgccccctcgtacccagtcccaagatacttctccccacatctacccccttggtggccttag

SEQ ID NO: 244779 - DNA, 1709 bp, Artificial Sequence
  derived and/or modified sequence
actcgtaactcgcacccgggtcctggctgcaccgcatcccctcctgcaccccctggatggcccttcagccaacgggggcctgggcgatggtcgaccacggagctgcgcaaggaaaagtcccgggatgcggcccgcagccggcgcagccaggagaccgaggtgctgtaccagctggctcacacgctgcccttcgcccgcggcgtcagcgcccacctggacaaggcctctatcatgcgcctcaccatcagctacctgcgcatgcaccgcctctgcgccgcagctggagctcattggacacagcatctttgatttcatccacccctgtgaccaagaggagcttcaggacgccctgaccccccagcagaccctgtccaggaggaaggtggaggcccccacggagcggtgcttctccttgcgcatgaagagtacactcaccagccgcgggcgcaccctcaacctcaaggcggccacctggaaggtgctgaactgctctggacatatgagggcctacaagccacctgcgcagacttctccagctgggagccctgactcagagcccccgctgcagtgcctggtgctcatctgcgaagccatcccccacccaggcagcctggagcccccactgggccgaggggccttcctcagccgccacagcctggacatgaagttcacctactgtgacgacaggattgcagaagtggctggctatagtcccgatgacctgatcggctgttccgcctacgagtacatccacgcgctggactccgatgcggtcagcaagagcatccacaccttgctgagcaagggccaggcagtaacagggcagtatcgcttcctggcccggagtggtggctacctgtggacccagacccaggccacagtggtgtcagggggacggggcccccagtcggagagtatcgtctgtgtccattttttaatcagccaggtggaagagaccggagtggtgctgtccctggagcaaacggagcaacactctcgcagacccattcagcggggcgccccctctcagaaggacacccctaaccctggggacagccttgacacccctggcccccggatccttgccttcctgcacccgccttccctgagcgaggctgccctggccgctgacccccgccgtttctgcagccctgacctccgtcgcctcctgggacccatcctggatggggcttcagtagcagccactcccagcaccccgctggccacacggcacccccaaagtcctctttcggctgatctcccagatgaactacctgtgggcaccgagaatgtgcacagactcttcacctccgggaaagacactgaggcagtggagacagatttagatatagctcaggaccccagcaccccactcctgaacctgaatgagcccctgggttttcactttgtcacccagtctggagtgcagtggcacaaacacagctcaccgcagcctcgacctcctgggctcaagtgatcctcctacttcagctcccacaagtagctgggactgcagctatgtgccatcatgcctggctgatgtttatatgttttgtagagacgaggtttcaccatgttgcccaggctggtcttgaactcctgagttcaagcgatccacctgccttggcctcccaaagtgctgggattactggtatgaaccaccacgcccgacagtaaatatgttttgaatgaataaactctcataaatg

SEQ ID NO: 244780 - DNA, 1708 bp, Artificial Sequence
  derived and/or modified sequence
actcgtaactcgcacccgggtcctggctgcaccgcatcccctcctgcaccccctggatggcccttcagccaacgggggcctgggcgatggtcgaccacggagctgcgcaaggaaaagtcccgggatgcggcccgcagccggcgcagccaggagaccgaggtgctgtaccagctggctcacacgctgcccttcgcccgcggcgtcagcgcccacctggacaaggcctctatcatgcgcctcaccatcagctacctgcgcatgcaccgcctctgcgccgcagctggagctcattggacacagcatctttgatttcatccacccctgtgaccaagaggagcttcaggacgccctgaccccccagcagaccctgtccaggaggaaggtggaggcccccacggagcggtgcttctccttgcgcatgaagagtacactcaccagccgcgggcgcaccctcaacctcaaggcggccacctggaaggtgctgaactgctctggacatatgagggcctacaagccacctgcgcagacttctccagctgggagccctgactcagagcccccgctgcagtgcctggtgctcatctgcgaagccatcccccacccaggcagcctggagcccccactgggccgaggggccttcctcagccgccacagcctggacatgaagttcacctactgtgacgacaggattgcagaagtggctggctatagtccgatgacctgatcggctgttccgcctacgagtacatccacgcgctggactccgatgcggtcagcaagagcatccacaccttgctgagcaagggccaggcagtaacagggcagtatcgcttcctggcccggagtggtggctacctgtggacccagacccaggccacagtggtgtcagggggacggggcccccagtcggagagtatcgtctgtgtccattttttaatcagccaggtggaagagaccggagtggtgctgtccctggagcaaacggagcaacactctcgcagacccattcagcggggcgccccctctcagaaggacacccctaaccctggggacagccttgacacccctggcccccggatccttgccttcctgcacccgccttccctgagcgaggctgccctggccgctgacccccgccgtttctgcagccctgacctccgtcgcctcctgggacccatcctggatggggcttcagtagcagccactcccagcaccccgctggccacacggcacccccaaagtcctctttcggctgatctcccagatgaactacctgtgggcaccgagaatgtgcacagactcttcacctccgggaaagacactgaggcagtggagacagatttagatatagctcaggaccccagcaccccactcctgaacctgaatgagcccctgggttttcactttgtcacccagtctggagtgcagtggcacaaacacagctcaccgcagcctcgacctcctgggctcaagtgatcctcctacttcagctcccacaagtagctgggactgcagctatgtgccatcatgcctggctgatgtttatatgttttgtagagacgaggtttcaccatgttgcccaggctggtcttgaactcctgagttcaagcgatccacctgccttggcctcccaaagtgctgggattactggtatgaaccaccacgcccgacagtaaatatgttttgaatgaataaactctcataaatg

SEQ ID NO: 244781 - DNA, 804 bp, Artificial Sequence
  derived and/or modified sequence
gagggctccggagcggcgactggcgagccatggcgctggggctgcagcgcgcaaggtcgaccacggagctgcgcaaggaaaagtcccgggatgcggcccgcagccggcgcagccaggagaccgaggtgctgtaccagctggctcacacgctgcccttcgcccgcggcgtcagcgcccacctggacaaggcctctatcatgcgcctcaccatcagctacctgcgcatgcaccgcctctgcgccgcaggaggagcttcaggacgccctgaccccccagcagaccctgtccaggaggaaggtggaggcccccacggagcggtgcttctccttgcgcatgaagagtacactcaccagccgcgggcgcaccctcaacctcaaggcggccacctggaaggtgctgaactgctctggacatatgagggcctacaagccacctgcgcagacttctccagctgggagccctgactcagagcccccgctgcagtgcctggtgctcatctgcgaagccatcccccacccaggcagcctggagcgctttgttcctgtgtcctctgctgctacttccctctgcctaccctctctctcacccagtaaagtggctggctatagtcccgatgacctgatcggctgttccgcctacgagtacatccacgcgctggactccgatgcgccccaggatgcactgcctccccacctcaacaccagctccctgctccccaagccccaaggaactgtctccttccttgccccctcatacccagtccccagatatttctctccccatttgcccccttggtggccctga

SEQ ID NO: 244782 - DNA, 1353 bp, Artificial Sequence
  derived and/or modified sequence
atgaggcctgctgctggagctgcccggcggccccgctgctgcacctcctggctgacccgctgccccagccctgctgccagcgcccccacctggacccggcccctgagctgtgccagccccagcgccacctgtgcctgcacagccagcgccccccagctggagctgattggccacagcatctttgacttcatccacccctgtgaccaggaggagctgcaggatgccctgaccccccagcagaccctgagcaggaggaaggtggaggcccccacagagcgctgcttcagcctgaggatgaagagcaccctgaccagccggggccgcaccctgaacctgaaggccgccacctggaaggtgctgaactgcagcggccacatgagggcctacaagcccccagcccagaccagccctgctggcagcccagattctgagccccccctgcagtgcctggtgctgatctgtgaggccatcccccaccctggcagcctggagccccccctgggccgcggggccttcctgagccgccacagcctggacatgaagttcacctactgtgatgacagaattgctgaggtggccggctacagcccagatgacctgattggctgcagcgcctatgagtacatccacgccctggacagtgatgctgtgtccaagagcatccacaccctgctgagcaagggccaggccgtgacaggccagtaccgcttcctggcccggagcggcggctacctgtggacccagacccaggccaccgtggtgtctgggggccggggcccccagagcgagagcatcgtgtgtgtgcacttcctgatcagccaggtggaggagaccggggtggtgctgagcctggagcagacagagcagcacagccggcggcccatccagagaggagcccccagccagaaggacacccccaaccctggggacagcctggacaccccaggcccccgcatcctggccttcctgcacccccccagcctgtctgaggccgccctggccgctgacccccggcgcttctgcagcccagacctgcggcggctgctgggccccatcctggatggagcctctgtggccgccacccccagcacccccctggccaccaggcacccccagagccccctgtctgctgacctgcctgatgagctgcctgtgggcacagaaaatgtgcacaggctcttcaccagcggcaaggacacagaggccgtggagacagacctggacatcgcccaggaccccagcacccccctgctgaacctgaatgagcccctgggcttccactttgtgacccagagcggcgtgcagtggcacaagcacagcagcccccagccccggcccccaggcctgaagtag

SEQ ID NO: 244783 - DNA, 600 bp, Artificial Sequence
  derived and/or modified sequence
atgaggcctgctgctggagctgcccggcggccccgctgctgcacctcctggctgacccgctgccccagccctgctgccagcgcccccacctggacccggcccctgagctgtgccagccccagcgccacctgtgcctgcacagccagcgccccccagctggagctgattggccacagcatctttgacttcatccacccctgtgaccaggaggagctgcaggatgccctgaccccccagcagaccctgagcaggaggaaggtggaggcccccacagagcgctgcttcagcctgaggatgaagagcaccctgaccagccggggccgcaccctgaacctgaaggccgccacctggaaggtgctgaactgcagcggccacatgagggcctacaagcccccagcccagaccagccctgctggcagcccagattctgagccccccctgcagtgcctggtgctgatctgtgaggccatcccccaccctggcagcctggagccccccctgggccgcggggccttcctgagccgccacagcctggacatgaagttcacctactgtgatgacagaattgctgaggtggccggctacagccccatgacctag

SEQ ID NO: 244784 - DNA, 714 bp, Artificial Sequence
  derived and/or modified sequence
atgaggcctgctgctggagctgcccggcggccccgctgctgcacctcctggctgacccgctgccccagccctgctgccagcgcccccacctggacccggcccctgagctgtgccagccccagcgccacctgtgcctgcacagccagcgccccccaggaggagctgcaggatgccctgaccccccagcagaccctgagcaggaggaaggtggaggcccccacagagcgctgcttcagcctgaggatgaagagcaccctgaccagccggggccgcaccctgaacctgaaggccgccacctggaaggtgctgaactgcagcggccacatgagggcctacaagcccccagcccagaccagccctgctggcagcccagacagcgagccccccctgcagtgcctggtgctgatctgtgaggccatcccccaccctggcagcctggagagatttgtgcctgtgagcagcgctgccaccagcctgtgcctgcccagcctgagccccagcaaggtggccggctacagcccagatgacctgattggctgcagcgcctatgagtacatccacgccctggacagtgatgccccccaggatgccctgcccccccacctgaacaccagcagcctgctgcccaagccccagggcaccgtgtccttcctggcccccagctaccctgtgccccgctacttcagcccccacctgcccccctggtggccctag

SEQ ID NO: 244785 - DNA, 1353 bp, Artificial Sequence
  derived and/or modified sequence
atgcggcccgccgccggcgccgcccggcggccccggtgctgcaccagctggctgacaagatgtccttcacccgcagcctctgcccccacatggacccgcccattatcctgcgcttctccctctgcgacttgcgcgtgtaccgcgtcggcaccccagttagagctgattggacattccatattcgatttcatccatccttgtgaccaagaggaactgcaagatgctttaaccccgcagcagactttaagcaggcgcaaagtggaagcaccgacagaaagatgcttctccctccgaatgaaaagcacactgacgagccgagggagaactctaaatctgaaagctgctacatggaaagtgctaaattgcagcggccacatgagagcatacaaacccccagcccagacaagtcctgccggatcgcccgacagcgaacccccacttcagtgcttagtcctgatatgtgaggctatccctcatccgggatccttggagccacctttgggtcgaggcgctttcctctcaaggcatagccttgacatgaagtttacttattgcgacgacagaattgccgaggtggccggatacagccccgacgatctgattggttgttccgcatacgagtacatccacgccctcgattcagatgcagtctccaagagtattcatacactgttgtccaagggccaagccgtgaccgggcagtacaggtttttggctcggtctgggggatacctttggactcagacccaggccaccgtggtctcagggggccgcggacctcaatctgagagcattgtgtgtgtgcattttctcataagtcaggtcgaggagacaggagtggttttgagtctcgaacagacagagcagcacagccggcgtcccattcagcggggggcaccatcccagaaagatacccccaacccgggtgacagtctagacacccctggaccacggatcctcgcattcttacaccctccttccctttccgaagccgccctggccgctgaccctcgccgcttctgctctccagatctgcgacgactcctggggcccatcttggatggtgcatcggtggctgcaacgccatcaacccctctagccactaggcatccccagtcacccttgtccgccgacttgcctgatgaacttcccgtcggcactgagaacgttcatagactattcacgagcggcaaagataccgaagctgttgagacagatctggatattgcccaagatcccagtaccccattgctgaacctgaatgagcccctcggctttcacttcgttacccaatccggagtgcagtggcacaagcactcgagcccccagccccggccccctggattgaaatag

SEQ ID NO: 244786 - DNA, 600 bp, Artificial Sequence
  derived and/or modified sequence
atgcggcccgccgccggcgccgcccggcggccccggtgctgcaccagctggcttacccggtgtccttcccctgccgcttccgcacccacgtggacacggcccctgagttgtgcaagtccttctgcaacgtgcgcctgtactgcctcagcaccacagctggaactcattggacattcaatttttgattttatccacccatgcgaccaagaggagctgcaggatgccttgacgccacaacagactctgagtcgaaggaaggtggaggccccaaccgaaaggtgttttagcctccggatgaagtccaccttaaccagtcgcggcaggaccctaaatttgaaagctgctacgtggaaggtcctgaactgttccggtcatatgagggcctacaaaccccctgcacagacctctccagcaggctctcccgattctgaacctcccctgcagtgcctagtgctgatctgcgaagccattccccacccgggcagccttgagcctcctttgggccggggtgcctttctcagtcgccattctctggatatgaagtttacttactgcgacgatcgtatcgctgaggtggctggctacagtccaatgacctag

SEQ ID NO: 244787 - DNA, 714 bp, Artificial Sequence
  derived and/or modified sequence
atgcggcccgccgccggcgccgcccggcggccccggtgctgcacctcatggctgacccgctgcccatcccctgccgccagcgcaccgacctggacacgccctctttcttgcgcctctccttctgcaacttgtgcctgtaccgcctcagctccgcaagaggagctgcaagatgccctgactccacaacaaacgctaagccggaggaaggtggaggctccaacagagcgctgtttcagcctccggatgaagtcgacattgacgagccgcggtcgcactctgaacctaaaggctgcaacctggaaggtgctcaactgctctgggcacatgcgggcatataagcccccggcccagacatcccctgcggggagccctgactccgaacccccactgcaatgcttagtgctcatctgtgaagctatacctcatccagggtctcttgaaaggttcgtgcctgtctcatccgctgcaacgagcctgtgtttgccctctctgagcccttccaaagtggccggatattcccctgacgatctcataggttgcagtgcctacgagtatatccatgccctggattccgacgccccccaggacgctctgccaccgcaccttaacacatctagtctcctgcctaagccacaaggtacggtctcctttttagccccctcatatccagtcccccgatatttttcaccgcatctgccaccctggtggccctag

SEQ ID NO: 244788 - DNA, 1353 bp, Artificial Sequence
  derived and/or modified sequence
atgaggcctgccgcaggcgctgcccgacggcctagatgctgcacttcttggctcactaggtgtccttcaccggctgcctccgcccctacttggactcggcctctgtcttgcgcttctccgagcgcaacatgcgcctgcactgcgagcgctccacagctggaactcattggtcactcaatctttgatttcattcacccctgtgaccaggaggagctgcaggatgccctgacccctcagcagaccctgtctcgcaggaaggtggaggcccctactgagcggtgtttctctctgcggatgaagtcaacgctcacctctcggggtcgcacactgaatctgaaggcagctacatggaaggtgctcaattgcagtggccatatgagagcttataagccacctgctcagaccagccctgccggttcgccggattccgaaccaccactgcaatgcctggtgctgatttgtgaagctatacctcaccctggctctctggaaccaccgctgggcagaggggcttttctgtcacgccactccttggatatgaaattcacatactgcgacgataggatcgctgaggtggcgggatactctccagacgacttaatagggtgctcagcctatgagtacatccacgctctcgattcagatgccgttagtaagtctattcacactctgctgtccaagggccaggccgtgacagggcagtacagatttcttgcacgatcagggggttatctgtggacacaaactcaggcaaccgtggtttccggcggacgcggacctcaatcagagtccattgtttgcgttcacttcctcatttctcaggtggaagagactggggtcgttctttcactagagcagactgaacagcattctcggagaccgattcaacgcggtgccccaagtcagaaggatacacctaacccaggagacagtctggatacccctggaccccgtattctggcattcttacacccaccttccttgagcgaagccgctttggctgctgatccgagacgattttgctcgcccgacctacgtcgcctgttagggccaatccttgacggagcatcagtggcagcaacaccctccactccactggccaccagacacccgcagagtcctctgagcgccgatttgcccgacgaactgccagttggaacagagaacgtgcatcgactgttcacctcaggaaaggatacagaagcagtggagactgatctggacattgcccaagacccaagtacccccctcttgaacctcaatgaacccctcggcttccattttgtgacgcaaagtggcgtgcagtggcacaagcacagttctccgcagcctcgccctcctggattaaaatag

SEQ ID NO: 244789 - DNA, 600 bp, Artificial Sequence
  derived and/or modified sequence
atgagacctgcagccggtgccgcacggcgaccaagatgctgcacgagttggcttacacggtgcccttcacccgcagcatctgcccctacctggactagacctctgtcttgtgcgtctccctctgctacttgtgcgtgtacagcttccgccccacaactggaactcatcgggcacagcatctttgactttatccatccctgtgaccaggaagaacttcaggacgctttaaccccgcagcagacgctgagtaggcgaaaagttgaggctcccaccgaacggtgcttcagcctgcgcatgaagtcaaccctgacatcacggggaaggaccctgaatctgaaggcagctacctggaaggtgctgaattgcagcggccacatgagggcttataagccccctgctcagacatcccctgccggaagccctgactctgagccgcctttacagtgcctggttctgatttgcgaagccatcccgcatcccggttctctggagccaccattgggtagaggagctttcctgagccggcatagtttagatatgaaatttacttactgcgacgacaggatcgccgaggtagccggatacagtcccatgacatag

SEQ ID NO: 244790 - DNA, 714 bp, Artificial Sequence
  derived and/or modified sequence
atgcgacccgctgccggtgcagcaaggcggcctagatgttgtacaagctggctgacgcgctgtccctctccagcggcttctgccccaacatggacccgccctctaagctgcgcttcgccatccgccacttgtgcctgcacagcgtccgcccctcaagaggaacttcaggatgctttgaccccccagcagaccctgagccgcagaaaggtggaggcacctactgagcgatgcttctccctcagaatgaaaagcaccctgaccagcagggggagaacacttaatctgaaggcagctacatggaaagtgctaaattgttccggccacatgcgggcatataagcccccagcgcaaacatcgccagctggatcaccagatagcgagcctcctctccagtgcctcgtactgatctgcgaggctattcctcatccgggaagtctcgagagattcgtcccggttagttctgcagcgaccagtctctgtctgccatccctgtcaccttccaaagtggcgggttactctcctgacgatctgattggatgttcagcctacgaatacatacatgcgctggacagcgatgcaccacaggatgcactcccaccccacctgaatacctctagcctgctcccaaagccccagggcacggtgtcatttctggctccgtcctaccccgtgcctcgctacttcagcccccacttgcctccgtggtggccttag

SEQ ID NO: 244791 - DNA, 1353 bp, Artificial Sequence
  derived and/or modified sequence
atgagacccgccgccggcgccgccagaagacccagatgctgcaccagctggctgaccagatgccccagccccgccgccagcgcccccacctggaccagacccctgagctgcgccagccccagcgccacctgcgcctgcaccgccagcgccccccagctggagctgatcggccacagcatcttcgacttcatccacccctgcgaccaggaggagctgcaggacgccctgaccccccagcagaccctgagcagaagaaaggtggaggcccccaccgagagatgcttcagcctgagaatgaagagcaccctgaccagcagaggcagaaccctgaacctgaaggccgccacctggaaggtgctgaactgcagcggccacatgagagcctacaagccccccgcccagaccagccccgccggcagccccgacagcgagccccccctgcagtgcctggtgctgatctgcgaggccatcccccaccccggcagcctggagccccccctgggcagaggcgccttcctgagcagacacagcctggacatgaagttcacctactgcgacgacagaatcgccgaggtggccggctacagccccgacgacctgatcggctgcagcgcctacgagtacatccacgccctggacagcgacgccgtgagcaagagcatccacaccctgctgagcaagggccaggccgtgaccggccagtacagattcctggccagaagcggcggctacctgtggacccagacccaggccaccgtggtgagcggcggcagaggcccccagagcgagagcatcgtgtgcgtgcacttcctgatcagccaggtggaggagaccggcgtggtgctgagcctggagcagaccgagcagcacagcagaagacccatccagagaggcgcccccagccagaaggacacccccaaccccggcgacagcctggacacccccggccccagaatcctggccttcctgcacccccccagcctgagcgaggccgccctggccgccgaccccagaagattctgcagccccgacctgagaagactgctgggccccatcctggacggcgccagcgtggccgccacccccagcacccccctggccaccagacacccccagagccccctgagcgccgacctgcccgacgagctgcccgtgggcaccgagaacgtgcacagactgttcaccagcggcaaggacaccgaggccgtggagaccgacctggacatcgcccaggaccccagcacccccctgctgaacctgaacgagcccctgggcttccacttcgtgacccagagcggcgtgcagtggcacaagcacagcagcccccagcccagaccccccggcctgaagtag

SEQ ID NO: 244792 - DNA, 600 bp, Artificial Sequence
  derived and/or modified sequence
atgagacccgccgccggcgccgccagaagacccagatgctgcaccagctggctgaccagatgccccagccccgccgccagcgcccccacctggaccagacccctgagctgcgccagccccagcgccacctgcgcctgcaccgccagcgccccccagctggagctgatcggccacagcatcttcgacttcatccacccctgcgaccaggaggagctgcaggacgccctgaccccccagcagaccctgagcagaagaaaggtggaggcccccaccgagagatgcttcagcctgagaatgaagagcaccctgaccagcagaggcagaaccctgaacctgaaggccgccacctggaaggtgctgaactgcagcggccacatgagagcctacaagccccccgcccagaccagccccgccggcagccccgacagcgagccccccctgcagtgcctggtgctgatctgcgaggccatcccccaccccggcagcctggagccccccctgggcagaggcgccttcctgagcagacacagcctggacatgaagttcacctactgcgacgacagaatcgccgaggtggccggctacagccccatgacctag

SEQ ID NO: 244793 - DNA, 714 bp, Artificial Sequence
  derived and/or modified sequence
atgagacccgccgccggcgccgccagaagacccagatgctgcaccagctggctgaccagatgccccagccccgccgccagcgcccccacctggaccagacccctgagctgcgccagccccagcgccacctgcgcctgcaccgccagcgccccccaggaggagctgcaggacgccctgaccccccagcagaccctgagcagaagaaaggtggaggcccccaccgagagatgcttcagcctgagaatgaagagcaccctgaccagcagaggcagaaccctgaacctgaaggccgccacctggaaggtgctgaactgcagcggccacatgagagcctacaagccccccgcccagaccagccccgccggcagccccgacagcgagccccccctgcagtgcctggtgctgatctgcgaggccatcccccaccccggcagcctggagagattcgtgcccgtgagcagcgccgccaccagcctgtgcctgcccagcctgagccccagcaaggtggccggctacagccccgacgacctgatcggctgcagcgcctacgagtacatccacgccctggacagcgacgccccccaggacgccctgcccccccacctgaacaccagcagcctgctgcccaagccccagggcaccgtgagcttcctggcccccagctaccccgtgcccagatacttcagcccccacctgcccccctggtggccctag

SEQ ID NO: 244794 - protein, 130 aa, Artificial Sequence
  derived and/or modified sequence
MAETVADTRRLITKPQNLNDAYGPPSNFLEIDVSNPQTVGVGRGRFTTYEIRVKVVVPPLPGKAFLRQLPFRGDDGIFDDNFIEERKQGLEQFINKVAGHPLAQNERCLHMFLQDEIIDKSYTPSKIRHA

SEQ ID NO: 244795 - DNA, 393 bp, Artificial Sequence
  derived and/or modified sequence
atggccgagaccgtggccgacaccagaagactgatcaccaagccccagaacctgaacgacgcctacggcccccccagcaacttcctggagatcgacgtgagcaacccccagaccgtgggcgtgggcagaggcagattcaccacctacgagatcagagtgaaggtggtggtgccccccctgcccggcaaggccttcctgagacagctgcccttcagaggcgacgacggcatcttcgacgacaacttcatcgaggagagaaagcagggcctggagcagttcatcaacaaggtggccggccaccccctggcccagaacgagagatgcctgcacatgttcctgcaggacgagatcatcgacaagagctacacccccagcaagatcagacacgcctag

SEQ ID NO: 244796 - DNA, 393 bp, Artificial Sequence
  derived and/or modified sequence
atggctgagacagttgccgacacgcgaagactaattacgaagccccagaacctcaacgacgcctatggacccccctcaaatttccttgagattgatgtgagcaatcctcagacagtcggcgtcggacggggacggttcactacatacgagatcagggtgaaggtggtcgttccacctttgcctggcaaggcgtttcttcggcaactgccatttcggggggacgacggcattttcgatgataacttcattgaggaacgaaaacagggccttgagcagttcatcaacaaggtcgctggacaccctctagcccagaacgaacgctgcctccacatgttcctgcaggacgagattatcgataaaagttacaccccctccaagattcgacacgcctag

SEQ ID NO: 244797 - DNA, 393 bp, Artificial Sequence
  derived and/or modified sequence
atggccgagaccgtggccgacaccaggaggctcatcaccaagccccagaacctgaatgatgcctacggcccccccagcaacttcctggagattgatgtgagcaacccccagacagtgggcgtgggccggggccgcttcaccacctatgagatccgggtgaaggtggtggtgccccccctgcccgggaaggccttcctgcggcagctgcccttcagaggagatgatggcatctttgatgacaacttcatcgaggagaggaagcagggcctggagcagttcatcaacaaggtggccggccaccccctggcccagaatgaacgctgcctgcacatgttcctgcaggatgagatcatcgacaagagctacacccccagcaagatcagacatgcctag

SEQ ID NO: 244798 - DNA, 393 bp, Artificial Sequence
  derived and/or modified sequence
atggccgagaccgtggccgacacccggcggctgatcaccaagccccagaatcttaacgacgcctacgggcccccatccaacttcctggagattgatgtatccaatcctcagactgtgggcgtgggaagaggccggttcactacctacgaaattcgggtgaaagtggtggtcccccccctgcccggaaaggcattcctccgccagctaccctttagaggggacgatgggatttttgatgacaacttcatcgaggaaagaaagcagggtcttgagcaattcataaacaaagtcgccgggcatcctctcgcccaaaacgaacgttgtcttcacatgttcctgcaggatgagattattgataagtcatacacccctagcaaaattcgacatgcatag

SEQ ID NO: 244799 - DNA, 393 bp, Artificial Sequence
  derived and/or modified sequence
atggccgagactgttgcggacacccgaaggctaataaccaagccccagaacttaaatgacgcgtatggaccaccctcaaacttccttgagattgatgtgtctaacccacagactgtaggagtcggccgaggaagatttacgacctacgaaataagggtgaaagttgtcgtgcctccactgcccggaaaggctttcttgcggcagctgccctttagaggggatgatggaatcttcgatgacaattttatagaagaaagaaaacagggcctggaacagtttatcaataaagtggccggtcacccactggcccagaatgagagatgcctgcacatgtttctccaggacgaaattatcgacaaatcctacactccctctaagatccgacacgcttag

SEQ ID NO: 244800 - DNA, 1072 bp, Artificial Sequence
  derived and/or modified sequence
gggggcggagggagcccgcggcggcggcagcagctacagcgaaatggcggagaccgtggctgacacccggcggctgatcaccaagccgcagaacctgaatgacgcctacggaccccccagcaacttcctcgagatcgatgtgagcaacccgcaaacggtgggggtcggccggggccgcttcaccacttacgaaatcagggtcaaggtcgtagttcccccgctccctgggaaagcgtttttgcgtcagcttccttttagaggagatgatggaatatttgatgacaattttattgaggaaagaaaacaagggctggagcagtttataaacaaggtcgctggtcatcctctggcacagaacgaacgttgtcttcacatgtttttacaagatgaaataatagataaaagctatactccatctaaaataagacatgcctgaaatttggcaagaaggggcaaaaacgtgactattaatgattgataagcaccagtgaagaagttctaacttttagcatgctgcacagaaactggtataacatgccttcagtatactaacactcatatgctcagttttgttttgttttggcagttgacaagaagttaatttgctttagtaaaaatccctcattccagcctttctatataaatagctctttcttgctgttttaatgtggtgcacactatagcctcacaaacctgttattccagtgtaatctgcagtgtcgtaactaaagttactggcttggtcttatttgcacagtttttgcgtcttgtttgcttcttgcatctgattaactagaatatttctctttcccccttttaatttgtgatgtcacttgaccccatttatgtgtaggagcactacaccattggtttccaatactgcacacataagatacatacttgtgtgcagaaagtatcttcctccaggcttgtaatacccttcacatggaagattaatgagggaaatctttatattctgtataaaaacaaaagcaaatttatatactaaaatcatttgtctaaaaatttaagttgttttcaaataaaaattaaaatgcatttctgatatgca

SEQ ID NO: 244801 - DNA, 1239 bp, Artificial Sequence
  derived and/or modified sequence
atgggcctgggccacgagcagggcttcggcgccccctgcctgaagtgcaaggagaagtgcgagggcttcgagctgcacttctggagaaagatctgcagaaactgcaagtgcggccaggaggagcacgacgtgctgctgagcaacgaggaggacagaaaggtgggcaagctgttcgaggacaccaagtacaccaccctgatcgccaagctgaagagcgacggcatccccatgtacaagagaaacgtgatgatcctgaccaaccccgtggccgccaagaagaacgtgagcatcaacaccgtgacctacgagtgggccccccccgtgcagaaccaggccctggccagacagtacatgcagatgctgcccaaggagaagcagcccgtggccggcagcgagggcgcccagtacagaaagaagcagctggccaagcagctgcccgcccacgaccaggaccccagcaagtgccacgagctgagccccagagaggtgaaggagatggagcagttcgtgaagaagtacaagagcgaggccctgggcgtgggcgacgtgaagctgccctgcgagatggacgcccagggccccaagcagatgaacatccccggcggcgacagaagcacccccgccgccgtgggcgccatggaggacaagagcgccgagcacaagagaacccagtacagctgctactgctgcaagctgagcatgaaggagggcgaccccgccatctacgccgagagagccggctacgacaagctgtggcaccccgcctgcttcgtgtgcagcacctgccacgagctgctggtggacatgatctacttctggaagaacgagaagctgtactgcggcagacactactgcgacagcgagaagcccagatgcgccggctgcgacgagctgatcttcagcaacgagtacacccaggccgagaaccagaactggcacctgaagcacttctgctgcttcgactgcgacagcatcctggccggcgagatctacgtgatggtgaacgacaagcccgtgtgcaagccctgctacgtgaagaaccacgccgtggtgtgccagggctgccacaacgccatcgaccccgaggtgcagagagtgacctacaacaacttcagctggcacgccagcaccgagtgcttcctgtgcagctgctgcagcaagtgcctgatcggccagaagttcatgcccgtggagggcatggtgttctgcagcgtggagtgcaagaagagaatgagctag

SEQ ID NO: 244802 - DNA, 1239 bp, Artificial Sequence
  derived and/or modified sequence
atggggcttggacatgaacagggctttggagccccctgtctaaagtgcaaggaaaagtgtgaagggtttgagctgcatttctggaggaagatttgccggaactgcaaatgtggtcaggaggagcacgatgtcctgctcagcaacgaggaggaccgaaaggtcggaaagctgttcgaggacaccaaatataccactctgatcgccaagctgaaaagtgacggcattccgatgtacaagaggaacgtgatgatcctcacgaaccccgtggcagcaaagaaaaatgtctcaatcaatacagtcacatacgaatgggcaccacccgtacaaaatcaggccctggccaggcaatatatgcagatgttacctaaggaaaaacagccagtcgctggctctgagggagcccaatacaggaagaagcagctggccaaacagctcccagcccacgaccaggatccatctaagtgccacgagctgtcacctcgggaggtgaaggagatggaacagttcgtcaagaaatacaagtctgaggccttaggggtgggtgatgtcaagcttccatgtgagatggatgcgcaggggcccaaacagatgaatatcccaggtggagacaggagcaccccagcagccgtgggggccatggaggataaatcagccgagcacaaacgaacacagtattcttgctattgctgcaaattaagcatgaaggagggagacccagctatctacgctgaacgggctgggtatgataaattgtggcaccccgcatgctttgtgtgtagcacctgccacgagttgctagttgacatgatctatttttggaaaaacgaaaaactctactgcggtagacactattgcgactccgaaaagccacgatgtgcaggatgcgacgagttaatcttctcaaatgagtacactcaagcggagaatcagaattggcatctgaaacacttctgttgtttcgactgcgattcaatactcgccggtgagatctatgtgatggttaacgacaaacctgtctgcaaaccttgttacgttaaaaatcacgcagtggtgtgtcaggggtgtcacaacgcgattgaccctgaggttcagcgcgttacctacaataatttctcttggcacgccagcaccgagtgttttctctgcagctgctgctcgaagtgcctgattggccagaagtttatgccagttgagggtatggtgttttgttctgtcgaatgcaagaaacgaatgagttag

SEQ ID NO: 244803 - DNA, 1239 bp, Artificial Sequence
  derived and/or modified sequence
atgggcctgggccacgagcagggctttggagccccctgcctgaagtgcaaggagaagtgtgagggctttgagctgcacttctggaggaagatctgcaggaactgcaagtgtggccaggaggagcatgatgtgctgctgagcaatgaggaggacaggaaggtgggcaagctgtttgaggacaccaagtacaccaccctgattgccaagctgaagagtgatggcatccccatgtacaagagaaatgtgatgatcctgaccaaccctgtggccgccaagaagaatgtgtccatcaacacagtgacctatgagtgggcccctcctgtgcagaaccaggccctggcccggcagtacatgcagatgctgcccaaggagaagcagcctgtggccggcagcgagggcgcccagtacaggaagaagcagctggccaagcagctgcctgcccatgaccaggaccccagcaagtgccacgagctgagcccccgggaggtgaaggagatggagcagtttgtgaagaagtacaagtctgaggccctgggcgtgggagatgtgaagctgccctgtgagatggatgcccagggccccaagcagatgaacatccctggaggagacaggagcaccccagctgctgtgggcgccatggaggacaagtctgctgagcacaagaggacccagtacagctgctactgctgcaagctgtccatgaaggagggggaccctgccatctatgcagagcgggccggctatgacaagctgtggcacccagcctgctttgtgtgcagcacctgccacgagctgctggtggacatgatctacttctggaagaatgagaagctgtactgcggccgccactactgtgacagcgagaagccccgctgtgccggctgtgatgagctgatcttcagcaatgagtacacccaggccgagaaccagaactggcacctgaagcacttctgctgctttgactgtgacagcatcctggccggggagatctacgtgatggtgaatgacaagcctgtgtgcaagccctgctacgtgaagaaccacgctgtggtgtgccagggctgccacaatgccattgatcctgaggtgcagagggtgacctacaacaacttctcctggcacgccagcacagagtgcttcctgtgcagctgctgcagcaaatgtctcatcggccagaagttcatgcctgtggagggcatggtgttctgcagcgtggagtgcaagaagaggatgtcctag

SEQ ID NO: 244804 - DNA, 1239 bp, Artificial Sequence
  derived and/or modified sequence
atgggcctgggccacgagcagggcttcggcgccccctgcctgaagtgtaaggagaaatgtgaaggattcgagcttcacttttggcgcaaaatttgtcggaattgtaagtgcgggcaagaggaacacgatgttttgctatccaatgaagaggatcggaaagtgggtaagctgttcgaagacacaaagtacacaacccttatcgcaaagcttaagagcgacgggattcctatgtacaaaagaaatgttatgatactgaccaaccccgtggcggccaaaaaaaatgtctcgattaatacagtgacgtacgagtgggctccccccgtccagaaccaggccctggcccggcagtacatgcagatgctgcccaaggaaaaacagccagtggcaggatcagagggcgctcagtacaggaagaaacaactggctaagcagcttccagcccacgaccaggatccttctaaatgccacgaactctcacctcgcgaggtcaaggaaatggagcagtttgtgaagaagtacaagtctgaggcattgggcgtgggcgacgtaaagctgccttgcgaaatggacgcgcaaggacccaagcagatgaacatcccagggggcgacagatccacacccgcagcagtgggcgccatggaggacaagagcgcggagcataaaaggacccaatactcttgctactgctgcaagctgagcatgaaggagggcgacccggccatttacgccgaacgcgcaggttacgataaactttggcatcctgcctgctttgtttgttccacttgccacgagctgcttgtagacatgatctacttttggaagaacgagaaattgtactgtggccgacattactgtgattccgagaaacccaggtgcgcaggctgcgacgaactcatcttctcaaacgagtacacacaggcggagaatcagaattggcatctgaaacacttctgctgtttcgactgtgattctattttagctggggaaatttacgttatggtgaacgataagccagtgtgcaaaccgtgttacgtgaagaaccatgccgtggtctgccaaggttgtcataacgccattgaccctgaggtacagagagtcacctataacaacttctcatggcacgcctctaccgagtgcttcctgtgctcatgttgtagcaaatgcctgatcggccagaaattcatgcctgtggaaggcatggtgttctgtagcgtggagtgtaagaaaaggatgagctag

SEQ ID NO: 244805 - DNA, 1239 bp, Artificial Sequence
  derived and/or modified sequence
atggggctggggcatgagcagggctttggcgctccatgcctgaagtgtaaagaaaagtgcgagggattcgaattacatttctggcggaaaatttgtcggaactgtaaatgcggccaggaagaacatgacgttttgttgtctaatgaggaagatagaaaagttggcaagctgttcgaggacaccaagtacacgaccttaatagcgaaattaaaatccgatgggattccaatgtacaaaaggaacgtaatgattcttaccaacccagtggccgctaagaaaaatgtcagtataaatactgtcacctatgagtgggccccaccggtccagaaccaggcattggccagacagtacatgcagatgctgcccaaagagaagcaaccggtggctgggtccgagggagcacagtatcggaaaaagcagctggccaagcagttgccagcacacgatcaggatcccagcaagtgtcatgaactctcgccacgagaggtgaaggagatggagcagttcgtcaagaagtacaagtccgaggctctgggagtcggagacgtgaagttaccttgtgagatggacgcccagggcccaaaacaaatgaacataccgggtggggatcgttccacacccgcagccgttggtgctatggaagacaaaagcgccgagcataaacggacccagtacagctgctactgctgtaaacttagcatgaaggaaggggatcctgctatttacgccgaacgagccggttacgataaactgtggcacccggcttgtttcgtctgctctacctgccacgagctgttggttgatatgatttatttctggaagaatgaaaagctgtattgcggacgccactattgcgactcagagaaacctaggtgcgccggatgtgatgagcttatttttagcaatgagtacacccaggcagaaaatcagaattggcatctgaaacatttctgttgctttgattgcgatagtattctcgccggtgagatttatgtgatggtaaatgacaagcctgtgtgtaaaccctgctacgtgaaaaatcacgccgtcgtgtgtcagggctgtcataacgccatcgaccccgaagtgcaacgggttacgtataataatttctcctggcatgcctcaacggaatgcttcctgtgttcctgctgttccaagtgtctgatcgggcagaagtttatgcctgtggaaggtatggtgttctgcagtgtcgaatgtaaaaaaaggatgagctag

SEQ ID NO: 244806 - DNA, 2763 bp, Artificial Sequence
  derived and/or modified sequence
aataaataggaggttttgagggctgtttatgagcgcattccattacagtgtctttcagcggagccagagctcagccaatcctaattaagaagcaatttcagctgcagtcattgcttattataataattgtgacatttttatagccctacattgtctttctcaaagtaacggattcaggaggagtccttttctgagtagagtccacagaagaggtattctattgatgggcttaggtcacgagcaaggatttggagccccttgtttaaaatgcaaagaaaaatgtgaaggattcgaactgcacttctggagaaaaatatgtcgtaactgcaagtgtggccaagaagagcatgatgtcctcttgagcaatgaagaggatcgaaaagtgggaaaactttttgaagacaccaagtataccactctgattgcaaaactaaagtcagatggaattcccatgtataaacgcaatgttatgatattgacgaatccagttgctgccaagaagaatgtctccatcaatacagttacctatgagtgggctcctcctgtccagaatcaagcattggccaggcagtacatgcagatgctacccaaggaaaagcagccagtagcaggctcagagggggcacagtaccggaagaagcagctggcaaagcagctccctgcacatgaccaggacccttcaaagtgccatgagttgtctcccagagaggtgaaggagatggagcagtttgtgaagaaatataagagcgaagctctgggagtaggagatgtcaaacttccctgtgagatggatgcccaaggccccaaacaaatgaacattcctggaggggatagaagcaccccagcagcagtgggggccatggaggacaaatctgctgagcacaaaagaactcaatattcctgctattgctgcaaactgagtatgaaagaaggtgacccagccatctatgccgaaagggctggctatgataaactgtggcacccagcttgttttgtctgcagcacctgccatgaactcctggttgacatgatttatttttggaagaatgagaagctatactgtggcagacattactgtgacagcgagaaaccccgatgtgctggctgtgacgagctgatattcagcaatgagtatacccaggcagaaaaccagaattggcacctgaaacacttctgctgctttgactgtgatagcattctagctggggagatatacgtgatggtcaatgacaagcccgtgtgcaagccctgctatgtgaagaatcacgctgtggtgtgtcaaggatgccacaatgccatcgacccagaagtgcagcgggtgacctataacaatttcagctggcatgcatccacagagtgctttctgtgctcttgctgcagcaaatgcctcattgggcagaagttcatgccagtagaagggatggttttctgttcagtggaatgtaagaagaggatgtcttaggaggagggcacccagaagtatcgagccatagctatccaaagtggtctgcatttctactgtaaaatgcaatttgaaaaaaataaaacgcaaaaaaagaaactgtaaaggaaaccaagagattttgtttaatttttttggccattttttcttcatcaattttttttcggtctcaacttttaaacttggtttaagcatttgatttgtaaaacagtaaataattgtatctttccatagcttttcaaatgtgaaatcatttttggaagcttggatctcattaaacttcatgtctctattccatttgtgccacacacttaaaagttagtgtactgaatggaaagatgagcattcctagttctacacttcttttttccccctcatgtgtaaaatgaaaagaaaactaaatttgccctaataccaaggcgctacgtttattgcctcgtcttattcactgacctttgtaatgatacacagtgaattctttttgacaaagagaaatgcagtgtagtatgcagagctgctgttttaatgcctatgcatttactctttcctgatttaggcagaggtggcattttctttattgcatttctctatttttttaatgtaccctaccttcagtattctctttgtaagttggtgacttgcatctgtggccttgaatattttattatcacatgtggcataacagtatccacactttttagttctttatttttttttttttattttgagcaattctcctgcctcagcctcccaaatagctgggattacaggtgcatgccaccacacccagctaatttttgtatttttagtagagacaggttttcaccatgttagccaggctggtctcaaactcctgacctcagatgatccgcctgccttggcctcccaaagtgctgggattacaggtgtgggagccaccatgcctgacccacacactttttacttgtatagatgatttttggcttggacataaaagccaagccacccatttgcttttaatccaaagaacatgtatagtttttgtacccagagactatgatttatattgattgcacttgcctgccatgatttagataagattttttttgcatggtttttattctttcctaatggatcctgttttataatacttccaagcctgtccatggatatatcaaatgtcttcacttgtatattttcatggctaggtatttctaatgtttattcttccctgtgtacttctacacatagctatgcactatgaaaattaaatggaatgaatgatatgtatattactcaaaataaagtttctttcactttaa

SEQ ID NO: 244807 - protein, 732 aa, Artificial Sequence
  derived and/or modified sequence
MGQGWATAGLPSLLFLLLCYGHPLLVPSQEASQQVTVTHGTSSQATTSSQTTTHQATAHQTSAQSPNLVTDEAEASKFVEEYDRTSQVVWNEYAEANWNYNTNITTETSKILLQKNMQIANHTLKYGTQARKFDVNQLQNTTIKRIIKKVQDLERAALPAQELEEYNKILLDMETTYSVATVCHPNGSCLQLEPDLTNVMATSRKYEDLLWAWEGWRDKAGRAILQFYPKYVELINQAARLNGYVDAGDSWRSMYETPSLEQDLERLFQELQPLYLNLHAYVRRALHRHYGAQHINLEGPIPAHLLGNMWAQTWSNIYDLVVPFPSAPSMDTTEAMLKQGWTPRRMFKEADDFFTSLGLLPVPPEFWNKSMLEKPTDGREVVCHASAWDFYNGKDFRIKQCTTVNLEDLVVAHHEMGHIQYFMQYKDLPVALREGANPGFHEAIGDVLALSVSTPKHLHSLNLLSSEGGSDEHDINFLMKMALDKIAFIPFSYLVDQWRWRVFDGSITKENYNQEWWSLRLKYQGLCPPVPRTQGDFDPGAKFHIPSSVPYIRYFVSFIIQFQFHEALCQAAGHTGPLHKCDIYQSKEAGQRLATAMKLGFSRPWPEAMQLITGQPNMSASAMLSYFKPLLDWLRTENELHGEKLGWPQYNWTPNSARSEGPLPDSGRVSFLGLDLDAQQARVGQWLLLFLGIALLVATLGLSQRLFSIRHRSLHRHSHGPQFGSEVELRHS

SEQ ID NO: 244808 - DNA, 2199 bp, Artificial Sequence
  derived and/or modified sequence
atggggcaggggtgggcaacagctgggcttccttccttgctgttcctgttgctttgctacggccatcccctgctggttccttcccaagaagcctcacagcaggtgaccgtcacacacggaacctcctcacaggcaacgacatcttctcagacaactacccaccaagccaccgcacaccaaacctctgctcagtcccctaatctggtcaccgacgaggctgaggccagcaagtttgttgaggaatacgaccggacctcacaggtggtgtggaatgagtacgcagaagccaattggaattataacacaaacattactaccgaaacatccaaaatcctgttgcagaaaaatatgcagattgccaaccacaccctgaagtacgggactcaggctcgcaaattcgacgttaatcagctgcagaatacgacaatcaagagaataataaaaaaagtccaggatttggaacgagcggctctcccagcccaagagcttgaggaatataacaagattttgctggatatggaaactacctactctgtagccacagtgtgccaccccaatggatcatgcctgcagctggaacctgatctcactaatgttatggctacgtctcgcaagtatgaggacctattatgggcatgggagggctggagagataaggctggaagagctatcttgcagttttaccctaagtatgttgagctgattaatcaggcagcacggctgaacggttacgtcgatgctggtgattcctggcgttcgatgtacgaaaccccctctttagaacaggatctggagcggctgttccaggaattacagccattatatctcaatctccacgcgtacgtccggcgtgccctacacaggcattatggcgcccagcacatcaacttagaaggacctatcccggcacacttgctcggaaacatgtgggcccagacgtggtcaaacatttatgatttggtggttcccttcccaagtgcgccctccatggatacgactgaggccatgctgaaacagggctggacacctaggagaatgtttaaagaagcagatgatttcttcactagtttgggactgctacccgtaccccctgagttttggaacaagtctatgctggaaaagccaacagatgggcgggaggtagtgtgccacgccagcgcctgggacttctacaacgggaaagacttccgaataaaacagtgtaccaccgtaaacttggaggacctggttgtggcacaccatgagatgggacatattcagtactttatgcagtacaaagacctgcctgtggcactgcgggagggtgccaatcccgggtttcacgaagccattggcgacgtgttggccctcagtgtgagcaccccaaaacacctccactccttaaacttactcagttcagaaggcggctctgacgaacacgatataaatttcctgatgaagatggctctagacaaaatagctttcataccctttagctacttagtggatcagtggagatggcgggtctttgacggcagtattaccaaggagaattataaccaggaatggtggagcctcagactcaagtaccaaggactttgtcctccagtccctcgtactcagggggacttcgatccaggagctaaatttcatataccttcttccgtcccatatatccgttattttgtgtcctttattatacagttccaattccacgaggccctttgccaagctgccggccatacaggccccttgcacaaatgcgatatataccagtcaaaagaggccgggcagcggcttgctaccgcgatgaagttaggcttctctaggccctggcctgaggcaatgcagctgattacgggtcagcccaacatgagcgccagtgccatgctgagctattttaagccacttctggactggctgaggactgagaatgagcttcacggtgagaagctgggctggccacaatataattggactcctaattccgcgcgcagcgagggcccgctgccagactccggtcgcgtcagttttctgggactggacctcgatgcccagcaagcacgagtcggccagtggcttttgctgtttctcggcatcgcgctccttgttgcgaccctcgggctatcccagcggctcttttccatccgtcaccggtccctgcacagacactcccatggaccccaatttggatctgaagtggagttgcgccacagctag

SEQ ID NO: 244809 - DNA, 2199 bp, Artificial Sequence
  derived and/or modified sequence
atgggccagggctgggccacagctggcctgcccagcctgctcttcctgctgctgtgctacggccaccccctgctggtgcccagccaggaggccagccagcaggtgacagtgacccacggcaccagcagccaggccaccaccagcagccagaccaccacccaccaggccacagcccaccagaccagcgcccagagccccaacctggtgacagatgaagctgaggccagcaagtttgtggaggagtatgacaggaccagccaggtggtgtggaatgaatatgcagaggccaactggaactacaacaccaacatcaccacagagaccagcaagatcctgctgcagaagaacatgcagatcgccaaccacaccctgaagtatggcacccaggccaggaagtttgatgtgaaccagctgcagaacaccaccatcaagaggatcatcaagaaggtgcaggacctggagcgggccgccctgcctgcccaggagctggaggagtacaacaagatcctgctggacatggagaccacctacagcgtggccaccgtgtgccaccccaacggcagctgcctgcagctggagccagacctgaccaacgtgatggccaccagcaggaaatatgaggacctgctgtgggcctgggagggctggagggacaaggccggccgggccatcctgcagttctaccccaagtatgtggagctgatcaaccaggccgcccggctgaatggctacgtggatgctggggacagctggaggtccatgtatgagacccccagcctggagcaggacctggagcggctcttccaggagctgcagcccctgtacctgaacctgcacgcctacgtgagaagagccctgcaccgccactacggggcccagcacatcaacctggagggccccatcccagcccacctgctgggcaacatgtgggcccagacctggagcaacatctatgacctggtggtgcccttccccagcgcccccagcatggacaccacagaggccatgctgaagcagggctggacccccaggaggatgttcaaggaggctgatgacttcttcaccagcctgggcctgctgcctgtgcccccagagttctggaacaagtccatgctggagaagcccacagatggccgggaggtggtgtgccacgccagcgcctgggacttctacaacgggaaggacttccgcatcaagcagtgcaccaccgtgaacctggaggacctggtggtggcccaccacgagatgggccacatccagtacttcatgcagtacaaggacctgcctgtggccctgcgggagggcgccaaccctggcttccacgaggccatcggagatgtgctggccctgtctgtgtccacccccaagcacctgcacagcctgaacctgctgagcagcgagggcggcagtgatgaacatgacatcaacttcctgatgaagatggccctggacaagatcgccttcatccccttctcctacctggtggaccagtggcgctggagggtgtttgatggcagcatcaccaaggagaactacaaccaggagtggtggagcctgcggctgaagtaccagggcctgtgcccccctgtgcccaggacccagggcgactttgatcctggggccaagttccacatccccagctctgtgccctacatccgctactttgtgtccttcatcatccagttccagttccacgaggccctgtgccaggccgccggccacacaggccccctgcacaagtgtgacatctaccagagcaaggaggccggccagaggctggccacagccatgaagctgggcttcagccggccctggccagaggccatgcagctgatcaccggccagcccaacatgtctgccagcgccatgctgagctacttcaagcccctgctggactggctgaggacagaaaatgagctgcatggagagaagctgggctggccccagtacaactggacccccaacagcgcccggtctgagggccccctgcctgacagcggccgggtgtccttcctgggcctggacctggatgcccagcaggcccgggtgggccagtggctgctgctcttcctgggcatcgccctgctggtggccaccctgggcctgagccagaggctcttcagcatccgccacaggagcctgcaccgccacagccacggcccccagtttggaagtgaggtggagctgcggcacagctag

SEQ ID NO: 244810 - DNA, 2199 bp, Artificial Sequence
  derived and/or modified sequence
atgggccagggctgggccaccgccggcctgcccagcctgctgttccttttactctgttatggccaccctctgcttgtaccaagccaggaagcttcgcaacaggtcaccgtcacacacggcacatcttcccaggccaccaccagttcgcaaactaccacacatcaggctactgcccaccagacctctgctcaaagtcctaacctcgtgacggacgaggccgaagccagtaagttcgtggaggaatatgacagaacttctcaggtcgtctggaatgagtacgctgaggctaactggaactataacaccaatatcactacagaaacaagtaagattctgctgcaaaagaatatgcagatcgcgaatcacactctcaagtatggaacacaggccaggaaattcgacgtgaaccagttgcagaacaccaccatcaaaagaatcatcaagaaggtccaggacctggagcgtgccgcactccctgcacaagagttggaggaatacaataagattcttctcgacatggagacaacatacagcgtggctaccgtgtgccacccaaatgggagttgtctgcaattagagcccgatctgaccaatgtaatggccacatctaggaagtatgaggatctgctgtgggcctgggaggggtggagagacaaagccggccgcgccatcttacagttctatccaaaatatgtggaacttatcaaccaggctgctagactgaacggttacgtggatgctggggactcgtggcgcagcatgtatgaaacaccctccctggaacaggatctggaacggctgttccaggagctccagcctctctacctcaatctccatgcttatgttcgcagagcgctccataggcactatggagctcaacatattaatctggaaggcccaatccctgcccacctcttaggaaacatgtgggctcaaacctggtctaacatttacgacctggtggtcccattcccttcagccccatccatggacaccacagaggccatgttaaaacagggctggacacctaggaggatgtttaaggaagccgacgatttctttacctctctggggttgctccccgtgccccctgagttctggaacaagtcaatgctggaaaagccaaccgatggtcgggaggtggtctgccacgcgtctgcttgggacttttataacggaaaagacttccgcatcaagcagtgcacaactgtcaatctcgaagatctcgtggttgcccaccatgagatggggcacattcagtatttcatgcagtacaaagacctgccagtcgccctcagagagggggctaatccaggctttcatgaagctataggggatgttttggcactgagcgtttccaccccaaagcatctgcactctctgaatctgctgtcgtccgagggcggctccgatgaacatgacatcaatttcctgatgaagatggccctggacaaaattgcttttatcccgttctcctatctggttgaccaatggagatggagggtcttcgacggcagcattacaaaggagaattacaaccaagaatggtggtccctacgtttaaagtatcagggtctgtgccccccagtaccgcggacccaaggggattttgaccccggtgccaaattccacatcccttcttctgttccttacattagatacttcgtgtctttcatcatccaattccagtttcatgaagcattgtgtcaggccgctggtcacaccggtcctcttcacaagtgcgatatctaccagtccaaagaagcaggacagcggttggccacagcaatgaaattagggttctcccggccatggccagaagcaatgcagctgataaccgggcagccaaatatgtccgcatccgctatgcttagttattttaagccattgctggactggttgcggacagaaaacgagctccatggtgaaaagttgggatggccccagtacaactggactccaaatagcgcccgctcagagggtccactgccagatagcgggcgcgtgtcattcctggggcttgaccttgatgcccagcaagctagggtgggacagtggctcctcttgttcctgggaatcgctctcttggtagccacactggggctctctcagagactgttcagtattcgtcatagaagcctgcacagacattcacacgggccacaattcggaagcgaagtggaattaaggcacagctag

SEQ ID NO: 244811 - DNA, 2503 bp, Artificial Sequence
  derived and/or modified sequence
cgctcttattggccaggggacggtagctgcaggactctgctctcctgcggccatgggccagggttgggctactgcaggacttcccagcctcctcttcctgctgctctgctacgggcaccctctgctggtccccagccaggaggcatcccaacaggtgacagtcacccatgggacaagcagccaggcaacaaccagcagccagacaaccacccaccaggcgacggcccaccagacatcagcccagagcccaaacctggtgactgatgaggctgaggccagcaagtttgtggaggaatatgaccggacatcccaggtggtgtggaacgagtatgccgaggccaactggaactacaacaccaacatcaccacagagaccagcaagattctgctgcagaagaacatgcaaatagccaaccacaccctgaagtacggcacccaggccaggaagtttgatgtgaaccagttgcagaacaccactatcaagcggatcataaagaaggttcaggacctagaacgggcagcactgcctgcccaggagctggaggagtacaacaagatcctgttggatatggaaaccacctacagcgtggccactgtgtgccacccgaatggcagctgcctgcagctcgagccagatctgacgaatgtgatggccacgtcccggaaatatgaagacctgttatgggcatgggagggctggcgagacaaggcggggagagccatcctccagttttacccgaaatacgtggaactcatcaaccaggctgcccggctcaatggctatgtagatgcaggggactcgtggaggtctatgtacgagacaccatccctggagcaagacctggagcggctcttccaggagctgcagccactctacctcaacctgcatgcctacgtgcgccgggccctgcaccgtcactacggggcccagcacatcaacctggaggggcccattcctgctcacctgctggggaacatgtgggcgcagacctggtccaacatctatgacttggtggtgcccttcccttcagccccctcgatggacaccacagaggctatgctaaagcagggctggacgcccaggaggatgtttaaggaggctgatgatttcttcacctccctggggctgctgcccgtgcctcctgagttctggaacaagtcgatgctggagaagccaaccgacgggcgggaggtggtctgccacgcctcggcctgggacttctacaacggcaaggacttccggatcaagcagtgcaccaccgtgaacttggaggacctggtggtggcccaccacgaaatgggccacatccagtatttcatgcagtacaaagacttacctgtggccttgagggagggtgccaaccccggcttccatgaggccattggggacgtgctagccctctcagtgtctacgcccaagcacctgcacagtctcaacctgctgagcagtgagggtggcagcgacgagcatgacatcaactttctgatgaagatggcccttgacaagatcgcctttatccccttcagctacctcgtcgatcagtggcgctggagggtatttgatggaagcatcaccaaggagaactataaccaggagtggtggagcctcaggctgaagtaccagggcctctgccccccagtgcccaggactcaaggtgactttgacccaggggccaagttccacattccttctagcgtgccttacatcaggtactttgtcagcttcatcatccagttccagttccacgaggcactgtgccaggcagctggccacacgggccccctgcacaagtgtgacatctaccagtccaaggaggccgggcagcgcctggcgaccgccatgaagctgggcttcagtaggccgtggccggaagccatgcagctgatcacgggccagcccaacatgagcgcctcggccatgttgagctacttcaagccgctgctggactggctccgcacggagaacgagctgcatggggagaagctgggctggccgcagtacaactggacgccgaactccgctcgctcagaagggcccctcccagacagcggccgcgtcagcttcctgggcctggacctggatgcgcagcaggcccgcgtgggccagtggctgctgctcttcctgggcatcgccctgctggtagccaccctgggcctcagccagcggctcttcagcatccgccaccgcagcctccaccggcactcccacgggccccagttcggctccgaggtggagctgagacactcctgaggtgacccggctgggtcggccctgcccaagggcctcccaccagagactgggatgggaacactggtgggcagctgaggacacaccccacaccccagcccaccctgctcctcctgccctgtccctgtccccctcccctcccagtcctccagaccaccagccgccccagccccttctcccagcacacggctgcctgacactgagccccacctctccaagtctctctgtgaatacaattaaaggtcctgccctccc

SEQ ID NO: 244812 - DNA, 2199 bp, Artificial Sequence
  derived and/or modified sequence
atgggccagggatgggccacagcaggactcccttctctgctgttcctactgctgtgctacggccacccgctgttggtgccaagtcaggaggcctcccagcaggtgactgtcacccacgggacctcaagccaagctaccacgtccagtcagaccacgacacaccaggcaacagcccaccaaacgagcgcccagtcgcctaacctcgtgacggacgaggccgaggctagtaagtttgtcgaggaatatgacaggacttctcaggtcgtgtggaatgagtatgcggaagctaattggaattacaatactaacatcacaaccgagacctccaagatcttgcttcagaaaaacatgcagatcgcgaatcacacgctgaagtacggcacacaggccagaaagtttgacgtgaatcagctccagaatacaacaattaagagaattatcaaaaaggtccaagatctcgaaagggcagctctgcctgcacaggaactggaggagtacaacaagatactgctggacatggaaaccacatattcggttgccaccgtttgccatcccaacgggtcttgcttacagctcgagccagatctcactaatgtgatggccacttctaggaagtacgaagatctcctttgggcttgggagggttggcgtgacaaagccggaagggccatcctgcaattttatcccaaatacgtggagctcataaatcaggcggcaagactcaacggttacgtcgacgctggtgactcttggcggtcgatgtacgaaactccgtcacttgaacaggatctggaacgcctgttccaggaactccagcccctatacctgaacctccacgcgtacgtaagaagggctttgcatcgccattacggagcccagcatatcaacctcgaaggcccaataccggctcacctgctagggaacatgtgggcccaaacttggagcaacatctacgacctggtcgtgcccttcccaagcgcccctagcatggacacgaccgaggcgatgctgaaacaggggtggaccccacggagaatgttcaaggaagcagatgatttcttcacctcgctgggcttgctccctgtcccacccgagttttggaacaagtctatgttagagaaacctaccgatggacgcgaggtcgtgtgtcatgcctcagcttgggatttttacaatggtaaggacttccggattaagcagtgcacgactgtgaatctcgaagatctggtggtggcccaccacgagatgggccacattcaatacttcatgcaatataaagacctgccagtggccctgagagagggtgccaacccgggatttcatgaggctattggagacgttttggcgctcagcgtcagcacacctaagcacctccactccctcaacctgctgagttccgagggtggatctgatgaacatgatatcaatttccttatgaaaatggccctggacaaaatcgcttttattcctttctcatacctggtggaccaatggcgatggagggtgttcgacggaagtatcactaaggagaactacaatcaggagtggtggtcccttcgactgaaatatcagggcctgtgtccgccagtcccacggactcagggagactttgacccaggagcaaagttccatattcctagttccgttccgtatattaggtatttcgtgtccttcatcatacagttccagtttcacgaagccttgtgccaggccgctggccacacgggtccgctgcacaagtgcgatatttatcagtccaaagaagctggccagaggctcgccactgctatgaagttaggctttagccgcccatggcctgaggcgatgcagctgatcacaggtcagcccaatatgtccgctagtgcaatgttaagttacttcaaacccttgctggactggctgaggaccgagaatgagctgcatggagagaaactggggtggcctcagtataactggacacccaacagtgcgcgttcggagggcccactgccagactccggccgtgtcagttttctggggttggatcttgacgcccaacaagctcgcgtcgggcagtggctgttgctttttctggggatagcattactggtggccaccctaggtttgagccagagactgttttcgattagacacaggtcactgcatagacactctcatggcccacaatttggaagcgaggtcgagctgcgacacagttag

SEQ ID NO: 244813 - DNA, 2199 bp, Artificial Sequence
  derived and/or modified sequence
atgggccagggctgggccaccgccggcctgcccagcctgctgttcctgctgctgtgctacggccaccccctgctggtgcccagccaggaggccagccagcaggtgaccgtgacccacggcaccagcagccaggccaccaccagcagccagaccaccacccaccaggccaccgcccaccagaccagcgcccagagccccaacctggtgaccgacgaggccgaggccagcaagttcgtggaggagtacgacagaaccagccaggtggtgtggaacgagtacgccgaggccaactggaactacaacaccaacatcaccaccgagaccagcaagatcctgctgcagaagaacatgcagatcgccaaccacaccctgaagtacggcacccaggccagaaagttcgacgtgaaccagctgcagaacaccaccatcaagagaatcatcaagaaggtgcaggacctggagagagccgccctgcccgcccaggagctggaggagtacaacaagatcctgctggacatggagaccacctacagcgtggccaccgtgtgccaccccaacggcagctgcctgcagctggagcccgacctgaccaacgtgatggccaccagcagaaagtacgaggacctgctgtgggcctgggagggctggagagacaaggccggcagagccatcctgcagttctaccccaagtacgtggagctgatcaaccaggccgccagactgaacggctacgtggacgccggcgacagctggagaagcatgtacgagacccccagcctggagcaggacctggagagactgttccaggagctgcagcccctgtacctgaacctgcacgcctacgtgagaagagccctgcacagacactacggcgcccagcacatcaacctggagggccccatccccgcccacctgctgggcaacatgtgggcccagacctggagcaacatctacgacctggtggtgcccttccccagcgcccccagcatggacaccaccgaggccatgctgaagcagggctggacccccagaagaatgttcaaggaggccgacgacttcttcaccagcctgggcctgctgcccgtgccccccgagttctggaacaagagcatgctggagaagcccaccgacggcagagaggtggtgtgccacgccagcgcctgggacttctacaacggcaaggacttcagaatcaagcagtgcaccaccgtgaacctggaggacctggtggtggcccaccacgagatgggccacatccagtacttcatgcagtacaaggacctgcccgtggccctgagagagggcgccaaccccggcttccacgaggccatcggcgacgtgctggccctgagcgtgagcacccccaagcacctgcacagcctgaacctgctgagcagcgagggcggcagcgacgagcacgacatcaacttcctgatgaagatggccctggacaagatcgccttcatccccttcagctacctggtggaccagtggagatggagagtgttcgacggcagcatcaccaaggagaactacaaccaggagtggtggagcctgagactgaagtaccagggcctgtgcccccccgtgcccagaacccagggcgacttcgaccccggcgccaagttccacatccccagcagcgtgccctacatcagatacttcgtgagcttcatcatccagttccagttccacgaggccctgtgccaggccgccggccacaccggccccctgcacaagtgcgacatctaccagagcaaggaggccggccagagactggccaccgccatgaagctgggcttcagcagaccctggcccgaggccatgcagctgatcaccggccagcccaacatgagcgccagcgccatgctgagctacttcaagcccctgctggactggctgagaaccgagaacgagctgcacggcgagaagctgggctggccccagtacaactggacccccaacagcgccagaagcgagggccccctgcccgacagcggcagagtgagcttcctgggcctggacctggacgcccagcaggccagagtgggccagtggctgctgctgttcctgggcatcgccctgctggtggccaccctgggcctgagccagagactgttcagcatcagacacagaagcctgcacagacacagccacggcccccagttcggcagcgaggtggagctgagacacagctag

SEQ ID NO: 244814 - protein, 140 aa, Artificial Sequence
  derived and/or modified sequence
MPSAFSVSSFPVSIPAVLTQTDWTEPWLMGLATFHALCVLLTCLSSRSYRLQIGHFLCLVILVYCAEYINEAAAMNWRLFSKYQYFDSRGMFISIVFSAPLLVNAMIIVVMWVWKTLNVMTDLKNAQERRKEKKRRRKED

SEQ ID NO: 244815 - protein, 127 aa, Artificial Sequence
  derived and/or modified sequence
MLSGYLQTDWTEPWLMGLATFHALCVLLTCLSSRSYRLQIGHFLCLVILVYCAEYINEAAAMNWRLFSKYQYFDSRGMFISIVFSAPLLVNAMIIVVMWVWKTLNVMTDLKNAQERRKEKKRRRKED

SEQ ID NO: 244816 - DNA, 423 bp, Artificial Sequence
  derived and/or modified sequence
atgcccagcgccttcagcgtgagcagcttccccgtgagcatccccgccgtgctgacccagaccgactggaccgagccctggctgatgggcctggccaccttccacgccctgtgcgtgctgctgacctgcctgagcagcagaagctacagactgcagatcggccacttcctgtgcctggtgatcctggtgtactgcgccgagtacatcaacgaggccgccgccatgaactggagactgttcagcaagtaccagtacttcgacagcagaggcatgttcatcagcatcgtgttcagcgcccccctgctggtgaacgccatgatcatcgtggtgatgtgggtgtggaagaccctgaacgtgatgaccgacctgaagaacgcccaggagagaagaaaggagaagaagagaagaagaaaggaggactag

SEQ ID NO: 244817 - DNA, 384 bp, Artificial Sequence
  derived and/or modified sequence
atgctgagcggctacctgcagaccgactggaccgagccctggctgatgggcctggccaccttccacgccctgtgcgtgctgctgacctgcctgagcagcagaagctacagactgcagatcggccacttcctgtgcctggtgatcctggtgtactgcgccgagtacatcaacgaggccgccgccatgaactggagactgttcagcaagtaccagtacttcgacagcagaggcatgttcatcagcatcgtgttcagcgcccccctgctggtgaacgccatgatcatcgtggtgatgtgggtgtggaagaccctgaacgtgatgaccgacctgaagaacgcccaggagagaagaaaggagaagaagagaagaagaaaggaggactag

SEQ ID NO: 244818 - DNA, 423 bp, Artificial Sequence
  derived and/or modified sequence
atgccctccgctttctctgtctctagcttccctgtgtctatccctgctgtgctgactcaaaccgattggacagagccctggctaatgggcctcgctacttttcacgccctgtgcgtgctgcttacatgtttatccagtagatcttaccggctgcagatcggacactttctgtgcctggtcatcctggtttattgcgcagaatatatcaatgaagccgccgcaatgaattggagattgttttccaaataccagtatttcgattcaagaggcatgttcatctccatcgtgttcagtgccccattactcgtcaacgcaatgatcatcgtcgtgatgtgggtctggaagaccctaaatgttatgacagacttgaaaaatgcgcaagagcggcggaaggagaagaaacggcgtcggaaggaggactag

SEQ ID NO: 244819 - DNA, 384 bp, Artificial Sequence
  derived and/or modified sequence
atgctgtcagggtatctacaaaccgattggaccgaaccatggctcatgggcctggctacatttcacgccctctgcgtgctgctcacatgcttatcttctaggagctataggctacagatcgggcatttcctgtgcttggtgatcctggtgtattgcgccgagtatattaacgaggcagcggccatgaactggcgcttgttttcaaaataccagtactttgattccaggggcatgtttatatccattgtgttttctgcccccctgctggtcaacgctatgattattgtggtcatgtgggtatggaagactctcaacgtcatgactgatctgaaaaatgcccaggagcgccgcaaagagaagaaacggcgccggaaagaggactag

SEQ ID NO: 244820 - DNA, 423 bp, Artificial Sequence
  derived and/or modified sequence
atgcccagcgccttctctgtgtcctccttccctgtgtccatcccagctgtgctgacccagacagactggacagagccctggctgatgggcctggccaccttccacgccctgtgtgtgctgctgacctgcctgagcagccgcagctaccgcctgcagatcggccacttcctgtgcctggtgatcctggtgtactgtgccgagtacatcaatgaggccgccgccatgaactggaggctcttcagcaagtaccagtactttgacagccggggcatgttcatcagcatcgtgttcagcgcccccctgctggtgaatgccatgatcatcgtggtgatgtgggtgtggaagaccctgaatgtgatgacagacctgaagaatgcccaggagaggaggaaggagaagaagagaagaagaaaagaagattag

SEQ ID NO: 244821 - DNA, 384 bp, Artificial Sequence
  derived and/or modified sequence
atgctgagcggctacctgcagacagactggacagagccctggctgatgggcctggccaccttccacgccctgtgtgtgctgctgacctgcctgagcagccgcagctaccgcctgcagatcggccacttcctgtgcctggtgatcctggtgtactgtgccgagtacatcaatgaagctgctgccatgaactggaggctcttcagcaagtaccagtactttgacagccggggcatgttcatcagcatcgtgttttctgcccccctgctggtgaatgccatgatcatcgtggtgatgtgggtgtggaagaccctgaatgtgatgacagacctgaagaatgcccaggagaggaggaaggagaagaagagaagaaggaaggaggactag

SEQ ID NO: 244822 - DNA, 423 bp, Artificial Sequence
  derived and/or modified sequence
atgcccagcgccttcagcgtgagcagcttccccgtgagcatccccgctgtgctgacacagactgactggacagaaccctggttaatgggattagctacattccatgcactctgtgttctcttaacatgcctgtcaagtcgttcttacaggctgcagatcggccactttttgtgcctagtgatccttgtatactgcgctgagtatatcaacgaagcagccgctatgaattggagactgttcagcaagtatcagtacttcgacagtaggggcatgttcattagtattgttttctcagccccgctgctggtcaacgccatgatcatagtggttatgtgggtctggaaaactttgaacgtgatgactgatctgaaaaatgcccaggagagacgaaaggagaaaaagagacgccgcaaagaagactag

SEQ ID NO: 244823 - DNA, 384 bp, Artificial Sequence
  derived and/or modified sequence
atgctgagcggctacctgcagaccgactggaccgagccctggctgatggggctggccacatttcatgcactgtgcgtgctgttgacctgtttatcatctcgatcatatcggctgcagattgggcatttcctttgtcttgtcattctggtttactgtgcagaatacatcaatgaggcggcggcaatgaactggcggctgttcagtaaatatcagtattttgatagtaggggtatgttcatttcgatcgtgttctcggccccgctccttgttaacgctatgatcattgtcgttatgtgggtgtggaagaccttgaacgtcatgacggacctcaagaatgcgcaggaacgtcggaaggagaagaagcgccgccgcaaagaggactag

SEQ ID NO: 244824 - DNA, 423 bp, Artificial Sequence
  derived and/or modified sequence
atgccttctgctttctccgtttcttcctttcccgtgtcaattcccgctgtgctgacccagacagactggactgagccctggcttatgggcttggcaacttttcacgccctgtgcgttctgctgacgtgcttaagtagccgcagctaccgcctgcagatcggccactttctgtgtttggtcatcttagtttattgtgcggagtacatcaacgaagcggctgctatgaattggcggctgttctctaaataccaatactttgactctagggggatgtttatctctatagtgttctccgcgccactgttggtgaacgcaatgattatcgtcgtgatgtgggtctggaaaactctcaacgtcatgaccgatctgaaaaatgcgcaggaaaggcgaaaggagaaaaagcggaggaggaaggaggattag

SEQ ID NO: 244825 - DNA, 384 bp, Artificial Sequence
  derived and/or modified sequence
atgcttagtggctatctccagacagactggaccgaaccatggctgatgggcctcgcaacttttcacgccctgtgcgttctgctcacgtgcctgtcatctcgcagttataggctgcagattgggcactttctctgcctggtgatcttggtctactgcgcagaatacattaatgaggcagccgcaatgaactggcggctgttttctaaataccaatattttgacagtcgaggcatgtttatttctattgtcttctccgccccactcctggtcaatgcgatgatcattgtggttatgtgggtgtggaagactctcaatgtgatgacagatctgaagaatgctcaggaacggcgaaaggagaaaaaacgaaggcggaaggaggattag

SEQ ID NO: 244826 - DNA, 2762 bp, Artificial Sequence
  derived and/or modified sequence
ggcagatctcacgagagaggatttggcgccctcctctgtggattctggccaggccgggttcggcggttgctgtgagagcgggcttcccaacaccatgccgtccgccttctctgtcagctctttccccgtcagcatcccagccgtgctcacgcagacggactggactgagccctggctcatggggctggccaccttccacgcgctctgcgtgctcctcacctgcttgtcctcccgaagctacagactacagatcgggcactttctgtgtctagtcatcttagtctactgtgctgaatacatcaatgaggcggctgcgatgaactggagattattttcgaaataccagtatttcgactccagggggatgttcatttctatagtattttcagccccactgctggtgaatgccatgatcattgtggttatgtgggtatggaagactttgaatgtgatgactgacctgaagaatgcacaagagagaagaaaggaaaagaaaaggagaaggaaagaagactgaggggcagcagctgcttggagtttgcgtccttcccgtccacccagtgcagctcccagtgctgcagtgtgcgtggcgtgggcatccttccagctgactcatggtttgaaaaaccgttgttttatttaaatatccacagtggtagggcacacactgaagttggcttttcagccagcactgaatgtatccatcaggacatgcgtcttcaggtgcctgatctttgtagtcaggctgtgggaacggtctctgcagagcttcataactgggaatttgatttgaagaagtccatgtcatatgtgtaactagtactaattataaatataaaatacacaatataaaatatgaaactcaataataaacagtgccacctgtacatgggcaccatgccctcctcctcgtgctgtgttttctagtgcatgccacagttcgcagtagagggtgttttcaccttccaagacatggggcaaagtttggagacacctggttgtcactggagggggtggtgctcctggcttctcctgtggagcccggggtgatgcataaaatcctgtgtgcctgggtcagccgcatcacagacaatgacttgacatgaaatgtcagctgtgctggggcagagagaccttggaaggaagctcttggaaaatacgttgtatctcagtttgatgaaccaattcacaagaggctaggccctctctagcaaagttatgggctgctttactgaaaacagaatggaagccctgaagtcaacactccatggagaagcgtgtctttcctaatgtcctggtgttctgttgatttaggtgcttgggaacacaatgctcccagttctgttaggacaggcatactgttactttgcaatatccactttataaaatagctcctgcccagtggctcttggttcctgtcaaatgtggacctgtagtttaagaatgacaggtggttagagacccagatatttaaaaataggtgttcaataagggaatactgattgtgcattgtatctggatagcatgcctaattgtgcatttctgaaagttaccaattcaaaatgtaattggaacagttatctttgattagacaagcctgggaagagaatgttgaggtgcagagctcaccagccaagttcatgcccctctcgggcctttgtggctgagaagtgggacagaaagatgattaaggtaatgtgtcctccctgtagcattgtccagggccgttgtgtagatatttgacttcactgacagaaaagaaaccagggagtttgtagagactgtgcatttttagtataacattttcaccatctgatatggtttggctttgtgtccccacccaaattgcatctcaaattgtaatccccatgtgtcaagggagggacctgatgggaggtgatgggatcatgggggtggtttcccctatgttgttatcataatagagagggagttctcacaagatctgctggttttaaagacagcagtttcccctgctgtcactgtctctctcctgctgccttgtgaagaaggtgcttgtttctccctctgccatgattgtaagtttcccgaggcctccccggccatgtggaactgagtcaattaaacttcttgtttataaagtaatccaggtctcaggtagtatctttatagcagtgtgagaacagactaattaaacatctatatgttatttggacttaatatggggccgtgtgattgaatctcagtttgcctgtgataaagtagtgtaacagtattgctagctttgcatgaatttgatgctgatgacatgtcagtgtgaaaccatgacgtgtggtctttgattttcattctgcatgtgtgtgtctgtgttttggaacagttatattttggttttgtaaaaacaaccttcactttatttttaactgtgtagtaagtttatattcaatgccttaaagtgcattgttaacaattgtcttgatatgttgtcctcattttagggaaagtcatagaagccaaaatgatcagcagttgagtaatttacgaaagcacaggtgcaatcccactttaaagcactgggggttgcacagagcacactggtttcaggctccataaatgtggatgactcactggagagcttcatctgtttaagtagaacaaatgtttttactctactgataaagtacaggaaaggaggtttgggatcaaaattatttttcacattccaaacctgtgacaccttacgtttatcgattgctatgcaataaaatacatctttaataata

SEQ ID NO: 244827 - DNA, 775 bp, Artificial Sequence
  derived and/or modified sequence
atgctctctggatacttgcagacggactggactgagccctggctcatggggctggccaccttccacgcgctctgcgtgctcctcacctgcttgtcctcccgaagctacagactacagatcgggcactttctgtgtctagtcatcttagtctactgtgctgaatacatcaatgaggcggctgcgatgaactggagattattttcgaaataccagtatttcgactccagggggatgttcatttctatagtattttcagccccactgctggtgaatgccatgatcattgtggttatgtgggtatggaagactttgaatgtgatgactgacctgaagaatgcacaagagagaagaaaggaaaagaaaaggagaaggaaagaagactgaggggcagcagctgcttggagtttgcgtccttcccgtccacccagtgcagctcccagtgctgcagtgtgcgtggcgtgggcatccttccagctgactcatggtttgaaaaaccgttgttttatttaaatatccacagtggtagggcacacactgaagttggcttttcagccagcactgaatgtatccatcaggacatgcgtcttcaggtgcctgatctttgtagtcaggctgtgggaacggtctctgcagagcttcataactgggaatttgatttgaagaagtccatgtcatatgtgtaactagtactaattataaatataaaatacacaatataaaatatgaaactcaataataaacagtgccacctgtacatgggcaccatgccctcctc

SEQ ID NO: 244828 - protein, 344 aa, Artificial Sequence
  derived and/or modified sequence
MATPYVPVPMPIGNSASSFTTNRNQRSSSFGSVSTSSNSSKGQLEDSNMGNFKQTSVPDQMDNTSSVCSSPLIRTKFTGTASSIEYSTRPRDTEEQNPETVNWEDRPSTPTILGYEVMEERAKFTVYKILVKKTPEESWVVFRRYTDFSRLNDKLKEMFPGFRLALPPKRWFKDNYNADFLEDRQLGLQAFLQNLVAHKDIANCLAVREFLCLDDPPGPFDSLEESRAFCETLEETNYRLQKELLEKQKEMESLKKLLSEKQLHIDTLENRIRTLSLEPEESLDVSETEGEQILKVESSALEVDQDVLDEESRADNKPCLSFSEPENAVSEIEVAEVAYDAEED

SEQ ID NO: 244829 - protein, 84 aa, Artificial Sequence
  derived and/or modified sequence
MATPYVPVPMPIGNSASSFTTNRNQRSSSFGSVSTSSNSSKGQLEDSNMGNFKQTSVPDQMDNTSSVCSSPLIRTKFTGTASSI

SEQ ID NO: 244830 - protein, 92 aa, Artificial Sequence
  derived and/or modified sequence
MATPYVPVPMPIGNSASSFTTNRNQRSSSFGSVSTSSNSSKGQLEDSNMGNFKQTSVPDQMDNTSSVCSSPLIRTKFTGTASSIEYSTRPRD

SEQ ID NO: 244831 - protein, 203 aa, Artificial Sequence
  derived and/or modified sequence
MATPYVPVPMPIGNSASSFTTNRNQRSSSFGSVSTSSNSSKGQLEDSNMGNFKQTSVPDQMDNTSSVCSSPLIRTKFTGTASSIEYSTRPRDTEEQNPETVNWEDRPSTPTILGYEVMEERAKFTVYKILVKKTPEESWVVFRRYTDFSRLNDKLKEMFPGFRLALPPKRWFKDNYNADFLEDRQLGLQAFLQNLVAHKDIAN

SEQ ID NO: 244832 - DNA, 1035 bp, Artificial Sequence
  derived and/or modified sequence
atggccaccccctacgtgcccgtgcccatgcccatcggcaacagcgccagcagcttcaccaccaacagaaaccagagaagcagcagcttcggcagcgtgagcaccagcagcaacagcagcaagggccagctggaggacagcaacatgggcaacttcaagcagaccagcgtgcccgaccagatggacaacaccagcagcgtgtgcagcagccccctgatcagaaccaagttcaccggcaccgccagcagcatcgagtacagcaccagacccagagacaccgaggagcagaaccccgagaccgtgaactgggaggacagacccagcacccccaccatcctgggctacgaggtgatggaggagagagccaagttcaccgtgtacaagatcctggtgaagaagacccccgaggagagctgggtggtgttcagaagatacaccgacttcagcagactgaacgacaagctgaaggagatgttccccggcttcagactggccctgccccccaagagatggttcaaggacaactacaacgccgacttcctggaggacagacagctgggcctgcaggccttcctgcagaacctggtggcccacaaggacatcgccaactgcctggccgtgagagagttcctgtgcctggacgacccccccggccccttcgacagcctggaggagagcagagccttctgcgagaccctggaggagaccaactacagactgcagaaggagctgctggagaagcagaaggagatggagagcctgaagaagctgctgagcgagaagcagctgcacatcgacaccctggagaacagaatcagaaccctgagcctggagcccgaggagagcctggacgtgagcgagaccgagggcgagcagatcctgaaggtggagagcagcgccctggaggtggaccaggacgtgctggacgaggagagcagagccgacaacaagccctgcctgagcttcagcgagcccgagaacgccgtgagcgagatcgaggtggccgaggtggcctacgacgccgaggaggactag

SEQ ID NO: 244833 - DNA, 1035 bp, Artificial Sequence
  derived and/or modified sequence
atggccaccccctacgtccctgttcctatgcccattggcaattctgccagcagtttcactactaatcgcaatcaacggtccagcagcttcggctctgtgtccacctcctcaaatagcagcaaaggtcaactagaggactcaaatatggggaactttaaacagactagtgttccagatcaaatggataatacttcctcggtatgcagttctccattaattagaacaaaattcaccggaactgccagcagcatagaatatagtacgcggccccgggacactgaggaacagaacccagaaaccgtgaattgggaagatagaccctccactcctaccattctcggctacgaggtgatggaagagagagcaaaattcactgtttataagatcctggtgaagaagacacctgaggaaagttgggtagtctttcgtaggtacaccgatttctccaggctgaatgacaagctgaaggagatgtttccggggttccggttagctcttcctccaaagcggtggttcaaagataattacaacgcagacttcctggaggataggcaattaggcctacaggcctttctgcagaatctggttgcccataaagacatcgcaaattgcctagctgtcagggagttcctctgtctggatgatcctccaggacccttcgactcactggaagagagccgagccttctgcgagacgcttgaggaaaccaactatcgcctgcagaaggagctcctggagaaacaaaaagaaatggagagcctgaaaaagctcctgtcagagaaacaattgcatatcgatacattagaaaaccggattagaaccttgtccctggaaccggaggaaagcctcgatgtttcggagaccgagggcgaacaaatcttgaaggttgagtcctccgctttagaggtcgaccaggacgtcctggatgaagagtccagagcagataataagccatgcttatctttttcagagccggagaatgccgtttccgaaattgaggtcgcagaggtagcctacgatgcagaggaagactag

SEQ ID NO: 244834 - DNA, 1035 bp, Artificial Sequence
  derived and/or modified sequence
atggccaccccctatgtgcccgtgcccatgccgattggcaactcggcgtcttctttcacgactaataggaaccagcgctcttcctcctttgggagtgtgtcaacaagcagtaatagctctaaagggcaattagaggacagcaacatggggaattttaagcagacttccgttccggaccagatggataatacatcttccgtgtgctccagtccacttatccgcaccaaatttacaggaacggcctcatcgattgagtactcaacacggccgcgggataccgaagagcagaatcccgagaccgtgaactgggaggataggccttccacacccacaattctgggctacgaagtcatggaagagcgcgcgaaattcactgtgtataaaattttagtcaagaagacgccagaggagagttgggtggtgtttcgtaggtacacagatttctctagattgaacgataagctgaaggagatgtttcctggcttccggttagccctcccacctaagcgttggttcaaggataattataacgctgacttccttgaagatcgccagctcggcctacaggcctttctgcagaacctagtggcccacaaggatattgccaactgtctggcagttagggagtttctctgcctggatgatccccccgggccttttgattcgctggaggagtcaagagccttctgcgaaacactggaggagacaaactatcgactccagaaagagcttctggagaagcagaaagagatggaatctttgaagaagctcctttctgaaaaacagctgcacatcgatacattggaaaacaggataaggaccctgtctctcgagccagaggaatccttagacgtttcggaaaccgagggggaacagatcctgaaggtggaaagctccgctctcgaagttgatcaggatgttctggatgaggaaagcagagcagataacaaaccctgcttgagcttcagtgaaccggaaaatgccgtcagtgagattgaggtggccgaagttgcttatgacgctgaggaagactag

SEQ ID NO: 244835 - DNA, 1035 bp, Artificial Sequence
  derived and/or modified sequence
atggccaccccctacgtgcctgtgcccatgcccatcggcaacagcgccagcagcttcaccaccaacagaaaccagaggagcagcagctttggatctgtgtccaccagcagcaacagcagcaagggccagctggaggacagcaacatgggcaacttcaagcagacctctgtgcctgaccagatggacaacaccagctctgtgtgcagcagccccctcatccgcaccaagttcaccggcacagccagcagcattgagtacagcacccggccccgggacacagaggagcagaaccctgagaccgtgaactgggaggaccggcccagcacccccaccatcctgggctatgaggtgatggaggagcgggccaagttcaccgtgtacaagatcctggtgaagaagaccccagaggagagctgggtggtgttccgccgctacacagacttcagccggctgaatgacaagctgaaggagatgtttcctggcttccggctggccctgccccccaagcgctggttcaaggacaactacaatgctgacttcctggaggaccggcagctgggcctgcaggccttcctgcagaacctggtggcccacaaggacatcgccaactgcctggccgtgcgggagttcctgtgcctggatgaccccccaggcccctttgacagcctggaggagagccgggccttctgtgagaccctggaggagaccaactaccgcctgcagaaggagctgctggagaagcagaaggagatggagagcctgaagaagctgctgtctgagaagcagctgcacatcgacaccctggagaaccgcatccgcaccctgagcctggagcctgaggagagcctggatgtgtctgaaacagaaggagagcagatcctgaaggtggagagcagcgccctggaggtggaccaggatgtgctggatgaggagagcagagctgacaacaagccctgcctgtccttcagcgagccagaaaatgctgtgtctgaaattgaggtggccgaggtggcctatgatgctgaagaagattag

SEQ ID NO: 244836 - DNA, 1035 bp, Artificial Sequence
  derived and/or modified sequence
atggccaccccctacgtgcccgtgcccatgcccatcggcaacagcgccagttcttttacaacgaacagaaatcagcgttcctcaagtttcggctccgtgtcaacctcctctaacagcagcaaaggccaactcgaggatagtaacatgggcaatttcaagcagacctcggtgccagatcagatggacaacacctcaagcgtgtgtagtagccctctcattcggactaaattcacgggcacggcatcctctatcgaatactcaacacggcctagggacactgaggaacagaaccctgagaccgtaaactgggaggacaggcctagtacgccaaccattttgggatacgaagtcatggaggaacgcgcaaagttcacagtatataagattctggtgaagaaaactcctgaagaatcttgggttgtgttcagaagatatacggacttctctcggttaaatgataagctgaaagaaatgtttcccgggttccgtttggctttaccacctaaacgctggttcaaagacaattacaatgcggacttcctcgaagaccgccaactaggcctgcaggcatttttgcagaacttggtggcacataaagatatcgcaaattgtttggcagtgagagagttcttgtgcttggatgacccacctgggcctttcgacagccttgaggagtctagagccttctgcgaaacgcttgaagagactaactatcgacttcaaaaggaacttttggaaaagcagaaagagatggagagtttgaagaaattacttagcgaaaagcaactgcatattgatacattagagaatcgaatccgcaccctgagcctggaacctgaggagtctctggacgtcagcgagaccgaaggagaacagattctcaaagtggaaagttcggccctggaagttgaccaggacgtgctcgacgaggaatccagggccgacaacaagccatgtctgtcttttagcgagcctgagaacgcagttagtgagatcgaggttgcagaagtagcttacgatgcagaagaggattag

SEQ ID NO: 244837 - DNA, 1035 bp, Artificial Sequence
  derived and/or modified sequence
atggccaccccctacgtgcccgtgcccatgcccatcggcaacagcgcgagcagcttcaccacaaatagaaatcagcgtagctccagctttggctccgtgagtacaagctcaaactcatccaaaggccagttggaggacagtaatatgggcaattttaaacaaacaagcgtacccgaccagatggacaacacgtcttctgtgtgctcttccccactcattcggaccaagttcaccggaacagcctcttccattgagtattccacacgaccgagggatacagaggagcaaaatcccgaaaccgtgaactgggaggaccggccttcaactcccactattttgggctatgaagtgatggaggaacgggcgaagttcaccgtgtataagattctggtgaaaaagacacccgaggaatcttgggtggtctttaggcgctatacggacttttcacggctcaatgataagttgaaagagatgttccccgggttccggctggcactacctccgaagagatggttcaaggacaattacaacgctgacttccttgaagatcgccagctgggtttgcaagccttcctgcagaatctggtggcccataaggatatcgccaattgcctggcagtgagggaattcttgtgcctggatgatccccctgggcccttcgactcgctggaggagtcacgagcattctgcgagactctggaagaaaccaactatagactgcaaaaggagcttctggaaaagcagaaggagatggagtcattgaagaagctgttgagcgagaagcagcttcacatcgatactctggagaataggatccgtactctttcccttgaaccggaggagtccctggatgtgtccgaaacagaaggcgagcagatcctgaaggtcgaatcctctgccttagaagtcgatcaggatgtcctggacgaggaatcacgcgctgacaacaaaccttgcctttctttttctgagcccgagaacgccgtcagtgaaatcgaggtcgccgaggtagcctatgatgcagaagaagactag

SEQ ID NO: 244838 - DNA, 1035 bp, Artificial Sequence
  derived and/or modified sequence
atggctactccatacgtccccgtccccatgccaatcgggaattctgcctcttcattcacaacaaaccgtaaccaaagatcttcaagctttgggagtgtgagcacttcctccaattcgagcaagggacagttggaggacagtaacatggggaatttcaagcagaccagcgtgcccgatcagatggacaacacttcgagtgtgtgctcgtccccccttatcagaacgaaattcactgggaccgcctcttcaatagagtactccaccaggccaagagatacagaggaacagaaccccgaaaccgtgaattgggaagatagacctagtaccccgactatattggggtatgaggtgatggaagaacgtgctaaattcacagtatacaaaatcctcgtgaagaagacaccagaggagagttgggtggtctttcgaagatacactgactttagccgactgaacgacaagctaaaagagatgttccctgggtttcggctggcgctccccccaaagaggtggtttaaagataattacaacgccgactttttggaggatcgccagctgggcctccaggcttttctgcagaacttggtagcccacaaggacatagctaactgcctggccgtccgggagtttttatgtctcgatgatccccctggccctttcgactcccttgaggaatctcgggctttctgtgagacgttggaggagactaactatcgcctccagaaagagctactggaaaagcaaaaggagatggaatctctgaaaaaacttctctccgaaaagcagttacatatcgacacgctggagaatcgcattcgtacgctcagccttgagcccgaagaatcactcgatgtgtctgaaacagagggcgagcaaatactcaaagtcgagagctctgccctggaagttgaccaggacgtgttagatgaggagtcccgcgcagacaataagccatgcttgtcatttagcgagcctgagaatgccgtctctgagattgaagtcgcagaagtggcatacgacgccgaggaggattag

SEQ ID NO: 244839 - DNA, 1035 bp, Artificial Sequence
  derived and/or modified sequence
atggctaccccttacgtaccagtcccaatgcctataggcaacagcgcttcaagcttcacaactaacagaaatcagcgctctagctcttttggttctgtaagtacatctagcaacagctctaagggccagctggaagatagtaacatggggaacttcaagcagaccagtgtgcccgatcagatggataacacgtcatccgtctgtagcagccccctgattaggaccaaatttacggggaccgcaagtagcatcgagtattcaactaggccacgcgacactgaagagcagaatcccgagacggtcaattgggaggatagaccatctacaccaaccatcttgggatacgaggtaatggaggaacgggctaagtttactgtctacaagattctcgtcaagaagacccctgaggagagttgggtagtgttcaggcgttacacagatttttcccggctcaacgacaagttgaaggagatgtttcccggatttcgtctcgctcttcctccaaaacgttggtttaaggacaactataacgcggacttcctggaggacaggcaactcggcctccaggcattcctgcagaaccttgtggcccataaggacatcgctaattgtctggctgtgagagagttcctctgcctggatgaccctcctgggccattcgattcccttgaggagagtagagccttctgtgagaccctcgaggagacaaattatcgcctgcagaaggagctgctggaaaaacagaaggagatggaatcccttaaaaaattgctgtcagaaaagcaactccacatcgacaccttggaaaatagaatcagaaccctgtcattggagccagaggagtctctagatgtaagcgagactgaaggagagcaaattctgaaagtagagagtagtgccttggaggtcgatcaggacgtgctagatgaggaatcacgtgccgacaataaaccctgtctttctttcagcgagcccgaaaatgccgtttccgaaatcgaggtcgcagaagtggcctacgatgccgaagaggactag

SEQ ID NO: 244840 - DNA, 1853 bp, Artificial Sequence
  derived and/or modified sequence
acacagcagggatcttgggcccgggcagagactggctgaggcggggagcagctgcttttggggcgggggtgtcacgtgaggcttctcgctgctgagggaggaggcgaaaagctgcggttaaggagagtccggtttaaccgtcaccgggaagcgcgctcgttcgggatcgccgagggggctgagatagtgaattcctaagaagaaaataatggattgcatattagttgttctctaagtggactcaacagtgtgcaagcttgttggaaaagccaaaagaagatggcaactccttatgtcccagttcctatgcccataggaaactctgcttccagttttacaacaaacagaaatcaaagaagttcttcttttggcagtgtctcaacaagctcaaattcttctaagggccagttagaagactcaaatatgggtaattttaaacagacaagtgttcctgatcaaatggataatacttcatctgtctgtagcagtcccctcattaggactaaatttacaggtacagcttcttccattgagtattctactagaccaagagacactgaagaacaaaatccggaaacagtgaattgggaagatagaccatctacacctactatactgggttatgaagtgatggaagaaagagctaaatttactgtatataaaatactagtaaagaaaaccccagaagaaagctgggtagttttcagaagatacactgacttctctaggcttaatgacaaattaaaagagatgtttccaggttttcgactagcacttcctccaaaacgctggtttaaagataattacaatgctgactttttagaagacagacaattaggattacaagcgtttcttcaaaatttagtagctcacaaggacattgctaactgccttgcagtgagagaatttctttgtttggatgatccaccgggtccatttgatagcctagaagaaagcagggcattctgtgaaactttagaagagacaaactaccgcttacagaaagaactacttgaaaaacaaaaggagatggaatcactaaagaaactgctcagtgagaagcaacttcatatagacactttagagaacagaatcagaacattgtctttagaacctgaagaatcactggatgtgtcagaaacagaaggtgaacagatcctaaaggtggagtcctctgcacttgaggttgatcaagatgtcctggatgaagaatctagagctgataataaaccatgcttaagttttagtgaacctgaaaatgctgtatcagagatagaagtagcagaagtggcatatgatgctgaagaagactaatgtatcacaagcagttccctccatttagactattcaaaaatttagaagagtggcaaatactattttaaaagaagaaccaagaactgtaaaacatatagaaaagagcaagaatgcacatgtataaagtttacataaagaagtttttttaagttattgagataggaaatatattcactgctgcttttaattgtattttatccaattacatttaatacactaaaaaaaatcttgttggaattctgttatcaaggcccacattcttaaatactgtgcataaattattatggtgttttgcctatatattgctccaaactactgtgtatatatgtatgtgtgttaaatcaccaattatattaatcaaatggaaattaattgcatgttactatctgggtgatatattcttctttatatctctgacatgacatattttcattaatagtttaaatcagtgaccatcataataaagataaaatttagttgagtttttaatgtttacatgtttacatctctaaataaaatttgcttatttgaaatgttaa

SEQ ID NO: 244841 - DNA, 3452 bp, Artificial Sequence
  derived and/or modified sequence
gcccgggcagagactggctgaggcggggagcagctgcttttggggcgggggtgtcacgtgaggcttctcgctgctgagggaggaggcgaaaagctgcggttaaggagagtccggtttaaccgtcaccgggaagcgcgctcgttcgggatcgccgagggggctgagtactgtcaagatgataagcatggaataaagcttcagaagggtctttaccaatctttctcctaccaacttttacatacatgaaatcaggttaaaatgaactttacagaaatacttcacaagggaataaagtagaggaaaaagggataacatgtaacatggagtcaaggaaaaagagtgtgaagtagttttgctctctctatcttgcaaataggagtccttaaagacaactgggagaaggggtttgagatagtgaattcctaagaagaaaataatggattgcatattagttgttctctaagtggactcaacagtgtgcaagcttgttggaaaagccaaaagaagatggcaactccttatgtcccagttcctatgcccataggaaactctgcttccagttttacaacaaacagaaatcaaagaagttcttcttttggcagtgtctcaacaagctcaaattcttctaagggccagttagaagactcaaatatgggtaattttaaacagacaagtgttcctgatcaaatggataatacttcatctgtctgtagcagtcccctcattaggactaaatttacaggtacagcttcttccattgagtattctactagaccaagagacactgaagaacaaaatccggaaacagtgaattgggaagatagaccatctacacctactatactgggttatgaagtgatggaagaaagagctaaatttactgtatataaaatactagtaaagaaaaccccagaagaaagctgggtagttttcagaagatacactgacttctctaggcttaatgacaaattaaaagagatgtttccaggttttcgactagcacttcctccaaaacgctggtttaaagataattacaatgctgactttttagaagacagacaattaggattacaagcgtttcttcaaaatttagtagctcacaaggacattgctaactgccttgcagtgagagaatttctttgtttggatgatccaccgggtccatttgatagcctagaagaaagcagggcattctgtgaaactttagaagagacaaactaccgcttacagaaagaactacttgaaaaacaaaaggagatggaatcactaaagaaactgctcagtgagaagcaacttcatatagacactttagagaacagaatcagaacattgtctttagaacctgaagaatcactggatgtgtcagaaacagaaggtgaacagatcctaaaggtggagtcctctgcacttgaggttgatcaagatgtcctggatgaagaatctagagctgataataaaccatgcttaagttttagtgaacctgaaaatgctgtatcagagatagaagtagcagaagtggcatatgatgctgaagaagactaatgtatcacaagcagttccctccatttagactattcaaaaatttagaagagtggcaaatactattttaaaagaagaaccaagaactgtaaaacatatagaaaagagcaagaatgcacatgtataaagtttacataaagaagtttttttaagttattgagataggaaatatattcactgctgcttttaattgtattttatccaattacatttaatacactaaaaaaaatcttgttggaattctgttatcaaggcccacattcttaaatactgtgcataaattattatggtgttttgcctatatattgctccaaactactgtgtatatatgtatgtgtgttaaatcaccaattatattaatcaaatggaaattaattgcatgttactatctgggtgatatattcttctttatatctctgacatgacatattttcattaatagtttaaatcagtgaccatcataataaagataaaatttagttgagtttttaatgtttacatgtttacatctctaaataaaatttgcttatttgaaatgttaatgctctttagaaaaatgactttctagtaccaaaggaaaactacttgaaagagctgtaatcatatagctaaagtgataagatagccttgattttaaaagctgattcattaatatcaaaatactttaataagtgtcacagttattaatatgttacatttgtttagtttccacgtaatctttatctctacctagatttagtgagtttgcctctttcagaatactacctccttttgttaaggcatattctttcgaaaatatagattctaaataaataggggcttatacaaaaaagaaaataaaaagccatatatactgcaaagttcctaactggcttgactcctgacattgcatttttatttctatttgtgtgaagatgttgttatactgtattatggctgattttctttttaatatatttagccaagtgatgcactttatgataattaaactcttttgtgccaagtttaattggtggatttttttagtaagtagagttaggagaaagaattatgtagtgcctttactatttcactttctacaaaagtctcctagggtctttgagtcagctttatgaaaaaatgtttgtttatttcagctttgtgtacagtcattaaaagtgccttgtttcatttttataggatgaagttatttattttctattttcactgttttgcatattgctgttaataagcattgtaatcatgctggcattttgcaatcccagtcggtatgctttctaaaaactgagggaaacttactggggaaatagaataacaatctccatttttttctttactatctaaaagtttatcggtatcttgatgtatatatatattaaggtgtggctgtttaaaattctaatgacatatatcaacacattcaatggctgttgttaacctttgaagtaaaaaggagatcactttttaccaaataaccaaaaatttttagtctgtcaaagtgcacaggtatgttctcagaacatttttcacaatgtgtatcagaaatatgtttgctatccttagagacagaaatgaatataataaattgatctgcttatttattaaaattattattctagacttacaaaaggcttaaaaagaacaatcatttaatcagtaccattctgtatcttatataacagatctttgccaaattctagatattatagtgttgcctgtctgttctaaagcgaaccagccactttttcaatctggctttttggaagattgtatttaaagttcttcaaggatgaagaaaaaaatctgttaattaggtaaaccactattatttatatttataatttacttttttttacttttataatgcattttactcccagtattatgttcatttaataaattattttttcact

SEQ ID NO: 244842 - protein, 315 aa, Artificial Sequence
  derived and/or modified sequence
MATPYVPVPMPIGNSASSFTTNRNQRSSSFGSVSTSSNSSKGQLEDSNMGNFKQTSVPDQMDNTSSVCSSPLIRTKFTGTASSIEYSTRPRDTEEQNPETVNWEDRPSTPTILGYEVMEERAKFTLKEMFPGFRLALPPKRWFKDNYNADFLEDRQLGLQAFLQNLVAHKDIANCLAVREFLCLDDPPGPFDSLEESRAFCETLEETNYRLQKELLEKQKEMESLKKLLSEKQLHIDTLENRIRTLSLEPEESLDVSETEGEQILKVESSALEVDQDVLDEESRADNKPCLSFSEPENAVSEIEVAEVAYDAEED

SEQ ID NO: 244843 - DNA, 948 bp, Artificial Sequence
  derived and/or modified sequence
atggccaccccctacgtgcccgtgcccatgcccatcggcaacagcgccagcagcttcaccaccaacagaaaccagagaagcagcagcttcggcagcgtgagcaccagcagcaacagcagcaagggccagctggaggacagcaacatgggcaacttcaagcagaccagcgtgcccgaccagatggacaacaccagcagcgtgtgcagcagccccctgatcagaaccaagttcaccggcaccgccagcagcatcgagtacagcaccagacccagagacaccgaggagcagaaccccgagaccgtgaactgggaggacagacccagcacccccaccatcctgggctacgaggtgatggaggagagagccaagttcaccctgaaggagatgttccccggcttcagactggccctgccccccaagagatggttcaaggacaactacaacgccgacttcctggaggacagacagctgggcctgcaggccttcctgcagaacctggtggcccacaaggacatcgccaactgcctggccgtgagagagttcctgtgcctggacgacccccccggccccttcgacagcctggaggagagcagagccttctgcgagaccctggaggagaccaactacagactgcagaaggagctgctggagaagcagaaggagatggagagcctgaagaagctgctgagcgagaagcagctgcacatcgacaccctggagaacagaatcagaaccctgagcctggagcccgaggagagcctggacgtgagcgagaccgagggcgagcagatcctgaaggtggagagcagcgccctggaggtggaccaggacgtgctggacgaggagagcagagccgacaacaagccctgcctgagcttcagcgagcccgagaacgccgtgagcgagatcgaggtggccgaggtggcctacgacgccgaggaggactag

SEQ ID NO: 244844 - DNA, 948 bp, Artificial Sequence
  derived and/or modified sequence
atggcaaccccgtacgtgcctgtacccatgcctataggtaacagcgcatcttcattcaccactaacaggaatcagcggtcttctagtttcggctcggtgtctacaagttcaaatagcagtaaagggcagctggaggattccaacatggggaacttcaaacagacaagcgtgccggatcagatggataacacatcaagtgtgtgttcctcccctctcattaggactaaattcaccggcaccgctagcagcatcgagtattccacccgcccccgagatactgaggaacaaaaccccgaaacagttaactgggaagatcggcccagtacaccaactattctgggttatgaggtgatggaagaacgagcgaagttcactctcaaggagatgttcccgggctttaggcttgccctcccacctaaacgctggtttaaggataattataatgcagattttttggaggatcggcagttgggactccaggccttcctgcagaatcttgtggcccataaagacattgcaaattgcctcgcagttagagaatttctctgtctcgatgatcccccaggccctttcgattctctggaggagtcccgagccttctgtgagacacttgaggagacgaactatagacttcaaaaagaactcttagagaagcagaaagaaatggagagcctgaaaaaacttttgtctgagaagcagctgcatatcgatacgttagagaaccgtattcgaaccctctcccttgagccagaagagtccctcgacgtgagtgagactgagggtgaacaaatcctgaaagtggagagcagcgctcttgaggtcgaccaggacgtcctggatgaagaatcacgtgccgacaataaaccatgtctttcgtttagcgaacccgagaacgccgtgagcgagatagaagtcgcagaagtcgcatacgacgcggaggaggactag

SEQ ID NO: 244845 - DNA, 948 bp, Artificial Sequence
  derived and/or modified sequence
atggccaccccctacgtgcctgtgcccatgcccatcggcaacagcgccagcagcttcaccaccaacagaaaccagaggagcagcagctttggatctgtgtccaccagcagcaacagcagcaagggccagctggaggacagcaacatgggcaacttcaagcagacctctgtgcctgaccagatggacaacaccagctctgtgtgcagcagccccctcatccgcaccaagttcaccggcacagccagcagcattgagtacagcacccggccccgggacacagaggagcagaaccctgagaccgtgaactgggaggaccggcccagcacccccaccatcctgggctatgaggtgatggaggagcgggccaagttcaccctgaaggagatgtttcctggcttccggctggccctgccccccaagcgctggttcaaggacaactacaatgctgacttcctggaggaccggcagctgggcctgcaggccttcctgcagaacctggtggcccacaaggacatcgccaactgcctggccgtgcgggagttcctgtgcctggatgatcctcctggcccctttgacagcctggaggagagccgggccttctgtgagaccctggaggagaccaactaccgcctgcagaaggagctgctggagaagcagaaggagatggagagcctgaagaagctgctgtctgagaagcagctgcacatcgacaccctggagaaccgcatccgcaccctgagcctggagcctgaggagagcctggatgtgtctgaaacagaaggagagcagatcctgaaggtggagagcagcgccctggaggtggaccaggatgtgctggatgaggagagcagagctgacaacaagccctgcctgtccttcagcgagccagaaaatgctgtgtctgaaattgaggtggccgaggtggcctatgatgctgaggaggactag

SEQ ID NO: 244846 - DNA, 948 bp, Artificial Sequence
  derived and/or modified sequence
atggccaccccctacgtgcccgtgcccatgcccatcggcaacagcgcatcttcctttacgacaaatagaaatcagcgttctagtagtttcggctccgtgtccacctcgtccaatagctccaaagggcaactagaggacagtaacatgggtaacttcaagcagacctccgtgccagatcagatggacaatacatcttccgtttgctctagcccgctaatccggacaaagttcacggggactgccagttcaatagagtactcaacgcgcccgagggatacagaagaacagaaccccgaaacagtgaattgggaggacagaccaagcaccccaactatactcgggtatgaggtcatggaggagcgagctaagttcaccctgaaagaaatgttccctggctttcggcttgccctacctcctaagcgctggttcaaagacaactataacgcagatttcttggaggatagacaactcgggctacaggcattcctgcaaaaccttgtggctcataaagacattgccaactgcctcgccgtccgcgagttcctgtgcctggacgacccccccgggccatttgatagcttggaagagtctcgcgcattctgcgagacgctggaggagactaattatagactgcagaaagagctgctagagaagcagaaggagatggaaagcctcaaaaagttgctgtcagagaagcagctgcacattgacaccttggaaaaccggatccgcaccttatcgctggaacctgaggagagcttagatgtctccgaaacagagggagagcagattttaaaagttgaaagcagcgcactggaggtggaccaggatgttcttgatgaagaaagtagggcagataacaagccatgcttatcattttctgagcctgaaaacgctgtgagcgagatcgaggtggccgaagtagcttatgacgccgaggaagattag

SEQ ID NO: 244847 - DNA, 948 bp, Artificial Sequence
  derived and/or modified sequence
atggctaccccttacgttcctgttcccatgcccattggcaattccgctagcagctttactactaatagaaaccagaggagctcttcctttgggagcgtgagtacatctagcaactcttccaaagggcaattagaagactctaacatggggaattttaaacagaccagcgtcccagaccaaatggacaacacaagctcagtctgctcctcccccctgatccgaacaaagttcaccggcacagctagcagcatagagtacagcactcgcccaagggataccgaagaacagaaccctgagaccgtgaattgggaggacagaccatcaacaccaaccatactgggttatgaggtgatggaggagcgagcgaaatttactttgaaagagatgttccctggattccgactcgcactgcctccgaaacggtggttcaaggataactacaacgcagattttctggaagaccggcaactaggtctacaagccttcctgcaaaatttggttgcacataaggacatcgccaactgccttgctgtacgggagttcctgtgtctggatgatcctcctggacccttcgactccctcgaagagagtcgcgctttctgcgagaccctggaggaaaccaactatcgcctacaaaaggagcttctggagaaacagaaggagatggagagtttgaagaagctgctgtcggagaagcagctacacattgatactttggagaatcggattcgcacactatccctggagcccgaggagagcctggacgtgtcagaaaccgaaggcgaacagattcttaaggttgagtccagcgcactggaggtggaccaggacgtgctcgacgaggagagtagagctgataataagccatgtttgtcattctctgaacccgagaacgccgtgtctgagatagaagttgcagaagttgcttatgatgccgaggaagactag

SEQ ID NO: 244848 - DNA, 3032 bp, Artificial Sequence
  derived and/or modified sequence
ctgcggttaaggagagtccggtttaaccgtcaccgggaagcgcgctcgttcgggatcgccgagggggctgagatagtgaattcctaagaagaaaataatggattgcatattagttgttctctaagtggactcaacagtgtgcaagcttgttggaaaagccaaaagaagatggcaactccttatgtcccagttcctatgcccataggaaactctgcttccagttttacaacaaacagaaatcaaagaagttcttcttttggcagtgtctcaacaagctcaaattcttctaagggccagttagaagactcaaatatgggtaattttaaacagacaagtgttcctgatcaaatggataatacttcatctgtctgtagcagtcccctcattaggactaaatttacaggtacagcttcttccattgagtattctactagaccaagagacactgaagaacaaaatccggaaacagtgaattgggaagatagaccatctacacctactatactgggttatgaagtgatggaagaaagagctaaatttactttaaaagagatgtttccaggttttcgactagcacttcctccaaaacgctggtttaaagataattacaatgctgactttttagaagacagacaattaggattacaagcgtttcttcaaaatttagtagctcacaaggacattgctaactgccttgcagtgagagaatttctttgtttggatgatccaccgggtccatttgatagcctagaagaaagcagggcattctgtgaaactttagaagagacaaactaccgcttacagaaagaactacttgaaaaacaaaaggagatggaatcactaaagaaactgctcagtgagaagcaacttcatatagacactttagagaacagaatcagaacattgtctttagaacctgaagaatcactggatgtgtcagaaacagaaggtgaacagatcctaaaggtggagtcctctgcacttgaggttgatcaagatgtcctggatgaagaatctagagctgataataaaccatgcttaagttttagtgaacctgaaaatgctgtatcagagatagaagtagcagaagtggcatatgatgctgaagaagactaatgtatcacaagcagttccctccatttagactattcaaaaatttagaagagtggcaaatactattttaaaagaagaaccaagaactgtaaaacatatagaaaagagcaagaatgcacatgtataaagtttacataaagaagtttttttaagttattgagataggaaatatattcactgctgcttttaattgtattttatccaattacatttaatacactaaaaaaaatcttgttggaattctgttatcaaggcccacattcttaaatactgtgcataaattattatggtgttttgcctatatattgctccaaactactgtgtatatatgtatgtgtgttaaatcaccaattatattaatcaaatggaaattaattgcatgttactatctgggtgatatattcttctttatatctctgacatgacatattttcattaatagtttaaatcagtgaccatcataataaagataaaatttagttgagtttttaatgtttacatgtttacatctctaaataaaatttgcttatttgaaatgttaatgctctttagaaaaatgactttctagtaccaaaggaaaactacttgaaagagctgtaatcatatagctaaagtgataagatagccttgattttaaaagctgattcattaatatcaaaatactttaataagtgtcacagttattaatatgttacatttgtttagtttccacgtaatctttatctctacctagatttagtgagtttgcctctttcagaatactacctccttttgttaaggcatattctttcgaaaatatagattctaaataaataggggcttatacaaaaaagaaaataaaaagccatatatactgcaaagttcctaactggcttgactcctgacattgcatttttatttctatttgtgtgaagatgttgttatactgtattatggctgattttctttttaatatatttagccaagtgatgcactttatgataattaaactcttttgtgccaagtttaattggtggatttttttagtaagtagagttaggagaaagaattatgtagtgcctttactatttcactttctacaaaagtctcctagggtctttgagtcagctttatgaaaaaatgtttgtttatttcagctttgtgtacagtcattaaaagtgccttgtttcatttttataggatgaagttatttattttctattttcactgttttgcatattgctgttaataagcattgtaatcatgctggcattttgcaatcccagtcggtatgctttctaaaaactgagggaaacttactggggaaatagaataacaatctccatttttttctttactatctaaaagtttatcggtatcttgatgtatatatatattaaggtgtggctgtttaaaattctaatgacatatatcaacacattcaatggctgttgttaacctttgaagtaaaaaggagatcactttttaccaaataaccaaaaatttttagtctgtcaaagtgcacaggtatgttctcagaacatttttcacaatgtgtatcagaaatatgtttgctatccttagagacagaaatgaatataataaattgatctgcttatttattaaaattattattctagacttacaaaaggcttaaaaagaacaatcatttaatcagtaccattctgtatcttatataacagatctttgccaaattctagatattatagtgttgcctgtctgttctaaagcgaaccagccactttttcaatctggctttttggaagattgtatttaaagttcttcaaggatgaagaaaaaaatctgttaattaggtaaaccactattatttatatttataatttacttttttttacttttataatgcattttactcccagtattatgttcatttaataaattattttttcactacaaca

SEQ ID NO: 244849 - protein, 703 aa, Artificial Sequence
  derived and/or modified sequence
MAPLCSLARWNYFFLYDGSKVKEEGDPTRAGICYFYPSQTLLDQQELLCGQIAGVVRCVSDISDSPPTLVRLRKLKFAIKVDGDYLWVLGCAVELPDVSCKRFLDQLVGFFNFYNGPVSLAYENCSQEELSTEWDTFIEQILKNTSDLHKIFNSLWNLDQTKVEPLLLLKAARILQTCQRSPHILAGCILYKGLIVSTQLPPSLTAKVLLHRTAPQEQRLPTGEDAPQEHGAALPPNVQIIPVFVTKEEAISLHEFPVEQMTRSLASPAGLQDGSAQHHPKGGSTSALKENATGHVESMAWTTPDPTSPDEACPDGRKENGCLSGHDLESIRPAGLHNSARGEVLGLSSSLGKELVFLQEELDLSEIHIPEAQEVEMASGHFAFLHVPVPDGRAPYCKASLSASSSLEPTPPEDTAISSLRPPSAPEMLTQHGAQEQLEDHPGHSSQAPIPRADPLPRRTRRPLLLPRLDPGQRGNKLPTGEQGLDEDVDGVCESHAAPGLECSSGSANCQGAGPSADGISSRLTPAESCMGLVRMNLYTHCVKGLVLSLLAEEPLLGDSAAIEEVYHSSLASLNGLEVHLKETLPRDEAASTSSTYNFTHYDRIQSLLMANLPQVATPQDRRFLQAVSLMHSEFAQLPALYEMTVRNASTAVYACCNPIQETYFQQLAPAARSSGFPNPQDGAFSLSGKAKQKLLKHGVNLL

SEQ ID NO: 244850 - DNA, 2112 bp, Artificial Sequence
  derived and/or modified sequence
atggccccactatgttcactcgcgaggtggaactatttttttctttatgacggctcaaaagtcaaagaggagggcgacccaactcgagccgggatctgctatttctatcctagccagaccctgttagatcagcaagagctgctgtgtgggcaaatcgctggcgtagtccggtgcgtgagcgacattagtgattccccccccaccctcgttaggctgaggaagctgaaattcgccattaaagtggatggtgattatctgtgggtgttaggctgcgcggtggagctgcccgacgtcagctgcaagcgcttccttgaccagttggtgggcttttttaacttctataacggtccagtgtcattggcctatgaaaactgctctcaggaggaactgtcaacagaatgggacacgttcattgaacagatcctcaaaaacacaagtgacctgcataaaatatttaactccctgtggaacctcgaccaaaccaaggtggaaccccttctgctcctgaaggctgctaggattctgcagacctgccaacggtcaccccacatcctcgccgggtgcatactgtacaaaggcttgatcgtgagcacccagctgcctccttccctcaccgctaaggtgctcttacacagaacagctccacaggagcagcgcctgcccaccggcgaagacgccccacaggaacatggcgcagcactcccaccaaatgtgcagattatccccgtgttcgtgacaaaggaggaagcgatatctcttcacgagtttcctgtcgaacaaatgactagatccttggcgtctcctgctggtcttcaagacggttccgcccaacatcatccaaaaggaggatcaacctcggctctgaaagagaatgccacaggccacgttgaatccatggcttggaccacccctgatccaaccagtcccgacgaggcctgtccagacgggagaaaagaaaatggctgcctaagcggccacgacttagaaagtattcgccctgccggcttgcacaacagtgctagaggggaagtactcgggctaagttcctctcttggtaaggagttggtgttcctgcaggaagagttggacctgtcagagatccatatacccgaagctcaagaagtggagatggcctccgggcactttgcctttctgcatgttccggtgccggatggccgcgctccctactgcaaagcctcactgtctgcctcttcttcgctggaaccgacgcccccagaggacaccgctatttcatcactgcgacccccaagtgctcccgaaatgctgacccaacatggtgcacaagagcaactggaagaccatcctggtcatagtagccaggcgcctatcccccgagcagatccccttccaaggcggacacgtcggccactcctgctgcctagacttgatcccgggcagcgtggtaacaagctgcctactggcgaacaaggacttgatgaagatgtagacggagtgtgtgagagccacgccgcccctggtcttgaatgtagctcagggagtgcaaattgtcagggcgctggaccaagcgctgacggcatttctagccgacttaccccagccgaatcatgtatgggtttagtgcggatgaacctatatacacattgcgtcaaggggttagtgctgagcctgttggctgaagagcctcttctgggagacagcgcagcgatcgaagaggtctaccacagttcacttgcttcactgaacggccttgaggtgcacctgaaggagacccttccccgagacgaagccgccagtacgtcaagtacttacaatttcacacattacgacaggattcagagccttctgatggccaacctcccgcaggtcgcaactccgcaggaccgcagattcctgcaagccgtgagccttatgcactcagagtttgcgcaactgcctgccttatacgagatgaccgttagaaatgcctcaacggccgtctatgcctgctgtaatccaatccaggagacatactttcagcagctggccccagctgctcgcagcagcggcttccccaatcctcaggacggggccttctcgctctccgggaaggcaaagcagaagctgctcaaacatggcgtaaatcttctgtag

SEQ ID NO: 244851 - DNA, 3562 bp, Artificial Sequence
  derived and/or modified sequence
agaccatgtggttgtatagttaaggttcagtgtttcaaataagagcagtcattgtgggcgcctcgtttttttttctagctactcgtgtcttctccggcagatggtctaacggctggatagaggcatatttttagtttgaatttcctgcgcttacagaatggttttatctaatttgtagctactggggttctttattctctggggccacctgaaggctttcaaacacagtaataagccctcctcgggctgggaaacaggaagctgtgttttaaatgccgtgatcactggattaaaggaaacatggctccactctgttctcttgccaggtggaattatttttttctttatgatggttccaaggtaaaggaagaaggcgatccaacaagagctggcatttgttacttttatccttcccagaccctgctagaccaacaggagttgctttgtggacagattgctggagttgtccgctgtgtttctgacatttctgactctcctcctactcttgttcgtctgagaaaactgaagtttgccataaaagttgatggagattacctttgggtgctgggctgtgctgtggagctccctgatgtcagctgcaagcggtttctggatcagctagttggattctttaatttttacaatggacctgtttccctagcttatgagaactgttctcaggaagaactgagcacggagtgggacaccttcatcgagcaaattctgaaaaacaccagtgatctgcataagattttcaattccctctggaacttggaccaaactaaagtggagcccctgttgttgctgaaggcagcccgcattctgcagacctgccagcgctcgcctcacattctcgctggctgcatcctctataaaggactgattgtcagcacccaactcccgccctccctcaccgccaaggtcctgcttcaccgaacagcacctcaggagcagagactccctacgggagaggatgccccgcaggaacatggagcggcattgcccccgaatgtccagattatccctgtttttgtgaccaaagaggaagccattagtctccacgagttcccggtggaacagatgacaaggtctctagcatctccagcaggactccaggatggttcagcccagcaccatccaaagggtgggagcacatctgccctgaaagaaaacgccactggccatgtggaatccatggcctggaccaccccagatcccacatcccctgacgaagcttgtccagatggcaggaaggagaacggatgcttgtctggccatgatctggagagcatcaggcccgcaggactgcacaactctgccaggggtgaggttcttggcctcagctcctccctggggaaggaactagtctttctccaagaagaactcgacttgtctgaaatccacattccagaggctcaggaagtggaaatggcctcaggtcattttgccttcctacatgtgcctgttccagatggcagggctccttactgcaaggcatctctcagcgcctccagcagcctggaacccacgcctcctgaggacacagccatcagcagcttgcgccctccctctgctcctgagatgctgacccagcatggagcccaagagcagctcgaagaccatcctggccatagcagccaagcccccattcccagagcagaccctctccccagaaggacccgcaggcccttgttattgcctcgcttagatccaggacagagaggaaacaagcttcccacgggggaacaaggcctggatgaggatgttgatggggtctgtgaaagccacgcagcccctggtctggaatgcagttcaggctcagcaaactgtcagggtgctggcccctctgcagatggaatcagctccaggctgacaccagcagagtcctgcatggggctcgtgaggatgaatctctacactcactgcgtcaaagggctggtgctgtccctgctggctgaggagccgctgctgggagacagcgcagccatagaggaagtgtaccacagcagcctggcttcactgaatgggctggaagtccacctgaaagagacgctgcccagggatgaggcagcctccacgagcagcacctacaacttcacacattacgaccgcattcagagcttgctgatggcaaacctgccgcaggtggccaccccgcaggatcgccgcttcctccaggccgtcagcctgatgcatagcgaatttgcccagctgcccgcgctttatgaaatgactgtcagaaatgcctccacggctgtgtacgcctgttgcaaccccatccaggagacatatttccagcagctggcacctgcagcacggagctccggcttcccaaaccctcaggatggcgccttcagcctctccggcaaagcaaagcagaagctgctgaagcacggggtgaacttgctctgaactgcacccaggaggtgactgggaaggagaaaaccagcaaaggaagctctgccttttataattgaaaaggcccctctattttatttttcttgaaaacattcccttttttaggaaccaaatgatatttgagtttttgttattccttttgcagattgggatgtgttttgggggcaggggttagttcttcaggtcggcagacccagagcacttgataaagaactgtatttaatcggtagtgttggggccgggacgggcttggctccctctctgccatactgagcctgaggtatttcatatctcctgctgttccatcccagcttgaattggtgccacaagcttccaagttggcattttttctagaacctgatcgtccactagcccagagtgtgtgtgttcaacccccacaccaggtggtggtaggcggtgtgactgcacagcgaggtgccggatctgtgagcaggccgactccactcccacgccgcaggtaggtttctccagtgcgctcttgctgggaggtccggatcgttcctgcagggaagcggcagcacacggagaccacttggttgaattctgttggaactctactcaaatctaggggcgtcttctttggacccacaatgggggcaagccttaataatatggaagggagtttgggctttagagatccctttataaaagctctgggggctgagccctgagaattcagtgacaacaggaccaacctgcgctgcctttgactacaagtgggccgtgcagctggttcctctcgagcgagtgtccctaaataggagtttacaagatgtctgggggtaaaagcactgtgcttttcagtggtggctgcgtgaaagggagcgacactcagctgtgtgttcctgggcttgtgtggtacttagaacctcagttctattacgttatagtcagacatttttttgacagtatgagacagactgcaggatgaaaatatttgtcaaaatcttaactgaatgtttactggaagtacttgagattccatttgagagttgtattgttaataatttcatgtcagtgaactgatatctgatgtttatgatatggtgtctttttcttgaaacaagcttccaagggctagaaataaaatagccaaaaaatgctggagttctgagtaattaaa

SEQ ID NO: 244852 - DNA, 2112 bp, Artificial Sequence
  derived and/or modified sequence
atggcccccctgtgcagcctggcccgctggaactacttcttcctgtatgatggcagcaaggtgaaggaggagggggaccccacccgggccggcatctgctacttctaccccagccagaccctgctggaccagcaggagctgctgtgtggccagattgctggggtggtgcgctgtgtgtctgacatcagtgacagcccccccaccctggtgcggctgaggaagctgaagtttgccatcaaggtggatggagactacctgtgggtgctgggctgtgctgtggagctgcctgatgtgtcctgcaagcgcttcctggaccagctggtgggcttcttcaacttctacaatggacctgtgtccctggcctatgagaactgcagccaggaggagctgagcacagagtgggacaccttcatcgagcagatcctgaagaacaccagtgacctgcacaagatcttcaacagcctgtggaacctggaccagaccaaggtggagcccctgctgctgctgaaggccgcccgcatcctgcagacctgccagaggagcccccacatcctggccggctgcatcctgtacaagggcctgattgtgtccacccagctgccccccagcctgacagccaaggtgctgctgcacaggacagccccccaggagcagaggctgcccaccggggaggatgccccccaggagcacggggccgccctgcccccaaatgtgcagatcatccctgtgtttgtgaccaaggaggaggccatcagcctgcacgagttccctgtggagcagatgaccaggagcctggccagccctgctggcctgcaggacggcagcgcccagcaccaccccaagggcggcagcaccagcgccctgaaggaaaatgccactggacatgtggagagcatggcctggaccaccccagaccccaccagcccagatgaggcctgcccagatggcaggaaagaaaatggctgcctgagcggccatgacctggagagcatccggcctgctggcctgcacaacagcgcccggggggaggtgctgggcctgagcagcagcctgggcaaggagctggtgttcctgcaggaggagctggacctgtctgagatccacatccctgaggcccaggaggtggagatggccagcggccactttgccttcctgcacgtgcctgtgcctgatggccgggccccctactgcaaggccagcctgagcgccagcagcagcctggagcccaccccacctgaggacacagccatcagcagcctgcggccccccagcgcccctgagatgctgacccagcacggggcccaggagcagctggaggaccaccctggccacagcagccaggcccccatccccagggctgaccccctgcccaggaggacccggcggcccctgctgctgccccggctggaccccggccagaggggcaacaagctgcccaccggggagcagggcctggatgaagatgtggatggagtgtgtgagagccatgctgcccctggcctggagtgcagcagcggcagcgccaactgccagggcgccggccccagcgcagatggcatcagcagccggctgaccccagctgagagctgcatgggcctggtgaggatgaacctgtacacccactgtgtgaagggcctggtgctgagcctgctggccgaggagcccctgctgggggacagcgctgccatcgaggaggtgtaccacagcagcctggccagcctgaatggcctggaggtgcacctgaaggagaccctgcccagagatgaggccgccagcaccagcagcacctacaacttcacccactatgaccgcatccagagcctgctgatggccaacctgccccaggtggccaccccccaggaccggcgcttcctgcaggccgtgtccctgatgcacagcgagtttgcccagctgcctgccctgtatgagatgacagtgagaaatgccagcacagctgtgtatgcctgctgcaaccccatccaggagacctacttccagcagctggccccagctgcccggagcagcggcttccccaacccccaggatggagccttcagcctgagcggcaaggccaagcagaagctgctgaagcacggcgtgaacctgctgtag

SEQ ID NO: 244853 - DNA, 2112 bp, Artificial Sequence
  derived and/or modified sequence
atggcccccctgtgcagcctggcccggtggaactacttcttcctgtatgatggctcaaaggtcaaagaagaaggagaccccactagagcggggatctgttatttctatcctagccagacactgctagatcaacaggaactgctctgtgggcaaatcgctggcgtggtgcgttgtgtctccgatattagcgattcacctcccaccttggtgcggctccggaagctaaagtttgcaatcaaggtggacggggactacctgtgggtgcttggatgcgcagtcgagctgccagacgtgagttgtaagaggtttctggatcagctcgttggattttttaacttttacaacgggccggtgtcactggcttatgagaactgctcgcaggaggagctgtccacagaatgggatacgtttatagagcagattctgaaaaacactagcgatctccataagatttttaactccctgtggaaccttgatcaaaccaaagtggagccgctgctgctgctcaaggcagccaggattttgcaaacatgtcagagaagcccgcatattctcgctgggtgcattctctataaggggttaattgtgtcgacccagctaccgccctcattaaccgctaaggtgttgttacaccgaacggcacctcaggaacagcggctgccgacaggagaggacgccccccaggaacacggagctgccctgcccccgaatgtgcagataattccagtgtttgtcacaaaggaggaagccattagcctccatgagtttcctgtcgagcagatgacccgcagtctcgctagccctgctggcttgcaggacgggagcgctcaacaccatccaaaagggggaagcacaagcgctcttaaggagaacgcaacaggccatgtggaatccatggcctggaccactccagatcctacaagccctgacgaggcatgtcctgatggccggaaagaaaacggttgcttgtccggtcacgatttagaatccataaggccggccggactgcataattcagcccgaggcgaggtgcttggattgtcttcatctctgggcaaagagttggtcttcctgcaggaggagctagacctctcagaaatacacattccggaggcccaggaggtggagatggcgtctggtcatttcgcattcttgcatgtgccggtgcctgatggtagggctccttactgtaaagcgtcactgagcgcatcctctagcttagagcctacaccacctgaggatacagcgatctctagcctgagacccccttccgcacctgagatgctgacccagcacggcgcacaagagcagctggaggaccaccccgggcactcatcacaggctccaattccgagggcagatccattaccccgaagaacacggaggccactcttgcttcccagactggatccaggacagaggggtaataagctgcctacaggggaacagggactggatgaggacgtcgatggggtctgtgagtcacacgcagctccaggacttgagtgctcaagtggatccgctaattgccagggagctggcccctctgcggacggtataagctctaggctgacaccggccgaatcttgcatggggctcgtgcgtatgaacttgtatacgcactgcgttaaggggttagtgttaagcctgctggcagaggagccacttctgggagattccgccgcaatagaggaggtgtatcattcttccctcgcctccctaaacggccttgaggttcatttgaaggagacactgccaagagacgaggccgcttcgaccagtagtacctataattttacccactacgaccgcattcaatcacttctgatggcaaatctgccgcaggtcgcaaccccccaggacagacgttttctgcaggccgttagtctgatgcatagtgaatttgcacagctgccagcgctctatgaaatgaccgtcagaaatgccagcacagcagtgtatgcctgctgtaatccaattcaggaaacgtacttccagcagctggctccagctgcccgcagttctggatttcctaaccctcaggatggggctttttcactctcaggtaaggccaaacagaaactcttaaaacatggagtgaatctgctttag

SEQ ID NO: 244854 - DNA, 2112 bp, Artificial Sequence
  derived and/or modified sequence
atggctcccctctgtagcctggctcggtggaattacttttttctctacgacgggtctaaggtaaaggaggaaggtgatcccacccgggcaggaatttgctacttttacccttcccagactctgctggatcaacaggagcttttgtgtgggcagatagcgggtgtggtgcggtgtgtgtcagacattagcgacagtccccctaccctcgttcgcctcagaaagcttaagtttgctattaaggtggacggcgactacctctgggtgctcgggtgtgctgtagagcttcctgatgtgtcttgcaaacgttttctcgatcagctggtggggttcttcaatttttataacggaccagtgtcgctggcgtatgagaactgttctcaggaggaattgagcacagagtgggacacttttattgagcaaattttgaaaaatacctctgatttacataagatatttaacagcctgtggaacttggatcagactaaggtcgaacctttattgctccttaaggctgcccgaattctgcagacttgtcagagatcaccccatatcctggccggatgtattctttataaggggttaatcgtctcaacgcaactgcccccaagtttgacggccaaagtgctgctgcaccggaccgcaccccaggaacagcggctgccgactggggaggatgcaccgcaggaacatggcgctgccctgcctcctaacgtgcaaattattcctgtcttcgtaactaaggaagaagcgatctcattgcacgaatttccagttgagcaaatgaccagaagtctggcctctcccgcaggactgcaggatggctctgcacagcatcatccaaagggcggatcaacttccgcgctgaaggagaacgccaccgggcacgtagaatctatggcttggaccacccctgatcctacgtcacctgacgaggcctgcccggacggcagaaaagaaaatggctgcctttctggccacgatctagagagcatcagaccagcaggacttcataattccgcgcgtggggaggtgctgggcctcagttcctcactgggcaaggagctcgtgtttctgcaggaggaactcgacctgagcgagatccacatccctgaggctcaggaagttgaaatggccagtggccatttcgcctttctgcacgttcccgtccctgacgggagggcgccatactgcaaagccagtctatctgcatcctcaagccttgagccaactcctcctgaagatactgctatttcttccctcaggccacctagcgctcccgaaatgctcacacaacacggagcccaggagcaactcgaagatcacccgggacatagtagccaagcccctattccgcgtgctgacccactaccaaggaggaccaggaggcctcttctgctgcccaggctggaccctgggcagcgtggcaataagctgcccaccggggaacaggggctcgacgaagacgtagacggagtctgtgagtcccacgccgcacctgggctagaatgttctagtggttctgctaattgtcaaggggcaggaccatctgctgacgggatctcgagcaggttaactccagccgaaagctgcatgggtttggtgaggatgaatttatacacacactgtgtgaagggactggttttatcactcctggccgaggagccacttctgggcgattctgcagccatcgaggaggtgtatcatagttccctggcgagtctgaatggattggaggttcatctgaaagagacactgcctagggacgaagcagctagcacctctagtacatacaatttcacacactatgatagaatccagtcactgcttatggctaacctgccacaggtcgctaccccccaggataggcggtttcttcaggccgtgtcactcatgcattccgagttcgcccaactccccgctttatacgagatgacagtgcgaaacgcatccactgccgtctacgcttgttgtaaccctatccaggaaacttatttccagcagctggcccctgccgctcgctcatcagggttcccaaatcctcaggacggggcttttagcctcagcggcaaggccaagcaaaagctgctgaaacacggcgtgaacttgctatag

SEQ ID NO: 244855 - DNA, 2112 bp, Artificial Sequence
  derived and/or modified sequence
atggcccccctgtgcagcctggccagatggaactacttcttcctgtacgacggcagcaaggtgaaggaggagggcgaccccaccagagccggcatctgctacttctaccccagccagaccctgctggaccagcaggagctgctgtgcggccagatcgccggcgtggtgagatgcgtgagcgacatcagcgacagcccccccaccctggtgagactgagaaagctgaagttcgccatcaaggtggacggcgactacctgtgggtgctgggctgcgccgtggagctgcccgacgtgagctgcaagagattcctggaccagctggtgggcttcttcaacttctacaacggccccgtgagcctggcctacgagaactgcagccaggaggagctgagcaccgagtgggacaccttcatcgagcagatcctgaagaacaccagcgacctgcacaagatcttcaacagcctgtggaacctggaccagaccaaggtggagcccctgctgctgctgaaggccgccagaatcctgcagacctgccagagaagcccccacatcctggccggctgcatcctgtacaagggcctgatcgtgagcacccagctgccccccagcctgaccgccaaggtgctgctgcacagaaccgccccccaggagcagagactgcccaccggcgaggacgccccccaggagcacggcgccgccctgccccccaacgtgcagatcatccccgtgttcgtgaccaaggaggaggccatcagcctgcacgagttccccgtggagcagatgaccagaagcctggccagccccgccggcctgcaggacggcagcgcccagcaccaccccaagggcggcagcaccagcgccctgaaggagaacgccaccggccacgtggagagcatggcctggaccacccccgaccccaccagccccgacgaggcctgccccgacggcagaaaggagaacggctgcctgagcggccacgacctggagagcatcagacccgccggcctgcacaacagcgccagaggcgaggtgctgggcctgagcagcagcctgggcaaggagctggtgttcctgcaggaggagctggacctgagcgagatccacatccccgaggcccaggaggtggagatggccagcggccacttcgccttcctgcacgtgcccgtgcccgacggcagagccccctactgcaaggccagcctgagcgccagcagcagcctggagcccaccccccccgaggacaccgccatcagcagcctgagaccccccagcgcccccgagatgctgacccagcacggcgcccaggagcagctggaggaccaccccggccacagcagccaggcccccatccccagagccgaccccctgcccagaagaaccagaagacccctgctgctgcccagactggaccccggccagagaggcaacaagctgcccaccggcgagcagggcctggacgaggacgtggacggcgtgtgcgagagccacgccgcccccggcctggagtgcagcagcggcagcgccaactgccagggcgccggccccagcgccgacggcatcagcagcagactgacccccgccgagagctgcatgggcctggtgagaatgaacctgtacacccactgcgtgaagggcctggtgctgagcctgctggccgaggagcccctgctgggcgacagcgccgccatcgaggaggtgtaccacagcagcctggccagcctgaacggcctggaggtgcacctgaaggagaccctgcccagagacgaggccgccagcaccagcagcacctacaacttcacccactacgacagaatccagagcctgctgatggccaacctgccccaggtggccaccccccaggacagaagattcctgcaggccgtgagcctgatgcacagcgagttcgcccagctgcccgccctgtacgagatgaccgtgagaaacgccagcaccgccgtgtacgcctgctgcaaccccatccaggagacctacttccagcagctggcccccgccgccagaagcagcggcttccccaacccccaggacggcgccttcagcctgagcggcaaggccaagcagaagctgctgaagcacggcgtgaacctgctgtag

SEQ ID NO: 244856 - protein, 178 aa, Artificial Sequence
  derived and/or modified sequence
MTSQPVPNETIIVLPSNVINFSQAEKPEPTNQGQDSLKKHLHAEIKVIGTIQILCGMMVLSLGIILASASFSPNFTQVTSTLLNSAYPFIGPFFFIISGSLSIATEKRLTKLLVHSSLVGSILSALSALVGFIILSVKQATLNPASLQWNSLSDADLHSAGILPSCAHCCAAVETGLL

SEQ ID NO: 244857 - DNA, 537 bp, Artificial Sequence
  derived and/or modified sequence
atgacatctcagcctgtcccgaacgaaactataatcgtcctaccttcaaatgtgatcaacttttctcaggctgaaaaacctgagccgactaatcaggggcaggactctttgaagaagcatttgcacgcggagattaaagtaattgggacaattcaaattctttgtggcatgatggtgttgtccctgggcatcatccttgctagtgccagttttagtcctaacttcactcaggtgactagcacactgctgaattctgcctaccccttcatagggccatttttcttcatcatcagcgggtctttgtcaatagccactgaaaaacgtctaactaagctcctggtgcatagcagcttggtgggttctattttgtccgccttgagtgctctggtgggctttattattttgtcggtgaagcaagcaacacttaatccagcttccttacagtggaactccctaagcgatgccgatctccattcggctggtatccttccctcctgtgcccattgttgcgctgcagtggagaccggtttattgtag

SEQ ID NO: 244858 - DNA, 537 bp, Artificial Sequence
  derived and/or modified sequence
atgaccagccagcctgtgcccaatgagaccatcatcgtgctgcccagcaatgtcatcaacttcagccaggccgagaagccagagcccaccaaccagggccaggacagcctgaagaagcacctgcatgctgagatcaaggtgattggcaccatccagatcctgtgtggcatgatggtgctgagcctgggcatcatcctggccagcgccagcttcagccccaacttcacccaggtgaccagcaccctgctgaacagcgcctaccccttcatcggccccttcttcttcatcatcagcggcagcctgagcatcgccacagagaagaggctgaccaagctgctggtgcacagcagcctggtgggcagcatcctgagcgccctgagcgccctggtgggcttcatcatcctgtctgtgaagcaggccaccctgaacccagccagcctgcagtggaacagcctgagtgatgctgacctgcacagcgctggcatcctgcccagctgtgcccactgctgtgccgctgtggagaccggcctgctgtag

SEQ ID NO: 244859 - DNA, 863 bp, Artificial Sequence
  derived and/or modified sequence
gagaaaccagagttaaaacctctttggagcttctgaggactcagctggaaccaacgggcacagttggcaacaccatcatgacatcacaacctgttcccaatgagaccatcatagtgctcccatcaaatgtcatcaacttctcccaagcagagaaacccgaacccaccaaccaggggcaggatagcctgaagaaacatctacacgcagaaatcaaagttattgggactatccagatcttgtgtggcatgatggtattgagcttggggatcattttggcatctgcttccttctctccaaattttacccaagtgacttctacactgttgaactctgcttacccattcataggaccctttttttttatcatctctggctctctatcaatcgccacagagaaaaggttaaccaagcttttggtgcatagcagcctggttggaagcattctgagtgctctgtctgccctggtgggtttcattatcctgtctgtcaaacaggccaccttaaatcctgcctcactgcagtggaactctctctctgatgctgatttgcactctgctggaattctgcctagctgtgctcactgctgtgctgcggtggaaacaggcttactctgacttccctgggagtgtacttttcctgcctcacagttacattggtaattctggcatgtcctcaaaaatgactcatgactgtggatatgaagaactattgacttcttaagaaaaaagggagaaatattaatcagaaagttgattcttatgataatatggaaaagttaaccattatagaaaagcaaagcttgagtttcctaaatgtaagcttttaaagtaatgaacattaaaaaaaaccattatttcactgtc

SEQ ID NO: 244860 - DNA, 537 bp, Artificial Sequence
  derived and/or modified sequence
atgaccagccagcccgtgcccaacgagaccatcatcgtgctgcccagcaacgtgatcaatttcagccaggccgaaaaacccgaacctactaaccaagggcaggactcactgaaaaaacacctgcatgccgaaatcaaagtgatcggtactatccaaattttgtgtggcatgatggtgctctccctgggtatcatcttagcttcagcctctttcagtccaaacttcactcaggtgacgagcactctgctcaactctgcgtatccatttattggccctttcttctttattatcagcggctcgctcagcattgctactgagaagcgattaaccaagctgttagtgcattcctcgctggtcggttctattctctcggctcttagtgctttggtaggatttattattcttagcgtgaagcaggctaccttaaaccctgcatccctgcagtggaattcgttatcggatgccgacctccactcagcagggattctgccgtcttgtgcacactgttgcgctgcggttgagaccggcttgctttag

SEQ ID NO: 244861 - DNA, 537 bp, Artificial Sequence
  derived and/or modified sequence
atgaccagccagcctgttcctaacgaaacaatcatcgtcctgcccagtaatgtgatcaacttcagtcaggcagagaaaccagaaccaaccaatcagggtcaagactccctgaaaaaacatttacacgccgagattaaagtcattgggaccatccaaattctgtgcggaatgatggtgctaagcctggggattatcctggccagcgcatcttttagccctaacttcacccaggtcacctcaaccttactgaactcagcataccctttcataggcccattcttcttcatcatcagcgggtcactgtccattgctactgaaaaacggctcaccaagcttttagtgcacagctccctcgtcgggtctattctctctgctttgtccgctctcgttgggttcatcatcctgtcagtcaaacaagcgacactcaatccagcatcactgcagtggaacagcttgagcgatgctgacctgcactctgcaggaattcttccctcttgtgctcactgctgcgcagccgtggaaacgggactgttgtag

SEQ ID NO: 244862 - DNA, 537 bp, Artificial Sequence
  derived and/or modified sequence
atgaccagccagcccgtgcccaacgagaccatcatcgtgctgcccagcaacgtgatcaacttcagccaggccgagaagcccgagcccaccaaccagggccaggacagcctgaagaagcacctgcacgccgagatcaaggtgatcggcaccatccagatcctgtgcggcatgatggtgctgagcctgggcatcatcctggccagcgccagcttcagccccaacttcacccaggtgaccagcaccctgctgaacagcgcctaccccttcatcggccccttcttcttcatcatcagcggcagcctgagcatcgccaccgagaagagactgaccaagctgctggtgcacagcagcctggtgggcagcatcctgagcgccctgagcgccctggtgggcttcatcatcctgagcgtgaagcaggccaccctgaaccccgccagcctgcagtggaacagcctgagcgacgccgacctgcacagcgccggcatcctgcccagctgcgcccactgctgcgccgccgtggagaccggcctgctgtag

SEQ ID NO: 244863 - DNA, 747 bp, Artificial Sequence
  derived and/or modified sequence
atgacaagccagcccgtgcccaatgaaacgataatagtccttccatcgaatgtgatcaatttcagccaagctgaaaagccagaaccaaccaatcaggggcaagatagtctgaagaaacatctccatgcagaaatcaaagttattggcacaatacaaattctttgcggcatgatggtcctctccttgggcatcattcttgctagcgcatcattctcaccgaattttactcaggtgacatccaccctgcttaattcggcctatccatttatcggaccattttttttcataatatcaggatccctcagcatcgctaccgagaaacgtcttactaagctgttggtacacagctctctggttgggagcatcttgtctgctctgtctgcactggttgggtttatcatcctgtccgtgaagcaggcaactttgaatcccgcctccctgcagtgcgagctggataaaaataacattcctacgcggtcctacgtttcttatttctaccacgactcgttgtatactacggactgttatacagcaaaagcctctctagccgggactctgtccttgatgttaatatgtaccctattagaattctgcctcgccgtcttgacggccgtgttgcgttggaagcaggcctattccgacttccccgggtccgtgctgttcctgccacactcttacatagggaatagcggaatgtcgagtaaaatgacacacgactgcgggtacgaggagttgctcacttcttag

SEQ ID NO: 244864 - DNA, 747 bp, Artificial Sequence
  derived and/or modified sequence
atgacttcccagcccgtccccaatgaaactataattgttctgcctagtaacgtgattaacttctcccaggccgaaaaaccagagcctacaaatcaggggcaagactctctgaaaaagcacttgcatgctgagatcaaggttatcggcacgattcagatcctctgcgggatgatggtcctctctctcggaataattctggccagtgcttcgttctctcctaattttacccaggtgactagcaccttgctgaattcggcctaccccttcattggcccctttttttttattatctccgggagcctgtcaattgctaccgaaaagaggcttacaaaactactggttcatagcagcttggttggctccatcctcagcgcgctgtcagcgctggtggggttcatcatcctctccgtgaaacaggcaacgttaaatcctgctagtctccagtgcgaactggataaaaacaacattcctacgagaagttatgtatcttacttctatcacgatagtctgtacactacagactgttacacagctaaggcctcactggccggaacactatccctgatgttaatttgtaccctgctagaattctgcctggccgtgctcacggcagtacttaggtggaagcaagcatactccgatttcccaggaagtgtgctgtttctgccccactcttatatcgggaacagcgggatgagctcaaaaatgacacacgactgcgggtacgaggaactgcttacaagctag

SEQ ID NO: 244865 - DNA, 747 bp, Artificial Sequence
  derived and/or modified sequence
atgaccagccagcctgtgcccaatgagaccatcatcgtgctgcccagcaatgtcatcaacttcagccaggccgagaagccagagcccaccaaccagggccaggacagcctgaagaagcacctgcatgctgagatcaaggtgattggcaccatccagatcctgtgtggcatgatggtgctgagcctgggcatcatcctggccagcgccagcttcagccccaacttcacccaggtgaccagcaccctgctgaacagcgcctaccccttcatcggccccttcttcttcatcatcagcggcagcctgagcatcgccacagagaagaggctgaccaagctgctggtgcacagcagcctggtgggcagcatcctgagcgccctgagcgccctggtgggcttcatcatcctgtctgtgaagcaggccaccctgaacccagccagcctgcagtgtgagctggacaagaacaacatccccaccaggagctatgtgtcctacttctaccatgacagcctgtacaccacagactgctacacagccaaggccagcctggccggcaccctgagcctgatgctgatctgcaccctgctggagttctgcctggccgtgctgacagctgtgctgcgctggaagcaggcctacagcgacttccctggctctgtgctcttcctgccccacagctacatcggcaacagcggcatgagcagcaagatgacccatgactgtggctatgaggagctgctgaccagctag

SEQ ID NO: 244866 - DNA, 747 bp, Artificial Sequence
  derived and/or modified sequence
atgaccagccagcccgtgcccaacgagaccatcatcgtgctgcccagtaatgtaattaatttcagccaagctgagaaacccgagcctactaaccagggccaggattcacttaagaaacacctccacgccgaaattaaagtgatcggaaccatccagatattatgcggcatgatggtcttgtcactgggaatcatcctggcctcagcttcattcagcccaaattttactcaggtcactagcactctcctgaactctgcttacccctttatcggccctttcttcttcatcatcagcggaagcctgagcattgcaaccgaaaagaggctgacaaaactcctggttcactcgtccctggtgggtagcatcctatccgctctctcagccctggttgggtttatcattttaagcgtcaagcaggccacgcttaatcccgcctctcttcagtgcgaacttgacaagaataatattcctacacgtagctacgtcagctatttctaccacgactccttatataccactgactgttatacggctaaagccagtcttgctggcacccttagtctgatgcttatctgtactctgctggaattctgtctcgccgtgctgacagctgtgctacggtggaaacaagcatattctgattttccggggagcgtcttgtttctcccccactcatatatcggcaatagcgggatgtcttcaaagatgacccacgactgtggttatgaagagcttctcacttcgtag

SEQ ID NO: 244867 - DNA, 747 bp, Artificial Sequence
  derived and/or modified sequence
atgaccagccagcccgtgcccaacgagaccatcatcgtgctgccctccaatgtgattaattttagtcaggccgagaagccagagccgacgaatcagggccaggactccctgaaaaaacaccttcacgccgaaatcaaggttataggcactattcaaattctctgcggtatgatggtgctctctctcgggataattcttgcctccgcaagcttttcccccaactttacccaggtgacttctaccctactaaacagcgcctatccttttatagggccattcttctttattatctccggatctctatcaattgcaaccgagaaacggctgaccaaactcctggtccattcaagcttagtcggctccattctttccgccctgagcgccttagtcggcttcatcattctcagtgttaagcaggccactttgaatcccgcatcacttcaatgtgaactggacaagaacaacattccgaccaggagctatgtatcttacttctatcatgatagtctgtacacgaccgattgttacacagctaaagcatctcttgccggtaccctctctttgatgttgatatgtacattactagagttctgcctcgcggtgctgacagctgttctccgctggaaacaggcatacagcgatttccccgggagtgtcctcttcctgccacattcgtatatcggcaattcgggcatgtcaagtaaaatgactcacgactgcggttacgaggaactcctcaccagctag

SEQ ID NO: 244868 - DNA, 747 bp, Artificial Sequence
  derived and/or modified sequence
atgacaagccaaccagtgcccaacgagactataattgttctgccatctaacgtcattaacttttcacaggcagaaaaaccagaaccaaccaaccagggacaagattctctgaaaaagcatttgcacgccgagatcaaggtgattgggacaattcaaatcctgtgcggcatgatggtgctgtcactcgggataattctggcctcagcttcatttagcccaaactttacacaagttacatcgacactgctgaacagcgcttatcccttcattggccctttctttttcatcatttctgggtccttgtctatcgcaaccgaaaaacgcctgaccaaattactggtgcattcctcactggtgggcagcatactcagcgcgctgtctgccttagtcggtttcataatactgagcgtaaaacaggctaccttgaatcctgccagcctgcagtgcgaattagacaaaaacaatatccctacccggtcgtacgtgtcctacttttaccacgattcactttatacaactgactgctacacagctaaagcctccctcgccggaacactttcactaatgcttatatgcactctactggaattttgtctcgctgtgctgactgctgtcttgcgctggaagcaggcctattctgatttccccggaagcgtgcttttccttccacatagctacataggcaactccggcatgtcatctaaaatgacccatgattgtggatacgaggaactgttaacctcgtag

SEQ ID NO: 244869 - DNA, 747 bp, Artificial Sequence
  derived and/or modified sequence
atgacctcccaaccagttcctaacgagactattatcgtcctgccttccaacgtgataaacttcagccaggcagaaaaaccagaacctactaatcagggtcaagattctctgaagaagcacctgcacgccgagataaaagtgatcgggacaattcagatcctttgtggcatgatggtcctcagcctagggatcattctggctagcgcctctttctccccaaactttacacaggtaactagtactttactgaactccgcatatcccttcatcggaccatttttttttatcatctctgggagcctgtctattgcaaccgaaaaaagactgaccaaactgctggtgcactcttcactggtaggctctatattatccgccctttctgctctcgtgggtttcattatactttctgtcaaacaggcaacactgaaccctgcgtcgctacaatgtgagctggacaaaaacaatatccctacacgaagctacgtgtcgtatttctaccacgacagcttatacaccactgactgctacacagcgaaggcaagcctggccggtacccttagcctgatgctgatctgcactcttctggagttctgcctcgcggtcctcacagctgttctgcgatggaagcaggcctactcagactttcctggcagtgtgctgttccttccccactcatacatcggaaactcaggaatgtccagcaagatgacgcacgattgcgggtacgaagagttgctgactagttag

SEQ ID NO: 244870 - DNA, 747 bp, Artificial Sequence
  derived and/or modified sequence
atgaccagccagcccgtgcccaacgagaccatcatcgtgctgcccagcaacgtgatcaacttcagccaggccgagaagcccgagcccaccaaccagggccaggacagcctgaagaagcacctgcacgccgagatcaaggtgatcggcaccatccagatcctgtgcggcatgatggtgctgagcctgggcatcatcctggccagcgccagcttcagccccaacttcacccaggtgaccagcaccctgctgaacagcgcctaccccttcatcggccccttcttcttcatcatcagcggcagcctgagcatcgccaccgagaagagactgaccaagctgctggtgcacagcagcctggtgggcagcatcctgagcgccctgagcgccctggtgggcttcatcatcctgagcgtgaagcaggccaccctgaaccccgccagcctgcagtgcgagctggacaagaacaacatccccaccagaagctacgtgagctacttctaccacgacagcctgtacaccaccgactgctacaccgccaaggccagcctggccggcaccctgagcctgatgctgatctgcaccctgctggagttctgcctggccgtgctgaccgccgtgctgagatggaagcaggcctacagcgacttccccggcagcgtgctgttcctgccccacagctacatcggcaacagcggcatgagcagcaagatgacccacgactgcggctacgaggagctgctgaccagctag

SEQ ID NO: 244871 - protein, 203 aa, Artificial Sequence
  derived and/or modified sequence
MVRLPLQCVLWGCLLTAVHPEPPTACREKQYLINSQCCSLCQPGQKLVSDCTEFTETECLPCGESEFLDTWNRETHCHQHKYCDPNLGLRVQQKGTSETDTICTCEEGWHCTSEACESCVLHRSCSPGFGVKQIATGVSDTICEPCPVGFFSNVSSAFEKCHPWTRSPGSAESPGGDPHHLRDPVCHPLGAGLYQKGGQEANQ

SEQ ID NO: 244872 - DNA, 612 bp, Artificial Sequence
  derived and/or modified sequence
atggtacggctgcccctacagtgtgtcctctggggttgcctgctgacagcagtgcacccagagccgcccaccgcatgccgggaaaagcaataccttatcaactcgcaatgctgctccttgtgccagcccggtcagaaacttgtatcagactgcactgagttcaccgaaaccgagtgcttaccatgcggggaatctgaattcctcgatacatggaaccgagagacacattgtcatcagcataagtactgtgacccaaacctaggattacgcgtccagcagaaaggaacctcagaaacggacactatctgtacatgcgaagagggatggcactgtacctcagaagcatgcgagagttgtgtgctccaccgtagttgttctcccggctttggcgtgaagcaaatcgcgactggggtatctgacaccatttgtgaaccatgtccagtcggtttctttagcaatgtttcttctgcgttcgagaaatgtcacccctggacgcgatcccccggctctgcggaaagccctggcggcgatcctcatcaccttcgagatccagtgtgccatccactgggcgcgggtctttatcaaaaaggcggacaggaggccaaccagtag

SEQ ID NO: 244873 - DNA, 612 bp, Artificial Sequence
  derived and/or modified sequence
atggtgcggctgcccctgcagtgtgtgctgtggggctgcctgctgacagctgtgcaccctgagcccccaacagcctgccgggagaagcagtacctgatcaacagccagtgctgcagcctgtgccagcccggccagaagctggtgtctgactgcacagagttcacagaaacagagtgcctgccctgtggggagagcgagttcctggacacctggaaccgggagacccactgccaccagcacaagtactgtgaccccaacctgggcctgcgggtgcagcagaagggcaccagcgagacagacaccatctgcacctgtgaggagggctggcactgcaccagcgaggcctgtgagagctgtgtgctgcacaggagctgcagccctggctttggagtgaagcagatcgccaccggggtgtctgacaccatctgtgagccctgccctgtgggcttcttcagcaatgtgagcagcgcctttgagaagtgccacccctggaccaggagccctggcagcgctgagagccctggaggagacccccaccacctgcgggaccctgtgtgccaccccctgggcgccggcctgtaccagaagggcggccaggaggccaaccagtag

SEQ ID NO: 244874 - DNA, 612 bp, Artificial Sequence
  derived and/or modified sequence
atggtgcggctgcccctgcagtgcgtgctgtggggctgcctgctgacagccgtgcacccagagcccccaaccgcctgtagagagaagcaatatttaatcaacagccagtgttgttcattgtgtcaacctggacagaagctggtgtcggactgcaccgaattcacagagacagagtgcttgccttgcggcgagtctgaattcctggatacttggaaccgggagactcactgccaccaacacaagtactgcgaccccaacttgggactgagagttcagcagaaagggacctctgagacggacactatctgcacatgcgaggagggctggcactgtacttccgaggcgtgcgaatcctgcgtcctgcaccgcagctgtagtccaggattcggtgtgaaacagattgccacaggggtcagcgacacgatctgtgagccatgccccgtcggatttttttcgaacgtatcatcagcttttgaaaagtgccatccctggactagaagccctggaagcgccgaatctcccggcggagacccgcaccacctcagggatccagtatgccatccccttggcgccgggctatatcagaagggaggccaggaagcgaaccagtag

SEQ ID NO: 244875 - DNA, 612 bp, Artificial Sequence
  derived and/or modified sequence
atggtgaggctgcctctgcagtgtgtgctgtggggttgtctgctgaccgccgtacaccccgagcccccaacagcctgtagagaaaagcagtacctgattaactcccagtgctgttccctgtgtcaaccaggacaaaagttggtgtctgactgtacggagttcactgaaacagaatgcctcccctgcggggagagtgaattcttggacacctggaaccgtgagacacattgccaccagcacaaatactgcgaccccaacctcggccttcgggtacagcagaagggaacatcagagacagacacaatctgcacttgtgaggagggatggcattgtaccagcgaagcgtgtgagagctgtgttctccaccgatcatgctcccctgggtttggagtgaagcagattgccactggagtttctgacactatctgcgagccatgccctgtcggcttcttttcaaacgtttcctctgcattcgaaaaatgtcacccgtggacacggtcacctggatccgctgaatcccctggaggagaccctcatcaccttcgagatcctgtgtgtcaccctctcggggcaggactctaccagaagggaggtcaggaggccaaccagtag

SEQ ID NO: 244876 - DNA, 1623 bp, Artificial Sequence
  derived and/or modified sequence
tggtcctgccgcctggtctcacctcgctatggttcgtctgcctctgcagtgcgtcctctggggctgcttgctgaccgctgtccatccagaaccacccactgcatgcagagaaaaacagtacctaataaacagtcagtgctgttctttgtgccagccaggacagaaactggtgagtgactgcacagagttcactgaaacggaatgccttccttgcggtgaaagcgaattcctagacacctggaacagagagacacactgccaccagcacaaatactgcgaccccaacctagggcttcgggtccagcagaagggcacctcagaaacagacaccatctgcacctgtgaagaaggctggcactgtacgagtgaggcctgtgagagctgtgtcctgcaccgctcatgctcgcccggctttggggtcaagcagattgctacaggggtttctgataccatctgcgagccctgcccagtcggcttcttctccaatgtgtcatctgctttcgaaaaatgtcacccttggacaaggtccccaggatcggctgagagccctggtggtgatccccatcatcttcgggatcctgtttgccatcctcttggtgctggtctttatcaaaaaggtggccaagaagccaaccaataaggccccccaccccaagcaggaaccccaggagatcaattttcccgacgatcttcctggctccaacactgctgctccagtgcaggagactttacatggatgccaaccggtcacccaggaggatggcaaagagagtcgcatctcagtgcaggagagacagtgaggctgcacccacccaggagtgtggccacgtgggcaaacaggcagttggccagagagcctggtgctgctgctgctgtggcgtgagggtgaggggctggcactgactgggcatagctccccgcttctgcctgcacccctgcagtttgagacaggagacctggcactggatgcagaaacagttcaccttgaagaacctctcacttcaccctggagcccatccagtctcccaacttgtattaaagacagaggcagaagtttggtggtggtggtgttggggtatggtttagtaatatccaccagaccttccgatccagcagtttggtgcccagagaggcatcatggtggcttccctgcgcccaggaagccatatacacagatgcccattgcagcattgtttgtgatagtgaacaactggaagctgcttaactgtccatcagcaggagactggctaaataaaattagaatatatttatacaacagaatctcaaaaacactgttgagtaaggaaaaaaaggcatgctgctgaatgatgggtatggaactttttaaaaaagtacatgcttttatgtatgtatattgcctatggatatatgtataaatacaatatgcatcatatattgatataacaagggttctggaagggtacacagaaaacccacagctcgaagagtggtgacgtctggggtggggaagaagggtctgggggagggttggttaaagggagatttggctttcccataatgcttcatcatttttcccaaaaggagagtgaattcacataatgcttatgtaattaaaaaatcatcaaacatgtaaaaagaaaa

SEQ ID NO: 244877 - DNA, 612 bp, Artificial Sequence
  derived and/or modified sequence
atggtgagactgcccctgcagtgcgtgctgtggggctgcctgctgaccgccgtgcaccccgagccccccaccgcctgcagagagaagcagtacctgatcaacagccagtgctgcagcctgtgccagcccggccagaagctggtgagcgactgcaccgagttcaccgagaccgagtgcctgccctgcggcgagagcgagttcctggacacctggaacagagagacccactgccaccagcacaagtactgcgaccccaacctgggcctgagagtgcagcagaagggcaccagcgagaccgacaccatctgcacctgcgaggagggctggcactgcaccagcgaggcctgcgagagctgcgtgctgcacagaagctgcagccccggcttcggcgtgaagcagatcgccaccggcgtgagcgacaccatctgcgagccctgccccgtgggcttcttcagcaacgtgagcagcgccttcgagaagtgccacccctggaccagaagccccggcagcgccgagagccccggcggcgacccccaccacctgagagaccccgtgtgccaccccctgggcgccggcctgtaccagaagggcggccaggaggccaaccagtag

SEQ ID NO: 244878 - protein, 84 aa, Artificial Sequence
  derived and/or modified sequence
MRPGTGQGGLEAPGEPGPNLRQRWPLLLLGLAVVTHGLLRPTAASQSRALGPGAPGGSSRSSLRSRWGRSAQGHPLGHSVPAVL

SEQ ID NO: 244879 - DNA, 255 bp, Artificial Sequence
  derived and/or modified sequence
atgcgaccaggaacggggcagggaggcctggaagcaccgggcgagcctggccctaacctgcggcagaggtggcccttattattgcttggacttgccgtggtaacccatggcctcctgcgccctactgctgcgtctcagtccagggctcttgggcctggcgctccagggggttccagccgttcttcgctgaggtcccgttgggggcgaagcgcacagggccaccctctgggtcatagcgtgccggccgtgctctag

SEQ ID NO: 244880 - DNA, 255 bp, Artificial Sequence
  derived and/or modified sequence
atgaggcctggcaccggccagggcggcctggaggcccctggagagcccggccccaacctgcggcagcgctggcccctgctgctgctgggcctggccgtggtgacccacggcctgctgcggcccacagctgccagccagagccgggccctgggccctggggcccctgggggcagcagccgcagcagcctgcggagccgctggggccgcagcgcccagggccaccccctgggccacagcgtgcctgctgtgctgtag

SEQ ID NO: 244881 - DNA, 255 bp, Artificial Sequence
  derived and/or modified sequence
atgcggcccggcaccggccagggcggcctggaggcccccggcgagcccggcccaaatcttcggcagaggtggcccctgcttctcttaggtcttgcggttgttacccacggattactgcgtccaacagcagcttcccaatctcgcgccctgggtccgggagcccctggcggcagctcacgatccagcctgcgctctcggtggggaagaagcgcccaaggccatcctctggggcactctgtacctgctgtgctttag

SEQ ID NO: 244882 - DNA, 255 bp, Artificial Sequence
  derived and/or modified sequence
atgaggcctggcaccgggcaggggggacttgaagccccaggagaacctggccctaatctcagacagcggtggccactcctgttgttagggctggccgtcgtcactcatggactgttgcggcctacagctgccagccagagccgcgctttggggccaggcgctcccggaggatcttcacgctccagtcttcgatctagatggggtaggtcagctcagggacacccattgggacattccgtgccagctgttctgtag

SEQ ID NO: 244883 - DNA, 255 bp, Artificial Sequence
  derived and/or modified sequence
atgagacccggcaccggccagggcggcctggaggcccccggcgagcccggccccaacctgagacagagatggcccctgctgctgctgggcctggccgtggtgacccacggcctgctgagacccaccgccgccagccagagcagagccctgggccccggcgcccccggcggcagcagcagaagcagcctgagaagcagatggggcagaagcgcccagggccaccccctgggccacagcgtgcccgccgtgctgtag

SEQ ID NO: 244884 - protein, 852 aa, Artificial Sequence
  derived and/or modified sequence
MEYERRGGRGDRTGRYGATDRSQDDGGENRSRDHDYRDMDYRSYPREYGSQEGKHDYDDSSEEQSAEIRGQLQSHGVQAREVRLMRNKSSGQSRGFAFVEFSHLQDATRWMEANQHSLNILGQKVSMHYSDPKPKINEDWLCNKCGVQNFKRREKCFKCGVPKSEAEQKLPLGTRLDQQTLPLGGRELSQGLLPLPQPYQAQGVLASQALSQGSEPSSENANDTIILRNLNPHSTMDSILGALAPYAVLSSSNVRVIKDKQTQLNRGFAFIQLSTIEAAQLLQILQALHPPLTIDGKTINVEFAKGSKRDMASNEGSRISAASVASTAIAAAQWAISQASQGGEGTWATSEEPPVDYSYYQQDEGYGNSQGTESSLYAHGYLKGTKGPGITGTKGDPTGAGPEASLEPGADSVSMQAFSRAQPGAAPGIYQQSAEASSSQGTAANSQSYTIMSPAVLKSELQSPTHPSSALPPATSPTAQESYSQYPVPDVSTYQYDETSGYYYDPQTGLYYDPNSQYYYNAQSQQYLYWDGERRTYVPALEQSADGHKETGAPSKEGKEKKEKHKTKTAQQIAKDMERWARSLNKQKENFKNSFQPISSLRDDERRESATADAGYAILEKKGALAERQHTSMDLPKLASDDRPSPPRGLVAAYSGESDSEEEQERGGPEREEKLTDWQKLACLLCRRQFPSKEALIRHQQLSGLHKQNLEIHRRAHLSENELEALEKNDMEQMKYRDRAAERREKYGIPEPPEPKRRKYGGISTASVDFEQPTRDGLGSDNIGSRMLQAMGWKEGSGLGRKKQGIVTPIEAQTRVRGSGLGARGSSYGVTSTESYKETLHKTMVTRFNEAQ

SEQ ID NO: 244885 - DNA, 2559 bp, Artificial Sequence
  derived and/or modified sequence
atggagtatgagaggagagggggacggggtgaccggactggtcgctacggcgccacggatcgctcgcaagacgatggcggggaaaataggtcaagagatcacgactacagggatatggactacagatcctatccaagagaatacggctcacaagaggggaagcacgactacgacgatagttccgaagagcaaagtgccgagataagaggccagctccagtcccatggggtgcaggcacgtgaggtgagactcatgcggaacaagagtagcggacaatctagggggttcgcatttgtcgaattttctcacttgcaggacgcaacgaggtggatggaagctaaccagcacagtctaaacatcctcggccagaaagtgtctatgcattattccgatccaaagccaaaaatcaacgaagattggctgtgtaacaaatgcggtgtgcagaacttcaagaggcgtgaaaaatgtttcaagtgcggagtgccaaagtcagaagcagaacagaaactgccactggggacaagacttgatcagcagaccctgcctttaggagggcgcgagctgagccagggcttgctcccactacctcagccatatcaggctcagggcgtgctggcatctcaggcactgagccagggtagcgaaccttcctcagagaacgcaaacgacactattattctgagaaatctgaacccccacagcaccatggacagtattctgggcgccttagcaccctatgcagttctgagctcaagcaacgtacgcgttattaaggacaagcagactcagctgaatcgcggatttgctttcatccaactttctactattgaagcagcccaattactccagatactgcaggcattgcatccccctctcaccatcgatgggaagactatcaacgtcgaatttgcaaaaggatccaaacgggacatggccagcaacgaaggttcgcgaatttctgcggcctcagtcgcctcaacagcgatcgctgccgcccagtgggcaatctcgcaggcttcccagggtggagagggcacctgggccacaagcgaggagccccctgtcgattactcatactatcaacaggacgaggggtatggaaacagtcaggggacagagagctctctgtacgcccacggctacctcaagggaaccaaaggacccggtatcacaggtacaaagggcgaccctaccggagcgggccccgaggcctcacttgagcctggcgctgattcagtctccatgcaggcgttttctagggctcaaccgggcgcggctcccggaatctatcagcagtcagccgaagcgagttcgagccaagggacagccgcgaactcccaaagttatacaatcatgagccctgccgtgctcaaaagcgaactgcagtcccccacccacccctcatctgcactacccccagccacctcaccgacagctcaagagagctactctcagtatccggtgcccgatgtgagtacataccagtatgacgagaccagtggttattattatgaccctcagaccgggctctattatgaccccaattcccagtactactacaacgctcaatctcagcagtatttgtattgggacggagagcgcaggacctatgtcccagcactggaacagtccgcagacggacacaaggagacaggcgccccatccaaggaggggaaagagaaaaaggagaaacataaaaccaaaaccgcacaacagattgctaaagacatggagagatgggcacgctctttgaataagcagaaggagaacttcaagaactctttccagcctatttctagtctgcgggatgatgagcgtagagagagcgctacagcggacgcaggctacgcaattctagaaaaaaaaggggcccttgctgaaaggcaacacacctccatggatctgcctaaattagcttccgatgatcgcccgagtcctcctagaggtttggttgccgcgtacagtggtgagtctgattccgaggaggaacaagagagaggaggaccagagagggaagagaagctgaccgattggcagaaattagcctgcctgttgtgtcggagacagttcccaagcaaagaggctttgatcagacatcaacaattgtcaggtttgcacaagcaaaatcttgagatacacaggcgggctcatctttccgagaatgaattggaagctctggagaaaaacgacatggagcaaatgaaataccgagatcgagctgctgagagacgggaaaaatatggcataccagaaccccctgaacccaaaaggcgcaaatacggaggcatttcaacagcttccgtagatttcgaacaaccaactagggatgggttaggctcagacaacatcgggtctcgtatgttgcaggctatgggctggaaggagggcagcggcctagggaggaaaaagcaagggattgtcacacccattgaggcgcagactagagttagggggtccggtctgggggcacggggcagcagttatggtgtgacttccaccgagtcctacaaagaaactttgcataagaccatggtgactcgctttaacgaagcccagtag

SEQ ID NO: 244886 - DNA, 2559 bp, Artificial Sequence
  derived and/or modified sequence
atggagtatgaaagaagaggaggccgcggggacagaacaggccgctacggggccacagacaggagccaggatgatggaggagagaacagaagccgggaccatgactacagagacatggactaccgcagctacccccgggagtatggcagccaggagggcaagcatgactatgatgacagcagcgaggagcagagcgctgagatccggggccagctgcagagccatggagtgcaggcccgggaggtgcggctgatgaggaacaagagcagcggccagagccggggctttgcctttgtggagttcagccacctgcaggatgccacccgctggatggaggccaaccagcacagcctgaacatcctgggccagaaggtgtccatgcactacagcgaccccaagcccaagatcaatgaagactggctgtgcaacaagtgtggggtgcagaacttcaagaggcgggagaagtgcttcaagtgtggggtgcccaagtctgaggccgagcagaagctgcccctgggcacccggctggaccagcagaccctgcccctgggcggccgggagctgagccagggcctgctgcccctgccccagccctaccaggcccagggcgtgctggccagccaggccctgagccagggcagcgagcccagcagtgaaaatgccaatgacaccatcatcctgaggaacctgaacccccacagcaccatggacagcatcctgggcgccctggccccctatgctgtgctgagcagcagcaatgtgcgggtcatcaaggacaagcagacccagctgaacagaggatttgccttcatccagctgagcaccatcgaggccgcccagctgctgcagatcctgcaggccctgcacccccccctgaccattgatggcaagaccatcaacgtggagtttgccaagggcagcaagagggacatggccagcaatgaaggcagccgcatctctgctgcctctgtggccagcacagccatcgctgctgcccagtgggccatcagccaggccagccagggcggggagggcacctgggccaccagcgaggagccccctgtggactacagctactaccagcaggatgagggctacggcaacagccagggcacagagagcagcctgtatgcccacggctacctgaagggcaccaagggccctggcatcaccggcaccaagggggaccccaccggggccggccctgaggccagcctggagcccggggctgacagcgtgtccatgcaggccttcagccgggcccagcctggagctgcccctggcatctaccagcagagcgctgaggccagcagcagccagggcacagctgccaacagccagagctacaccatcatgagccctgctgtgctgaagtctgagctgcagagccccacccaccccagcagcgccctgcccccagccaccagccccacagcccaggagagctacagccagtaccctgtgcctgatgtgtccacctaccagtatgatgagaccagcggctactactatgacccccagacaggcctgtactatgaccccaacagccagtactactacaatgcccagagccagcagtacctgtactgggatggagagaggaggacctacgtgcctgccctggagcagagcgcagatggccacaaggagactggagcccccagcaaggagggcaaggagaagaaggagaagcacaagaccaagacagcccagcagatcgccaaggacatggagcgctgggcccggagcctgaacaagcagaaggagaacttcaagaacagcttccagcccatcagcagcctgagagatgatgagcggcgggagagcgccacagcagatgctggctacgccatcctggagaagaagggggccctggccgagcggcagcacacctccatggacctgcccaagctggccagtgatgaccggcccagccccccccggggcctggtggccgcctacagcggggagagtgacagcgaggaggagcaggagcggggcggccctgagcgggaggagaagctgacagactggcagaagctggcctgcctgctgtgccggcggcagttccccagcaaggaggccctgatccgccaccagcagctgagcggcctgcacaagcagaacctggagatccaccggcgggcccacctgtctgaaaatgagctggaggccctggagaagaatgacatggagcagatgaagtacagagacagagctgctgagcggcgggagaagtatggcatccctgagcccccagagcccaagaggaggaaatatggaggcatcagcacagcctctgtggactttgagcagcccaccagagatggcctgggcagtgacaacatcggcagcaggatgctgcaggccatgggctggaaggagggcagcggcctgggcaggaagaagcagggcatcgtgacccccatcgaggcccagaccagggtgcggggcagcggcctgggcgcccggggcagcagctatggagtgaccagcacagagagctacaaggagaccctgcacaagaccatggtgacccgcttcaatgaggcccagtag

SEQ ID NO: 244887 - DNA, 2559 bp, Artificial Sequence
  derived and/or modified sequence
atggagtacgagcggcggggcggccggggcgaccggaccggccggtatggtgctaccgataggagtcaggacgacgggggcgagaacaggtctcgtgatcatgattacagggacatggattatagatcgtaccccagagagtatggaagccaggagggcaagcatgactacgatgacagcagcgaggagcagtcagcagaaattcggggacagctgcagagtcacggcgtgcaggcacgggaagtgagacttatgaggaacaaatcctcagggcaatcccgggggtttgccttcgtggagttctctcatctccaggacgccacaaggtggatggaagcaaaccagcatagcctgaacatcttgggccagaaggtttctatgcactattcagaccctaaaccaaagattaatgaggattggctgtgcaataagtgcggtgtacagaacttcaaacgacgcgagaaatgctttaaatgtggagtacctaagagcgaagctgaacagaaacttcccctcggtacacggttggatcagcaaacgctgccactgggcggacgagagctctcccaagggttgttacctttgccgcagccttatcaagctcaaggggtccttgcctcacaagcgctgtcccaaggctctgaaccatcctctgaaaacgccaacgatactataattctgcggaacctgaacccacatagtacaatggattcgattctgggcgccctggcaccctacgcagtcttgagctcctcaaatgtgagagtgatcaaagataagcagacccagctgaatcgggggttcgccttcattcagctttcaacaatcgaggctgcccagcttcttcaaattctgcaggccctgcacccgcccctcacgattgatggcaaaaccattaatgtggagttcgcaaagggctccaagagggacatggcaagcaacgaaggcagcaggatttcagccgcctccgtggcttccacagctatcgccgcagcacagtgggcaatcagtcaagcttcacagggaggagagggcacatgggcaacatccgaagaaccacccgttgactatagttactaccagcaggatgagggctatgggaacagccaaggtactgagagcagcctctacgcacacgggtacctgaaggggaccaaaggacccggaatcactggcaccaagggggacccaacaggcgccggcccagaagctagcctggaacccggggccgattccgtctctatgcaagccttttctcgcgcccagcccggcgccgcccctgggatttaccagcaatcagctgaggcatccagtagccagggcacagccgcaaactcccagagctatacgataatgagtccagccgtgctaaagtcggaactccagagccctacacacccttcatccgcactgccacctgcaacaagccccaccgcccaggagagttactctcagtaccctgtccctgacgtttcgacctatcagtatgacgagacttctggctactattatgatccacagacaggtctgtattacgaccctaattcccaatattactataatgcccagtcccaacagtatctgtactgggatggggagagacgcacatacgtcccggcactggagcagtctgcggacggccataaggaaactggcgctccttccaaggagggcaaggagaaaaaagagaagcataaaacaaagactgcgcagcaaattgcaaaggacatggagaggtgggccagatcattaaataagcaaaaggaaaattttaaaaactcatttcagcccatctcttctttgagagatgatgagagacgagaaagcgccaccgccgatgccggttacgcaatcttggaaaaaaagggcgcactggccgagagacagcatactagtatggacctgcccaaattggcaagcgatgatcgtccctcaccgccacggggtctcgtggccgcttactccggtgagtccgatagcgaggaggaacaagagcgcggagggcccgaacgcgaggaaaagctgactgattggcagaagttggcttgtctgttgtgccgacgtcagtttccctcgaaagaagctctgattcgacatcagcagctctctgggctccataaacaaaatctggagatccacaggcgtgcacatctgtccgagaatgagctggaggcccttgaaaagaatgatatggagcagatgaaatacagagacagggccgccgaaagaagggaaaagtacggcatcccagaaccccctgaacctaaacggagaaaatatgggggcatcagcacagcctctgtcgatttcgagcagccaactagggacggattgggatccgacaacatcggatcaagaatgctacaggccatgggctggaaagagggctctgggcttggtcgaaaaaagcagggaattgtcaccccgatagaagctcagacgcgggttcggggcagtgggctgggagctagagggtcttcgtatggtgtgactagtacagagtcctacaaggagactcttcataagacaatggtcacgcgtttcaacgaggctcagtag

SEQ ID NO: 244888 - DNA, 2559 bp, Artificial Sequence
  derived and/or modified sequence
atggagtatgagaggcgaggcggaagaggcgataggacaggccgttacggggcaactgacagatcacaggacgacggtggagaaaaccggtccagagaccacgattacagagatatggattaccgaagctaccctagggaatacggaagtcaggaagggaaacacgattatgacgactcatcagaagaacagtcagcggagataagggggcagctccagagtcatggagtgcaggcacgcgaggtgcgcctgatgagaaataaaagctcaggtcagtcgcgaggatttgcgtttgtagagttcagccacctccaggacgccactcgctggatggaagccaatcagcactcacttaacattcttggtcaaaaagtcagtatgcattactcagatcctaagcctaagatcaacgaggactggctgtgcaataagtgtggcgtgcagaatttcaaaagaagggaaaagtgctttaagtgcggtgtgccaaagtcagaagccgaacagaagttgcccctgggcacaagattggaccagcagaccctgccccttggcggacgggaactttcccaagggttattgcccctgccacaaccataccaggctcagggcgtgctcgcctcccaggccctgtctcagggaagcgagccttcctctgaaaacgccaatgatacaattattctgcggaacctgaacccacatagcactatggacagcatccttggcgcacttgctccatatgctgtgctgagttcaagcaacgtgcgggtgatcaaggataaacaaacccagcttaacagaggattcgcgtttatccaactaagtaccatcgaggccgcacagctgcttcagatcctccaggccctgcaccctcccctgacaatcgatggcaagacaattaacgtggaattcgcgaagggaagcaagcgcgacatggcgtctaacgaggggtctaggatatctgcagcatctgtggccagtacagccattgccgctgcacagtgggctatatcccaggcgtcacagggaggcgagggcacctgggcaacaagtgaggaaccccctgtggactactcgtattatcagcaagacgaaggctatggaaactctcaggggactgagagtagcctctatgcccatggctacctgaaggggaccaaagggcctggtatcaccgggacaaaaggagaccctaccggtgcgggacccgaggcaagcttagagcctggggctgacagcgttagcatgcaggcgttttcccgggctcagcctggcgcagccccaggcatttaccagcagtccgccgaggcttccagttcccagggcactgccgcaaattctcagagttatactattatgagcccagctgtgctgaaatctgagctgcagtcccctacacatccctcttcggcgttgcctccagccacctcccccacagcccaagagtcctattctcaatacccagtgccagacgtgagcacctaccagtacgatgagacttctggatactattatgacccccagacgggtctgtactatgaccccaattcccaatactactacaatgctcagagccagcagtacctctactgggatggagaacgtcgcacctacgtaccagcactcgagcaaagcgcggatggccataaagaaaccggggcacctagcaaagaggggaaagaaaagaaggagaagcataagacgaaaactgcacagcagatcgctaaagatatggagcgctgggcacgtagcctcaataagcaaaaagagaacttcaaaaactcatttcaaccgatttcaagtttgagggacgatgagaggcgagagagtgcgaccgcggacgctggctacgccatcttagagaaaaagggagccctcgctgagaggcagcacacatcaatggacttgcctaaactggcgagcgatgatcgtcccagtccgcctcggggactagtcgccgcatactccggggagtccgattctgaggaggagcaggagcggggaggacctgaacgagaagaaaaactgacagactggcagaaattagcatgtctgctgtgccgccgtcagttcccttccaaggaggcactcatccgacatcaacagctctccgggttgcataaacagaacctggaaattcatcggagggcacacctgtctgaaaacgagctggaagctttggaaaaaaacgatatggaacagatgaagtacagggatcgtgctgcggagcggagggagaaatacggaatcccggagcctccagagcccaagcggaggaagtacgggggaatcagcacagcctcagttgacttcgaacaaccaacccgggacgggctggggtctgacaacatcgggtctagaatgctccaggcaatggggtggaaagaaggtagtggcctcggtaggaagaaacaaggcatagtcacaccaatcgaagcccagacccgcgttcggggatccgggttaggggcacgaggctcctcatatggagttactagtacagagagctacaaagagacattgcataaaactatggtgactcgcttcaacgaggctcaatag

SEQ ID NO: 244889 - DNA, 2559 bp, Artificial Sequence
  derived and/or modified sequence
atggagtacgagagaagaggcggcagaggcgacagaaccggcagatacggcgccaccgacagaagccaggacgacggcggcgagaacagaagcagagaccacgactacagagacatggactacagaagctaccccagagagtacggcagccaggagggcaagcacgactacgacgacagcagcgaggagcagagcgccgagatcagaggccagctgcagagccacggcgtgcaggccagagaggtgagactgatgagaaacaagagcagcggccagagcagaggcttcgccttcgtggagttcagccacctgcaggacgccaccagatggatggaggccaaccagcacagcctgaacatcctgggccagaaggtgagcatgcactacagcgaccccaagcccaagatcaacgaggactggctgtgcaacaagtgcggcgtgcagaacttcaagagaagagagaagtgcttcaagtgcggcgtgcccaagagcgaggccgagcagaagctgcccctgggcaccagactggaccagcagaccctgcccctgggcggcagagagctgagccagggcctgctgcccctgccccagccctaccaggcccagggcgtgctggccagccaggccctgagccagggcagcgagcccagcagcgagaacgccaacgacaccatcatcctgagaaacctgaacccccacagcaccatggacagcatcctgggcgccctggccccctacgccgtgctgagcagcagcaacgtgagagtgatcaaggacaagcagacccagctgaacagaggcttcgccttcatccagctgagcaccatcgaggccgcccagctgctgcagatcctgcaggccctgcacccccccctgaccatcgacggcaagaccatcaacgtggagttcgccaagggcagcaagagagacatggccagcaacgagggcagcagaatcagcgccgccagcgtggccagcaccgccatcgccgccgcccagtgggccatcagccaggccagccagggcggcgagggcacctgggccaccagcgaggagccccccgtggactacagctactaccagcaggacgagggctacggcaacagccagggcaccgagagcagcctgtacgcccacggctacctgaagggcaccaagggccccggcatcaccggcaccaagggcgaccccaccggcgccggccccgaggccagcctggagcccggcgccgacagcgtgagcatgcaggccttcagcagagcccagcccggcgccgcccccggcatctaccagcagagcgccgaggccagcagcagccagggcaccgccgccaacagccagagctacaccatcatgagccccgccgtgctgaagagcgagctgcagagccccacccaccccagcagcgccctgccccccgccaccagccccaccgcccaggagagctacagccagtaccccgtgcccgacgtgagcacctaccagtacgacgagaccagcggctactactacgacccccagaccggcctgtactacgaccccaacagccagtactactacaacgcccagagccagcagtacctgtactgggacggcgagagaagaacctacgtgcccgccctggagcagagcgccgacggccacaaggagaccggcgcccccagcaaggagggcaaggagaagaaggagaagcacaagaccaagaccgcccagcagatcgccaaggacatggagagatgggccagaagcctgaacaagcagaaggagaacttcaagaacagcttccagcccatcagcagcctgagagacgacgagagaagagagagcgccaccgccgacgccggctacgccatcctggagaagaagggcgccctggccgagagacagcacaccagcatggacctgcccaagctggccagcgacgacagacccagcccccccagaggcctggtggccgcctacagcggcgagagcgacagcgaggaggagcaggagagaggcggccccgagagagaggagaagctgaccgactggcagaagctggcctgcctgctgtgcagaagacagttccccagcaaggaggccctgatcagacaccagcagctgagcggcctgcacaagcagaacctggagatccacagaagagcccacctgagcgagaacgagctggaggccctggagaagaacgacatggagcagatgaagtacagagacagagccgccgagagaagagagaagtacggcatccccgagccccccgagcccaagagaagaaagtacggcggcatcagcaccgccagcgtggacttcgagcagcccaccagagacggcctgggcagcgacaacatcggcagcagaatgctgcaggccatgggctggaaggagggcagcggcctgggcagaaagaagcagggcatcgtgacccccatcgaggcccagaccagagtgagaggcagcggcctgggcgccagaggcagcagctacggcgtgaccagcaccgagagctacaaggagaccctgcacaagaccatggtgaccagattcaacgaggcccagtag

SEQ ID NO: 244890 - DNA, 456 bp, Artificial Sequence
  derived and/or modified sequence
atgaccaacgaggagcccctgcccaagaaggtgagactgagcgagaccgacttcaaggtgatggccagagacgagctgatcctgagatggaagcagtacgaggcctacgtgcaggccctggagggcaagtacaccgacctgaacagcaacgacgtgaccggcctgagagagagcgaggagaagctgaagcagcagcagcaggagagcgccagaagagagaacatcctggtgatgagactggccaccaaggagcaggagatgcaggagtgcaccacccagatccagtacctgaagcaggtgcagcagcccagcgtggcccagctgagaagcaccatggtggaccccgccatcaacctgttcttcctgaagatgaagggcgagctggagcagaccaaggacaagctggagcaggcccagaacgagctgagcgcctggaagttcacccccgacagatag

SEQ ID NO: 244891 - DNA, 456 bp, Artificial Sequence
  derived and/or modified sequence
atgactaatgaggaacccctgcccaagaaggttagactgagcgagacagattttaaggtgatggctcgggacgagctgattctccgatggaagcagtacgaggcgtacgttcaggcacttgaaggtaagtacaccgatttgaatagtaacgatgtaacagggctccgggagagcgaggagaaactgaaacagcaacagcaagaaagcgcacggcgggaaaatatcctagtgatgcggttggccactaaagaacaggagatgcaggagtgtacgacccaaattcagtatctgaagcaggtacaacagccatccgtcgcccagctccggtcgacgatggtcgacccggctatcaaccttttcttccttaaaatgaaaggtgagctcgaacagacaaaggataagcttgagcaggctcaaaatgaactcagcgcatggaagtttacccctgatcgctag

SEQ ID NO: 244892 - DNA, 456 bp, Artificial Sequence
  derived and/or modified sequence
atgaccaatgaggagcccctgcccaagaaggtgcggctgtctgaaacagacttcaaggtgatggccagagatgagctgatcctgcgctggaagcagtatgaggcctacgtgcaggccctggagggcaagtacacagacctgaacagcaatgatgtgacaggcctgcgggagagcgaggagaagctgaagcagcagcagcaggagagcgcccggcgggagaacatcctggtgatgaggctggccaccaaggagcaggagatgcaggagtgcaccacccagatccagtacctgaagcaggtgcagcagcccagcgtggcccagctgcggagcaccatggtggaccctgccatcaacctcttcttcctgaagatgaagggggagctggagcagaccaaggacaagctggagcaggcccagaatgagctgagcgcctggaagttcaccccagacagatag

SEQ ID NO: 244893 - DNA, 456 bp, Artificial Sequence
  derived and/or modified sequence
atgaccaacgaggagcccctgcccaagaaggtgcggctgagcgagactgattttaaggtgatggcgcgcgacgagctgatcctgaggtggaagcagtatgaagcgtacgttcaggctctggaggggaaatacactgacctgaatagcaatgacgtgacaggactacgagaaagcgaagagaagttgaaacagcagcagcaagagtcggccagacgtgagaacatccttgtgatgcgactggcaaccaaggagcaggaaatgcaagagtgtactacacaaattcagtatttgaagcaggtgcagcagccttccgtggcacagctgcggagtactatggtagatcccgccattaatctgttttttctaaagatgaagggggagctggaacagactaaggataaattggaacaggcacagaacgagcttagcgcttggaaatttacacccgaccgatag

SEQ ID NO: 244894 - DNA, 456 bp, Artificial Sequence
  derived and/or modified sequence
atgacaaacgaggagccgctgcccaagaaggtcagactttctgaaaccgacttcaaagttatggccagagacgagctgattctccggtggaaacagtacgaagcctacgtccaggccttggagggcaaatacaccgatctcaactccaatgacgtgactggactcagggaatctgaagaaaaactgaagcagcaacagcaggaaagcgccaggagagaaaacattctggttatgcgccttgcaacaaaggagcaggagatgcaggaatgtacaacacagatacagtatctgaagcaggttcagcagccatcagtagctcagctgagatctaccatggtagaccccgctattaatttgtttttcctgaagatgaaaggagagctggaacagaccaaggataagctggagcaggcccagaatgagctatcagcatggaaatttactcccgatcgctag

SEQ ID NO: 244895 - DNA, 1622 bp, Artificial Sequence
  derived and/or modified sequence
ggccggcggcagagctgtccggctgcgcggtggcccggggggcccgggcggcagggcaagcagcgcggcctcggcctatgcgaccggtggcgccggcgcggcttctgcctggagaggattcaagatgaccaacgaagaacctcttcccaagaaggttcgattgagtgaaacagacttcaaagttatggcaagagatgagttaattctaagatggaaacaatatgaagcatatgtacaagctttggagggcaagtacacagatcttaactctaatgatgtaactggcctaagagagtctgaagaaaaactaaagcaacaacagcaggagtctgcacgcagggaaaacatccttgtaatgcgactagcaaccaaggaacaagagatgcaagagtgtactactcaaatccagtacctcaagcaagtccagcagccgagcgttgcccaactgagatcaacaatggtagacccagcgatcaacttgtttttcctaaaaatgaaaggtgaactggaacagactaaagacaaactggaacaagcccaaaatgaactgagtgcctggaagtttacgcctgataggtaaacaaatcatactccccagtcaagacttccctgacagtcccactacgagaaagctgtggtgggacagccaagtactcgtttccacaccaagactcagactttttgagccaaaaaaaagccacattcttacactgtccagcttgtaatggttaatgtaaaacttaccagatgaaccttgtgtttcagcttttttcttttccccttccccttgcttcagaggcctgatggcgtcggactattccgaagaagtggccacctccgaaaaattccccttctagaacatgtagacacttgagaaatgtttctgtttgaagaaaatagagggagaaacagaagtcttaagtctgtggcacactgtgtcttcagacagtttgaaggaatgaaaacctagagattttaaatcatgaattgaacatgtaaaattccagtaaaatgtaaaaacggaatatgcatcgctcttaaccttgagcatagtgacttagagacactgtgtatcagttttgccaataagactgtggacttcatgattgttgttgaacttctgggtcaaaactcaaatgaggtgaattttgcctttaaagggtttatttgctgagaaccaactttcaatagtcatgagagaatcaaataatagatgtccgtacaagtagcgcatatatttaaccatttagtttggggctctatattacttgcttgagccttaatcaatgtggttttattcaatggtttgttctttgaatggttgcaaaaactgtagataatcttactgaggactgtacaaacatgaaggtgtggtatcaaacttcaggttgaaactgtttgaagcattataaacattcatttcacaactagattgtataaggatattagctgtgatgagactcactgcattattttttttagtgaattttatgaaatccccgttccattcaacaggcacatgtttaaaagagctttgtcgttggtgttaatgggggaatgtgttccttcattgtatttgggccttttgtattgcactcttgatattaaattaaatgtgcctt

SEQ ID NO: 244896 - protein, 431 aa, Artificial Sequence
  derived and/or modified sequence
MASSLLEEEVHYGSSPLAMLTAACSKFGGSSPLRDSTTLGKAGTKKPYSVGSDLSASKTMGDAYPAPFTSTNGLLSPAGSPPAPTSGYANDYPPFSHSFPGPTGTQDPGLLVPKGHSSSDCLPSVYTSLDMTHPYGSWYKAGIHAGISPGPGNTPTPWWDMHPGGNWLGGGQGQGDGLQGTLPTGPAQPPLNPQLPTYPSDFAPLNPAPYPAPHLLQPGPQHVLPQDVYKPKAVGNSGQLEGSGGAKPPRGASTGGSGGYGGSGAGRSSCDCPNCQELERLGAAAAGLRKKPIHSCHIPGCGKVYGKASHLKAHLRWHTGERPFVCNWLFCGKRFTRSDELERHVRTHTREKKFTCLLCSKRFTRSDHLSKHQRTHGEPGPGPPPSGPKELGEGRSTGEEEASQTPRPSASPATPEKAPGGSPEQSNLLEI

SEQ ID NO: 244897 - protein, 413 aa, Artificial Sequence
  derived and/or modified sequence
MLTAACSKFGGSSPLRDSTTLGKAGTKKPYSVGSDLSASKTMGDAYPAPFTSTNGLLSPAGSPPAPTSGYANDYPPFSHSFPGPTGTQDPGLLVPKGHSSSDCLPSVYTSLDMTHPYGSWYKAGIHAGISPGPGNTPTPWWDMHPGGNWLGGGQGQGDGLQGTLPTGPAQPPLNPQLPTYPSDFAPLNPAPYPAPHLLQPGPQHVLPQDVYKPKAVGNSGQLEGSGGAKPPRGASTGGSGGYGGSGAGRSSCDCPNCQELERLGAAAAGLRKKPIHSCHIPGCGKVYGKASHLKAHLRWHTGERPFVCNWLFCGKRFTRSDELERHVRTHTREKKFTCLLCSKRFTRSDHLSKHQRTHGEPGPGPPPSGPKELGEGRSTGEEEASQTPRPSASPATPEKAPGGSPEQSNLLEI

SEQ ID NO: 244898 - DNA, 2995 bp, Artificial Sequence
  derived and/or modified sequence
ttctcccattctccctccctctcccttttctctctctaccccccccaccccccggctcagctctctccatctgcctggctccttgggacccgttccccagcctcaggatggcgtcctccctgcttgaggaggaagttcactatggctccagtcccctggccatgctgacggcagcgtgcagcaaatttggtggctctagccctctgcgggactcaacaactctgggcaaagcaggcacaaagaagccgtactctgtgggcagtgacctttcagcctccaaaaccatgggggatgcttatccagccccctttacaagcactaatgggctcctttcacctgcaggcagtcctccagcacccacctcaggctatgctaatgattaccctcccttttcccactcattccctgggcccacaggcacccaggaccctgggctactagtgcccaaggggcacagctcttctgactgtctgcccagtgtctacacctctctggacatgacacacccctatggctcctggtacaaggcaggcatccatgcaggcatttcaccaggcccaggcaacactcctactccatggtgggatatgcaccctggaggcaactggctaggtggtgggcagggccagggtgatgggctgcaagggacactgcccacaggtccagctcagcctccactgaacccccagctgcccacctacccatctgactttgctccccttaatccagccccctacccagctccccacctcttgcaaccagggccccagcatgtcttgccccaagatgtctataaacccaaggcagtgggaaatagtgggcagctagaagggagtggtggagccaaacccccacggggtgcaagcactgggggtagtggtggatatgggggcagtggggcagggcgctcctcctgcgactgccctaattgccaggagctagagcggctgggagcagcagcggctgggctgcggaagaagcccatccacagctgccacatccctggctgcggcaaggtgtatggcaaggcttcgcacctgaaggcccacttgcgctggcacacaggcgagaggcccttcgtctgcaactggctcttctgcggcaagaggttcactcgttcggatgagctggagcgtcatgtgcgcactcacacccgggagaagaagttcacctgcctgctctgctccaagcgctttacccgaagcgaccacctgagcaaacaccagcgcacccatggagaaccaggcccgggtccccctcccagtggccccaaggagctgggggagggccgcagcacgggggaagaggaggccagtcagacgccccgaccttctgcctcgccagcaaccccagagaaagcccctggaggcagccctgagcagagcaacttgctggagatctgagccgggtggaaggtctcccaccccagggctgccctgacagtctctcttggctctctagaccactgcttgccaatcactctctttaccccatgcatgccatccttcggggctctctccctctgtctccctcctggccattctgggcttgggtatctccttgcatgcctcctcagctcaccttctctcttcaccatgagactggctttccacaaactctcatctcaggccctccccttgtgcctgatacctgcactccggcttcctagactctggccctgccacaccaacacactttctatttgggctcccaacactatttctccatctcactccttgacatgtacccctttctgcttctcaagcttatttcctgctgtccctcagcctccaggcttcagtcttcccaacttcttacaccattgctttccattctccagaactcttttttcctttttacaaacacaatgataatgataatttattgccccctggtggcctcttcatcaggggtattggggttagtgacctggccagagggtgccaagaggggggcagaccagtggggatctgatcccaaagatggggtgaccccagggtcagggaggctgcccccaggcctgtatatttaacccctatgtaccaggagtaatgaatagtaataattctatttatgtaagttatgatgacgggtcaggtagagtgagctggggagggaagtggatccatttctgctaaggaaattctagtcaaatgcatctctgtatagacaaaatgttagtggagaagatcttgttaatagaatgtctatcatcagaatctcagttgatagggtttctcttgtaatgaagtctctacaaattgggttagctacatctctgctaaacagttgatggggtatctcttgattagggggatccctaatatccccagccccagccagaagctgtgaaacctcaagtcctatggaggggagaaggactggaatgtaccccatctcccttgactgcagagcaggttcctccactgccccaccccttagacaccatgaccccatcaggttaatcccctgttgccatggttatggagagcttgcagctgccatcttagatgtgctctttggggaagcccatctaacaggaggacattggtttgggggtgcacctcctgaagaatgggtggggaaggctttctctaggatcagattcaaataagtatgtattgagtgcctactctgtgcaaggcactatgctagatctggtgcctagaagccctgagaaagaacttaaagagctaggaggacagaggcccccaagctgatctggtggtgcatccacgcacccccaccctgggactttggatgctcccatctccacctccagtgacttttaaagccgcttcgtgcctttcctgtaacgttggatcctccttttctgtcccctgctgtctcaaggccccaagttaaagggttaaagccgctggagcttggggagagaacattgtggaatggaagggatcatgccctttgtggagtcttttttttttaatttaataaataaaagttggatttgaaaaaaaaaaaaaaaaaaaaaaaa

SEQ ID NO: 244899 - DNA, 1296 bp, Artificial Sequence
  derived and/or modified sequence
atggccagcagcctgctggaggaggaggtgcactacggcagcagccccctggccatgctgaccgccgcctgcagcaagttcggcggcagcagccccctgagagacagcaccaccctgggcaaggccggcaccaagaagccctacagcgtgggcagcgacctgagcgccagcaagaccatgggcgacgcctaccccgcccccttcaccagcaccaacggcctgctgagccccgccggcagcccccccgcccccaccagcggctacgccaacgactacccccccttcagccacagcttccccggccccaccggcacccaggaccccggcctgctggtgcccaagggccacagcagcagcgactgcctgcccagcgtgtacaccagcctggacatgacccacccctacggcagctggtacaaggccggcatccacgccggcatcagccccggccccggcaacacccccaccccctggtgggacatgcaccccggcggcaactggctgggcggcggccagggccagggcgacggcctgcagggcaccctgcccaccggccccgcccagccccccctgaacccccagctgcccacctaccccagcgacttcgcccccctgaaccccgccccctaccccgccccccacctgctgcagcccggcccccagcacgtgctgccccaggacgtgtacaagcccaaggccgtgggcaacagcggccagctggagggcagcggcggcgccaagccccccagaggcgccagcaccggcggcagcggcggctacggcggcagcggcgccggcagaagcagctgcgactgccccaactgccaggagctggagagactgggcgccgccgccgccggcctgagaaagaagcccatccacagctgccacatccccggctgcggcaaggtgtacggcaaggccagccacctgaaggcccacctgagatggcacaccggcgagagacccttcgtgtgcaactggctgttctgcggcaagagattcaccagaagcgacgagctggagagacacgtgagaacccacaccagagagaagaagttcacctgcctgctgtgcagcaagagattcaccagaagcgaccacctgagcaagcaccagagaacccacggcgagcccggccccggccccccccccagcggccccaaggagctgggcgagggcagaagcaccggcgaggaggaggccagccagacccccagacccagcgccagccccgccacccccgagaaggcccccggcggcagccccgagcagagcaacctgctggagatctag

SEQ ID NO: 244900 - DNA, 1296 bp, Artificial Sequence
  derived and/or modified sequence
atggctagctcactgctcgaggaggaggtgcattacgggagcagcccgctcgccatgttaaccgccgcatgctccaagtttgggggctcctctcctctgcgcgattctacaaccttggggaaagcaggaactaagaagccatattcagtcggctccgacctgtcagcttccaagactatgggagacgcctaccctgcacctttcacttccacaaatgggttgctgtcccctgccggatcaccccctgcacctaccagtgggtacgctaatgattacccgccattttcgcattcgtttcctggcccaacgggcacccaggaccccgggcttctggtgccaaaaggccattctagtagcgactgcctaccctcggtgtatacatcactggatatgacacacccctatggcagctggtataaggccggtattcacgctggaattagtcctggccccggcaacactcctactccctggtgggatatgcaccctgggggcaattggctaggaggcgggcagggacagggtgatggactgcaagggacgttaccgaccgggccagcccagccgccgctgaatccccaactccctacctacccttctgatttcgcaccactcaatcccgctccctaccctgccccacacttgctgcagcccgggcctcagcacgtccttccccaggacgtctataaaccaaaagccgtgggtaattcaggccagctggaaggtagtgggggagctaaacctccaagaggcgcaagcaccgggggcagcggcggttatgggggaagtggcgccggccgcagctcatgtgattgtccaaactgccaggagctggaaagactgggggcagccgccgccggacttaggaaaaagcctattcattcctgtcacatccccggctgcggaaaagtgtacgggaaggcttctcacctgaaggcacaccttcgatggcatacaggagagaggccctttgtgtgtaactggctcttctgcggtaaaaggttcacaagatcagatgagctggagagacacgtgcgtacccacactcgagagaagaaattcacctgcctcctgtgcagcaagcggtttacccgcagcgatcatctgtccaagcatcagagaacacatggcgaaccagggcccggtcctccaccatctggccccaaggagttgggggaaggccgcagtacaggcgaggaagaggcgtctcagaccccccgtccgtccgcttcgcccgccacacctgagaaggcccccggcggcagcccagagcagtccaacctgcttgagatctag

SEQ ID NO: 244901 - DNA, 1296 bp, Artificial Sequence
  derived and/or modified sequence
atggcatcctcactgcttgaggaggaggtgcattacggctcctcccctttagccatgctcacggcagcatgtagcaaattcggcggaagttctccactgagagattctacaacactcgggaaagccggcaccaaaaagccatacagcgtggggagtgaccttagcgcttccaagacaatgggcgacgcctacccggcgccgttcacttccaccaacggcctgctgtcaccagcaggctctccaccagcacctactagcggctatgccaatgactaccccccttttagtcacagcttcccgggcccaactggaacccaagatccgggcctccttgttcccaaggggcactcatccagcgactgcctcccttccgtttacacaagtttagatatgactcatccatatggcagctggtacaaggccggaattcatgctgggattagtcccggaccgggaaataccccaaccccttggtgggacatgcaccctggaggcaactggctgggcggcggacaaggccagggggatggcctgcaaggcactttgccaacaggacccgctcagccgcccctgaacccacagctccccacctacccctctgattttgcacctttgaatccagccccctacccagctcctcacctcctgcagccaggaccccagcacgtactgccgcaagacgtctataagcctaaggcagtgggaaactctgggcagttggaaggatctggtggtgcaaagcctccccgaggcgcctcgacgggcggcagcggtggttacggcggtagcggggccggacggtcctcatgcgattgtcccaactgtcaggagttagagaggctgggagcagccgcagctggcctgaggaaaaagccgattcactcatgtcacatcccggggtgtggaaaagtctacggaaaagcttcacatcttaaggcccacttgcggtggcatactggagaaagaccttttgtgtgcaattggctcttctgcggcaagaggtttaccaggtcagacgagctcgagaggcacgtccgaacccacacccgcgagaagaaattcacatgcctgctatgctcaaagcgctttaccagaagcgatcacctgtctaagcaccagcgcacgcacggtgaacctggtccggggccaccccctagcggtccaaaagagctcggcgagggtagatctaccggcgaggaagaagcatctcagactccccgtccctccgcttcgcccgccactccagaaaaagcacccgggggctctccggaacagtcaaatctgttggagatttag

SEQ ID NO: 244902 - DNA, 1296 bp, Artificial Sequence
  derived and/or modified sequence
atggccagcagcctgctggaggaggaggtgcactacggcagcagccccctggccatgctgacagctgcctgcagcaagtttggaggcagcagccccctgcgggacagcaccaccctgggcaaggccggcaccaagaagccctacagcgtgggcagtgacctgagcgccagcaagaccatgggagatgcctacccagcccccttcaccagcaccaacggcctgctgagccctgctggcagccccccagcccccaccagcggctacgccaatgactacccacccttcagccacagcttccctggccccaccggcacccaggaccccggcctgctggtgcccaagggccacagcagcagtgactgcctgcccagcgtgtacaccagcctggacatgacccacccctacggctcctggtacaaggccggcatccatgctggcatcagccctggccctggcaacacccccaccccctggtgggacatgcaccctgggggcaactggctgggcggcggccagggccagggagatggcctgcagggcaccctgcccaccggccctgcccagccccccctgaacccccagctgcccacctaccccagcgactttgcccccctgaacccagccccctacccagccccccacctgctgcagcccggcccccagcacgtgctgccccaggatgtgtacaagcccaaggctgtgggcaacagcggccagctggagggcagcggcggggccaagccacccaggggggccagcactggaggcagcggcggctacggcggcagcggggccggccgcagcagctgtgactgccccaactgccaggagctggagcggctgggcgctgctgctgctggcctgaggaagaagcccatccacagctgccacatccctggctgcggcaaggtgtatggcaaggccagccacctgaaggcccacctgcgctggcacactggagagcggccctttgtgtgcaactggctgttctgtgggaagcgcttcaccaggagtgatgagctggagcggcacgtgaggacccacacccgggagaagaagttcacctgcctgctgtgcagcaagcgcttcaccaggagtgaccacctgagcaagcaccagaggacccacggggagcccggccctggccccccacccagcggccccaaggagctgggggagggccgcagcactggagaggaggaggccagccagaccccccggcccagcgccagccctgccaccccagagaaggcccctgggggcagccctgagcagagcaacctgctggagatctag

SEQ ID NO: 244903 - DNA, 1296 bp, Artificial Sequence
  derived and/or modified sequence
atggccagcagcctgctggaggaggaggtgcactacggcagcagccccctcgcaatgttgaccgcggcttgttcaaagttcgggggttcatcgccactgagggattccacaacacttggcaaagcagggacaaagaagccatattctgtaggatctgatttgtctgctagtaagactatgggcgacgcctatcccgctccgtttacaagcacaaacggtttgctttcacccgccgggagccctcctgctcctacctccggatacgcgaatgattaccctcctttctcacacagcttccccggccccactggcacacaagatcctggtctgctggttcctaaaggccactccagctcggattgtctcccttcagtgtatacaagtctggacatgacacacccttacggaagctggtataaggccggtatccatgcaggaattagtccaggacctggcaacactccgactccatggtgggatatgcatcccggaggaaattggctcggcggggggcaggggcaaggggatggtttacagggcacacttccgaccggcccagcccagcccccattgaatccccagcttcctacttatccttctgacttcgctcccctaaaccctgccccttatcccgccccgcacttgttgcagcccgggccacaacacgtccttccccaggatgtgtacaagcctaaggctgttggaaatagtggtcagctggaggggagcggcggagcaaagccgccaagaggagccagtaccggagggtccggaggatacgggggcagcggagctgggaggtcctcctgtgactgcccaaattgccaggagctggaacggctgggcgctgcagctgccggactgcggaagaagccgattcacagctgtcatatcccaggctgcggaaaggtttacgggaaagcttcacacctgaaagctcatctgagatggcacaccggcgagcggcccttcgtttgcaattggctcttctgcggcaagagatttacccgaagtgacgagctggagcgacatgtgcgtacacacactcgggagaagaaattcacttgtcttctgtgtagcaaaagatttacacgtagtgatcacttatccaagcaccagaggacgcatggggagcctgggcccggccctcctccaagtggccccaaggaactaggagagggccggtccactggcgaggaggaggccagtcagactccccgcccatcagcttcaccagccacaccagagaaagctccaggcgggtcccccgagcagtcaaatctgctggaaatttag

SEQ ID NO: 244904 - DNA, 1296 bp, Artificial Sequence
  derived and/or modified sequence
atggccagcagcctgctggaggaggaggtgcactacggcagcagccccctggcaatgttgaccgccgcatgttccaagtttggggggtcttccccattgcgagattctacaacactggggaaagcaggaacaaagaagccgtattcggtgggctcggacctgagtgcctcaaaaaccatgggagacgcttaccctgctcctttcacatctaccaacggtctccttagccccgcaggctctcccccagctcctacatcaggttacgccaacgattaccccccattcagccattcctttcctggccctactgggacccaggaccccggactgttggttcccaaaggtcactccagtagtgactgcctgccatcggtctataccagcctggatatgactcatccatatggcagctggtataaagctggtattcacgccggaatatctcccggccctggaaacactcccaccccctggtgggatatgcaccctgggggcaattggctgggaggaggacaaggtcaaggcgacgggcttcagggcacgctgccgaccggtcccgctcagcctcccctgaatccgcagctccccacatatccctccgatttcgccccacttaaccccgcaccctatccagccccacatctcctgcagcccggacctcaacacgtgttaccacaggatgtttacaagcctaaagccgtcggtaacagtggacagctggagggatcaggcggcgccaagcctcctcggggcgcaagcacaggtgggtccggcggatacggcggatccggcgctggccgctccagttgcgattgccccaattgccaggagctcgagcgcctgggggcagccgccgcgggtctacggaaaaaaccaattcattcctgtcacattccaggttgcggaaaggtctacggcaaggctagccatctcaaggcgcatctgagatggcacaccggagagaggccatttgtttgcaattggcttttctgcggtaagcgttttactaggagcgatgagctagagcgccacgtccgcactcacacccgtgagaagaagttcacgtgcctgctgtgcagcaaacgctttaccagatccgatcacctttcgaaacatcagcggacacatggggagccaggccccggaccccctccctctggacccaaggagcttggggagggtaggtctacaggggaggaggaggcctcacagaccccccggcctagcgcctcaccagctactcctgaaaaggccccagggggctctccggagcaatcaaatctgctcgagatctag

SEQ ID NO: 244905 - DNA, 1296 bp, Artificial Sequence
  derived and/or modified sequence
atggcttcatccttgctggaggaggaagtgcactacggttcttctcctctggcaatgctcaccgccgcttgctctaagtttggtggcagctcgccgctgcgcgacagtacaacgttaggcaaggcgggaacaaaaaagccttatagcgtcggttcagatctgtccgcttcaaaaacaatgggggatgcatatccagcgccttttacatctaccaatggtctcctgagtccggctggatctccacccgcaccgacaagtggctatgctaatgactacccacctttctcccatagttttcccggacctaccgggacacaggatccgggtcttcttgtgcctaaagggcactcctcttctgattgtcttcccagtgtttatacttccctcgacatgacccatccctatggaagctggtacaaagcaggcattcacgcaggaatcagccctggacctggtaatacccccaccccttggtgggacatgcatcctggcggaaattggctgggcggtgggcaggggcagggtgatgggctccagggaacgcttccgacagggcctgctcagccacctttgaatcctcagcttcctacgtacccttcggatttcgctcccctgaatcccgcaccatatcctgctccgcacctccttcagcccggacctcagcacgtgctacctcaagatgtatacaagcctaaggcggtgggtaactcagggcagctagagggctccgggggagccaagccccctagaggggcatctacaggagggtccggtgggtacggtggctccggagcaggaagaagtagttgtgactgtccgaattgccaggaactggagaggctgggggcagcagcagcaggactgagaaaaaagcctattcactcttgccatattccgggatgcgggaaggtttacggcaaggccagccacttaaaggctcatctgcgttggcacaccggagagcgccctttcgtgtgcaactggctcttctgtggcaagagatttacccgatccgacgaactggagagacacgtgcgcacacatacacgagagaaaaaattcacttgcctgctctgcagcaagcggtttacaaggtctgaccacctgtctaagcaccagaggacacatggagaaccaggacccggacctcccccaagcggccctaaagagctaggggagggacgatcgactggggaggaggaagcaagccagacgcccagaccatcagcatcccccgcaactccagagaaggcccctggcggtagcccagaacaatccaatctgctcgagatctag

SEQ ID NO: 244906 - DNA, 1296 bp, Artificial Sequence
  derived and/or modified sequence
atggccagtagtctacttgaggaagaagtgcattatgggagttcgcccctagccatgttaacagctgcatgtagcaaattcggcggtagttctcccttgagggattccacaactttgggtaaggcaggaacgaagaagccatactctgtagggtctgatctttctgcctctaaaactatgggggacgcttacccagcacccttcacttctacaaacggcctgctcagtcctgcaggcagtccgccagctccgacatccggatatgccaacgactaccctcccttttcacattcatttccaggccctaccggaacacaagacccgggactcctggtgcctaaaggccacagtagctcggattgcctgccctccgtgtacacctctctcgatatgacacatccctacgggtcctggtacaaagccggtatccacgccggtatctccccagggccaggcaacacccccacgccttggtgggatatgcaccccggaggcaattggctgggaggtgggcagggccaaggggacgggcttcagggcacgctccctaccggccctgcacaaccaccgctgaatccacagctgcctacctatcctagcgatttcgccccattaaaccccgcaccatatccagccccacatctcctacagcccggaccccaacatgtcctcccacaggatgtttataaacctaaagcggtcggaaactcgggccagctggagggaagcgggggtgctaagccccctcggggtgcctctaccgggggtagcggcggatatggaggaagcggagccggtaggtcgagctgcgattgcccaaactgccaggagctggagagactcggcgctgctgcagctggtcttcggaaaaagcctattcactcctgccacattcccggatgcggaaaggtgtacggaaaagcctcccacctgaaggcacacctccgctggcacaccggcgaaagaccttttgtgtgcaattggctcttctgtggcaaaagatttacccgtagcgacgagttggagcgccacgtacgcacccacacccgggaaaaaaaattcacgtgtctgctgtgctcaaagagatttacgcgcagtgatcaccttagcaagcaccagcgcacccacggtgagccaggcccaggacctcctccttctggcccaaaagagctcggggagggacgctccaccggagaggaggaggccagtcagacacctcgcccaagtgccagtccagccacacccgaaaaggcacccggtgggagccccgagcagtctaatctgttagagatctag

SEQ ID NO: 244907 - DNA, 2971 bp, Artificial Sequence
  derived and/or modified sequence
attctcccattctccctccctctcccttttctctctctaccccccccaccccccggctcagctctctccatctgcctggctccttgggacccgttccccagcctcaggatggcgtcctccctgcttgaggaggaagttcactatggctccagtcccctggccatgctgacggcagcgtgcagcaaatttggtggctctagccctctgcgggactcaacaactctgggcaaagcaggcacaaagaagccgtactctgtgggcagtgacctttcagcctccaaaaccatgggggatgcttatccagccccctttacaagcactaatgggctcctttcacctgcaggcagtcctccagcacccacctcaggctatgctaatgattaccctcccttttcccactcattccctgggcccacaggcacccaggaccctgggctactagtgcccaaggggcacagctcttctgactgtctgcccagtgtctacacctctctggacatgacacacccctatggctcctggtacaaggcaggcatccatgcaggcatttcaccaggcccaggcaacactcctactccatggtgggatatgcaccctggaggcaactggctaggtggtgggcagggccagggtgatgggctgcaagggacactgcccacaggtccagctcagcctccactgaacccccagctgcccacctacccatctgactttgctccccttaatccagccccctacccagctccccacctcttgcaaccagggccccagcatgtcttgccccaagatgtctataaacccaaggcagtgggaaatagtgggcagctagaagggagtggtggagccaaacccccacggggtgcaagcactgggggtagtggtggatatgggggcagtggggcagggcgctcctcctgcgactgccctaattgccaggagctagagcggctgggagcagcagcggctgggctgcggaagaagcccatccacagctgccacatccctggctgcggcaaggtgtatggcaaggcttcgcacctgaaggcccacttgcgctggcacacaggcgagaggcccttcgtctgcaactggctcttctgcggcaagaggttcactcgttcggatgagctggagcgtcatgtgcgcactcacacccgggagaagaagttcacctgcctgctctgctccaagcgctttacccgaagcgaccacctgagcaaacaccagcgcacccatggagaaccaggcccgggtccccctcccagtggccccaaggagctgggggagggccgcagcacgggggaagaggaggccagtcagacgccccgaccttctgcctcgccagcaaccccagagaaagcccctggaggcagccctgagcagagcaacttgctggagatctgagccgggtggaaggtctcccaccccagggctgccctgacagtctctcttggctctctagaccactgcttgccaatcactctctttaccccatgcatgccatccttcggggctctctccctctgtctccctcctggccattctgggcttgggtatctccttgcatgcctcctcagctcaccttctctcttcaccatgagactggctttccacaaactctcatctcaggccctccccttgtgcctgatacctgcactccggcttcctagactctggccctgccacaccaacacactttctatttgggctcccaacactatttctccatctcactccttgacatgtacccctttctgcttctcaagcttatttcctgctgtccctcagcctccaggcttcagtcttcccaacttcttacaccattgctttccattctccagaactcttttttcctttttacaaacacaatgataatgataatttattgccccctggtggcctcttcatcaggggtattggggttagtgacctggccagagggtgccaagaggggggcagaccagtggggatctgatcccaaagatggggtgaccccagggtcagggaggctgcccccaggcctgtatatttaacccctatgtaccaggagtaatgaatagtaataattctatttatgtaagttatgatgacgggtcaggtagagtgagctggggagggaagtggatccatttctgctaaggaaattctagtcaaatgcatctctgtatagacaaaatgttagtggagaagatcttgttaatagaatgtctatcatcagaatctcagttgatagggtttctcttgtaatgaagtctctacaaattgggttagctacatctctgctaaacagttgatggggtatctcttgattagggggatccctaatatccccagccccagccagaagctgtgaaacctcaagtcctatggaggggagaaggactggaatgtaccccatctcccttgactgcagagcaggttcctccactgccccaccccttagacaccatgaccccatcaggttaatcccctgttgccatggttatggagagcttgcagctgccatcttagatgtgctctttggggaagcccatctaacaggaggacattggtttgggggtgcacctcctgaagaatgggtggggaaggctttctctaggatcagattcaaataagtatgtattgagtgcctactctgtgcaaggcactatgctagatctggtgcctagaagccctgagaaagaacttaaagagctaggaggacagaggcccccaagctgatctggtggtgcatccacgcacccccaccctgggactttggatgctcccatctccacctccagtgacttttaaagccgcttcgtgcctttcctgtaacgttggatcctccttttctgtcccctgctgtctcaaggccccaagttaaagggttaaagccgctggagcttggggagagaacattgtggaatggaagggatcatgccctttgtggagtcttttttttttaatttaataaataaaagttggattt

SEQ ID NO: 244908 - DNA, 3148 bp, Artificial Sequence
  derived and/or modified sequence
ggcgggcggcagcagcctaggcagcagcagtagcagaagcagcagccgccgagcagcagcaaggactctggagtcagagtaggactgtaggaccggagcctgagtggaacaggagtggagctggcctgggagagagcggatccctcccagcaccctcaggccacccgttgcctgcactctccctgccagacctccagagaggagagactcgggacagccagccccaggttcccccagctctctccatctgcctggctccttgggacccgttccccagcctcaggatggcgtcctccctgcttgaggaggaagttcactatggctccagtcccctggccatgctgacggcagcgtgcagcaaatttggtggctctagccctctgcgggactcaacaactctgggcaaagcaggcacaaagaagccgtactctgtgggcagtgacctttcagcctccaaaaccatgggggatgcttatccagccccctttacaagcactaatgggctcctttcacctgcaggcagtcctccagcacccacctcaggctatgctaatgattaccctcccttttcccactcattccctgggcccacaggcacccaggaccctgggctactagtgcccaaggggcacagctcttctgactgtctgcccagtgtctacacctctctggacatgacacacccctatggctcctggtacaaggcaggcatccatgcaggcatttcaccaggcccaggcaacactcctactccatggtgggatatgcaccctggaggcaactggctaggtggtgggcagggccagggtgatgggctgcaagggacactgcccacaggtccagctcagcctccactgaacccccagctgcccacctacccatctgactttgctccccttaatccagccccctacccagctccccacctcttgcaaccagggccccagcatgtcttgccccaagatgtctataaacccaaggcagtgggaaatagtgggcagctagaagggagtggtggagccaaacccccacggggtgcaagcactgggggtagtggtggatatgggggcagtggggcagggcgctcctcctgcgactgccctaattgccaggagctagagcggctgggagcagcagcggctgggctgcggaagaagcccatccacagctgccacatccctggctgcggcaaggtgtatggcaaggcttcgcacctgaaggcccacttgcgctggcacacaggcgagaggcccttcgtctgcaactggctcttctgcggcaagaggttcactcgttcggatgagctggagcgtcatgtgcgcactcacacccgggagaagaagttcacctgcctgctctgctccaagcgctttacccgaagcgaccacctgagcaaacaccagcgcacccatggagaaccaggcccgggtccccctcccagtggccccaaggagctgggggagggccgcagcacgggggaagaggaggccagtcagacgccccgaccttctgcctcgccagcaaccccagagaaagcccctggaggcagccctgagcagagcaacttgctggagatctgagccgggtggaaggtctcccaccccagggctgccctgacagtctctcttggctctctagaccactgcttgccaatcactctctttaccccatgcatgccatccttcggggctctctccctctgtctccctcctggccattctgggcttgggtatctccttgcatgcctcctcagctcaccttctctcttcaccatgagactggctttccacaaactctcatctcaggccctccccttgtgcctgatacctgcactccggcttcctagactctggccctgccacaccaacacactttctatttgggctcccaacactatttctccatctcactccttgacatgtacccctttctgcttctcaagcttatttcctgctgtccctcagcctccaggcttcagtcttcccaacttcttacaccattgctttccattctccagaactcttttttcctttttacaaacacaatgataatgataatttattgccccctggtggcctcttcatcaggggtattggggttagtgacctggccagagggtgccaagaggggggcagaccagtggggatctgatcccaaagatggggtgaccccagggtcagggaggctgcccccaggcctgtatatttaacccctatgtaccaggagtaatgaatagtaataattctatttatgtaagttatgatgacgggtcaggtagagtgagctggggagggaagtggatccatttctgctaaggaaattctagtcaaatgcatctctgtatagacaaaatgttagtggagaagatcttgttaatagaatgtctatcatcagaatctcagttgatagggtttctcttgtaatgaagtctctacaaattgggttagctacatctctgctaaacagttgatggggtatctcttgattagggggatccctaatatccccagccccagccagaagctgtgaaacctcaagtcctatggaggggagaaggactggaatgtaccccatctcccttgactgcagagcaggttcctccactgccccaccccttagacaccatgaccccatcaggttaatcccctgttgccatggttatggagagcttgcagctgccatcttagatgtgctctttggggaagcccatctaacaggaggacattggtttgggggtgcacctcctgaagaatgggtggggaaggctttctctaggatcagattcaaataagtatgtattgagtgcctactctgtgcaaggcactatgctagatctggtgcctagaagccctgagaaagaacttaaagagctaggaggacagaggcccccaagctgatctggtggtgcatccacgcacccccaccctgggactttggatgctcccatctccacctccagtgacttttaaagccgcttcgtgcctttcctgtaacgttggatcctccttttctgtcccctgctgtctcaaggccccaagttaaagggttaaagccgctggagcttggggagagaacattgtggaatggaagggatcatgccctttgtggagtcttttttttttaatttaataaataaaagttggatttg

SEQ ID NO: 244909 - DNA, 1472 bp, Artificial Sequence
  derived and/or modified sequence
agcagccgccgagcagcagcaaggactctggagtcagagtaggactgtaggaccggagcctgagtggaacaggagtggagctggcctgggagagagcggatccctcccagcaccctcaggccacccgttgcctgcactctccctgccagacctccagagaggagagactcgggacagccagccccaggttcccccaggaggaagttcactatggctccagtcccctggccatgctgacggcagcgtgcagcaaatttggtggctctagccctctgcgggactcaacaactctgggcaaagcaggcacaaagaagccgtactctgtgggcagtgacctttcagcctccaaaaccatgggggatgcttatccagccccctttacaagcactaatgggctcctttcacctgcaggcagtcctccagcacccacctcaggctatgctaatgattaccctcccttttcccactcattccctgggcccacaggcacccaggaccctgggctactagtgcccaaggggcacagctcttctgactgtctgcccagtgtctacacctctctggacatgacacacccctatggctcctggtacaaggcaggcatccatgcaggcatttcaccaggcccaggcaacactcctactccatggtgggatatgcaccctggaggcaactggctaggtggtgggcagggccagggtgatgggctgcaagggacactgcccacaggtccagctcagcctccactgaacccccagctgcccacctacccatctgactttgctccccttaatccagccccctacccagctccccacctcttgcaaccagggccccagcatgtcttgccccaagatgtctataaacccaaggcagtgggaaatagtgggcagctagaagggagtggtggagccaaacccccacggggtgcaagcactgggggtagtggtggatatgggggcagtggggcagggcgctcctcctgcgactgccctaattgccaggagctagagcggctgggagcagcagcggctgggctgcggaagaagcccatccacagctgccacatccctggctgcggcaaggtgtatggcaaggcttcgcacctgaaggcccacttgcgctggcacacaggcgagaggcccttcgtctgcaactggctcttctgcggcaagaggttcactcgttcggatgagctggagcgtcatgtgcgcactcacacccgggagaagaagttcacctgcctgctctgctccaagcgctttacccgaagcgaccacctgagcaaacaccagcgcacccatggagaaccaggcccgggtccccctcccagtggccccaaggagctgggggagggccgcagcacgggggaagaggaggccagtcagacgccccgaccttctgcctcgccagcaaccccagagaaagcccctggaggcagccctgagcagagcaacttgctggagatctga

SEQ ID NO: 244910 - protein, 445 aa, Artificial Sequence
  derived and/or modified sequence
MHGHSRNGQAHVPRRKRRNRFVKKNGQCNVYFANLSNKSQRYMADIFTTCVDTRWRYMLMIFSAAFLVSWLFFGLLFWCIAFFHGDLEASPGVPAAGGPAAGGGGAAPVAPKPCIMHVNGFLGAFLFSVETQTTIGYGFRCVTEECPLAVIAVVVQSIVGCVIDSFMIGTIMAKMARPKKRAQTLLFSHHAVISVRDGKLCLMWRVGNLRKSHIVEAHVRAQLIKPYMTQEGEYLPLDQRDLNVGYDIGLDRIFLVSPIIIVHEIDEDSPLYGMGKEELESEDFEIVVILEGMVEATAMTTQARSSYLASEILWGHRFEPVVFEEKSHYKVDYSRFHKTYEVAGTPCCSARELQESKITVLPAPPPPPSAFCYENELALMSQEEEEMEEEAAAAAAVAAGLGLEAGSKEEAGIIRMLEFGSHLDLERMQASLPLDNISYRRESAI

SEQ ID NO: 244911 - DNA, 1338 bp, Artificial Sequence
  derived and/or modified sequence
atgcacggacactcgcgaaacggccaggcccatgtaccacgtagaaaacgccgaaaccggtttgtgaaaaagaatggacaatgcaacgtgtacttcgctaatctgtccaataagagccaaagatacatggccgacatcttcaccacctgtgtggataccaggtggcggtacatgttgatgattttcagtgccgcttttctggtttcttggctgttcttcggcctgctcttctggtgtatcgcgttcttccatggtgacttagaggcctctcctggagtgcccgcggcagggggtcccgcggcaggtggcggcggggcagcacctgtggctcccaagccctgcattatgcatgttaacggattcctgggcgcctttctgtttagcgtcgagacccaaactaccattggttatggatttaggtgcgtgacagaggaatgccctctggcagtcattgccgttgtcgttcagagtatcgtggggtgcgttattgacagcttcatgatcgggaccattatggcaaaaatggcacgccctaaaaagcgggcccaaactttgctcttctctcatcacgccgtgatttccgtgagagacggtaaattatgcttaatgtggcgggtggggaacctgcgaaaatcacacattgtcgaggcccacgtgagagctcagctgattaagccctacatgacccaagaaggtgaatacctccccctggaccaacgagatttgaacgtgggctacgatattggtctggacaggatttttctggtctcccctatcattatcgtgcacgagatcgacgaagacagccccctgtatggaatgggaaaagaagagctggagagcgaagacttcgaaatcgtcgtgatactggaggggatggtggaggccactgcaatgactacccaggctcggagctcgtacctggcctcagaaatcctctggggacacaggttcgaacctgtggttttcgaggaaaagagccactataaggtcgattacagtaggtttcacaaaacttacgaagttgccggcaccccgtgctgctctgcaagagagctgcaagaatccaagataaccgtgcttcccgcccccccacccccgccaagtgcattctgttacgagaatgaattggcacttatgtctcaagaggaggaggagatggaggaggaagccgccgccgccgccgcggtggctgctggtctaggactggaggctggaagcaaagaagaggccgggataattcgcatgttggagtttgggagtcacttggatctggagcggatgcaggcgtccctccccctggacaatatctcttataggcgtgagtcagcaatctag

SEQ ID NO: 244912 - DNA, 1338 bp, Artificial Sequence
  derived and/or modified sequence
atgcacggccacagcagaaatggccaggcccacgtgcccaggaggaagagaagaaacagatttgtgaagaagaatggccagtgcaatgtgtactttgccaacctgagcaacaagagccagcgctacatggctgacatcttcaccacctgtgtggacacccgctggagatacatgctgatgatcttctctgctgccttcctggtgtcctggctgttcttcggcctgctcttctggtgcatcgccttcttccacggggacctggaggccagccctggggtgcctgctgctgggggccctgctgctgggggcggcggggccgcccctgtggcccccaagccctgcatcatgcacgtgaatggcttcctgggcgccttcctgttctctgtggagacccagaccaccatcggctacggcttccgctgtgtgacagaagaatgtcccctggccgtgattgctgtggtggtgcagagcatcgtgggctgtgtgattgacagcttcatgattggcaccatcatggccaagatggcccggcccaagaagagggcccagaccctgctcttcagccaccacgctgtgatctctgtgagagatggcaagctgtgcctgatgtggagggtgggcaacctgaggaagagccacatcgtggaggcccacgtgcgggcccagctgatcaagccctacatgacccaggagggggagtacctgcccctggaccagagggacctgaatgtgggctatgacatcggcctggaccgcatcttcctggtgagccccatcatcatcgtgcatgaaattgatgaggacagccccctgtatggcatgggcaaggaggagctggagagcgaggactttgagatcgtggtgatcctggagggcatggtggaggccacagccatgaccacccaggcccggagcagctacctggccagcgagatcctgtggggccacagatttgagcctgtggtgtttgaggagaagagccactacaaggtggactacagccgcttccacaagacctatgaggtggccggcaccccctgctgcagcgcccgggagctgcaggagagcaagatcaccgtgctgcctgcccctcctcctcctccttctgccttctgctatgaaaatgagctggccctgatgagccaggaggaggaggagatggaggaggaggccgctgctgctgctgctgtggccgccggcctgggcctggaggccggcagcaaggaggaggccggcatcatccgcatgctggagtttggcagccacctggacctggagaggatgcaggccagcctgcccctggacaacatctcctaccgccgggagagcgccatctag

SEQ ID NO: 244913 - DNA, 1338 bp, Artificial Sequence
  derived and/or modified sequence
atgcacggccacagccggaacggccaggcccacgtgccccggcggaaaaggagaaaccggtttgttaagaagaacgggcagtgtaacgtatactttgctaatttaagtaacaagtcccagcggtatatggcagacatcttcaccacatgtgttgatactcgatggcgttatatgcttatgatctttagtgcagcctttttggtttcctggctattcttcgggttactgttttggtgtatcgcattcttccatggagacctcgaggcttctcctggcgtgccggcggctggaggtccagcggctggtggaggaggggcagcgcctgtagccccaaaaccatgcatcatgcacgtgaatggattcttgggcgccttcttattctctgtagaaacccagacaactataggttacggcttccgttgtgtaaccgaggagtgcccactggccgtgatcgctgtcgtggtacagagtatcgtaggatgcgtgattgactcattcatgattgggacgatcatggccaaaatggccagacccaagaagagggcccagactttactgttcagccaccatgccgttatttctgtgcgcgatgggaaattgtgcttgatgtggcgggtggggaacctgcgcaagagtcacatcgtcgaggcccacgttagggcacagctgatcaagccctacatgacacaggagggtgagtatctccctcttgatcagagagatctaaatgtcggctacgatattggcctggacaggattttcctggtgtctcccattatcattgtgcatgagattgatgaggacagcccgctgtacggaatggggaaggaagaactggagtcagaagatttcgaaatcgtcgttatcctagagggtatggtggaggccacagccatgactacacaggctcgttcttcctacttagccagcgagattctatggggccacaggtttgagcccgtcgtcttcgaagagaaatcacactacaaggtagactactctagatttcataaaacctacgaggtggccggaactccgtgctgcagcgcccgggaattacaggaatcaaagattacagtactgccagctcccccccctcccccttctgccttctgctacgagaatgaactggcactgatgagccaagaggaagaggaaatggaggaggaggccgcagctgcagccgccgttgcagccggattggggctcgaagcaggatcgaaggaagaggccggaattattcgaatgctagaatttggctcacatctggacctcgaacggatgcaagcctctctgcccctcgacaacatttcctataggagggaatcagccatttag

SEQ ID NO: 244914 - DNA, 2065 bp, Artificial Sequence
  derived and/or modified sequence
gggagcggcgcgggacggccgggacgcgcggagaccccaagacccacgcgcagaccgagcggcagccggggaggggagcgcgggccggccggccgagttcgcgggcagggggcgccgggactcccctttccgcgcccgggacgccgcccgccggatcgcgccttgggatgtagcgcccgctcgccgcctcccggactctcgtcggaccctccgcccagcggccctgcgtcttcccaggtgaccacgccggcttcaggacatgcacggacacagccgcaacggccaggcccacgtgccccggcggaagcgccgcaaccgcttcgtcaagaagaacggccaatgcaacgtgtacttcgccaacctgagcaacaagtcgcagcgctacatggcggacatcttcaccacctgcgtggacacgcgctggcgctacatgctcatgatcttctccgcggccttccttgtctcctggctctttttcggcctcctcttctggtgtatcgccttcttccacggtgacctggaggccagcccaggggtgcctgcggcggggggcccggcggcgggtggtggcggagcagccccggtggcccccaagccctgcatcatgcacgtgaacggcttcctgggtgccttcctgttctcggtggagacgcagacgaccatcggctatgggttccggtgcgtgacagaggagtgcccgctggcagtcatcgctgtggtggtccagtccatcgtgggctgcgtcatcgactccttcatgattggcaccatcatggccaagatggcgcggcccaagaagcgggcgcagacgttgctgttcagccaccacgcggtcatttcggtgcgcgacggcaagctctgcctcatgtggcgcgtgggcaacctgcgcaagagccacattgtggaggcccacgtgcgggcccagctcatcaagccctacatgacccaggagggcgagtacctgcccctggaccagcgggacctcaacgtgggctatgacatcggcctggaccgcatcttcctggtgtcgcccatcatcattgtccacgagatcgacgaggacagcccgctttatggcatgggcaaggaggagctggagtcggaggactttgagatcgtggtcatcctggagggcatggtggaggccacggccatgaccacccaggcccgcagctcctacctggccagcgagatcctgtggggccaccgctttgagcctgtggtcttcgaggagaagagccactacaaggtggactactcacgttttcacaagacctacgaggtggccggcacgccctgctgctcggcccgggagctgcaggagagtaagatcaccgtgctgcccgccccaccgccccctcccagtgccttctgctacgagaacgagctggcccttatgagccaggaggaagaggagatggaggaggaggcagctgcggcggccgcggtggccgcaggcctgggcctggaggcgggttccaaggaggaggcgggcatcatccggatgctggagttcggcagccacctggacctggagcgcatgcaggcttccctcccgctggacaacatctcctaccgcagggagtctgccatctgacctccaggcccggccctcaccactgcccacaagagcctctgccgggggtgggatgccaggacaccccctcccacactcaggacagagccaaccctggctccgtggaccttctggaggaaggtgggggtttcaaagactgggggaccccttcctcctgactccagcacccaggcctgggaagagctcggccccgatcagcctgagttccgccagcgcctacttctggtggctctaggtccccggatccaccacccttcccccactgactcttcaaggacgtgccctctttgctctcagaaccttggggaaggtggctggactgctgggcgggggacatctcggggtttcagggtgggcagggggttagtttggggaggggggggtgcgtttcttttgcatgactgtggcctgttgctcatgactttcttttgtaaatatctataaatggagacagatggagacaccaaa

SEQ ID NO: 244915 - DNA, 1338 bp, Artificial Sequence
  derived and/or modified sequence
atgcacgggcactctagaaacggacaagcgcacgtcccaagaaggaaaagaagaaatcgattcgtgaagaagaacggtcagtgcaacgtctacttcgccaacctttctaataagtctcagcgttacatggccgacatttttacaacatgcgttgatactagatggcgttatatgttaatgatttttagcgcagccttcttagtgagttggctgtttttcggattgttattctggtgcatagcgttctttcacggagatttggaggctagccctggcgttccagccgctggtgggcctgccgctgggggtggaggcgctgcccctgttgccccaaagccttgtataatgcatgtgaatggatttttaggggcattcctttttagtgtcgaaacccagacaaccatcgggtatggttttaggtgcgtgactgaagaatgtcctctggcagtgatcgccgttgtagtccagtctatcgtgggatgtgtgatagatagttttatgatcgggacaatcatggccaaaatggccagacctaagaaaagagcccaaacactgcttttcagtcatcacgctgtcatttcagtgcgcgatggcaagttatgcctgatgtggcgtgtcggaaacctcaggaagagccacatcgtggaggctcacgtgcgcgcacagctgattaaaccctacatgactcaggagggggagtacctgccactggatcagcgcgacttaaatgtgggatatgatatcggtcttgaccggattttcctggtttccccaatcattatcgttcatgaaatcgacgaagactccccactgtacggcatgggcaaggaggagctggaatctgaggacttcgaaatcgtggtcatccttgagggtatggtcgaagccacagcaatgaccactcaggcgagatccagctaccttgcttccgagatcctgtgggggcacaggtttgaacccgttgtattcgaggaaaagtcccactataaagtcgattattccaggttccataagacttacgaggtggcgggtactccttgttgctctgccagggaactgcaggaaagcaaaattaccgtactccccgctccccctccaccgccttctgctttttgttatgagaatgaactcgcgcttatgtcccaggaggaggaggagatggaggaggaggcggctgcagccgctgccgtggctgccggtctcgggctggaggctgggagcaaggaagaagctggaatcataagaatgcttgagtttgggtcgcaccttgatttggaacgcatgcaggcctcacttcccctcgataacatctcttaccgcagggaaagcgctatttag

SEQ ID NO: 244916 - DNA, 1338 bp, Artificial Sequence
  derived and/or modified sequence
atgcacggccacagcagaaacggccaggcccacgtgcccagaagaaagagaagaaacagattcgtgaagaagaacggccagtgcaacgtgtacttcgccaacctgagcaacaagagccagagatacatggccgacatcttcaccacctgcgtggacaccagatggagatacatgctgatgatcttcagcgccgccttcctggtgagctggctgttcttcggcctgctgttctggtgcatcgccttcttccacggcgacctggaggccagccccggcgtgcccgccgccggcggccccgccgccggcggcggcggcgccgcccccgtggcccccaagccctgcatcatgcacgtgaacggcttcctgggcgccttcctgttcagcgtggagacccagaccaccatcggctacggcttcagatgcgtgaccgaggagtgccccctggccgtgatcgccgtggtggtgcagagcatcgtgggctgcgtgatcgacagcttcatgatcggcaccatcatggccaagatggccagacccaagaagagagcccagaccctgctgttcagccaccacgccgtgatcagcgtgagagacggcaagctgtgcctgatgtggagagtgggcaacctgagaaagagccacatcgtggaggcccacgtgagagcccagctgatcaagccctacatgacccaggagggcgagtacctgcccctggaccagagagacctgaacgtgggctacgacatcggcctggacagaatcttcctggtgagccccatcatcatcgtgcacgagatcgacgaggacagccccctgtacggcatgggcaaggaggagctggagagcgaggacttcgagatcgtggtgatcctggagggcatggtggaggccaccgccatgaccacccaggccagaagcagctacctggccagcgagatcctgtggggccacagattcgagcccgtggtgttcgaggagaagagccactacaaggtggactacagcagattccacaagacctacgaggtggccggcaccccctgctgcagcgccagagagctgcaggagagcaagatcaccgtgctgcccgcccccccccccccccccagcgccttctgctacgagaacgagctggccctgatgagccaggaggaggaggagatggaggaggaggccgccgccgccgccgccgtggccgccggcctgggcctggaggccggcagcaaggaggaggccggcatcatcagaatgctggagttcggcagccacctggacctggagagaatgcaggccagcctgcccctggacaacatcagctacagaagagagagcgccatctag

SEQ ID NO: 244917 - protein, 314 aa, Artificial Sequence
  derived and/or modified sequence
MLGIWTLLPLVLTSVARLSSKSVNAQVTDINSKGLELRKTVTTVETQNLEGLHHDGQFCHKPCPPGERKARDCTVNGDEPDCVPCQEGKEYTDKAHFSSKCRRCRLCDEGHGLEVEINCTRTQNTKCRCKPNFFCNSTVCEHCDPCTKCEHGIIKECTLTSNTKCKEEVKRKEVQKTCRKHRKENQGSHESPTLNPETVAINLSDVDLSKYITTIAGVMTLSQVKGFVRKNGVNEAKIDEIKNDNVQDTAEQKVQLLRNWHQLHGKKEAYDTLIKDLKKANLCTLAEKIQTIILKDITSDSENSNFRNEIQSLV

SEQ ID NO: 244918 - DNA, 945 bp, Artificial Sequence
  derived and/or modified sequence
atgctgggcatctggaccctgctgcccctggtgctgaccagcgtggccagactgagcagcaagagcgtgaacgcccaggtgaccgacatcaacagcaagggcctggagctgagaaagaccgtgaccaccgtggagacccagaacctggagggcctgcaccacgacggccagttctgccacaagccctgcccccccggcgagagaaaggccagagactgcaccgtgaacggcgacgagcccgactgcgtgccctgccaggagggcaaggagtacaccgacaaggcccacttcagcagcaagtgcagaagatgcagactgtgcgacgagggccacggcctggaggtggagatcaactgcaccagaacccagaacaccaagtgcagatgcaagcccaacttcttctgcaacagcaccgtgtgcgagcactgcgacccctgcaccaagtgcgagcacggcatcatcaaggagtgcaccctgaccagcaacaccaagtgcaaggaggaggtgaagagaaaggaggtgcagaagacctgcagaaagcacagaaaggagaaccagggcagccacgagagccccaccctgaaccccgagaccgtggccatcaacctgagcgacgtggacctgagcaagtacatcaccaccatcgccggcgtgatgaccctgagccaggtgaagggcttcgtgagaaagaacggcgtgaacgaggccaagatcgacgagatcaagaacgacaacgtgcaggacaccgccgagcagaaggtgcagctgctgagaaactggcaccagctgcacggcaagaaggaggcctacgacaccctgatcaaggacctgaagaaggccaacctgtgcaccctggccgagaagatccagaccatcatcctgaaggacatcaccagcgacagcgagaacagcaacttcagaaacgagatccagagcctggtgtag

SEQ ID NO: 244919 - DNA, 945 bp, Artificial Sequence
  derived and/or modified sequence
atgctggggatttggactcttctgccgcttgtactgacatcggtggcccgactctcttctaagtcagtaaatgcccaagtcaccgacattaatagtaaaggactggagttacgaaagactgtcacaacagtggagacccagaatttagagggtctgcatcacgacggccagttttgtcataagccctgcccccccggcgagcggaaggccagagattgcaccgtaaacggcgacgaaccggactgtgtcccttgccaggaagggaaggaatataccgataaggcccacttttcttcaaagtgcagacgctgtcgtctgtgtgatgaagggcacgggcttgaagtggagatcaactgcacccggactcagaataccaagtgccggtgtaaaccaaatttcttctgtaactcaaccgtgtgcgaacattgcgatccctgcacaaagtgtgaacacggcattatcaaagagtgcacactgaccagcaacacaaagtgtaaagaagaagttaagagaaaggaagtgcaaaaaacatgccggaagcataggaaggagaaccaagggagccatgagagcccaacactgaaccccgaaactgtggccatcaatctgagcgatgtggatctgtcgaagtatattactacgattgcaggcgtgatgacactctcccaggtaaaagggtttgtgagaaaaaatggggttaacgaggccaaaatagatgagattaaaaatgacaacgttcaggacactgctgagcaaaaagtccagctgctgcggaactggcatcagttacacggcaaaaaggaagcgtatgacaccctgatcaaggatttgaagaaggcgaacctgtgtactttagccgagaaaatccaaacaattatactgaaggatattacttcagatagcgaaaatagtaactttcggaatgaaatccagtccctcgtatag

SEQ ID NO: 244920 - DNA, 1044 bp, Artificial Sequence
  derived and/or modified sequence
ggctgcccaggcggagctgcctcttctcccgcgggttggtggacccgctcagtacggagttggggaagctctttcacttcggaggattgctcaacaaccatgctgggcatctggaccctcctacctctggttcttacgtctgttgctagattatcgtccaaaagtgttaatgcccaagtgactgacatcaactccaagggattggaattgaggaagactgttactacagttgagactcagaacttggaaggcctgcatcatgatggccaattctgccataagccctgtcctccaggtgaaaggaaagctagggactgcacagtcaatggggatgaaccagactgcgtgccctgccaagaagggaaggagtacacagacaaagcccatttttcttccaaatgcagaagatgtagattgtgtgatgaaggacatggcttagaagtggaaataaactgcacccggacccagaataccaagtgcagatgtaaaccaaactttttttgtaactctactgtatgtgaacactgtgacccttgcaccaaatgtgaacatggaatcatcaaggaatgcacactcaccagcaacaccaagtgcaaagaggaagtgaagagaaaggaagtacagaaaacatgcagaaagcacagaaaggaaaaccaaggttctcatgaatctccaactttaaatcctgaaacagtggcaataaatttatctgatgttgacttgagtaaatatatcaccactattgctggagtcatgacactaagtcaagttaaaggctttgttcgaaagaatggtgtcaatgaagccaaaatagatgagatcaagaatgacaatgtccaagacacagcagaacagaaagttcaactgcttcgtaattggcatcaacttcatggaaagaaagaagcgtatgacacattgattaaagatctcaaaaaagccaatctttgtactcttgcagagaaaattcagactatcatcctcaaggacattactagtgactcagaaaattcaaacttcagaaatgaaatccaaagcttggtctag

SEQ ID NO: 244921 - DNA, 945 bp, Artificial Sequence
  derived and/or modified sequence
atgctgggcatctggaccctgctgcccctggtgctgacctctgtggcccggctgagcagcaagtctgtgaatgcccaggtgacagacatcaacagcaagggcctggagctgaggaagacagtgaccaccgtggagacccagaacctggagggcctgcaccatgatggccagttctgccacaagccctgccccccaggagagaggaaggcccgggactgcaccgtgaatggagatgagccagactgtgtgccctgccaggagggcaaggagtacacagacaaggcccacttcagcagcaagtgccgccgctgccgcctgtgtgatgagggccacggcctggaggtggagatcaactgcaccaggacccagaacaccaagtgccgctgcaagcccaacttcttctgcaacagcacagtgtgtgagcactgtgacccctgcaccaagtgtgaacatggcatcatcaaggagtgcaccctgaccagcaacaccaagtgcaaggaggaggtgaagaggaaggaggtgcagaagacctgcaggaagcacaggaaggagaaccagggcagccatgagagccccaccctgaaccctgagaccgtggccatcaacctgagtgatgtggacctgagcaagtacatcaccaccatcgccggcgtgatgaccctgagccaggtgaagggctttgtgaggaagaatggagtgaatgaggccaagattgatgagatcaagaatgacaacgtgcaggacacagctgagcagaaggtgcagctgctgaggaactggcaccagctgcacggcaagaaggaggcctatgacaccctcatcaaggacctgaagaaggccaacctgtgcaccctggccgagaagatccagaccatcatcctgaaggacatcaccagtgacagcgagaacagcaacttcagaaatgagatccagagcctggtgtag

SEQ ID NO: 244922 - DNA, 945 bp, Artificial Sequence
  derived and/or modified sequence
atgctgggcatctggaccctgctgcccctggtgctgaccagcgtggccagactttctagtaaatcggtgaacgctcaggtcaccgatatcaacagcaagggactggaactccggaagactgtaacaactgtcgaaacgcagaacctggagggcctccaccatgatggtcagttttgtcacaagccctgtccacctggggagaggaaagctagggactgcacagtaaacggtgacgagcctgactgtgttccctgccaagaagggaaagagtataccgataaagcccacttctcaagcaagtgccgcagatgtagattgtgcgatgagggccatggtttagaagtagagataaactgcacacgcacccagaatacaaagtgtagatgtaaaccgaactttttttgcaactctactgtttgcgagcactgcgatccttgcacgaaatgtgaacacggaatcattaaggagtgcaccctaacctcaaacaccaaatgcaaagaagaagttaagcgcaaggaggtgcagaagacatgtaggaagcatcgcaaggaaaatcagggctctcatgagtctcctacattgaatccagagaccgtggctatcaatctgagtgatgtcgacctctccaagtacataaccacaattgcgggcgtcatgaccttgtcccaggtcaaaggcttcgtgcggaagaacggcgtgaatgaggccaagatcgacgaaataaaaaacgacaacgtgcaggatactgcagagcagaaagttcaactcttgcggaattggcaccagcttcacggcaaaaaggaggcatatgacacactgattaaagacctcaagaaagccaatctttgtacactcgctgagaagatccagaccataatcctgaaagacatcacaagcgattcagaaaattcgaatttcaggaatgaaattcagtctctggtttag

SEQ ID NO: 244923 - DNA, 945 bp, Artificial Sequence
  derived and/or modified sequence
atgctgggcatctggactctcttacctctagtgttaacgagtgtagcaaggctgagcagcaaatcagtgaatgcacaggttacggacatcaacagcaagggcctcgaacttaggaaaaccgtgactacagtggaaacacaaaacctcgagggactacatcacgatggtcagttctgccacaaaccgtgtccgccaggggaaagaaaagcacgagactgtaccgtgaatggtgatgagcccgactgcgttccctgtcaggagggcaaagagtatacagacaaggcacacttctcatctaagtgccggcgttgccgcttgtgtgatgaagggcacggtctggaggttgagatcaactgcaccaggacccagaacactaagtgtagatgtaaacccaactttttctgtaacagcacggtgtgtgaacactgtgatccctgcaccaagtgcgagcacggcattatcaaggagtgcacattgaccagcaacactaaatgtaaggaggaggtcaagaggaaagaggtccaaaagacctgtagaaaacaccgcaaggaaaatcagggatctcacgaatcgcccacgctgaaccccgagactgtggcaattaacctcagcgatgtggacctatcaaaatatattacgacaatagccggagtcatgaccctgtctcaagtcaaaggattcgttcggaaaaatggagtcaatgaggccaaaattgacgaaatcaagaatgacaacgtgcaggataccgcagaacagaaagtgcagctgctgcggaactggcaccaactacatggaaaaaaggaggcctatgataccttgataaaagatctcaagaaagccaacttgtgtactctggcagagaaaatccagaccataattcttaaagacataacttccgattcggaaaactcaaattttcggaatgagatccaatccttggtctag

SEQ ID NO: 244924 - DNA, 663 bp, Artificial Sequence
  derived and/or modified sequence
atgctgggcatctggaccctgctgcccctggtgctgaccagcgtggccagactgagcagcaagagcgtgaacgcccaggtgaccgacatcaacagcaagggcctggagctgagaaagaccgtgaccaccgtggagacccagaacctggagggcctgcaccacgacggccagttctgccacaagccctgcccccccggcgagagaaaggccagagactgcaccgtgaacggcgacgagcccgactgcgtgccctgccaggagggcaaggagtacaccgacaaggcccacttcagcagcaagtgcagaagatgcagactgtgcgacgagggccacggcctggaggtggagatcaactgcaccagaacccagaacaccaagtgcagatgcaagcccaacttcttctgcaacagcaccgtgtgcgagcactgcgacccctgcaccaagtgcgagcacggcatcatcaaggagtgcaccctgaccagcaacaccaagtgcaaggaggagggcagcagaagcaacctgggctggctgtgcctgctgctgctgcccatccccctgatcgtgtgggtgaagagaaaggaggtgcagaagacctgcagaaagcacagaaaggagaaccagggcagccacgagagccccaccctgaaccccatgctgacctag

SEQ ID NO: 244925 - DNA, 663 bp, Artificial Sequence
  derived and/or modified sequence
atgctgggcatatggacattgttacctctcgtgctcacttccgttgcacgtctgtcctctaagagcgtgaatgcccaagtaacagatattaacagcaaagggcttgagctcaggaaaaccgtcactactgtggagactcaaaacttggagggacttcatcacgacggacaattctgccacaagccatgccccccaggcgagcgaaaggctcgggattgcacagtgaacggagacgagcctgattgcgtgccctgccaggagggcaaggagtacacagataaagctcatttctccagtaaatgtcggaggtgtagactttgtgacgaaggacacggcctcgaggtcgaaatcaactgtactcgcacgcaaaacaccaaatgcaggtgtaaacccaattttttctgtaactctacagtgtgcgaacactgtgacccctgcactaagtgtgagcatgggataatcaaagaatgcacactcacaagcaacaccaagtgcaaggaggagggcagccgctccaatctcggctggctgtgcctgttgctgctgcctatccccctgatcgtgtgggttaaacgcaaggaagtgcagaagacctgcagaaagcaccgaaaagagaatcagggctcccacgagagcccaacgttaaacccaatgcttacctag

SEQ ID NO: 244926 - DNA, 983 bp, Artificial Sequence
  derived and/or modified sequence
atgctgggcatctggaccctcctacctctggttcttacgtctgttgctagattatcgtccaaaagtgttaatgcccaagtgactgacatcaactccaagggattggaattgaggaagactgttactacagttgagactcagaacttggaaggcctgcatcatgatggccaattctgccataagccctgtcctccaggtgaaaggaaagctagggactgcacagtcaatggggatgaaccagactgcgtgccctgccaagaagggaaggagtacacagacaaagcccatttttcttccaaatgcagaagatgtagattgtgtgatgaaggacatggcttagaagtggaaataaactgcacccggacccagaataccaagtgcagatgtaaaccaaactttttttgtaactctactgtatgtgaacactgtgacccttgcaccaaatgtgaacatggaatcatcaaggaatgcacactcaccagcaacaccaagtgcaaagaggaaggatccagatctaacttggggtggctttgtcttcttcttttgccaattccactaattgtttgggtgaagagaaaggaagtacagaaaacatgcagaaagcacagaaaggaaaaccaaggttctcatgaatctccaactttaaatcctatgttgacttgagtaaatatatcaccactattgctggagtcatgacactaagtcaagttaaaggctttgttcgaaagaatggtgtcaatgaagccaaaatagatgagatcaagaatgacaatgtccaagacacagcagaacagaaagttcaactgcttcgtaattggcatcaacttcatggaaagaaagaagcgtatgacacattgattaaagatctcaaaaaagccaatctttgtactcttgcagagaaaattcagactatcatcctcaaggacattactagtgactcagaaaattcaaacttcagaaatgaaatccaaagcttggtctag

SEQ ID NO: 244927 - DNA, 663 bp, Artificial Sequence
  derived and/or modified sequence
atgctgggcatctggaccctgctgcccctggtgctgacctctgtggcccggctgagcagcaagtctgtgaatgcccaggtgacagacatcaacagcaagggcctggagctgaggaagacagtgaccaccgtggagacccagaacctggagggcctgcaccatgatggccagttctgccacaagccctgccccccaggagagaggaaggcccgggactgcaccgtgaatggagatgagccagactgtgtgccctgccaggagggcaaggagtacacagacaaggcccacttcagcagcaagtgccgccgctgccgcctgtgtgatgagggccacggcctggaggtggagatcaactgcaccaggacccagaacaccaagtgccgctgcaagcccaacttcttctgcaacagcacagtgtgtgagcactgtgacccctgcaccaagtgtgaacatggcatcatcaaggagtgcaccctgaccagcaacaccaagtgcaaggaggagggcagccgcagcaacctgggctggctgtgcctgctgctgctgcccatccccctgattgtgtgggtgaagaggaaggaggtgcagaagacctgcaggaagcacaggaaagaaaaccagggcagccatgagagccccaccctgaaccccatgctgacctag

SEQ ID NO: 244928 - DNA, 663 bp, Artificial Sequence
  derived and/or modified sequence
atgctgggcatctggaccctgctgcccctggtgctgaccagcgtggctcggctctcgagtaagtccgtcaacgcgcaagtcacagatatcaattctaaggggctggaacttaggaaaaccgtaactacagtggagacccagaatctggagggcctccaccacgacgggcagttttgtcacaagccatgtccaccgggagagagaaaggctagagactgcactgtgaatggcgacgagccagattgcgtgccatgccaggagggaaaggaatataccgacaaggcccacttcagctccaaatgccggaggtgcagattgtgcgatgagggtcatgggctagaagtcgagatcaactgcactaggacgcaaaacaccaaatgccgctgtaagccaaacttcttctgtaattcaaccgtgtgcgagcattgcgatccatgtacgaaatgcgagcatggaatcattaaggaatgcacacttacttccaacaccaagtgtaaagaggaggggtcaaggtcaaatctgggatggctgtgcttgctcttgcttcccattcctttaatcgtttgggtgaaacgtaaggaagtccaaaagacttgtcggaagcatcggaaagagaaccagggctctcacgaaagtcccactctgaatcccatgctcacatag

SEQ ID NO: 244929 - DNA, 663 bp, Artificial Sequence
  derived and/or modified sequence
atgctcggcatttggacccttctgccgttagttctcacaagtgtcgcacgcctctcaagcaaaagcgttaacgcccaggttacggacatcaacagtaaagggctggaactgcgcaaaacagtgaccactgtggagactcagaatctcgagggcctccatcacgatggccagttttgtcacaagccatgcccgccaggcgagcgcaaggcacgggattgcacagtaaacggcgatgaaccggattgcgtgccctgtcaggaaggaaaggaatacacggacaaggcccattttagctccaagtgccgcaggtgtcgcctgtgcgatgaaggacatgggttggaagtggagatcaactgtacgcgtactcagaacacgaagtgcagatgcaaaccaaattttttctgcaactccaccgtgtgcgagcactgcgacccgtgtactaagtgtgagcatggtatcatcaaagagtgtaccctaaccagcaacactaagtgcaaggaggagggcagtcggtcaaatttaggatggctctgcctgttacttctgcccatcccactaatcgtgtgggtgaagagaaaggaggtacaaaaaacatgcagaaagcacagaaaggaaaaccagggttcacacgagtctccaactctgaatccaatgttgacatag

SEQ ID NO: 244930 - protein, 1214 aa, Artificial Sequence
  derived and/or modified sequence
MAAAAGAPPPGPPQPPPPPPPEESSDSEPEAEPGSPQKLIRKVSTSGQIRQKTIIKEGMLTKQNNSFQRSKRRYFKLRGRTLYYAKTAKSIIFDEVDLTDASVAESSTKNVNNSFTVITPCRKLILCADNRKEMEDWIAALKTVQNREHFEPTQYSMDHFSGMHNWYACSHARPTYCNVCREALSGVTSHGLSCEVCKFKAHKRCAVRATNNCKWTTLASIGKDIIEDADGIAMPHQWLEGNLPVSAKCTVCDKTCGSVLRLQDWRCLWCKAMVHTSCKESLLTKCPLGLCKVSVIPPTALNSIDSDGFWKASCPPSCTSPLLVFVNSKSGDNQGVKFLRRFKQLLNPAQVFDLMNGGPHLGLRLFQKFDTFRILVCGGDGSVGWVLSEIDSLNLHKQCQLGVLPLGTGNDLARVLGWGSACDDDTQLPQILEKLERASTKMLDRWSVMAYEAKLPRQASSSTVTEDFSEDSEVQQILFYEDSVAAHLSKILTSDQHSVVISSAKVLCETVKDFVARVGKAYEKTTESSEESEVMAKKCSVLKEKLDSLLKTLDDESQASSSLPNPPPTIAEEAEDGDGSGSICGSTGDRLVASACPARPQIFRPREQLMLRANSLKKAIRQIIEHTEKAVDEQNAQTQEQEGFVLGLSESEEKMDHRVCPPLSHSESFGVPKGRSQRKVSKSPCEKLISKGSLSLGSSASLPPQPGSRDGLPALNTKILYPNVRAGMSGSLPGGSVISRLLINADPFNSEPETLEYYTEKCVMNNYFGIGLDAKISLDFNNKRDEHPEKCRSRTKNMMWYGVLGTKELLHRTYKNLEQKVLLECDGRPIPLPSLQGIAVLNIPSYAGGTNFWGGTKEDDTFAAPSFDDKILEVVAVFGSMQMAVSRVIRLQHHRIAQCRTVKISILGDEGVPVQVDGEAWVQPPGYIRIVHKNRAQTLTRDRAFESTLKSWEDKQKCELPRPPSCSLHPEMLSEEEATQMDQFGQAAGVLIHSIREIAQSHRDMEQELAHAVNASSKSMDRVYGKPRTTEGLNCSFVLEMVNNFRALRSETELLLSGKMALQLDPPQKEQLGSALAEMDRQLRRLADTPWLCQSAEPGDEESVMLDLAKRSRSGKFRLVTKFKKEKNNKNKEAHSSLGAPVHLWGTEEVAAWLEHLSLCEYKDIFTRHDIRGSELLHLERRDLKDLGVTKVGHMKRILCGIKELSRSAPAVEA

SEQ ID NO: 244931 - DNA, 3645 bp, Artificial Sequence
  derived and/or modified sequence
atggccgcagctgccggcgccccacctcccggacccccccagccaccaccgcctccaccacctgaagagtcttcggattctgagccagaagcggagccagggagcccacaaaagcttatccggaaggtttccacctcaggacagatccgccaaaagacgataatcaaggagggtatgttgaccaagcaaaataattccttccagcgatctaaaagaagatatttcaagctgcgcggccgcactctctactacgcaaagacggcgaaatcgatcatatttgacgaggtagacctgacggacgcttccgtagcagaatcctctacgaagaatgtcaacaactctttcaccgtcatcacgccttgccggaaactgatactttgtgccgacaaccgcaaagaaatggaggactggatcgcagccctgaagacagtccaaaatcgcgaacatttcgagcctacccagtacagtatggaccattttagtggcatgcacaactggtatgcatgtagccacgctcggccaacatattgtaacgtgtgcagagaagctctgagcggagtgacaagccacgggctgagctgtgaggtttgcaaattcaaggcccacaagcgatgcgctgtgcgggcaaccaataactgcaagtggacaacactagcctctattggcaaggacattattgaggatgccgatggaatagccatgccacaccagtggctggaagggaatttgcctgtttccgccaaatgcactgtgtgcgataagacttgtgggagcgtgctaaggcttcaagattggcgatgtctttggtgcaaggccatggttcacacgagttgcaaagaaagtctgctaacaaaatgcccgctgggtttgtgtaaagtgagtgttatcccccctaccgcgctgaatagtatcgattccgatgggttttggaaggccagctgtcccccatcttgtaccagccctctgctggtctttgtcaactcgaaatctggcgacaaccaaggcgtgaaatttttacgccggttcaagcaactgttgaatccggctcaggtgttcgatctgatgaatggtgggccgcatctcggcctaaggctcttccagaagtttgatacattcaggatactggtgtgtggcggtgatggtagtgtggggtgggtactgtccgaaattgattctttgaacctgcacaagcaatgccagctaggcgtgctgccgctcggaacggggaacgacctggctagagttcttggctggggaagtgcatgtgacgatgatacacaactgccccagatattagaaaagctggaacgagcctccaccaaaatgctcgaccggtggtcagtaatggcatacgaagctaaactgccacgacaggctagctcttccaccgtcaccgaagacttttccgaggacagcgaagttcagcagatcctgttctacgaagactcagtggcagcccatctcagcaagatcttgacttctgatcagcatagcgtggtgatttcctctgccaaggtgctgtgcgagacagtaaaggactttgtcgccagggtggggaaagcctatgagaagaccaccgaaagctctgaagagtccgaagtcatggccaaaaagtgtagtgtgcttaaggaaaagctggatagtctgttaaaaactctggacgacgagagccaggcttcatcaagcctccccaatccaccaccaacgattgctgaggaagccgaggatggagacggctctggttcgatttgtggttccacgggggatagacttgtggcctcagcgtgcccagctagaccccagatttttaggccacgggagcaattgatgctccgggcgaattctctgaagaaggccattagacaaattatagaacatactgaaaaggccgtcgatgaacagaacgcccaaacacaggagcaggagggcttcgtgctcggcttgtccgagtccgaggaaaagatggatcaccgcgtgtgccccccactatcacactcagagagctttggggtgcccaagggcagatcgcaaaggaaagtaagcaaatctccttgtgaaaagctcatttcaaaaggatcccttagcctcggcagctcagcttcattgcctccacagccaggctcccgggatgggcttcctgccctgaacacaaaaatcctgtaccctaatgtccgcgccggcatgtccgggtcgctgccaggagggtccgtcatatcacgcctcctgattaacgcagatcctttcaactctgaacccgaaaccctcgagtactacaccgagaaatgcgtgatgaacaactactttggcatcggcttagacgcaaagatatcccttgatttcaataataaaagggacgaacatccagaaaagtgtagaagcaggacaaaaaatatgatgtggtatggcgtgctgggcacaaaagaacttcttcaccgaacttacaagaacctagagcagaaagtgctgctggagtgtgatggtcggccaatccccctgccctccctccagggcatagctgtgcttaatatccctagctacgccggcggtaccaacttctggggtggtactaaagaggacgatacctttgccgccccaagtttcgatgacaagattctggaagtcgtggctgtatttggtagtatgcagatggcagtgagccgggtgatcagattacagcaccaccgtatagcccagtgtaggaccgtcaagatttctattctgggcgacgaaggggtacccgtgcaggtggatggagaggcatgggtgcagccaccagggtacatcagaatcgtgcacaagaacagggcacaaaccctcacacgcgatagagcttttgagagtaccctaaagtcatgggaagataagcagaagtgtgaacttcctaggcccccgtcatgcagcctgcacccagagatgctgtctgaagaggaagcaacccagatggaccagtttggacaggcggccggggtactgatccactccattcgcgaaattgctcagtcgcaccgagatatggagcaagaactggcccacgccgtcaatgcctctagcaagtccatggacagagtgtacggtaaacctcggacaacagaggggctaaactgctcgttcgtcctggagatggtgaataatttcagagctctccggagtgagacagaattgctcctgagcggtaagatggcactgcaactagacccaccccagaaagagcagctgggatcagccctggccgagatggaccgccaactgcgccgcctggctgatacaccctggctgtgtcagtccgccgaaccgggagacgaggagtcagtgatgttagatctggcgaagcgctcgcgcagcggcaagttcaggctagtaaccaaattcaaaaaagagaagaacaacaagaataaggaggcccacagtagtctcggggctcctgtacacctgtggggaaccgaagaggtggcggcctggctcgagcacttatccctgtgcgagtataaggatatttttacaagacacgacatcagggggagcgaactgctccacctggagcggagggacctcaaagacttaggtgtgacaaaggtaggacatatgaaaagaatactttgcgggattaaggaactgtcacggtctgccccagctgtcgaagcctag

SEQ ID NO: 244932 - DNA, 3645 bp, Artificial Sequence
  derived and/or modified sequence
atggctgctgctgctggggcccctcctcctggccccccccagcccccacctcctcctcctcctgaggagagcagtgacagcgagcctgaggccgagcccggcagcccccagaagctgatcaggaaggtgtccaccagcggccagatccggcagaagaccatcatcaaggagggcatgctgaccaagcagaacaacagcttccagaggagcaagaggcgctacttcaagctgcggggccgcaccctgtactatgccaagacagccaagagcatcatctttgatgaggtggacctgacagatgcctctgtggccgagagcagcaccaagaatgtgaacaacagcttcaccgtcatcaccccctgcaggaagctgatcctgtgtgccgacaacaggaaggagatggaggactggattgctgccctgaagacagtgcagaaccgggagcactttgagcccacccagtacagcatggaccacttcagcggcatgcacaactggtacgcctgcagccacgcccggcccacctactgcaatgtgtgccgggaggccctgtctggagtgaccagccacggcctgagctgtgaggtgtgcaagttcaaggcccacaagagatgtgctgtgcgggccaccaacaactgcaagtggaccaccctggccagcatcggcaaggacatcattgaagatgctgatggcatcgccatgccccaccagtggctggagggcaacctgcctgtgtctgccaagtgcaccgtgtgtgacaagacctgtggctctgtgctgcggctgcaggactggcgctgcctgtggtgcaaggccatggtgcacaccagctgcaaggagagcctgctgaccaagtgccccctgggcctgtgcaaggtgtctgtcatccccccaacagccctgaacagcattgacagtgatggcttctggaaggccagctgcccccccagctgcaccagccccctgctggtgtttgtgaacagcaagagcggggacaaccagggcgtgaagttcctgcggcgcttcaagcagctgctgaacccagcccaggtgtttgacctgatgaatggaggcccccacctgggcctgcggctcttccagaagtttgacaccttccgcatcctggtgtgtggaggagatggctctgtgggctgggtgctgtctgaaattgacagcctgaacctgcacaagcagtgccagctgggcgtgctgcccctgggcactggaaatgacctggcccgggtgctgggctggggcagcgcctgtgatgatgacacccagctgccccagatcctggagaagctggagcgggccagcaccaagatgctggaccgctggagcgtgatggcctatgaggccaagctgccccggcaggccagcagcagcacagtgacagaggacttcagcgaggacagcgaggtgcagcagatcctcttctatgaagattctgtggccgcccacctgagcaagatcctgaccagtgaccagcacagcgtggtgatcagcagcgccaaggtgctgtgtgagaccgtgaaggactttgtggcccgggtgggcaaggcctatgagaagaccacagagagcagcgaggagagcgaggtgatggccaagaagtgcagcgtgctgaaggagaagctggacagcctgctgaagaccctggatgatgagagccaggccagcagcagcctgcccaaccccccacccaccatcgccgaggaggctgaagatggagatggcagcggcagcatctgtggcagcactggagaccggctggtggccagcgcctgcccagcccggccccagatcttccggccccgggagcagctgatgctgcgggccaacagcctgaagaaggccatccggcagatcatcgagcacacagagaaggctgtggatgagcagaatgcccagacccaggagcaggagggctttgtgctgggcctgtctgagagcgaggagaagatggaccaccgggtgtgcccccccctgagccacagcgagagctttggagtgcccaagggccgcagccagaggaaggtgtccaagagcccctgtgagaagctgatcagcaagggcagcctgagcctgggcagcagcgccagcctgcccccccagcccggcagcagagatggcctgcctgccctgaacaccaagatcctgtacccaaatgtgcgggccggcatgagcggcagcctgcccggcggcagcgtcatcagccggctgctgatcaatgctgaccccttcaacagcgagcctgagaccctggagtactacacagagaagtgtgtgatgaacaactacttcggcatcggcctggatgccaagatcagcctggacttcaacaacaagagagatgagcaccctgagaagtgccgcagcaggaccaagaacatgatgtggtatggagtgctgggcaccaaggagctgctgcacaggacctacaagaacctggagcagaaggtgctgctggagtgtgatggccggcccatccccctgcccagcctgcagggcattgctgtgctgaacatccccagctatgccggcggcaccaacttctggggcggcaccaaggaggatgacacctttgctgcccccagctttgatgacaagatcctggaggtggtggccgtgtttggctccatgcagatggctgtgtccagggtcatccggctgcagcaccaccgcatcgcccagtgcaggacagtgaagatcagcatcctgggagatgaaggagtgcctgtgcaggtggatggagaggcctgggtgcagcccccaggctacatccgcatcgtgcacaagaacagagcccagaccctgacccgggaccgggcctttgagagcaccctgaagtcctgggaggacaagcagaagtgtgagctgcccaggcctcccagctgcagcctgcaccctgagatgctgtctgaggaggaggccacccagatggaccagtttggccaggccgccggcgtgctgatccacagcatccgggagatcgcccagagccaccgggacatggagcaggagctggcccatgctgtgaatgccagcagcaagtccatggacagagtgtatggcaagcccaggaccacagagggcctgaactgcagctttgtgctggagatggtgaacaacttccgggccctgcggagtgaaacagagctgctgctgagcggcaagatggccctgcagctggaccccccccagaaggagcagctgggcagcgccctggccgagatggaccggcagctgcggcggctggccgacaccccctggctgtgccagagcgctgagcctggagatgaggagagcgtgatgctggacctggccaagaggagccgcagcggcaagttccggctggtgaccaagttcaagaaggagaagaacaacaagaacaaggaggcccacagcagcctgggcgcccctgtgcacctgtggggcacagaggaggtggccgcctggctggagcacctgagcctgtgtgagtacaaggacatcttcaccaggcatgacatccggggcagcgagctgctgcacctggagcggcgggacctgaaggacctgggcgtgaccaaggtgggccacatgaagaggatcctgtgtggcatcaaggagctgagccgcagcgccccagctgtggaggcctag

SEQ ID NO: 244933 - DNA, 3645 bp, Artificial Sequence
  derived and/or modified sequence
atggccgccgccgccggcgcccccccccccggccccccccagcccccaccacctcctcctcccgaggaaagttccgactcagaaccggaggccgaaccaggtagccctcagaagcttattcggaaggtgtctacttcagggcagattcgccaaaagactattatcaaagaagggatgctgactaagcaaaataatagcttccagagatcaaagaggcggtattttaaactcagggggcgcactctgtactacgcaaaaaccgcgaaatccatcatcttcgacgaggtggatctcaccgacgcgtccgttgctgagagttcaactaaaaacgtgaacaactctttcacagtgatcacaccctgtagaaagttgattctctgtgcagacaatagaaaggagatggaagactggatcgcggccctaaaaactgttcagaacagggaacatttcgagcctacacagtactctatggaccatttttctggaatgcataactggtatgcatgttctcatgcaaggcccacctactgcaacgtgtgcagagaagctctgagtggagtgacaagccatggacttagttgtgaggtgtgtaagtttaaagctcacaagcgttgcgcggtgcgcgcaaccaacaattgcaagtggacaaccctggcctcaatcggcaaggatattattgaggatgccgacgggattgccatgcctcatcagtggctggagggtaatttgcctgtgagtgccaaatgtacagtctgcgacaagacatgcggttccgtactccggttgcaggactggaggtgcctgtggtgcaaggccatggtgcacacatcctgcaaagaatcactgctgaccaagtgcccccttggtttgtgtaaggtttccgtgatcccacctaccgcactcaattccattgacagcgatgggttctggaaggcgtcatgtcctccttcttgcacgtcaccactcctggtgtttgtgaatagcaagtcgggggataaccagggcgtcaagtttctgagaaggttcaagcagctgctgaatcccgcacaagtttttgacttgatgaacggggggccccatcttgggctcagactattccagaaattcgatacatttcggattttagtatgcggaggtgatggttctgtaggctgggtactatccgagatagattctctgaacctgcataagcagtgccaacttggagtcctccccctgggcactggcaacgatctcgccagagtcctggggtggggatcagcctgcgacgatgacacgcagttgccccagatactcgaaaaattggaacgggcatctactaaaatgctggatcggtggtccgtaatggcatatgaagcaaaactgccccggcaagcttcctcaagtacagtcacagaagacttttcagaagatagtgaggttcagcagatcctgttctacgaggatagcgtagccgctcatctgtccaaaatcctaacaagcgaccaacactccgtggtgatcagcagcgctaaggtgctgtgtgaaacagttaaagatttcgtggcccgggtgggtaaagcatatgagaaaactaccgaatccagtgaggaatccgaagttatggccaagaagtgtagtgtgctgaaggagaaattagacagcctactaaagaccctcgacgacgaatctcaagcaagttcttctctgccaaacccccctcccacaatcgctgaggaggccgaagatggggatggttctgggagcatttgtggatccacaggtgatagactcgtggcgtcagcctgccccgctagaccacagatcttccggccccgcgaacagctgatgctgcgagccaactctctcaagaaggccattaggcaaattatcgagcatacagagaaagctgttgatgagcagaacgcacagactcaggagcaagagggattcgtgctcgggctcagcgaatcagaggaaaaaatggatcacagagtatgtccccctttgagccattcagagtcgttcggcgttccaaaaggccggtcccagcgcaaagtctctaagagcccatgcgaaaagttgatcagtaaaggaagcctgtccctgggaagttctgcctccttgcctccgcagccaggaagcagagacggtctccccgcactgaacaccaagattctctatccaaatgtcagggcagggatgtccggcagtttgcccggaggatctgtcatctctcgactgctgataaacgctgatccatttaattcagagcccgagactctggaatattacaccgagaagtgtgtgatgaataattatttcggcattgggctcgatgccaagatttcccttgattttaacaacaaacgcgatgagcaccctgaaaagtgtcgaagtagaactaagaatatgatgtggtacggagttctcggtacaaaggaattactgcatagaacatacaaaaatctggagcagaaagtgctgctcgagtgcgacgggcggcccatccctctgccttctctacaaggcattgctgtactcaatattccttcctacgctggaggcacaaatttctggggcggcactaaggaggatgatacgttcgctgccccttctttcgatgacaagattttggaggtggttgccgttttcggctcaatgcagatggcagtctcaagagtgatccggctgcagcatcataggatcgcccaatgtcgcactgttaaaatctctattctgggtgacgaaggagtccccgttcaggtcgatggggaggcttgggtgcagcccccgggatacattcggatcgtacacaagaatagggcacagactctgacccgcgacagagcctttgagtctactctgaagagctgggaagataaacagaaatgcgagctgccacgcccaccttcctgctcacttcatccggagatgctgagcgaagaagaagctacccagatggaccagttcgggcaggctgctggcgtactcattcactccatccgtgagattgctcagagtcacagagatatggagcaagaactggcacacgctgtgaatgcatcctccaagtctatggaccgtgtgtacggcaaacctcggaccactgagggactgaattgctctttcgttctggaaatggtgaataactttcgagcactcagaagcgagactgagctgctgttaagtggcaaaatggcccttcagttagacccacctcagaaagagcagttaggctctgctctcgcggagatggatcgccagctgcggagactcgccgacaccccttggctttgccagtccgccgagccaggggatgaggagtccgttatgttggatcttgctaagcgaagtcggtcaggcaagttcaggttagtcacaaagttcaagaaggagaagaataataaaaataaagaggcgcacagcagtctcggcgcacctgtgcatctgtggggaactgaggaagtggccgcatggctcgagcacctgtctctatgcgaatacaaggatattttcacacggcatgatatccgcggaagtgaattgctgcacctggagcgtcgggatcttaaggatctgggagttaccaaggtcggccatatgaagagaatcctctgtgggataaaagaactgtcacgaagtgctcccgccgtcgaagcttag

SEQ ID NO: 244934 - DNA, 3645 bp, Artificial Sequence
  derived and/or modified sequence
atggccgcagccgcaggagcacctccccctggtcccccacagccacctcccccacctcctccagaggaaagttctgacagcgagccagaagcagagcccggaagtccccagaaactcatccggaaggtgagtacatcaggccagatccgccagaaaacaatcataaaggagggcatgctgaccaagcagaataattcatttcagagatccaagcggcgatatttcaagctgagagggagaacactgtactacgcgaaaaccgctaaatcaatcatcttcgacgaagtcgacctaacagacgcctccgttgccgaatcctcaactaagaatgtcaataatagctttactgtgattaccccgtgtaggaagctgattctgtgtgctgataatcgcaaggaaatggaggactggattgcggcattgaaaaccgttcagaacagggagcattttgaaccaacccagtattctatggaccacttctccggaatgcataattggtacgcctgcagtcatgcacgacccacatactgtaacgtgtgtagggaggcactgagtggcgtaacaagtcacggtcttagttgtgaggtgtgtaagtttaaagctcacaaacgctgtgccgtccgcgcaaccaataattgtaagtggacaaccttggcctcaattgggaaagatattatagaggatgctgacggaatcgccatgcctcaccaatggctagagggtaatctaccagtgtccgccaagtgcacggtatgtgataagacctgtggctccgtactgagactgcaagactggcgatgtctttggtgcaaagccatggtgcatacttcatgtaaagaaagcttgctaacaaaatgccctctaggactgtgcaaggtgagcgtgatcccaccgactgccctcaactcgattgattctgacgggttctggaaggcatcatgtcctccatcttgcacaagtcccttgctggtctttgtaaactctaaatccggggacaatcagggtgtgaaatttctccgacggtttaagcagcttctcaatcccgctcaggtcttcgatttgatgaacggagggcctcatctgggcctgaggcttttccagaaattcgacacgtttaggattctcgtatgcggcggagatgggtccgtggggtgggtgctgagtgagatcgactctctaaatctccacaaacagtgtcaactgggtgtcctacccttgggcacaggaaatgatttggcccgtgtactcgggtggggctctgcctgcgacgatgatacccaattgcctcagatcctggagaagctcgagcgggcttccaccaaaatgctcgatagatggagcgtgatggcctacgaggccaagttgccccgtcaggcttccagctcaacagtgaccgaggatttctcggaagactccgaagtgcagcagatactcttttatgaagactccgtcgccgctcatttatcaaaaattttgacgagcgatcagcattccgtggtgatcagctctgccaaagttctctgtgagactgtgaaagacttcgttgccagagtgggcaaagcctatgagaagaccaccgaatcttcggaggagagcgaagtcatggccaaaaaatgtagtgtgttaaaggagaagttggacagcctactcaaaacactggatgacgagagccaggcatcttcttctctgcctaaccccccacccaccatcgcggaggaagccgaagacggcgatggcagcggatccatatgcgggtctaccggggaccggcttgtggcttctgcatgtccggctcgaccacagatttttaggccacgggagcagctcatgctgcgagctaactccctaaaaaaggctattcgacagattattgagcacaccgaaaaggccgttgacgagcagaacgcacaaacccaagaacaggaaggctttgttctggggctatctgagtccgaggagaaaatggatcaccgggtttgccccccacttagccactctgagtcttttggcgtccctaagggcagatctcaacggaaagtaagcaaaagcccttgtgagaaattgatctccaagggtagcctgagtcttggaagcagcgcatctctgccgcctcagcctggttcccgtgatggccttcccgcactgaacaccaaaatcctgtaccctaacgtacgagcaggaatgtccggatcactgcctggcggatcagttatctcccgactgcttattaatgccgatcctttcaacagcgagccagagaccctcgagtactataccgagaagtgcgtgatgaacaactacttcgggattgggttagacgcgaagatctccctcgacttcaacaataaaagggacgaacaccctgaaaagtgccgatcaagaactaagaacatgatgtggtatggcgtgctgggcacgaaggagttactccatcgtacttacaagaacctggagcaaaaggtactgttggagtgtgacggacgccctatccccctaccaagcctgcaggggatagcggtgctgaacattccctcgtacgctgggggaaccaatttttggggcggtaccaaagaggacgataccttcgctgccccatcgttcgacgacaaaatcctcgaggtggttgccgtctttggatcaatgcagatggccgtttccagggtgatccgacttcagcaccaccgtatcgcacagtgtcggaccgtgaaaattagcatactgggagatgaaggggtgccagtgcaggtcgatggggaggcatgggtccagcctcccggttacatccgtatcgttcataaaaacagagcccagacattaacccgagatagggcttttgagtctacacttaagtcctgggaagataagcagaaatgcgagcttcctcgccctcccagttgcagcttgcaccccgaaatgttatcagaagaggaagccactcagatggatcagttcggccaggctgccggagtcctgattcactctattcgagagattgcccaatctcacagagatatggagcaagaattggcccacgccgtgaatgccagctccaaatccatggacagagtatatggaaaacctagaactactgaagggttgaattgcagctttgtattggagatggtgaacaactttcgggcactccgctctgagacagaattgttactgtccgggaagatggcattacagctggaccctccccagaaggagcagctgggatctgccctggccgaaatggatcggcagcttcgacgtctggctgacacaccctggctttgccaatcagccgagcctggggatgaagaatcagttatgctggacctcgctaagcggtctcgatcgggcaagtttagacttgtaaccaagttcaaaaaggaaaaaaataataaaaataaggaggcacactcctcattgggtgcgccagtgcacctttggggtaccgaagaggtggcagcttggctagagcatctctccctatgtgaatacaaagacatcttcacaagacatgatattcgcggatccgagctgttgcacctagaacgtagggatctgaaagacctcggagttacgaaagtcggccacatgaagaggatcttgtgcggtatcaaggagctgtcaaggtctgcccctgcggtggaggcatag

SEQ ID NO: 244935 - DNA, 3645 bp, Artificial Sequence
  derived and/or modified sequence
atggccgccgccgccggcgcccccccccccggccccccccagcccccccccccccccccccccgaggagagcagcgacagcgagcccgaggccgagcccggcagcccccagaagctgatcagaaaggtgagcaccagcggccagatcagacagaagaccatcatcaaggagggcatgctgaccaagcagaacaacagcttccagagaagcaagagaagatacttcaagctgagaggcagaaccctgtactacgccaagaccgccaagagcatcatcttcgacgaggtggacctgaccgacgccagcgtggccgagagcagcaccaagaacgtgaacaacagcttcaccgtgatcaccccctgcagaaagctgatcctgtgcgccgacaacagaaaggagatggaggactggatcgccgccctgaagaccgtgcagaacagagagcacttcgagcccacccagtacagcatggaccacttcagcggcatgcacaactggtacgcctgcagccacgccagacccacctactgcaacgtgtgcagagaggccctgagcggcgtgaccagccacggcctgagctgcgaggtgtgcaagttcaaggcccacaagagatgcgccgtgagagccaccaacaactgcaagtggaccaccctggccagcatcggcaaggacatcatcgaggacgccgacggcatcgccatgccccaccagtggctggagggcaacctgcccgtgagcgccaagtgcaccgtgtgcgacaagacctgcggcagcgtgctgagactgcaggactggagatgcctgtggtgcaaggccatggtgcacaccagctgcaaggagagcctgctgaccaagtgccccctgggcctgtgcaaggtgagcgtgatcccccccaccgccctgaacagcatcgacagcgacggcttctggaaggccagctgcccccccagctgcaccagccccctgctggtgttcgtgaacagcaagagcggcgacaaccagggcgtgaagttcctgagaagattcaagcagctgctgaaccccgcccaggtgttcgacctgatgaacggcggcccccacctgggcctgagactgttccagaagttcgacaccttcagaatcctggtgtgcggcggcgacggcagcgtgggctgggtgctgagcgagatcgacagcctgaacctgcacaagcagtgccagctgggcgtgctgcccctgggcaccggcaacgacctggccagagtgctgggctggggcagcgcctgcgacgacgacacccagctgccccagatcctggagaagctggagagagccagcaccaagatgctggacagatggagcgtgatggcctacgaggccaagctgcccagacaggccagcagcagcaccgtgaccgaggacttcagcgaggacagcgaggtgcagcagatcctgttctacgaggacagcgtggccgcccacctgagcaagatcctgaccagcgaccagcacagcgtggtgatcagcagcgccaaggtgctgtgcgagaccgtgaaggacttcgtggccagagtgggcaaggcctacgagaagaccaccgagagcagcgaggagagcgaggtgatggccaagaagtgcagcgtgctgaaggagaagctggacagcctgctgaagaccctggacgacgagagccaggccagcagcagcctgcccaaccccccccccaccatcgccgaggaggccgaggacggcgacggcagcggcagcatctgcggcagcaccggcgacagactggtggccagcgcctgccccgccagaccccagatcttcagacccagagagcagctgatgctgagagccaacagcctgaagaaggccatcagacagatcatcgagcacaccgagaaggccgtggacgagcagaacgcccagacccaggagcaggagggcttcgtgctgggcctgagcgagagcgaggagaagatggaccacagagtgtgcccccccctgagccacagcgagagcttcggcgtgcccaagggcagaagccagagaaaggtgagcaagagcccctgcgagaagctgatcagcaagggcagcctgagcctgggcagcagcgccagcctgcccccccagcccggcagcagagacggcctgcccgccctgaacaccaagatcctgtaccccaacgtgagagccggcatgagcggcagcctgcccggcggcagcgtgatcagcagactgctgatcaacgccgaccccttcaacagcgagcccgagaccctggagtactacaccgagaagtgcgtgatgaacaactacttcggcatcggcctggacgccaagatcagcctggacttcaacaacaagagagacgagcaccccgagaagtgcagaagcagaaccaagaacatgatgtggtacggcgtgctgggcaccaaggagctgctgcacagaacctacaagaacctggagcagaaggtgctgctggagtgcgacggcagacccatccccctgcccagcctgcagggcatcgccgtgctgaacatccccagctacgccggcggcaccaacttctggggcggcaccaaggaggacgacaccttcgccgcccccagcttcgacgacaagatcctggaggtggtggccgtgttcggcagcatgcagatggccgtgagcagagtgatcagactgcagcaccacagaatcgcccagtgcagaaccgtgaagatcagcatcctgggcgacgagggcgtgcccgtgcaggtggacggcgaggcctgggtgcagccccccggctacatcagaatcgtgcacaagaacagagcccagaccctgaccagagacagagccttcgagagcaccctgaagagctgggaggacaagcagaagtgcgagctgcccagaccccccagctgcagcctgcaccccgagatgctgagcgaggaggaggccacccagatggaccagttcggccaggccgccggcgtgctgatccacagcatcagagagatcgcccagagccacagagacatggagcaggagctggcccacgccgtgaacgccagcagcaagagcatggacagagtgtacggcaagcccagaaccaccgagggcctgaactgcagcttcgtgctggagatggtgaacaacttcagagccctgagaagcgagaccgagctgctgctgagcggcaagatggccctgcagctggaccccccccagaaggagcagctgggcagcgccctggccgagatggacagacagctgagaagactggccgacaccccctggctgtgccagagcgccgagcccggcgacgaggagagcgtgatgctggacctggccaagagaagcagaagcggcaagttcagactggtgaccaagttcaagaaggagaagaacaacaagaacaaggaggcccacagcagcctgggcgcccccgtgcacctgtggggcaccgaggaggtggccgcctggctggagcacctgagcctgtgcgagtacaaggacatcttcaccagacacgacatcagaggcagcgagctgctgcacctggagagaagagacctgaaggacctgggcgtgaccaaggtgggccacatgaagagaatcctgtgcggcatcaaggagctgagcagaagcgcccccgccgtggaggcctag

SEQ ID NO: 244936 - DNA, 6297 bp, Artificial Sequence
  derived and/or modified sequence
tggcccggcagcatggcggcggcggcgggcgcccctccgccgggtcccccgcaaccgcctccgccgccgccgcccgaggagtcgtccgacagcgagcccgaggcggagcccggctccccacagaagctcatccgcaaggtgtccacgtcgggtcagatccgacagaagaccatcatcaaagaggggatgctgaccaaacagaacaattcattccagcgatcaaaaaggagatactttaagcttcgagggcgaacgctttactatgccaaaacggcaaagtcaatcatatttgatgaggtggatctgacagatgccagcgtagctgaatccagtaccaaaaacgtcaacaacagttttacggtcataactccatgcaggaagctcatcttgtgtgctgataacagaaaagaaatggaagattggattgcagcattaaagactgtgcagaacagggagcactttgagcccacccagtacagcatggaccacttctcagggatgcacaattggtacgcctgttcccacgcgaggccgacctactgcaatgtgtgccgtgaggctctgtctggggtcacgtcgcacgggctgtcctgcgaggtgtgcaaatttaaggcccacaagcgctgtgctgtgcgtgcaaccaataactgcaagtggaccacactggcctcgatcgggaaggacatcattgaagatgcagatgggattgcaatgccccaccagtggttggaaggaaacctacctgtgagcgccaagtgcactgtgtgcgacaagacctgtggcagtgtgctgcgcctgcaggactggcgctgcctctggtgcaaggccatggttcacacatcgtgtaaagaatccttgctgaccaagtgcccacttggcctgtgcaaagtgtcagtcatcccacccacggctctcaacagcatcgactccgatgggttctggaaggccagctgtcctccttcttgcacaagcccactgttggtcttcgtcaattcaaaaagtggggacaaccagggtgtgaagttcctcagaagattcaaacagctactaaaccccgcccaggtcttcgacctcatgaacggaggcccacacctcggcttacggttattccagaagtttgacacattccggattctggtttgtggcggggatggaagtgttggctgggtcctctccgaaatcgacagcctcaaccttcataaacagtgtcagctgggagtgctgccgctcggcacagggaacgacttggcccgagtactgggctggggctcagcctgcgatgacgacacccagctcccccagatcttggagaagttggagagagccagcaccaagatgctggacaggtggagcgtcatggcatacgaggccaagctcccccggcaggcctcctcctctaccgtcaccgaagacttcagcgaggattccgaggtacagcagattctcttctatgaagactcggttgcagcccacctttctaaaatcctcacctcggaccagcactcggtggtcatctcctcggccaaagtgctctgtgagacggtgaaggacttcgtggcacgggtggggaaggcctatgagaagacgaccgagagctcggaggagtcagaggtcatggccaagaagtgctctgtcctgaaagagaagctggattcccttctcaagaccttggacgatgagtcccaggcctcgtcctctctgcccaacccgccccccaccattgccgaggaggctgaagatggagatgggtcgggcagcatctgcggttccaccggagaccgcttggtggcatcagcttgcccggcccggccgcagatattccggcctcgagaacagctcatgctgagagccaacagcctgaagaaagcaattcgtcagatcatagaacacacagaaaaagctgtcgatgagcagaatgcccagacccaggagcaggagggcttcgtcctgggcctctctgagtcagaggagaagatggaccacagagtgtgcccaccactgtcccacagcgagagcttcggggtccccaaggggaggagccagcgcaaagtgtcgaaatctccgtgtgaaaagctgatcagcaaagggagtctgtccctaggcagttctgcttcccttccgccccagccgggaagccgggacggcctgcctgcgctcaacaccaagatcctgtacccaaatgtccgggctggaatgtctggttccttacccggtggctcagtcatcagtcgcctgttaattaatgctgatcccttcaactctgaaccagaaaccctagagtattacacggagaaatgtgtcatgaacaactattttggcattggcctggatgcgaagatatccctggactttaacaacaagcgcgatgagcacccagagaagtgcaggagccgaaccaagaacatgatgtggtatggagttcttggaaccaaagagttgctgcacagaacctacaagaacctggagcaaaaggtcttgctggagtgtgacgggcgacccatcccactccccagtcttcagggaattgctgtccttaacattcccagctatgccggaggaaccaacttctgggggggtaccaaggaagatgatactttcgcagctccatcattcgatgacaagattctggaggtggtcgccgtgttcggcagcatgcagatggccgtctctcgagtcatcaggctacagcatcatcggatcgcccagtgtcgcacggtgaagatctccatccttggggatgagggcgtgcctgtgcaggtggacggagaggcctgggtccagccgccagggtacattcggattgtccacaagaaccgggcacagacactgaccagagacagggcatttgagagcaccctgaagtcctgggaagacaagcagaagtgcgagctgccccgccctccatcctgttccctgcacccggagatgctgtccgaggaggaggccacccagatggaccagtttgggcaggcagcaggggtcctcattcacagtatccgagaaatagctcagtctcaccgggacatggagcaggaactggcccacgccgtcaatgccagctccaagtccatggaccgtgtgtatggcaagcccagaaccacagaggggctcaactgcagcttcgtcctggaaatggtgaataacttcagagctctgcgcagtgagacggagctgctgctgtctgggaagatggccctgcagctggatccgcctcagaaggagcagctggggagtgctcttgccgagatggaccgacagctcaggaggctggcagacaccccgtggctctgccagtccgcagagcccggcgacgaagagagtgtgatgctggatcttgccaagcgcagtcgcagtggtaaattccgcctcgtgaccaagtttaaaaaggagaaaaacaacaagaacaaagaagctcacagtagcctgggagccccggttcacctctgggggacagaggaggttgctgcctggctggagcacctcagtctctgtgagtataaggacatcttcacacggcacgacatccggggctctgagctcctgcacctggagcggagggacctcaaggacctgggcgtgaccaaggtgggccacatgaagaggatcctgtgtggcatcaaggagctgagccgcagcgcccccgccgtcgaggcctagcctctgtcctctcagcctgtggcctccacatccccgccgccgaggcctagcctccgccctctcagcctgtggcctctgcgcctcctgccactgaggccctgggcagatgctgcagcccgcccccttctcatggtgctacttcctctgtcagctacagaaagcctccgtgacaccgtccaccagagctctggggtctcgaacataacaacacagctacctttgaaacaacactttctccagctcagagtcacctggggcacatgtgtcacggccactcagctctcgcccgcctgtgctgtgggccagggaatccagcggcgtctggcctcctgggcactgcttgcctggcctcgtgcttggattgtcccgggggctcctctccgtgtgtccttctgtggccgcaccgtgtggctccgcctcctggcccccagccagttctcagaaacgtggctggggcccagcacagcagcctgcaagggcccctgtttgttgatgcagcttttgttgaacaaaaatcgtgctctttcctggtttgaaagtagcatggatgtttccagtcttgttgattgtaatttgacgtgaagagaaaaaaaaattcctcctgcgtgagccaaggcagcgggtgctgtttcccaggcggggagcccctccctgggtgtcacagggcctgtgctcctccctcctccatcctctctcctcccgctcctccctccccccactgtgggctggggacgcctgcccttctgtctccggacgctctaggcgagttcagcttggggtgtgagtgagacagcttgccagctgcatccctgcagacagaggatgtgtgtccacatgagtgtttctgtgtgggaaatgcttcctggctctgggaaactttttctgcccattctgtggttcccagggagcgtggccctggtgggccaggggtggtttgacctcttcagcccgtccggtggcctggaggccggaggctctcctgagtgtctgcccctgcagtggcttcttgtcgcctgctgctgggcgtgatgtcgctggaggtgctggcagggactctgatttggtggtccgcgctgcccctgccctgcctctgtcctggctctgaactagtagatgatggtgccagagggcagggagctcgcctggggagagggctgtgccccgtagggacagtgcccaggtgaaggatgcccctggtcctccagggcactgactttgcccttttttcccgttgatagtcatggctcagaggtgcttgtaaatgtcttgggaagaggtttctgtaacccctgccctggtgtgaggaggaaatggctctggcctggctgcctggccgtggcttctctttggctcccaaagagaaggacagtgttgggagtatctgccgtggcttctctttggctcccaaagagaaggacagtgttgggagtatctgccggcgctgtccaggtcctttagtcagcgtcactccatctgatgtgcagaagctgggctgcacctgcgggggtgggcatagaccgggctgggtctgcagcagcccctggtcctgagcaggcggcagtgaacagcactggcccacctcccactcacagcccctctgtcccctctgcagtgcacccaggtgggcccctctgcgtgcctttgggtgctcccctctcgtggtcgttctggcccgaggcccttagagtatggaggctgagccaggccttgggtttccccagcacagcctcctgtcgctgcatgcgacgtgttgggatttttggatgaaagactctcccacgctctgttggtggacttagctgcctcactggaagtgatgtgggtggaaggtggttgtatgttaccttttccacctctcattgttttccccagaacattgtagatgggggttggcagagggagaaataagccagccacggcagtcgcttggtttcccaggtggaatgggctaacacaggagatgatgggaacctgtcccgcagtccctgcatgaccattggccctgctggcctggcgatgtgggcatcctggggttcttagggtcccagaacaagccccaggcaagctggaacttgggtggggaggggacatgaggaggataaacagctgactgtggcttcaaggacatcagggccaccccaagtcctcagtgtcctactcctggcaaggagttgggtttggatcaaaagtgtttaaaattaatatgttgtcagtgattagaacaacactgtttacataaaaaccatttttctaattctaacaagttagaatgtgaggaaggaatgaacatgagtgtttaggaacctgccctttggtgctgggctggcgtcccgcactggggtgtcctcgctgtctgggggctgctctgctgccccggcccaggtccccttgtggtgttgccagacgggcctcatggtctgctgtgcagagagaggcaggaaggatccctgaagagtcttggagaaaaggttctgtgccctcaggtggggcttaccccctcgtatttataatcttaatttatatagtgaccaccgtggaaacaaacgcctcttgtattgtcatgtacatagtccatacctgagtgctgtacataagttgttctgtgtataaataaaacaagcctgtttttgatcttccatc

SEQ ID NO: 244937 - protein, 1030 aa, Artificial Sequence
  derived and/or modified sequence
MGAARGSPARPRRLPLLSVLLLPLLGGTQTAIVFIKQPSSQDALQGRRALLRCEVEAPGPVHVYWLLDGAPVQDTERRFAQGSSLSFAAVDRLQDSGTFQCVARDDVTGEEARSANASFNIKWIEAGPVVLKHPASEAEIQPQTQVTLRCHIDGHPRPTYQWFRDGTPLSDGQSNHTVSSKERNLTLRPAGPEHSGLYSCCAHSAFGQACSSQNFTLSIADESFARVVLAPQDVVVARYEEAMFHCQFSAQPPPSLQWLFEDETPITNRSRPPHLRRATVFANGSLLLTQVRPRNAGIYRCIGQGQRGPPIILEATLHLAEIEDMPLFEPRVFTAGSEERVTCLPPKGLPEPSVWWEHAGVRLPTHGRVYQKGHELVLANIAESDAGVYTCHAANLAGQRRQDVNITVATVPSWLKKPQDSQLEEGKPGYLDCLTQATPKPTVVWYRNQMLISEDSRFEVFKNGTLRINSVEVYDGTWYRCMSSTPAGSIEAQARVQVLDGSSLPEWVTDNAGTLHFARVTRDDAGNYTCIASNGPQGQIRAHVQLTVAVFITFKVEPERTTVYQGHTALLQCEAQGDPKPLIQWKGKDRILDPTKLGPRMHIFQNGSLVIHDVAPEDSGRYTCIAGNSCNIKHTEAPLYVVDKPVPEESEGPGSPPPYKMIQTIGLSVGAAVAYIIAVLGLMFYCKKRCKAKRLQKQPEGEEPEMECLNGGPLQNGQPSAEIQEEVALTSLGSGPAATNKRHSTSDKMHFPRSSLQPITTLGKSEFGEVFLAKAQGLEEGVAETLVLVKSLQSKDEQQQLDFRRELEMFGKLNHANVVRLLGLCREAEPHYMVLEYVDLGDLKQFLRISKSKDEKLKSQPLSTKQKVALCTQVALGMEHLSNNRFVHKDLAARNCLVSAQRQVKVSALGLSKDVYNSEYYHFRQAWVPLRWMSPEAILEGDFSTKSDVWAFGVLMWEVFTHGEMPHGGQADDEVLADLQAGKARLPQPEGCPSKLYRLMQRCWALSPKDRPSFSEIASALGDSTVDSKP

SEQ ID NO: 244938 - protein, 269 aa, Artificial Sequence
  derived and/or modified sequence
FSAQPPPSLQWLFEDETPITNRSRPPHLRRATVFANGSLLLTQVRPRNAGIYRCIGQGQRGPPIILEATLHLAEIEDMPLFEPRVFTAGSEERVTCLPPKGLPEPSVWWEHAGVRLPTHGRVYQKGHELVLANIAESDAGVYTCHAANLAGQRRQDVNITVASEHLCPEGQGEVEGNTGLGVMDRGFPAVPSWLKKPQDSQLEEGKPGYLDCLTQATPKPTVVWYRNQMLISEDSRFEVFKNGTLRINSVEVYDGTWYRCMSSTPAGSI

SEQ ID NO: 244939 - protein, 940 aa, Artificial Sequence
  derived and/or modified sequence
MGAARGSPARPRRLPLLSVLLLPLLGGTQTAIVFIKQPSSQDALQGRRALLRCEVEAPGPVHVYWLLDGAPVQDTERRFAQGSSLSFAAVDRLQDSGTFQCVARDDVTGEEARSANASFNIKWIEAGPVVLKHPASEAEIQPQTQVTLRCHIDGHPRPTYQWFRDGTPLSDGQSNHTVSSKERNLTLRPAGPEHSGLYSCCAHSAFGQACSSQNFTLSIADESFARVVLAPQDVVVARYEEAMFHCQFSAQPPPSLQWLFEDETPITNRSRPPHLRRATVFANGSLLLTQVRPRNAGIYRCIGQGQRGPPIILEATLHLAEIEDMPLFEPRVFTAGSEERVTCLPPKGLPEPSVWWEHAGVRLPTHGRVYQKGHELVLANIAESDAGVYTCHAANLAGQRRQDVNITVANGSSLPEWVTDNAGTLHFARVTRDDAGNYTCIASNGPQGQIRAHVQLTVAVFITFKVEPERTTVYQGHTALLQCEAQGDPKPLIQWKGKDRILDPTKLGPRMHIFQNGSLVIHDVAPEDSGRYTCIAGNSCNIKHTEAPLYVVDKPVPEESEGPGSPPPYKMIQTIGLSVGAAVAYIIAVLGLMFYCKKRCKAKRLQKQPEGEEPEMECLNGGPLQNGQPSAEIQEEVALTSLGSGPAATNKRHSTSDKMHFPRSSLQPITTLGKSEFGEVFLAKAQGLEEGVAETLVLVKSLQSKDEQQQLDFRRELEMFGKLNHANVVRLLGLCREAEPHYMVLEYVDLGDLKQFLRISKSKDEKLKSQPLSTKQKVALCTQVALGMEHLSNNRFVHKDLAARNCLVSAQRQVKVSALGLSKDVYNSEYYHFRQAWVPLRWMSPEAILEGDFSTKSDVWAFGVLMWEVFTHGEMPHGGQADDEVLADLQAGKARLPQPEGCPSKLYRLMQRCWALSPKDRPSFSEIASALGDSTVDSKP

SEQ ID NO: 244940 - DNA, 1191 bp, Artificial Sequence
  derived and/or modified sequence
atgccgttgttcgaaccacgggtgttcactgcagggagtgaggagagagtgacgtgtttgcccccaaaagggttacccgagccttcagtctggtgggagcacgcaggcgtcagacttccaactcacggcagggtgtaccagaagggccacgagctcgtcctggccaatatcgcagagtctgacgcaggcgtgtatacgtgccacgccgctaatctggctggccaaagacgccaggacgtcaatattaccgtggcaaccgtcccaagctggctgaaaaaacctcaggacagccaactcgaggaaggaaagccgggctacctggactgtctgacacaagccactccaaaaccgaccgtcgtgtggtaccggaatcaaatgctgatttccgaggacagcaggtttgaagtgttccttgcaaaagctcagggactggaagagggcgtggcagaaacactagtgctcgtaaagtcgctgcagagcaaagacgaacagcaacagctggattttaggcgcgagctagagatgtttgggaagctgaaccatgccaacgtcgtgaggctgttggggctgtgccgcgaagcagagccccactatatggtgctcgaatatgtcgatctgggggatctgaagcagttcttgcggatctcaaaatccaaggatgagaagttgaagtcccaacccctaagcactaaacaaaaagtagcactgtgtacccaggttgcactaggcatggaacaccttagcaataacagatttgtgcataaagatttagcagcacgcaattgcctggtctctgcccagcgccaggtcaaagtgtccgctcttggactgagcaaggacgtgtacaattcagagtattatcactttcggcaagcatgggtccctctccgctggatgtccccagaggctatcctagaaggagacttcagtacaaagtcagacgtctgggcattcggtgttctcatgtgggaggtatttacgcatggcgagatgcctcatggaggccaggctgatgacgaagttttagctgatcttcaggctggcaaggctaggctacctcagcctgagggctgtccctctaaactgtatcgtctcatgcagagatgctgggctctcagccctaaggacagaccaagcttttccgagattgcgtctgcactcggcgatagcacagtagattcaaaaccctag

SEQ ID NO: 244941 - DNA, 1191 bp, Artificial Sequence
  derived and/or modified sequence
atgcccctgtttgagcccagggtcttcaccgctggcagcgaggagcgggtgacctgcctgccccccaagggcctgcctgagcccagcgtgtggtgggagcacgccggcgtgcggctgcccacccacggccgggtgtaccagaagggccacgagctggtgctggccaacattgctgagagtgatgctggggtgtacacctgccacgccgccaacctggccggccagaggcggcaggatgtgaacatcaccgtggccaccgtgcccagctggctgaagaagccccaggacagccagctggaggagggcaagccaggctacctggactgcctgacccaggccacccccaagcccaccgtggtgtggtacagaaaccagatgctgatcagcgaggacagcagatttgaggtgttcctggccaaggcccagggcctggaggagggcgtggccgagaccctggtgctggtgaagagcctgcagagcaaggatgagcagcagcagctggacttccggcgggagctggagatgtttgggaagctgaaccacgccaacgtggtgcggctgctgggcctgtgccgggaggccgagccccactacatggtgctggagtatgtggacctgggggacctgaagcagttcctgcgcatcagcaagagcaaggatgagaagctgaagagccagcccctgagcaccaagcagaaggtggccctgtgcacccaggtggccctgggcatggagcacctgagcaacaacagatttgtgcacaaggacctggccgccaggaactgcctggtgtctgcccagaggcaggtgaaggtgtctgccctgggcctgagcaaggatgtgtacaacagcgagtactaccacttccggcaggcctgggtgcccctgcgctggatgagccctgaggccatcctggagggggacttcagcaccaagagtgatgtgtgggccttcggcgtgctgatgtgggaggtgttcacccacggggagatgcctcatggaggccaggctgatgatgaggtgctggccgacctgcaggccggcaaggcccggctgccccagcctgagggctgccccagcaagctgtaccgcctgatgcagcgctgctgggccctgagccccaaggaccggcccagcttcagcgagatcgccagcgccctgggggacagcacagtggacagcaagccctag

SEQ ID NO: 244942 - DNA, 1191 bp, Artificial Sequence
  derived and/or modified sequence
atgcccctgttcgagccccgggtgttcaccgccggcagcgaggagcgagtgacctgcctccccccaaaaggacttcccgaaccctccgtatggtgggagcatgcaggggtacgccttcctacacatggacgcgtctaccaaaaaggtcacgaattagtactcgcgaatatcgccgaatcagatgcaggagtctatacttgccacgcagccaatctggccggacagcggaggcaggacgtcaacatcacagttgctacggtaccttcttggctcaagaaaccccaagattcacagcttgaggaaggcaagcctggatatctggattgtctgactcaggccacccctaagcctacagtggtgtggtaccgtaaccagatgctgatctcagaggactcaagatttgaagtgtttttggctaaagcccaaggactggaagaaggtgtggctgagaccctcgtactggtcaagtccctgcagagcaaggacgagcagcagcagttggacttcaggagagagctggaaatgttcggaaaattgaatcacgctaacgttgtccgcctcctcggactatgtagagaagctgagccacactacatggtgcttgaatatgttgatctcggagatcttaagcagtttctgagaatctcaaagtccaaagatgagaagctaaagtcacagcctttaagcaccaagcagaaggttgctctgtgtacgcaggtcgctctgggaatggagcacctctcaaataatcgctttgttcataaggacctagctgcaaggaattgcctggtttctgctcaaagacaggtgaaagtgagtgctctggggttgtccaaggacgtctataactctgagtactaccacttccgccaagcctgggttccccttcgatggatgtcccccgaagcaatcttggagggggacttttcgacaaagtccgacgtgtgggctttcggggtgttaatgtgggaggtattcactcacggagaaatgcctcacggtggccaggcggacgacgaggtgttggccgatctgcaggcagggaaggccaggctgccccaaccagagggctgcccatccaaattgtaccgcctcatgcagcgatgctgggccctcagccctaaggatcgcccaagctttagcgagattgcctcagcactgggggacagtacagtggactctaagccatag

SEQ ID NO: 244943 - DNA, 1191 bp, Artificial Sequence
  derived and/or modified sequence
atgccactctttgagccccgagtattcaccgccggatcagaagaaagggttacatgtctgcctcctaaggggctgcccgaacctagcgtctggtgggaacatgcaggcgtgaggctgcctacacatggcagggtctatcaaaagggtcatgaactcgtactagcgaatatcgctgaatcagacgccggagtgtacacttgccatgctgcaaacctggccggtcagcgaaggcaggatgtcaatataacggtagccactgtgccttcatggcttaaaaaaccccaggattctcagctagaggaaggcaagcctgggtacttggattgcctgacgcaggcgacgcccaagccaactgtggtctggtacaggaatcagatgctgatctccgaggatagtcgttttgaagtattccttgctaaggcgcagggcctggaagaaggcgtggccgagaccctagttctggtcaagtccctccagagcaaggacgaacagcaacagttggactttagaagggagctggagatgtttggcaagttgaatcatgcaaatgtggtacggttgctcggactttgtagagaggccgagccccattacatggtgctggagtacgtggacctaggggacctcaagcagtttctacgcatctccaagagtaaagatgaaaagctcaaaagccagcctctgtctacaaaacagaaggttgccctctgcacgcaggtggcccttggcatggaacacctctccaataaccggttcgtgcataaagacctcgctgctcgcaactgtttggtgtcagcccaacggcaggtgaaagtctcagctttgggcttgagtaaagacgtttataacagcgagtattaccattttcggcaggcgtgggtgccactccggtggatgtctccagaagccattctggagggtgattttagtactaaatcagacgtttgggcatttggggtccttatgtgggaagtgtttacacacggagagatgccccatggcggacaagccgatgatgaggtgcttgccgaccttcaggcgggtaaagcccgattgccgcagcccgaaggctgtccgagtaagctgtacagactcatgcaacggtgctgggccctgtcaccaaaggatagaccgagctttagtgagatcgcctccgccctcggggattctaccgtggattccaaaccatag

SEQ ID NO: 244944 - DNA, 1191 bp, Artificial Sequence
  derived and/or modified sequence
atgcccctgttcgagcccagagtgttcaccgccggcagcgaggagagagtgacctgcctgccccccaagggcctgcccgagcccagcgtgtggtgggagcacgccggcgtgagactgcccacccacggcagagtgtaccagaagggccacgagctggtgctggccaacatcgccgagagcgacgccggcgtgtacacctgccacgccgccaacctggccggccagagaagacaggacgtgaacatcaccgtggccaccgtgcccagctggctgaagaagccccaggacagccagctggaggagggcaagcccggctacctggactgcctgacccaggccacccccaagcccaccgtggtgtggtacagaaaccagatgctgatcagcgaggacagcagattcgaggtgttcctggccaaggcccagggcctggaggagggcgtggccgagaccctggtgctggtgaagagcctgcagagcaaggacgagcagcagcagctggacttcagaagagagctggagatgttcggcaagctgaaccacgccaacgtggtgagactgctgggcctgtgcagagaggccgagccccactacatggtgctggagtacgtggacctgggcgacctgaagcagttcctgagaatcagcaagagcaaggacgagaagctgaagagccagcccctgagcaccaagcagaaggtggccctgtgcacccaggtggccctgggcatggagcacctgagcaacaacagattcgtgcacaaggacctggccgccagaaactgcctggtgagcgcccagagacaggtgaaggtgagcgccctgggcctgagcaaggacgtgtacaacagcgagtactaccacttcagacaggcctgggtgcccctgagatggatgagccccgaggccatcctggagggcgacttcagcaccaagagcgacgtgtgggccttcggcgtgctgatgtgggaggtgttcacccacggcgagatgccccacggcggccaggccgacgacgaggtgctggccgacctgcaggccggcaaggccagactgccccagcccgagggctgccccagcaagctgtacagactgatgcagagatgctgggccctgagccccaaggacagacccagcttcagcgagatcgccagcgccctgggcgacagcaccgtggacagcaagccctag

SEQ ID NO: 244945 - protein, 1014 aa, Artificial Sequence
  derived and/or modified sequence
MGAARGSPARPRRLPLLSVLLLPLLGGTQTAIVFIKQPSSQDALQGRRALLRCEVEAPGPVHVYWLLDGAPVQDTERRFAQGSSLSFAAVDRLQDSGTFQCVARDDVTGEEARSANASFNIKWIEAGPVVLKHPASEAEIQPQTQVTLRCHIDGHPRPTYQWFRDGTPLSDGQSNHTVSSKERNLTLRPAGPEHSGLYSCCAHSAFGQACSSQNFTLSIADESFARVVLAPQDVVVARYEEAMFHCQFSAQPPPSLQWLFEDETPITNRSRPPHLRRATVFANGSLLLTQVRPRNAGIYRCIGQGQRGPPIILEATLHLAEIEDMPLFEPRVFTAGSEERVTCLPPKGLPEPSVWWEHAGVRLPTHGRVYQKGHELVLANIAESDAGVYTCHAANLAGQRRQDVNITVATVPSWLKKPQDSQLEEGKPGYLDCLTQATPKPTVVWYRNQMLISEDSRFEVFKNGTLRINSVEVYDGTWYRCMSSTPAGSIEAQARVQVLEKLKFTPPPQPQQCMEFDKEATVPCSATGREKPTIKWERADGSSLPEWVTDNAGTLHFARVTRDDAGNYTCIASNGPQGQIRAHVQLTVAVFITFKVEPERTTVYQGHTALLQCEAQGDPKPLIQWKDKPVPEESEGPGSPPPYKMIQTIGLSVGAAVAYIIAVLGLMFYCKKRCKAKRLQKQPEGEEPEMECLNGGPLQNGQPSAEIQEEVALTSLGSGPAATNKRHSTSDKMHFPRSSLQPITTLGKSEFGEVFLAKAQGLEEGVAETLVLVKSLQSKDEQQQLDFRRELEMFGKLNHANVVRLLGLCREAEPHYMVLEYVDLGDLKQFLRISKSKDEKLKSQPLSTKQKVALCTQVALGMEHLSNNRFVHKDLAARNCLVSAQRQVKVSALGLSKDVYNSEYYHFRQAWVPLRWMSPEAILEGDFSTKSDVWAFGVLMWEVFTHGEMPHGGQADDEVLADLQAGKARLPQPEGCPSKLYRLMQRCWALSPKDRPSFSEIASALGDSTVDSKP

SEQ ID NO: 244946 - DNA, 3045 bp, Artificial Sequence
  derived and/or modified sequence
atgggagcagcacgcggcagcccggctcgaccaagacgcctgcctctcctaagcgtattactgctgcccttattgggaggcacacagactgccatagtgtttataaaacagccctcttcgcaagatgccctccaggggcgacgggccctgttgaggtgtgaggtggaagcccccggccctgtacacgtctactggctactcgacggtgcccctgtgcaggacacagagaggcggtttgcccaaggttcctccctcagctttgcagccgtggatagattgcaggactccggcacttttcaatgtgtcgcccgagatgacgtaacaggggaagaggcgagatctgccaatgcttcttttaacatcaagtggatcgaggctgggcctgtcgtccttaaacaccccgcttcagaggccgagatccaaccccagacacaggtgactttgcggtgccatatcgacggacacccaaggccaacctaccagtggttcagagatggcacacctctttccgacggacagagcaatcacacagtgtcatcaaaagagaggaacctcacccttcgtcctgccgggcctgagcattccggcctatacagctgttgcgctcacagcgcattcggacaggcctgctcttcgcagaattttaccctgtccatcgccgatgagagctttgccagagtggtgctggccccccaggatgtagtcgtagctagatacgaggaagccatgtttcactgtcagttcagtgcccagcctcccccttctctccagtggctcttcgaggacgaaacacctattacaaaccgtagccgccctcctcacctgcgcagggcaaccgtgttcgcaaatggatctcttttgttgacccaggtccgcccaagaaatgccggcatctatcggtgcataggccagggccagcgaggtcctccaatcatcctggaggcaaccttgcacttggcggagatagaagatatgcccctgtttgagccacgggtgtttactgctggaagcgaggaacgcgtgacatgtctgccgcctaaggggctgccagagccatcggtgtggtgggaacacgctggagtgaggctgcctacacacggccgcgtctatcagaagggtcatgagctggtgttggcgaatattgccgagtccgacgccggcgtgtatacatgtcacgcagctaacctggccggccaacgcaggcaggacgtaaacatcaccgtcgctaccgttccctcctggctcaagaagccacaggactcacagctagaagaaggaaaacctggctaccttgattgcttgacacaggcaacacccaagcctactgtcgtgtggtatagaaatcagatgcttatctccgaagactccagatttgaggtgttcaagaacggcacactccggataaactcagtggaggtgtacgatggcacctggtacaggtgcatgtcttcgacgccggccggttccatagaggctcaagcgagagtgcaggtgctcgaaaaacttaagttcactcccccgccacagccccagcaatgcatggaattcgacaaggaggccaccgtcccatgtagcgccaccgggcgcgaaaagccaactatcaagtgggagcgagcagatgggtcatctctcccagagtgggtgacagataatgccggcactttgcatttcgctcgcgtgacgagggatgacgccgggaattatacctgtattgcttcaaacggcccccaggggcagattagagcgcacgtgcagctgaccgtggcagtatttatcactttcaaagttgagcctgaacgtactactgtttaccagggacacaccgcacttttgcagtgtgaggcccagggagacccaaagcctttgattcaatggaaggacaagcccgtgcctgaggagagcgaggggcccgggtccccacccccatataaaatgattcagaccatcgggctatccgtgggggccgcggtggcatatatcattgctgtgctcggcctgatgttctactgcaaaaaacgctgtaaggccaaacgcttgcagaaacagcccgaaggggaggagcctgagatggagtgtttgaacggcggccccctacagaacggacagccaagtgctgagatccaagaggaagtggcattgacatcccttggctcgggcccagcagcaactaataagcgtcatagtacctcggacaaaatgcattttcccagatcttccctgcagccaatcacaacactaggcaagtctgagtttggggaggtatttctggccaaagctcagggccttgaggagggagttgccgagactttggtgctggtcaaatctttacagagcaaagatgaacagcaacagttagattttcgcagggagttagaaatgttcggcaaactcaaccacgctaacgtggtgagactcctcggtctgtgccgcgaagctgagcctcattatatggtgctggagtatgttgacctgggtgaccttaaacagttcctcaggataagtaaatcaaaggacgagaagctgaaaagccagcccctttccaccaaacagaaggtggccctgtgcacccaggtggctcttggaatggagcatctcagcaacaataggttcgtccacaaagacctagctgctcggaactgcctggtctcggctcagcgtcaagtgaaggtgtcggccctgggcctcagtaaggacgtttacaatagcgagtattatcactttcgccaggcatgggtgccactaaggtggatgtcccctgaagccatattagaaggggacttctctacaaaatcagatgtgtgggcattcggtgtgctgatgtgggaagttttcacacatggcgaaatgccacatggcggccaggcagatgacgaggtactcgctgatctacaggctggcaaggctcgactaccccagcctgagggttgtccatctaaactctaccggctaatgcagagatgttgggcattgtcaccaaaggataggcctagcttctcggaaattgccagcgccttgggtgattccacagtggattccaagccgtag

SEQ ID NO: 244947 - DNA, 810 bp, Artificial Sequence
  derived and/or modified sequence
ttctcagctcagccccctcccagtttacagtggctttttgaagacgagacccccattacaaaccgaagccgccccccacatctgaggcgagccacagttttcgccaacggtagcctactgctgacccaggtccgccctcgtaacgcagggatctaccggtgcatcggtcagggacagaggggacctccgatcatactcgaggcaactctgcacctggctgagatcgaagacatgcccttgttcgagcccagggtcttcacggccggctcagaagaacgggttacctgcctgccaccaaagggtctgccggagcccagcgtctggtgggaacatgccggagtccgcctgcccacacatggccgtgtataccaaaagggacacgagctagtactcgcgaacattgctgagtcagatgcgggtgtctatacttgccatgccgcaaatctggctggccagcgccgccaagatgtaaacattacagtggcgtcagagcatctctgccccgagggccagggggaggtggaaggaaatacaggtttgggggttatggatcgtggatttcccgccgttcccagctggctcaagaaaccccaggattcgcagctggaagagggaaagcctggctacttggactgcttgactcaagccactcccaagcctactgtcgtttggtaccggaatcagatgctcataagcgaagacagtcgcttcgaggttttcaagaacggtacactgcggattaattcagtcgaagtatatgacggaacttggtatagatgtatgtcaagcacgcctgccgggagcatttag

SEQ ID NO: 244948 - DNA, 3045 bp, Artificial Sequence
  derived and/or modified sequence
atgggcgccgcccggggcagccctgcccggccccggcggctgcccctgctgtctgtgctgctgctgcccctgctgggcggcacccagacagccatcgtgttcatcaagcagcccagcagccaggatgccctgcagggcagaagagccctgctgcgctgtgaggtggaggcccctggccctgtgcacgtgtactggctgctggatggagcccctgtgcaggacacagaaagaagatttgcccagggcagcagcctgagctttgctgctgtggaccggctgcaggacagcggcaccttccagtgtgtggccagagatgatgtgactggagaggaggcccggagcgccaatgccagcttcaacatcaagtggattgaggccggccctgtggtgctgaagcacccagccagcgaggccgagatccagccccagacccaggtgaccctgcgctgccacattgatggccacccccggcccacctaccagtggttcagagatggcacccccctgagtgatggccagagcaaccacacagtgagcagcaaggagaggaacctgaccctgcggcctgctggccctgagcacagcggcctgtacagctgctgtgcccacagcgccttcggccaggcctgcagcagccagaacttcaccctgagcattgctgatgagagctttgcccgggtggtgctggccccccaggatgtggtggtggcccgctatgaggaggccatgttccactgccagttcagcgcccagcccccacccagcctgcagtggctgtttgaagatgagacccccatcaccaacagaagccggcccccccacctgcggcgggccaccgtgtttgccaacggcagcctgctgctgacccaggtgcggcccagaaatgccggcatctaccgctgcatcggccagggccagaggggcccccccatcatcctggaggccaccctgcacctggccgagattgaggacatgcccctgtttgagcccagggtcttcaccgctggcagcgaggagcgggtgacctgcctgccccccaagggcctgcctgagcccagcgtgtggtgggagcacgccggcgtgcggctgcccacccacggccgggtgtaccagaagggccacgagctggtgctggccaacattgctgagagtgatgctggggtgtacacctgccacgccgccaacctggccggccagaggcggcaggatgtgaacatcaccgtggccaccgtgcccagctggctgaagaagccccaggacagccagctggaggagggcaagccaggctacctggactgcctgacccaggccacccccaagcccaccgtggtgtggtacagaaaccagatgctgatcagcgaggacagcagatttgaggtgttcaagaatggcaccctgcgcatcaacagcgtggaggtgtatgatggcacctggtaccgctgcatgagcagcaccccagctggcagcattgaggcccaggcccgggtgcaggtgctggagaagctgaagttcaccccaccaccccagccccagcagtgcatggagtttgacaaggaggccaccgtgccctgcagcgccaccggccgggagaagcccaccatcaagtgggagcgggcagatggcagcagcctgcctgagtgggtgacagacaatgccggcaccctgcactttgcccgggtgaccagagatgatgctggcaactacacctgcatcgccagcaatggcccccagggccagatccgggcccacgtgcagctgactgtggccgtgttcatcaccttcaaggtggagcctgagaggaccaccgtgtaccagggccacacagccctgctgcagtgtgaggcccagggcgaccccaagcccctcatccagtggaaggacaagcctgtgcctgaggagagcgagggccctggcagccccccaccctacaagatgatccagaccatcggcctgtctgtgggcgctgctgtggcctacatcatcgctgtgctgggcctgatgttctactgcaagaagcgctgcaaggccaagaggctgcagaagcagcctgagggggaggagcctgagatggagtgcctgaatggaggccccctgcagaatggccagcccagcgctgagatccaggaggaggtggccctgaccagcctgggcagcggccctgctgccaccaacaagaggcacagcaccagtgacaagatgcacttccccaggagcagcctgcagcccatcaccaccctgggcaagtcagaatttggagaggtgttcctggccaaggcccagggcctggaggagggcgtggccgagaccctggtgctggtgaagagcctgcagagcaaggatgagcagcagcagctggacttccggcgggagctggagatgtttgggaagctgaaccacgccaacgtggtgcggctgctgggcctgtgccgggaggccgagccccactacatggtgctggagtatgtggacctgggggacctgaagcagttcctgcgcatcagcaagagcaaggatgagaagctgaagagccagcccctgagcaccaagcagaaggtggccctgtgcacccaggtggccctgggcatggagcacctgagcaacaacagatttgtgcacaaggacctggccgccaggaactgcctggtgtctgcccagaggcaggtgaaggtgtctgccctgggcctgagcaaggatgtgtacaacagcgagtactaccacttccggcaggcctgggtgcccctgcgctggatgagccctgaggccatcctggagggggacttcagcaccaagagtgatgtgtgggccttcggcgtgctgatgtgggaggtgttcacccacggggagatgcctcatggaggccaggctgatgatgaggtgctggccgacctgcaggccggcaaggcccggctgccccagcctgagggctgccccagcaagctgtaccgcctgatgcagcgctgctgggccctgagccccaaggaccggcccagcttcagcgagatcgccagcgccctgggggacagcacagtggacagcaagccctag

SEQ ID NO: 244949 - DNA, 810 bp, Artificial Sequence
  derived and/or modified sequence
ttcagcgcccagcccccacccagcctgcagtggctgtttgaagatgagacccccatcaccaacagaagcaggcctccccacctgcggcgggccaccgtgtttgccaacggcagcctgctgctgacccaggtgcggcccagaaatgccggcatctaccgctgcatcggccagggccagaggggcccccccatcatcctggaggccaccctgcacctggccgagattgaggacatgcccctgtttgagcccagggtcttcaccgctggcagcgaggagcgggtgacctgcctgccccccaagggcctgcctgagcccagcgtgtggtgggagcacgccggcgtgcggctgcccacccacggccgggtgtaccagaagggccacgagctggtgctggccaacattgctgagagtgatgctggggtgtacacctgccacgccgccaacctggccggccagaggcggcaggatgtgaacatcaccgtggccagcgagcacctgtgcccagagggccagggcgaggtggagggcaacacaggcctgggcgtgatggaccggggcttccctgctgtgcccagctggctgaagaagccccaggacagccagctggaggagggcaagccaggctacctggactgcctgacccaggccacccccaagcccaccgtggtgtggtacagaaaccagatgctgatcagcgaggacagcagatttgaggtgttcaagaatggcaccctgcgcatcaacagcgtggaggtgtatgatggcacctggtaccgctgcatgagcagcaccccagctggcagcatctag

SEQ ID NO: 244950 - DNA, 3045 bp, Artificial Sequence
  derived and/or modified sequence
atgggcgccgcccggggcagccccgcccggccccggcggctgcccctgctctctgttttgctgctgccactgctaggcggcactcaaacagccattgtgttcattaagcagccctcttctcaggacgctctgcagggaaggagagccctgctgagatgtgaggtggaggcaccaggtccagttcatgtatattggctcctcgatggcgcccctgttcaggataccgagcgaagattcgctcaggggtcatcccttagctttgccgctgtggatcgcctccaggatagtggtaccttccagtgcgtcgcccgagacgatgtgactggcgaggaagccaggtcagcgaacgcgtcatttaatatcaagtggatagaggctggccccgtcgtactaaagcatcccgccagtgaagcggagattcaaccccaaacgcaggtgacactaaggtgtcatatcgacggccaccctcgcccaacctaccagtggttcagagacggcacccctctttctgacgggcaatcgaatcacacggtctcttccaaagagagaaacctgactctgcggcccgccgggccggagcactccggcctatacagctgctgcgctcacagtgcgtttgggcaggcctgttcgagccaaaatttcactttaagtattgccgatgagagcttcgctagagtggtgttagccccacaggacgtcgttgtcgcccgatatgaggaagcaatgttccactgtcaattctcagcacaaccccccccctccctgcagtggcttttcgaagacgaaacccccatcacaaaccgtagtagaccccctcacctgaggcgagccaccgtgtttgccaacggcagcctgctcttgacccaagtgagacccaggaatgcagggatatacagatgcattggccagggccaaagaggtcctcctataattttagaagccacactgcacttggccgagattgaagacatgccgctgtttgaacccagagtatttacggccggtagtgaagaacgtgttacgtgcttgcctcccaaaggcttgcctgagccctccgtgtggtgggaacatgcaggcgtaaggcttcccacccacggcagagtgtatcaaaaggggcatgagctggtgctcgccaacatcgccgagtcagacgccggcgtctatacctgtcacgctgccaatttggccggtcagaggcgtcaggatgtgaatattactgtagctacggttccgtcatggctgaagaagccccaagattcacagctcgaggaaggtaagcccggatatttggattgtttgacacaggccacccctaagcccactgtggtctggtataggaatcagatgttgatttccgaagacagtcggtttgaagtgtttaagaatggaactctccgaatcaactctgtggaagtctatgatggcacctggtatagatgcatgagcagtacccccgctggctcgatcgaagctcaggcaagagtacaagtccttgaaaaattgaagttcaccccaccccctcagcctcagcaatgtatggaatttgacaaagaggccaccgtgccctgttcagcgacaggacgggagaagcctaccatcaaatgggaacgggctgacggtagttccctccctgagtgggtgactgacaacgctggcactcttcatttcgcgcgggtcacaagggatgacgccgggaattacacctgtatcgccagcaatgggcctcaggggcagatccgagcccatgtgcagctgacagttgcagtttttattacgtttaaagtggagccagaacggacaacagtctatcagggacacacggctctgcttcaatgtgaggcgcagggagatcctaagccactgatccagtggaaggacaagccggtccccgaggaatccgagggcccgggctctcctcccccctataaaatgatccagactatcgggctgagcgtgggtgcggccgtagcttacatcattgccgtgctcggtttaatgttctactgcaaaaagaggtgtaaagccaagcggctccagaaacagcctgagggcgaagagcctgagatggagtgtctgaacggcgggcctctgcagaacggacagccttctgcagaaatacaagaagaggtagctctcacaagcctgggatccgggcctgccgcgacaaataagcgacattcgacaagcgacaagatgcactttccgcgttccagcttgcaaccgattaccaccctgggaaaatctgaatttggcgaggtttttctggccaaggcccaagggctggaagaaggggtcgctgaaacgctggttttggtgaagtctctgcagagcaaggatgaacaacaacagttggatttcaggagggagctggaaatgttcggtaagctgaaccacgctaatgtggttaggttactcgggttatgtcgagaagcagaacctcactatatggttttggagtacgttgatcttggggatctcaagcaattcttgcgaatctctaagtctaaagacgaaaagctaaagagccagccattgtctaccaagcagaaagtcgctttgtgcactcaggttgccttggggatggagcatctgtccaacaatcggtttgtccataaagacctggccgccaggaactgtctggtgtcagctcagagacaggtgaaagtttctgctttaggtctgtctaaggatgtatacaactctgagtattaccacttcagacaggcctgggtgccacttaggtggatgtctcccgaagccattctggaaggagacttcagtactaagtccgatgtgtgggcattcggagtactgatgtgggaggttttcacccacggcgagatgcctcatggcggccaggccgacgacgaggtactggccgacttgcaggccggaaaagcaaggctcccgcaacctgagggctgtccttcgaaactgtaccgtctgatgcagcgctgttgggctctctcacccaaagatcgtccctctttctcggagatagcctctgcactgggagactctacagtggatagtaagccatag

SEQ ID NO: 244951 - DNA, 810 bp, Artificial Sequence
  derived and/or modified sequence
ttcagcgcccagcccccccccagcctgcagtggctgttcgaggacgaaacgcctatcacaaatcggagcaggcccccacacctcagacgtgccaccgtctttgcaaacggatcactgctactgacacaggtcaggccaaggaatgcagggatttatcgctgtatcggccagggtcaacgaggacctccgattattctagaggcaactctgcacctggcagagatcgaagatatgcctctgttcgaaccaagagtgttcacagctggctctgaagaacgcgtaacctgcctgcctcccaaaggtctccctgagcctagtgtttggtgggaacacgctggtgtgcggctccccacccatggacgagtgtaccagaaaggccatgaattagttctggctaatatagccgagagcgacgcgggggtatatacatgccatgccgctaatcttgcgggacagcgccgccaagatgtgaacattacagtggccagcgaacacctgtgccctgagggccagggggaagtcgagggaaacaccggccttggcgtaatggatcgcggcttccctgccgtccccagctggcttaagaagccacaggattcacagctagaagagggcaagccaggctacctggactgtctcacccaggccaccccaaaacccaccgtggtctggtatagaaatcagatgttgatatcagaagattctagatttgaagtgttcaaaaatggaaccctcagaattaattccgtggaggtttacgatggcacatggtaccgctgcatgtcgtctacacccgcgggcagcatttag

SEQ ID NO: 244952 - DNA, 3045 bp, Artificial Sequence
  derived and/or modified sequence
atgggcgcagccaggggaagccctgccaggccccgacgcctcccactactcagcgttctcctgctaccgctgctggggggaactcaaaccgcaatagttttcatcaagcagccttcttctcaggatgctctgcagggtagacgggcattgctacggtgtgaggtggaggccccaggtcccgtccacgtctactggctgctggacggagcacccgtacaagacacagagaggcggtttgcccagggttcctccctctctttcgctgctgtagataggctccaggactccgggacatttcagtgcgttgcgagagacgacgttactggcgaggaagctagatcagcgaacgcttcattcaatataaagtggatagaagctgggcctgtggtcctgaaacaccccgcatccgaagccgaaattcagccccagactcaggtgacgctgcggtgccatattgacggtcacccccgacctacgtaccagtggttcagggacggaacacccctgtctgacgggcagtccaatcacacagtatcctcaaaggagcggaacctgaccctgcggcctgctggaccagagcattcaggattatatagttgttgtgcccattccgctttcggacaggcctgctcttcgcagaacttcactctgtcaatagctgatgagagcttcgcaagggtggtgcttgcaccccaagacgtagtggtggcacggtacgaagaggccatgtttcactgccagttttccgcccagccaccaccgtcgctccagtggctcttcgaagatgagacgcccatcactaaccgatcccgcccaccacatctcaggagggctacggtttttgccaatggtagcctactactaacgcaggtccgcccacggaatgctggcatatatcgctgtatcggacagggtcagcgcggtcctccgattattcttgaagctactttacacctcgcagagattgaagatatgcccctctttgaaccgcgtgtcttcacagctggcagcgaagaacgggtcacgtgtctcccgcctaaaggtctccctgagccctcggtttggtgggagcacgcgggagtgcgtttgccgacacatggaagagtttaccagaaggggcacgagctggtgctggctaacattgctgagagcgacgccggagtgtacacatgtcatgcagcaaacctggctgggcagaggcgccaggatgtgaacattactgttgctactgtgccttcttggctgaaaaagccacaggactcccagctcgaagagggtaagccaggatacctggattgcctgacacaggccacaccaaaacccacagtggtctggtaccgcaatcagatgctaatcagtgaggactcacgcttcgaggtgtttaagaatgggaccctgaggataaactctgtcgaggtatatgacggcacgtggtacagatgcatgagctctactcccgctgggagcattgaagctcaggccagggtgcaggtgttagagaaactcaaatttacacccccaccacagccccaacagtgtatggagttcgacaaagaggctaccgttccctgctctgctacagggagagaaaagccaaccattaagtgggagagggcagatgggtccagtctcccagagtgggttaccgacaatgcaggcacccttcactttgccagagtgactagagatgatgctgggaattacacgtgtatagcaagtaatgggcctcagggacaaatacgcgctcacgtccaactcactgtggcggtattcattacatttaaggtcgaaccagagcgaacaaccgtgtatcaggggcacactgccttgctgcagtgcgaggcccagggcgaccccaaacctctgattcagtggaaggacaagccagtgccagaagagtctgaaggccctgggagtccccctccgtacaaaatgattcagactatcggtctttctgtgggggcagcagtggcttatatcatagcagtcttgggactcatgttttactgcaaaaagcgttgtaaggctaagcgcttgcagaaacagccagagggggaagagcccgagatggagtgtcttaacggcggacccttgcagaacggacagcctagcgctgaaattcaggaggaagtcgcacttacctcgttgggaagcggcccagccgctacaaacaaacggcactctacaagtgacaagatgcattttcctcggagtagcctgcagcccattacaaccctgggaaagtcggaatttggggaagtattcctcgccaaagctcaaggactggaggagggcgtggccgagacccttgtcctggtcaagagcctacaaagcaaagacgaacaacagcagctggactttcgacgagagctggaaatgtttggaaagctgaatcatgccaacgtggtccgtcttctcggcctgtgcagggaagcagaaccacactacatggtgcttgaatacgtcgatctgggcgacttaaagcagtttcttagaatcagtaaatccaaggacgagaagctgaagagccagcctctatccactaaacagaaggtggctctgtgtactcaggtggctctcggaatggagcatttgtctaacaataggtttgtccacaaagacctagcagcacgaaactgtttggtctccgctcagagacaagtcaaagtgagtgccctcggcctgtctaaagacgtgtacaactctgagtattaccatttcagacaggcatgggtccctttacggtggatgtctccagaagcaattctcgaaggcgatttttccacaaagtccgacgtgtgggcttttggagtgctgatgtgggaggtgttcacccacggcgaaatgccccacgggggacaagccgacgatgaggtgctggcggatttgcaggctggcaaagcccgattgcctcagcctgagggatgcccttcaaagttgtatagattgatgcagcggtgctgggccctttcaccgaaggataggccaagtttcagcgaaatcgccagtgcacttggtgatagcaccgttgattctaagccatag

SEQ ID NO: 244953 - DNA, 810 bp, Artificial Sequence
  derived and/or modified sequence
tttagcgctcagcctcctccttcattacaatggctgtttgaggacgagactccaattaccaaccgttcccgccctccccacctgaggagagcaacagtgtttgcaaatggatcattgttattgacacaggttcgccctagaaatgcgggtatctaccgctgtataggccaaggccagcgaggcccacctatcatcctggaggcaacgttgcatctcgcggaaattgaagacatgcccctgtttgaacctagggttttcactgcaggcagcgaggagcgagtgacctgtctcccgcctaaggggctacccgaacccagcgtgtggtgggagcacgctggagtgcgtttaccaacccatggacgggtctaccagaagggccacgagcttgtgctggcgaatattgccgagtccgacgccggagtgtatacttgccacgccgctaacctggcagggcaaagaaggcaggacgtcaacattaccgttgcgagtgagcatttgtgcccagagggccagggtgaggtggagggtaacacaggcctgggtgtgatggatagggggttcccagccgtcccaagctggctgaagaaaccacaagattcccaactggaggaaggcaaacccggatatctggattgcctcactcaggcaacaccaaagcccactgtggtgtggtaccggaaccagatgctgattagcgaggattcaaggttcgaagtctttaagaacggcactctcaggatcaacagcgtggaggtgtacgatggaacatggtatcgatgtatgtcctcaactcctgctggtagcatctag

SEQ ID NO: 244954 - DNA, 3199 bp, Artificial Sequence
  derived and/or modified sequence
gcggcgcgcggggactcggaggtactgggcgcgcgcggctccggctcgggacgcctcgggacgcctcggggtcgggctccggctgcggctgctgctgcggcgcccgcgctccggtgcgctccgcctcctgtgcccgccgcggagcgcagtctgcgcgcccgccgtgcgccctcagctccttttcctgagcccgccgcgatgggagctgcgcggggatccccggccagaccccgccggttgcctctgctcagcgtcctgctgctgccgctgctgggcggtacccagacagccattgtcttcatcaagcagccgtcctcccaggatgcactgcaggggcgccgggcgctgcttcgctgtgaggttgaggctccgggcccggtacatgtgtactggctgctcgatggggcccctgtccaggacacggagcggcgtttcgcccagggcagcagcctgagctttgcagctgtggaccggctgcaggactctggcaccttccagtgtgtggctcgggatgatgtcactggagaagaagcccgcagtgccaacgcctccttcaacatcaaatggattgaggcaggtcctgtggtcctgaagcatccagcctcggaagctgagatccagccacagacccaggtcacacttcgttgccacattgatgggcaccctcggcccacctaccaatggttccgagatgggacccccctttctgatggtcagagcaaccacacagtcagcagcaaggagcggaacctgacgctccggccagctggtcctgagcatagtgggctgtattcctgctgcgcccacagtgcttttggccaggcttgcagcagccagaacttcaccttgagcattgctgatgaaagctttgccagggtggtgctggcaccccaggacgtggtagtagcgaggtatgaggaggccatgttccattgccagttctcagcccagccacccccgagcctgcagtggctctttgaggatgagactcccatcactaaccgcagtcgccccccacacctccgcagagccacagtgtttgccaacgggtctctgctgctgacccaggtccggccacgcaatgcagggatctaccgctgcattggccaggggcagaggggcccacccatcatcctggaagccacacttcacctagcagagattgaagacatgccgctatttgagccacgggtgtttacagctggcagcgaggagcgtgtgacctgccttccccccaagggtctgccagagcccagcgtgtggtgggagcacgcgggagtccggctgcccacccatggcagggtctaccagaagggccacgagctggtgttggccaatattgctgaaagtgatgctggtgtctacacctgccacgcggccaacctggctggtcagcggagacaggatgtcaacatcactgtggccactgtgccctcctggctgaagaagccccaagacagccagctggaggagggcaaacccggctacttggattgcctgacccaggccacaccaaaacctacagttgtctggtacagaaaccagatgctcatctcagaggactcacggttcgaggtgttcctggcaaaggctcagggcttggaggagggagtggcagagaccctggtacttgtgaagagcctgcagagcaaggatgagcagcagcagctggacttccggagggagttggagatgtttgggaagctgaaccacgccaacgtggtgcggctcctggggctgtgccgggaggctgagccccactacatggtgctggaatatgtggatctgggagacctcaagcagttcctgaggatttccaagagcaaggatgaaaaattgaagtcacagcccctcagcaccaagcagaaggtggccctatgcacccaggtagccctgggcatggagcacctgtccaacaaccgctttgtgcataaggacttggctgcgcgtaactgcctggtcagtgcccagagacaagtgaaggtgtctgccctgggcctcagcaaggatgtgtacaacagtgagtactaccacttccgccaggcctgggtgccgctgcgctggatgtcccccgaggccatcctggagggtgacttctctaccaagtctgatgtctgggccttcggtgtgctgatgtgggaagtgtttacacatggagagatgccccatggtgggcaggcagatgatgaagtactggcagatttgcaggctgggaaggctagacttcctcagcccgagggctgcccttccaaactctatcggctgatgcagcgctgctgggccctcagccccaaggaccggccctccttcagtgagattgccagcgccctgggagacagcaccgtggacagcaagccgtgaggagggagcccgctcaggatggcctgggcaggggaggacatctctagagggaagctcacagcatgatgggcaagatccctgtcctcctgggccctgaggcccctgccctagtgcaacaggcattgctgaggtctgagcagggcctggcctttcctcctcttcctcaccctcatcctttgggaggctgacttggacccaaactgggcgactagggctttgagctgggcagttttccctgccacctcttcctctatcagggacagtgtgggtgccacaggtaaccccaatttctggccttcaacttctccccttgaccgggtccaactctgccactcatctgccaactttgcctggggagggctaggcttgggatgagctgggtttgtggggagttccttaatattctcaagttctgggcacacagggttaatgagtctcttggcccactggtcccacttgggggtctagaccaggattatagaggacacagcaagtgagtcctccccactctgggcttgtgcacactgacccagacccacgtcttccccacccttctctcctttcctcatcctaagtgcctggcagatgaaggagttttcaggagcttttgacactatataaaccgccctttttgtatgcaccacgggcggcttttatatgtaattgcagcgtggggtgggtgggcatgggaggtaggggtgggccctggagatgaggagggtgggccatccttaccccacacttttattgttgtcgttttttgtttgttttgtttttttgtttttgtttttgtttttacactcgctgctctcaataaataagccttttttacaacctg

SEQ ID NO: 244955 - DNA, 4023 bp, Artificial Sequence
  derived and/or modified sequence
cgcctcgggacgcctcggggtcgggctccggctgcggctgctgctgcggcgcccgcgctccggtgcgctccgcctcctgtgcccgccgcggagcgcagtctgcgcgcccgccgtgcgccctcagctccttttcctgagcccgccgcgatgggagctgcgcggggatccccggccagaccccgccggttgcctctgctcagcgtcctgctgctgccgctgctgggcggtacccagacagccattgtcttcatcaagcagccgtcctcccaggatgcactgcaggggcgccgggcgctgcttcgctgtgaggttgaggctccgggcccggtacatgtgtactggctgctcgatggggcccctgtccaggacacggagcggcgtttcgcccagggcagcagcctgagctttgcagctgtggaccggctgcaggactctggcaccttccagtgtgtggctcgggatgatgtcactggagaagaagcccgcagtgccaacgcctccttcaacatcaaatggattgaggcaggtcctgtggtcctgaagcatccagcctcggaagctgagatccagccacagacccaggtcacacttcgttgccacattgatgggcaccctcggcccacctaccaatggttccgagatgggacccccctttctgatggtcagagcaaccacacagtcagcagcaaggagcggaacctgacgctccggccagctggtcctgagcatagtgggctgtattcctgctgcgcccacagtgcttttggccaggcttgcagcagccagaacttcaccttgagcattgctgatgaaagctttgccagggtggtgctggcaccccaggacgtggtagtagcgaggtatgaggaggccatgttccattgccagttctcagcccagccacccccgagcctgcagtggctctttgaggatgagactcccatcactaaccgcagtcgccccccacacctccgcagagccacagtgtttgccaacgggtctctgctgctgacccaggtccggccacgcaatgcagggatctaccgctgcattggccaggggcagaggggcccacccatcatcctggaagccacacttcacctagcagagattgaagacatgccgctatttgagccacgggtgtttacagctggcagcgaggagcgtgtgacctgccttccccccaagggtctgccagagcccagcgtgtggtgggagcacgcgggagtccggctgcccacccatggcagggtctaccagaagggccacgagctggtgttggccaatattgctgaaagtgatgctggtgtctacacctgccacgcggccaacctggctggtcagcggagacaggatgtcaacatcactgtggccactgtgccctcctggctgaagaagccccaagacagccagctggaggagggcaaacccggctacttggattgcctgacccaggccacaccaaaacctacagttgtctggtacagaaaccagatgctcatctcagaggactcacggttcgaggtcttcaagaatgggaccttgcgcatcaacagcgtggaggtgtatgatgggacatggtaccgttgtatgagcagcaccccagccggcagcatcgaggcgcaagcccgtgtccaagtgctggaaaagctcaagttcacaccaccaccccagccacagcagtgcatggagtttgacaaggaggccacggtgccctgttcagccacaggccgagagaagcccactattaagtgggaacgggcagatgggagcagcctcccagagtgggtgacagacaacgctgggaccctgcattttgcccgggtgactcgagatgacgctggcaactacacttgcattgcctccaacgggccgcagggccagattcgtgcccatgtccagctcactgtggcagtttttatcaccttcaaagtggaaccagagcgtacgactgtgtaccagggccacacagccctactgcagtgcgaggcccagggggaccccaagccgctgattcagtggaaagacaagcctgtgccggaggagtcggagggccctggcagccctcccccctacaagatgatccagaccattgggttgtcggtgggtgccgctgtggcctacatcattgccgtgctgggcctcatgttctactgcaagaagcgctgcaaagccaagcggctgcagaagcagcccgagggcgaggagccagagatggaatgcctcaacggtgggcctttgcagaacgggcagccctcagcagagatccaagaagaagtggccttgaccagcttgggctccggccccgcggccaccaacaaacgccacagcacaagtgataagatgcacttcccacggtctagcctgcagcccatcaccacgctggggaagagtgagtttggggaggtgttcctggcaaaggctcagggcttggaggagggagtggcagagaccctggtacttgtgaagagcctgcagagcaaggatgagcagcagcagctggacttccggagggagttggagatgtttgggaagctgaaccacgccaacgtggtgcggctcctggggctgtgccgggaggctgagccccactacatggtgctggaatatgtggatctgggagacctcaagcagttcctgaggatttccaagagcaaggatgaaaaattgaagtcacagcccctcagcaccaagcagaaggtggccctatgcacccaggtagccctgggcatggagcacctgtccaacaaccgctttgtgcataaggacttggctgcgcgtaactgcctggtcagtgcccagagacaagtgaaggtgtctgccctgggcctcagcaaggatgtgtacaacagtgagtactaccacttccgccaggcctgggtgccgctgcgctggatgtcccccgaggccatcctggagggtgacttctctaccaagtctgatgtctgggccttcggtgtgctgatgtgggaagtgtttacacatggagagatgccccatggtgggcaggcagatgatgaagtactggcagatttgcaggctgggaaggctagacttcctcagcccgagggctgcccttccaaactctatcggctgatgcagcgctgctgggccctcagccccaaggaccggccctccttcagtgagattgccagcgccctgggagacagcaccgtggacagcaagccgtgaggagggagcccgctcaggatggcctgggcaggggaggacatctctagagggaagctcacagcatgatgggcaagatccctgtcctcctgggccctgaggcccctgccctagtgcaacaggcattgctgaggtctgagcagggcctggcctttcctcctcttcctcaccctcatcctttgggaggctgacttggacccaaactgggcgactagggctttgagctgggcagttttccctgccacctcttcctctatcagggacagtgtgggtgccacaggtaaccccaatttctggccttcaacttctccccttgaccgggtccaactctgccactcatctgccaactttgcctggggagggctaggcttgggatgagctgggtttgtggggagttccttaatattctcaagttctgggcacacagggttaatgagtctcttggcccactggtcccacttgggggtctagaccaggattatagaggacacagcaagtgagtcctccccactctgggcttgtgcacactgacccagacccacgtcttccccacccttctctcctttcctcatcctaagtgcctggcagatgaaggagttttcaggagcttttgacactatataaaccgccctttttgtatgcaccacgggcggcttttatatgtaattgcagcgtggggtgggtgggcatgggaggtaggggtgggccctggagatgaggagggtgggccatccttaccccacacttttattgttgtcgttttttgtttgttttgtttttttgtttttgtttttgtttttacactcgctgctctcaataaataagcctttttta

SEQ ID NO: 244956 - DNA, 807 bp, Artificial Sequence
  derived and/or modified sequence
ttctcagcccagccacccccgagcctgcagtggctctttgaggatgagactcccatcactaaccgcagtcgccccccacacctccgcagagccacagtgtttgccaacgggtctctgctgctgacccaggtccggccacgcaatgcagggatctaccgctgcattggccaggggcagaggggcccacccatcatcctggaagccacacttcacctagcagagattgaagacatgccgctatttgagccacgggtgtttacagctggcagcgaggagcgtgtgacctgccttccccccaagggtctgccagagcccagcgtgtggtgggagcacgcgggagtccggctgcccacccatggcagggtctaccagaagggccacgagctggtgttggccaatattgctgaaagtgatgctggtgtctacacctgccacgcggccaacctggctggtcagcggagacaggatgtcaacatcactgtggccagtgagcacctttgccctgaaggtcaaggagaggtggaggggaacacaggtctgggtgtgatggacagaggcttccctgctgtgccctcctggctgaagaagccccaagacagccagctggaggagggcaaacccggctacttggattgcctgacccaggccacaccaaaacctacagttgtctggtacagaaaccagatgctcatctcagaggactcacggttcgaggtcttcaagaatgggaccttgcgcatcaacagcgtggaggtgtatgatgggacatggtaccgttgtatgagcagcaccccagccggcagcatc

SEQ ID NO: 244957 - DNA, 3045 bp, Artificial Sequence
  derived and/or modified sequence
atgggcgccgccagaggcagccccgccagacccagaagactgcccctgctgagcgtgctgctgctgcccctgctgggcggcacccagaccgccatcgtgttcatcaagcagcccagcagccaggacgccctgcagggcagaagagccctgctgagatgcgaggtggaggcccccggccccgtgcacgtgtactggctgctggacggcgcccccgtgcaggacaccgagagaagattcgcccagggcagcagcctgagcttcgccgccgtggacagactgcaggacagcggcaccttccagtgcgtggccagagacgacgtgaccggcgaggaggccagaagcgccaacgccagcttcaacatcaagtggatcgaggccggccccgtggtgctgaagcaccccgccagcgaggccgagatccagccccagacccaggtgaccctgagatgccacatcgacggccaccccagacccacctaccagtggttcagagacggcacccccctgagcgacggccagagcaaccacaccgtgagcagcaaggagagaaacctgaccctgagacccgccggccccgagcacagcggcctgtacagctgctgcgcccacagcgccttcggccaggcctgcagcagccagaacttcaccctgagcatcgccgacgagagcttcgccagagtggtgctggccccccaggacgtggtggtggccagatacgaggaggccatgttccactgccagttcagcgcccagcccccccccagcctgcagtggctgttcgaggacgagacccccatcaccaacagaagcagacccccccacctgagaagagccaccgtgttcgccaacggcagcctgctgctgacccaggtgagacccagaaacgccggcatctacagatgcatcggccagggccagagaggcccccccatcatcctggaggccaccctgcacctggccgagatcgaggacatgcccctgttcgagcccagagtgttcaccgccggcagcgaggagagagtgacctgcctgccccccaagggcctgcccgagcccagcgtgtggtgggagcacgccggcgtgagactgcccacccacggcagagtgtaccagaagggccacgagctggtgctggccaacatcgccgagagcgacgccggcgtgtacacctgccacgccgccaacctggccggccagagaagacaggacgtgaacatcaccgtggccaccgtgcccagctggctgaagaagccccaggacagccagctggaggagggcaagcccggctacctggactgcctgacccaggccacccccaagcccaccgtggtgtggtacagaaaccagatgctgatcagcgaggacagcagattcgaggtgttcaagaacggcaccctgagaatcaacagcgtggaggtgtacgacggcacctggtacagatgcatgagcagcacccccgccggcagcatcgaggcccaggccagagtgcaggtgctggagaagctgaagttcaccccccccccccagccccagcagtgcatggagttcgacaaggaggccaccgtgccctgcagcgccaccggcagagagaagcccaccatcaagtgggagagagccgacggcagcagcctgcccgagtgggtgaccgacaacgccggcaccctgcacttcgccagagtgaccagagacgacgccggcaactacacctgcatcgccagcaacggcccccagggccagatcagagcccacgtgcagctgaccgtggccgtgttcatcaccttcaaggtggagcccgagagaaccaccgtgtaccagggccacaccgccctgctgcagtgcgaggcccagggcgaccccaagcccctgatccagtggaaggacaagcccgtgcccgaggagagcgagggccccggcagcccccccccctacaagatgatccagaccatcggcctgagcgtgggcgccgccgtggcctacatcatcgccgtgctgggcctgatgttctactgcaagaagagatgcaaggccaagagactgcagaagcagcccgagggcgaggagcccgagatggagtgcctgaacggcggccccctgcagaacggccagcccagcgccgagatccaggaggaggtggccctgaccagcctgggcagcggccccgccgccaccaacaagagacacagcaccagcgacaagatgcacttccccagaagcagcctgcagcccatcaccaccctgggcaagagcgagttcggcgaggtgttcctggccaaggcccagggcctggaggagggcgtggccgagaccctggtgctggtgaagagcctgcagagcaaggacgagcagcagcagctggacttcagaagagagctggagatgttcggcaagctgaaccacgccaacgtggtgagactgctgggcctgtgcagagaggccgagccccactacatggtgctggagtacgtggacctgggcgacctgaagcagttcctgagaatcagcaagagcaaggacgagaagctgaagagccagcccctgagcaccaagcagaaggtggccctgtgcacccaggtggccctgggcatggagcacctgagcaacaacagattcgtgcacaaggacctggccgccagaaactgcctggtgagcgcccagagacaggtgaaggtgagcgccctgggcctgagcaaggacgtgtacaacagcgagtactaccacttcagacaggcctgggtgcccctgagatggatgagccccgaggccatcctggagggcgacttcagcaccaagagcgacgtgtgggccttcggcgtgctgatgtgggaggtgttcacccacggcgagatgccccacggcggccaggccgacgacgaggtgctggccgacctgcaggccggcaaggccagactgccccagcccgagggctgccccagcaagctgtacagactgatgcagagatgctgggccctgagccccaaggacagacccagcttcagcgagatcgccagcgccctgggcgacagcaccgtggacagcaagccctag

SEQ ID NO: 244958 - DNA, 810 bp, Artificial Sequence
  derived and/or modified sequence
ttcagcgcccagcccccccccagcctgcagtggctgttcgaggacgagacccccatcaccaacagaagcagacccccccacctgagaagagccaccgtgttcgccaacggcagcctgctgctgacccaggtgagacccagaaacgccggcatctacagatgcatcggccagggccagagaggcccccccatcatcctggaggccaccctgcacctggccgagatcgaggacatgcccctgttcgagcccagagtgttcaccgccggcagcgaggagagagtgacctgcctgccccccaagggcctgcccgagcccagcgtgtggtgggagcacgccggcgtgagactgcccacccacggcagagtgtaccagaagggccacgagctggtgctggccaacatcgccgagagcgacgccggcgtgtacacctgccacgccgccaacctggccggccagagaagacaggacgtgaacatcaccgtggccagcgagcacctgtgccccgagggccagggcgaggtggagggcaacaccggcctgggcgtgatggacagaggcttccccgccgtgcccagctggctgaagaagccccaggacagccagctggaggagggcaagcccggctacctggactgcctgacccaggccacccccaagcccaccgtggtgtggtacagaaaccagatgctgatcagcgaggacagcagattcgaggtgttcaagaacggcaccctgagaatcaacagcgtggaggtgtacgacggcacctggtacagatgcatgagcagcacccccgccggcagcatctag

SEQ ID NO: 244959 - protein, 1626 aa, Artificial Sequence
  derived and/or modified sequence
MAGLRGNAVAGLLWMLLLWSGGGGCQAQRAGCKSVHYDLVFLLDTSSSVGKEDFEKVRQWVANLVDTFEVGPDRTRVGVVRYSDRPTTAFELGLFGSQEEVKAAARRLAYHGGNTNTGDALRYITARSFSPHAGGRPRDRAYKQVAILLTDGRSQDLVLDAAAAAHRAGIRIFAVGVGEALKEELEEIASEPKSAHVFHVSDFNAIDKIRGKLRRRLCENVLCPSVRVEGDRFKHTNGGTKEITGFDLMDLFSVKEILGKRENGAQSSYVRMGSFPVVQSTEDVFPQGLPDEYAFVTTFRFRKTSRKEDWYIWQVIDQYSIPQVSIRLDGENKAVEYNAVGAMKDAVRVVFRGSRVNDLFDRDWHKMALSIQAQNVSLHIDCALVQTLPIEERENIDIQGKTVIGKRLYDSVPIDFDLQRIVIYCDSRHAELETCCDIPSGPCQVTVVTEPPPPPPPQRPPTPGSEQIGFLKTINCSCPAGEKGEMGVAGPMGLPGPKGDIGAIGPVGAPGPKGEKGDVGIGPFGQGEKGEKGSLGLPGPPGRDGSKGMRGEPGELGEPGLPGEVGMRGPQGPPGLPGPPGRVGAPGLQGERGEKGTRGEKGERGLDGFPGKPGDTGQQGRPGPSGVAGPQGEKGDVGPAGPPGVPGSVVQQEGLKGEQGAPGPRGHQGAPGPPGARGPIGPEGRDGPPGLQGLRGKKGDMGPPGIPGLLGLQGPPGPPGVPGPPGPGGSPGLPGEIGFPGKPGPPGPTGPPGKDGPNGPPGPPGTKGEPGERGEDGLPGKPGLRGEIGEQGLAGRPGEKGEAGLPGAPGFPGVRGEKGDQGEKGELGLPGLKGDRGEKGEAGPAGPPGLPGTTSLFTPHPRMPGEQGPKGEKGDPGLPGEPGLQGRPGELGPQGPTGPPGAKGQEGAHGAPGAAGNPGAPGHVGAPGPSGPPGSVGAPGLRGTPGKDGERGEKGAAGEEGSPGPVGPRGDPGAPGLPGPPGKGKDGEPGLRGSPGLPGPLGTKAACGKVRGSENCALGGQCVKGDRGAPGIPGSPGSRGDPGIGVAGPPGPSGPPGDKGSPGSRGLPGFPGPQGPAGRDGAPGNPGERGPPGKPGLSSLLSPGDINLLAKDVCNDCPPGPPGLPGLPGFKGDKGVPGKPGREGTEGKKGEAGPPGLPGPPGIAGPQGSQGERGADGEVGQKGDQGHPGVPGFMGPPGNPGPPGADGIAGAAGPPGIQGSPGKEGPPGPQGPSGLPGIPGEEGKEGRDGKPGPPGEPGKAGEPGLPGPEGARGPPGFKGHTGDSGAPGPRGESGAMGLPGQEGLPGKDGDTGPTGPQGPQGPRGPPGKNGSPGSPGEPGPSGTPGQKGSKGENGSPGLPGFLGPRGPPGEPGEKGVPGKEGVPGKPGEPGFKGERGDPGIKGDKGPPGGKGQPGDPGIPGHKGHTGLMGPQGLPGENGPVGPPGPPGQPGFPGLRGESPSMETLRRLIQEELGKQLETRLAYLLAQMPPAYMKSSQGRPGPPGPPGKDGLPGRAGPMGEPGRPGQGGLEGPSGPIGPKGERGAKGDPGAPGVGLRGEMGPPGIPGQPGEPGYAKDGLPGIPGPQGETGPAGHPGLPGPPGPPGQCDPSQCAYFASLAARPGNVKGP

SEQ ID NO: 244960 - DNA, 528 bp, Artificial Sequence
  derived and/or modified sequence
atgaggctgcccggggccccagccctgcctgatgctgacttcctggtgcacctgcacttcctggtgcagacctcctggttcatctgcaacttcctggtgcgcatcccctgggccagcgccctgcctgatgccccagccctgctggtgatcctggagaagaccttccctgagcacgccacctgccggggctgctgggtgtctggctacctgtgctggacagcccctggcaactgcatctgcagcgccaacgtgggcttcctgaagattgagaacacctaccggcagatccaccacacccacatgcaccgccacacccacacccacacagacaagagcatcacccacacctgcacagacacccacacccagagccagaggcaccggctgaccagccgggccctgcggctcttcatcctgaatgccatcacagacaccagcaagtttggagctgctgtgttcttctacgtgtactgcctgtttgctgacagcgtgtacaagttcttccccttcctgccccccttcagatag

SEQ ID NO: 244961 - protein, 341 aa, Artificial Sequence
  derived and/or modified sequence
MGRRCCRRRVLAAACLGAALLLLCAAPRSLRPAFGNRALGSSWLGGEKRSPLQKLYDLDQDPRSTLAKVHRQRRDLLNSACSRHSRRQRLLQPEDLRHVLVDDAHGLLYCYVPKVACTNWKRVLLALSGQARGDPRAISAQEAHAPGRLPSLADFSPAEINRRLRAYLAFLFVREPFERLASAYRNKLARPYSAAFQRRYGARIVQRLRPRALPDARARGHDVRFAEFLAYLLDPRTRREEPFNEHWERAHALCHPCRLRYDVVGKFETLAEDAAFVLGLAGASDLSFPGPPRPRGAAASRDLAARLFRDISPFYQRRLFDLYKMDFLLFNYSAPSYLRLL

SEQ ID NO: 244962 - protein, 225 aa, Artificial Sequence
  derived and/or modified sequence
MGRRCCRRRVLAAACLGAALLLLCAAPRSLRPAFGNRALGSSWLGGEKRSPLQKLYDLDQDPRSTLAKVHRQRRDLLNSACSRHSRRQRLLQPEDLRHVLVDDAHGLLYCYVPKVACTNWKRVLLALSGQARGDPRAISAQEAHAPGRLPSLADFSPAEINRRLRAYLAFLFVREPFERLASAYRNKLARTRSATRVASATTSWASSRRWRRTRPSCWAWRAHPT

SEQ ID NO: 244963 - DNA, 1026 bp, Artificial Sequence
  derived and/or modified sequence
atgggcagaagatgctgcagaagaagagtgctggccgccgcctgcctgggcgccgccctgctgctgctgtgcgccgcccccagaagcctgagacccgccttcggcaacagagccctgggcagcagctggctgggcggcgagaagagaagccccctgcagaagctgtacgacctggaccaggaccccagaagcaccctggccaaggtgcacagacagagaagagacctgctgaacagcgcctgcagcagacacagcagaagacagagactgctgcagcccgaggacctgagacacgtgctggtggacgacgcccacggcctgctgtactgctacgtgcccaaggtggcctgcaccaactggaagagagtgctgctggccctgagcggccaggccagaggcgaccccagagccatcagcgcccaggaggcccacgcccccggcagactgcccagcctggccgacttcagccccgccgagatcaacagaagactgagagcctacctggccttcctgttcgtgagagagcccttcgagagactggccagcgcctacagaaacaagctggccagaccctacagcgccgccttccagagaagatacggcgccagaatcgtgcagagactgagacccagagccctgcccgacgccagagccagaggccacgacgtgagattcgccgagttcctggcctacctgctggaccccagaaccagaagagaggagcccttcaacgagcactgggagagagcccacgccctgtgccacccctgcagactgagatacgacgtggtgggcaagttcgagaccctggccgaggacgccgccttcgtgctgggcctggccggcgccagcgacctgagcttccccggcccccccagacccagaggcgccgccgccagcagagacctggccgccagactgttcagagacatcagccccttctaccagagaagactgttcgacctgtacaagatggacttcctgctgttcaactacagcgcccccagctacctgagactgctgtag

SEQ ID NO: 244964 - DNA, 678 bp, Artificial Sequence
  derived and/or modified sequence
atgggcagaagatgctgcagaagaagagtgctggccgccgcctgcctgggcgccgccctgctgctgctgtgcgccgcccccagaagcctgagacccgccttcggcaacagagccctgggcagcagctggctgggcggcgagaagagaagccccctgcagaagctgtacgacctggaccaggaccccagaagcaccctggccaaggtgcacagacagagaagagacctgctgaacagcgcctgcagcagacacagcagaagacagagactgctgcagcccgaggacctgagacacgtgctggtggacgacgcccacggcctgctgtactgctacgtgcccaaggtggcctgcaccaactggaagagagtgctgctggccctgagcggccaggccagaggcgaccccagagccatcagcgcccaggaggcccacgcccccggcagactgcccagcctggccgacttcagccccgccgagatcaacagaagactgagagcctacctggccttcctgttcgtgagagagcccttcgagagactggccagcgcctacagaaacaagctggccagaaccagaagcgccaccagagtggccagcgccaccaccagctgggccagcagcagaagatggagaagaaccagacccagctgctgggcctggagagcccaccccacctag

SEQ ID NO: 244965 - DNA, 1026 bp, Artificial Sequence
  derived and/or modified sequence
atgggtcggaggtgctgccgacgcagagtgctcgccgcggcgtgtctgggagccgccctgttactgttgtgcgcagcccctcgcagcctcaggccagccttcgggaatcgcgctctcggatctagctggctcggtggagaaaagagatccccacttcaaaaattgtatgatctggaccaggatcctcgctccaccctggctaaagtacacagacagagacgggacctactaaactctgcgtgttcgcgccattcccgtcggcagagactactgcagccggaggatctgcggcacgtgctggtggacgacgcgcatgggctcttatattgctacgtacccaaggtcgcttgtacaaactggaagagggtccttctggctctgagtggtcaagcgcggggcgatccacgcgctatctctgcccaagaagcacacgcacccggccgcctgccaagtctggcagattttagtcccgctgagataaatcggcgacttcgagcttacttggcttttctttttgtacgggaaccattcgagcgactggcatctgcttaccgcaataaactggcaaggccttactctgcagccttccagcggagatacggggccaggatagtccagagactccgacccagggcgttgcctgacgcacgggcaagggggcacgatgtccgatttgcagaattcttggcatacctcctggacccgcggacaaggagagaagagccattcaatgaacattgggaacgcgcgcacgcgctctgtcacccatgccgcctcagatacgacgtggtagggaagttcgaaacgcttgccgaggacgctgccttcgtgctgggacttgccggggccagcgatttatcattcccaggtccccctagacctcgtggagctgccgcctcgagggacctcgcagcccgtttattcagggatatttctcccttctaccagagacgtttattcgatctttataagatggactttcttctgttcaattactcagcaccaagctacttgcgccttctgtag

SEQ ID NO: 244966 - DNA, 678 bp, Artificial Sequence
  derived and/or modified sequence
atgggcaggcggtgttgtcgacggcgagtattggccgcagcctgtctgggcgccgcactgctcttactctgcgcggctccccgctctctcagacctgcctttggaaatcgggccttagggtcctcttggctggggggcgaaaaacgctccccccttcagaagctgtacgatttagaccaggatccgaggtccacccttgccaaagtgcatcgccaaaggagggatttgcttaactccgcgtgttccaggcacagccggcgccagcgcctgctccagcctgaagacctgaggcatgtcctggtagatgatgcacatggtctgttatactgttatgtgcccaaagttgcttgtaccaattggaaacgcgttctccttgccctatctggacaagctcggggcgatccacgggccatcagtgcccaggaggcccacgcacccggacggttaccttccctggccgacttttcccccgccgaaatcaatagaaggctgagggcttacctggcattcctctttgtgagggagcccttcgaaaggctggccagtgcataccgaaataaactcgctcggacacggagcgcgacacgcgtggctagtgctacgacttcatgggcttcttcccgtcgctggagaagaacaagaccatcatgctgggcctggcgggcccaccccacctag

SEQ ID NO: 244967 - DNA, 1026 bp, Artificial Sequence
  derived and/or modified sequence
atgggccgccgctgctgcagaagaagagtgctggccgccgcctgcctgggcgccgccctgctgctgctgtgtgccgcccccaggagcctgcggcctgccttcggcaacagagccctgggcagctcctggctgggcggggagaagaggagccccctgcagaagctgtatgacctggaccaggaccccaggagcaccctggccaaggtgcaccggcagaggcgggacctgctgaacagcgcctgcagccgccacagccggcggcagaggctgctgcagcctgaggacctgcggcacgtgctggtggatgatgcccacggcctgctgtactgctacgtgcccaaggtggcctgcaccaactggaagagggtgctgctggccctgagcggccaggcccggggggacccccgggccatcagcgcccaggaggcccacgcccctggccgcctgcccagcctggccgacttctccccagctgagatcaacagaaggctgcgggcctacctggccttcctgtttgtgcgggagccctttgagcggctggccagcgcctacagaaacaagctggcccggccctacagcgctgccttccagaggcgctacggggcccgcatcgtgcagaggctgcggccccgggccctgcctgatgcccgggcccggggccatgatgtgcgctttgctgagttcctggcctacctgctggaccccaggacccggcgggaggagcccttcaatgagcactgggagcgggcccacgccctgtgccacccctgccgcctgcgctatgatgtggtgggcaagtttgagaccctggccgaggatgctgcctttgtgctgggcctggccggggccagtgacctgtccttccctggccccccccggcccagaggagctgctgccagccgggacctggccgcccggctcttccgggacatcagccccttctaccagaggcggctgtttgacctgtacaagatggacttcctgctcttcaactacagcgcccccagctacctgcggctgctgtag

SEQ ID NO: 244968 - DNA, 678 bp, Artificial Sequence
  derived and/or modified sequence
atgggccgccgctgctgcagaagaagagtgctggccgccgcctgcctgggcgccgccctgctgctgctgtgtgccgcccccaggagcctgcggcctgccttcggcaacagagccctgggcagctcctggctgggcggggagaagaggagccccctgcagaagctgtatgacctggaccaggaccccaggagcaccctggccaaggtgcaccggcagaggcgggacctgctgaacagcgcctgcagccgccacagccggcggcagaggctgctgcagcctgaggacctgcggcacgtgctggtggatgatgcccacggcctgctgtactgctacgtgcccaaggtggcctgcaccaactggaagagggtgctgctggccctgagcggccaggcccggggggacccccgggccatcagcgcccaggaggcccacgcccctggccgcctgcccagcctggccgacttctccccagctgagatcaacagaaggctgcgggcctacctggccttcctgtttgtgcgggagccctttgagcggctggccagcgcctacagaaacaagctggcccggaccaggtctgccaccagggtggccagcgccaccacctcctgggccagcagccgccgctggaggaggacccggcccagctgctgggcctggagggcccaccccacctag

SEQ ID NO: 244969 - DNA, 1026 bp, Artificial Sequence
  derived and/or modified sequence
atgggccggcggtgctgccggcggcgggtgctggccgccgcctgcctcggtgctgccctcttgctgctgtgtgcggcccctagaagtcttcgacctgccttcggtaaccgcgccttgggatcctcgtggttaggaggggagaagaggtcgcccttgcagaagctgtacgacctcgaccaagacccccggtcaactcttgctaaggtgcacagacaacgaagggacctcctaaacagcgcgtgttctcgtcacagtcgcagacaacgcctgcttcaaccagaggatctgaggcatgtgctcgttgacgacgcacatgggctgctgtattgttatgtaccaaaagtcgcttgtacgaactggaagcgcgtccttctggcgctttcaggacaggcccgaggggatcccagagccatttctgctcaagaggctcacgcacctgggcggctgccctcactagctgacttttctccggctgagattaatcggcggctgcgtgcttatctggcctttctcttcgttagagaacctttcgaacggcttgcatcagcctacagaaacaaactggctaggccatactccgccgcattccagcgtcgttacggagctcgcatagtccaacggcttcggcccagggcgctcccagacgctcgagcccgggggcatgacgtgcgatttgctgagtttctcgcctatttgcttgatcctcgaacccggcgggaagagccgttcaatgagcactgggagcgagcccatgccttatgccatccatgtcgccttcggtacgacgtcgttggtaagtttgagactcttgctgaagacgcggcttttgtccttggactggccggtgcctccgatttatcattccccggtcccccccggccacgcggcgcagctgccagccgggacttagcagctcgcctgttcagggatatcagcccgttctatcagcgcagacttttcgacctttacaagatggattttttactgtttaactactctgcaccatcatacctgcgattgctatag

SEQ ID NO: 244970 - DNA, 678 bp, Artificial Sequence
  derived and/or modified sequence
atgggccggcggtgctgccggcggcgggtgctggccgccgcctgcttaggagcagccttactcttactgtgtgctgcgccgaggtctctgaggcctgcatttggtaatcgtgcactcggttctagctggctcggcggggaaaaacgctcccccttacagaagttgtatgacctggaccaagaccctcgctctacattggccaaggtgcatcgtcaacgaagagatctgctgaacagtgcatgctcacggcacagccgccgccagaggctccttcagcccgaggacctccgccatgtactggtggatgacgcccatggcctcttgtactgctacgtccccaaagtagcctgtacgaactggaaacgagtgctgctggccctgtccggtcaggccaggggtgacccccgggccattagtgcccaagaagcccatgcccctggtcgcttgccaagcttggcggatttttccccggccgagattaataggcgtctgagagcatacctagcctttttgtttgtgagagagccgttcgagcgactggcatctgcatacaggaataagctggctcggacgcgatccgctacccgcgttgccagtgccaccactagttgggcatcttcacgacggtggcggcggaccagacccagctgctgggcctggcgcgctcatcccacttag

SEQ ID NO: 244971 - DNA, 1026 bp, Artificial Sequence
  derived and/or modified sequence
atgggcagacgatgttgtaggcgcagggttttagcagctgcctgcctgggagcggcactgttgttgctctgtgccgcacctaggtctctgaggccggctttcggaaatcgtgcccttggcagcagttggctgggcggagagaagcgctcacctttgcaaaagctgtacgacctggaccaagatccaagatcaacactcgcgaaggtgcaccgccagagacgcgatttactgaacagcgcatgttcacgtcatagtcggcgacaaaggttattgcagcccgaggatctacggcacgtactcgttgacgacgcacatgggctgttgtattgctacgtgcccaaggtggcatgcaccaattggaaacgtgtcctgctcgctctgtcaggccaggctcgcggagaccctagagcaatcagcgctcaggaagctcatgctccaggtcgactgcctagccttgcagacttctccccagctgagataaaccgccgattgcgggcttacctggcttttctcttcgttagagagcctttcgaaagactggcatccgcgtatcgcaacaagttagctcgcccatacagcgccgcattccagagacgttacggtgctaggatcgtccagcgcctgcgcccacgtgctcttccagacgcacgcgcaagagggcatgacgtgaggtttgcggaatttctcgcctatctgttagaccctcggacgcggagagaggaacctttcaacgaacactgggagagggctcatgcactgtgccacccttgcagattgagatatgacgtagttgggaaattcgaaaccctagccgaggacgcagcgtttgtgctgggcctggctggagcaagcgacttgagtttccccggtccaccaaggccaaggggcgctgccgctagccgtgatctcgctgccaggctgttcagggacatctcccccttttatcagagaagactctttgacctctacaagatggatttcctgctctttaactattctgccccaagctatctgcggctcctgtag

SEQ ID NO: 244972 - DNA, 678 bp, Artificial Sequence
  derived and/or modified sequence
atgggtcggaggtgttgcaggcggagagtactggctgccgcttgtcttggcgcagcccttctgttactgtgtgcagcccctagaagtcttcgtcctgcattcggcaatagggctctgggaagctcatggctcggcggtgagaaaagaagtcctctccaaaagctgtacgaccttgatcaggatccacgctctaccctagcaaaagtccatcggcagcggagagatctgttgaactcagcatgtagcaggcattccaggagacagagattgttgcagccagaagacctgaggcatgtgcttgtggacgacgcacatggactcctctactgctatgtgccaaaggttgcctgcacaaactggaaaagggttttactcgcactgtcggggcaggccagaggcgacccccgagcaatatccgcacaggaagcccacgccccaggccgacttccttccttggctgattttagtcccgctgagatcaaccggagactgagagcctatctggcatttctttttgtcagagagccttttgaacgactagcatcagcttaccgtaacaaactggcccgaactaggagcgctacgcgggtggctagcgctactactagctgggctagcagcagaagatggagacgaaccaggccctcctgctgggcctggagagctcatcctacctag

SEQ ID NO: 244973 - DNA, 1789 bp, Artificial Sequence
  derived and/or modified sequence
gcccccagccgtatccagcggactgtcctccgccgcgcgcccggcacagcatggggaggcgctgctgccggcggcgcgtgctggcggccgcctgtctgggcgccgcgctcctgctcctatgcgccgcgccccgctccctgcgcccggcatttggaaacagagccctgggctccagctggcttggtggggagaagagaagccccctgcagaagctctatgacctggatcaggacccgcgctcgaccctggcgaaggtgcaccggcagcggcgcgacctgctgaacagcgcctgtagccgccactcacgccggcagcgcctgctacagccggaggacctgcggcacgtgctggtggacgacgcgcatggcctgctctactgctacgtgcccaaggtggcctgcaccaactggaagcgcgtgctgctggcgctgagcggccaagcccgcggcgacccgcgcgccatctccgcgcaagaggcgcacgcgcctggccgcctgccctcactggccgacttcagccccgccgagatcaaccggcgcctgcgcgcctacttggccttcctgttcgtgcgggagcccttcgagcgcctggcatcggcttaccgcaacaagctcgcgcgcccctacagcgccgccttccagaggcgctacggtgcacgcatcgttcagcgcctgcggccgcgcgcgctccccgacgcccgggcccgcggccacgacgtgcgcttcgcggagttcctggcctacctgctggacccgcgcacgcggcgtgaggagcccttcaacgagcactgggagcgcgcgcacgcgctctgccacccgtgtcgcctccgctacgacgtcgtgggcaagttcgagacgctggcggaggacgcggccttcgtgctgggcctggcgggcgcatccgacctgagcttccctgggccgccgcggccccggggagccgccgcctcccgcgacctggcagcgcgcctcttccgggacatcagccccttctaccagcggcgcctcttcgacctctacaagatggacttcctgcttttcaactactccgccccctcctacctgcggctgctctagcggtcctggaggtcctgtggccacgcggggcaagtgcctttccgacaagacccccggggaatgcaggtgctgccggccccaggacccctcttcaagagccactgcgtgcactcacctggccgccgggccagcgggcgcagggcacacctggccaggcttgggggcagcccatctcaggtggccctgcacgcgtgtgcctgcctcggcctgtcgcctgaggcctgcttcctccacttgctccagctgacaggcacctctccaggccccgtagatgggcaaggacttgataaccagggttttaggcttttaaaggccattttgggggtcagccctgcccctgaacctgttcatggtgcatcagaacataatgctgacaccggtgtcagtgtggcccgagcctgtgtcctccccacctcgcccaccctggcaaggacagctgcggccaaggacgaaagccctcccttggctggcctcacgatggggccgtcccgggagccaggtgggagctgccttccactgccatcgggtctcctctcctctcccacgcggctggccctacccaggcgccaccttcggtctcagtctggcaagacgctgggtcttcaggctccatgccaacagagcccctggtgcaatgcggtcacaggttttatgggactttggtgagctgggcggtcatggttttgaaataaatgtattttgttactttctga

SEQ ID NO: 244974 - DNA, 678 bp, Artificial Sequence
  derived and/or modified sequence
atggggaggcgctgctgccggcggcgcgtgctggcggccgcctgtctgggcgccgcgctcctgctcctatgcgccgcgccccgctccctgcgcccggcatttggaaacagagccctgggctccagctggcttggtggggagaagagaagccccctgcagaagctctatgacctggatcaggacccgcgctcgaccctggcgaaggtgcaccggcagcggcgcgacctgctgaacagcgcctgtagccgccactcacgccggcagcgcctgctacagccggaggacctgcggcacgtgctggtggacgacgcgcatggcctgctctactgctacgtgcccaaggtggcctgcaccaactggaagcgcgtgctgctggcgctgagcggccaagcccgcggcgacccgcgcgccatctccgcgcaagaggcgcacgcgcctggccgcctgccctcactggccgacttcagccccgccgagatcaaccggcgcctgcgcgcctacttggccttcctgttcgtgcgggagcccttcgagcgcctggcatcggcttaccgcaacaagctcgcgcgcacgcgctctgccacccgtgtcgcctccgctacgacgtcgtgggcaagttcgagacgctggcggaggacgcggccttcgtgctgggcctggcgggcgcatccgacctga

SEQ ID NO: 244975 - protein, 280 aa, Artificial Sequence
  derived and/or modified sequence
MRGVSCLQVLLLLVLGAAGTQGRKSAACGQPRMSSRIVGGRDGRDGEWPWQASIQHRGAHVCGGSLIAPQWVLTAAHCFPRRALPAEYRVRLGALRLGSTSPRTLSVPVRRVLLPPDYSEDGARGDLALLQLRRPVPLSARVQPVCLPVPGARPPPGTPCRVTGWGSLRPGVPLPEWRPLQGVRVPLLDSRTCDGLYHVGADVPQAERIVLPGSLCAGYPQGHKDACQGDSGGPLTCLQSGSWVLVGVVSWGKGCALPNRPGVYTSVATYSPWIQARVSF

SEQ ID NO: 244976 - DNA, 843 bp, Artificial Sequence
  derived and/or modified sequence
atgcgaggggtgtcgtgcttgcaggtcctcttactgctggttcttggggcggcaggtacgcaggggcggaagagcgccgcatgcggacagccacgcatgtcctctcggatcgtaggcggtagggatggacgtgacggtgagtggccttggcaggctagtatacaacatagaggtgcccatgtgtgtggaggaagcctgattgcccctcagtgggtgctcacggcagctcattgcttcccacgcagagccctgcccgccgagtatagggtaaggttgggggccctgcggcttggtagcacttcacctaggactctctccgtgcctgttcgcagggttctgctcccacctgattactctgaagacggtgctagaggagatttggcactgctgcaactgcgaaggccagttcccctgtccgctcgagtccagcccgtctgtctgcctgtgccgggtgccaggccaccacctggtaccccgtgtcgcgttacaggctggggctcgctgcgccccggtgtgcccttacctgaatggcgcccactccagggcgtgcgcgtacccctcctggattcacggacctgcgatggcctataccatgttggcgccgacgttccgcaagctgagcggatcgttcttcctggctccctctgcgctggttacccacagggacataaagatgcttgccagggcgattcaggtggacctctgacctgtctgcaatcggggagttgggttctagtcggagtggtgagctgggggaaggggtgcgccctccccaaccgcccaggagtatacacctccgtggccacctactcgccatggatccaggcccgcgtcagcttctag

SEQ ID NO: 244977 - DNA, 843 bp, Artificial Sequence
  derived and/or modified sequence
atgagaggagtgtcctgcctgcaggtgctgctgctgctggtgctgggcgccgccggcacccagggcaggaagtctgctgcctgtggccagcccaggatgagcagcagaattgtgggcggcagagatggaagagatggagagtggccctggcaggccagcatccagcacagaggagcccacgtgtgtggcggcagcctgattgccccccagtgggtgctgacagctgcccactgcttcccccggcgggccctgcctgctgagtacagagtgcggctgggcgccctgcggctgggcagcaccagccccaggaccctgtctgtgcctgtgcggcgggtgctgctgcccccagactacagtgaagatggagcccggggggacctggccctgctgcagctgcggcggcctgtgcccctgagcgcccgggtgcagcctgtgtgcctgcctgtgcctggggcccggcccccacctggcaccccctgccgggtgacaggctggggcagcctgcggcctggggtgcccctgcctgagtggaggcccctgcagggcgtgcgggtgcccctgctggacagcaggacctgtgatggcctgtaccacgtgggcgcagatgtgccccaggccgagagaattgtgctgcccggcagcctgtgtgccggctacccccagggccacaaggatgcctgccagggcgacagcggcggccccctgacctgcctgcagagcggctcctgggtgctggtgggcgtggtgtcctggggcaagggctgtgccctgcccaacagacctggggtgtacacctctgtggccacctacagcccctggatccaggcccgggtgtccttctag

SEQ ID NO: 244978 - DNA, 843 bp, Artificial Sequence
  derived and/or modified sequence
atgcggggcgtgagctgcctgcaggtgctgctgctgctggtgctgggcgctgccggaacccagggtcggaaatccgcggcatgtggccagccccgtatgtcttctcgtatagtgggcggtagggacgggcgggacggcgagtggccatggcaagcttcaatacagcatcgtggagcccatgtatgtgggggcagtctcattgctccacaatgggtgctgaccgctgcccactgtttcccacgcagagctcttcccgctgaatatagagtgcggctcggtgctctcaggttgggaagcacaagcccacgcacactctcagtgcccgtgagaagagttctccttcctccggattactcggaggacggagctaggggagatttagcccttctccagctgcggagaccagtccctctgtccgcccgcgttcagcccgtatgcctccccgtgccaggagcacgacccccacccgggacgccatgccgggtcaccggatggggcagcttgagacctggcgtcccccttcctgagtggcgccctctgcaaggggtgagagtgcccctgctggacagtcgtacttgcgacggattgtatcatgtaggcgcagacgttcctcaagctgaacgcattgttctcccaggtagtctgtgcgcgggctacccccaaggacacaaggacgcatgccaaggcgactcaggtggccctttgacatgtttgcagtccggtagttgggtcctcgtcggagtcgtgtcctggggcaaaggttgcgcacttccaaacagacccggagtttatacttcggtggccacctacagcccatggatccaagctagggtcagcttttag

SEQ ID NO: 244979 - DNA, 843 bp, Artificial Sequence
  derived and/or modified sequence
atgaggggagtttcctgtcttcaagtgttgttacttctggtgttgggcgctgccggaactcagggccgaaagagcgctgcgtgtgggcaacccagaatgtctagcaggatcgtgggtggacgcgacgggagggacggtgagtggccctggcaggcctctatccagcatcgcggtgcacatgtgtgcggtgggtctctcatcgctccgcagtgggtgttgaccgccgctcattgttttccaaggcgcgcactaccagccgaataccgggtcagactcggagcgttgagactcggttcgacatcccctaggacactgtcggtgccagtacgcagagtactgctcccaccagattactcagaagatggcgcaagaggagatctggctttgctgcaactgaggagaccggtacctttgtcagccagggtccagcccgtgtgcctgccagtcccgggagctcggcctcccccaggaacaccctgtcgcgtcactggttgggggagtttgagacctggtgtacctttaccagagtggagacccctccaaggagtgcgtgtaccacttcttgattctcgtacctgcgatgggctgtaccacgttggtgccgatgtcccgcaagccgagaggatagtactgcccggatcactctgcgcaggatacccccagggccataaggacgcctgtcaaggagactcagggggtccactcacatgtttgcagtccggcagttgggtcctggtcggagtcgtaagctgggggaaggggtgtgcgttgccaaacagacccggagtctacacttcagtggctacctacagcccatggatacaggccagggtgtctttctag

SEQ ID NO: 244980 - DNA, 1694 bp, Artificial Sequence
  derived and/or modified sequence
ggagctgaggacagacagaaggaccacggagggggtgacgggctggtgtgaggattggtgcccctgggccaggactctcctctcttctccctgctggctccagaccagagtccaagccctaggcagtgccacccttacccagcccagccttgaagacagaatgagaggggtttcctgtctccaggtcctgctccttctggtgctgggagctgctgggactcagggaaggaagtctgcagcctgcgggcagccccgcatgtccagtcggatcgttgggggccgggatggccgggacggagagtggccgtggcaggcgagcatccagcatcgtggggcacacgtgtgcggggggtcgctcatcgccccccagtgggtgctgacagcggcgcactgcttccccaggagggcactgccagctgagtaccgcgtgcgcctgggggcgctgcgtctgggctccacctcgccccgcacgctctcggtgcccgtgcgacgggtgctgctgcccccggactactccgaggacggggcccgcggcgacctggcactgctgcagctgcgtcgcccggtgcccctgagcgctcgcgtccaacccgtctgcctgcccgtgcccggcgcccgcccgccgcccggcacaccatgccgggtcaccggctggggcagcctccgcccaggagtgcccctcccagagtggcgaccgctacaaggagtaagggtgccgctgctggactcgcgcacctgcgacggcctctaccacgtgggcgcggacgtgccccaggctgagcgcattgtgctgcctgggagtctgtgtgccggctacccccagggccacaaggacgcctgccagggtgattctgggggacctctgacctgcctgcagtctgggagctgggtcctggtgggcgtggtgagctggggcaagggttgtgccctgcccaaccgtccaggggtctacaccagtgtggccacatatagcccctggattcaggctcgcgtcagcttctaatgctagccggtgaggctgacctggagccagctgctggggtccctcagcctcctggttcatccaggcacctgcctataccccacatcccttctgcctcgaggccaagatgcctaaaaaagctaaaggccaccccaccccccacccaccacctcctgcctcctctcctctttggggatcaccagctctgactccaccaaccctcatccaggaatctgccatgagtcccagggagtcacactccccactcccttcctggcttgtatttacttttcttggccctggccagggctgggcgcaaggcacgcagtgatgggcaaaccaattgctgcccatctggcctgtgtgcccatctttttctggagaaagtcagattcacagcatgacagagatttgacaccagggagatcctccatagctggctttgaggacacggggaccacagccatgagcggcctctaagagctgagagacagccggcagggaatcggaaccctcagacccacagccgcaaggcactggattctggcagcaccctgaaggagctgggaagtaagttcttccccagcctccagataagagccccgccggccaatcccttcatttcaacctaaagagaccctaagcagagaacctagctgagccactcctgacctacaaagttgtgacttaataaatgtgtgctttaagctgc

SEQ ID NO: 244981 - DNA, 843 bp, Artificial Sequence
  derived and/or modified sequence
atgagaggcgtgagctgcctgcaggtgctgctgctgctggtgctgggcgccgccggcacccagggcagaaagagcgccgcctgcggccagcccagaatgagcagcagaatcgtgggcggcagagacggcagagacggcgagtggccctggcaggccagcatccagcacagaggcgcccacgtgtgcggcggcagcctgatcgccccccagtgggtgctgaccgccgcccactgcttccccagaagagccctgcccgccgagtacagagtgagactgggcgccctgagactgggcagcaccagccccagaaccctgagcgtgcccgtgagaagagtgctgctgccccccgactacagcgaggacggcgccagaggcgacctggccctgctgcagctgagaagacccgtgcccctgagcgccagagtgcagcccgtgtgcctgcccgtgcccggcgccagacccccccccggcaccccctgcagagtgaccggctggggcagcctgagacccggcgtgcccctgcccgagtggagacccctgcagggcgtgagagtgcccctgctggacagcagaacctgcgacggcctgtaccacgtgggcgccgacgtgccccaggccgagagaatcgtgctgcccggcagcctgtgcgccggctacccccagggccacaaggacgcctgccagggcgacagcggcggccccctgacctgcctgcagagcggcagctgggtgctggtgggcgtggtgagctggggcaagggctgcgccctgcccaacagacccggcgtgtacaccagcgtggccacctacagcccctggatccaggccagagtgagcttctag

SEQ ID NO: 244982 - protein, 802 aa, Artificial Sequence
  derived and/or modified sequence
MWIQVRTIDGSKTCTIEDVSRKATIEELRERVWALFDVRPECQRLFYRGKQLENGYTLFDYDVGLNDIIQLLVRPDPDHLPGTSTQIEAKPCSNSPPKVKKAPRVGPSNQPSTSARARLIDPGFGIYKVNELVDARDVGLGAWFEAHIHSVTRASDGQSRGKTPLKNGSSCKRTNGNIKHKSKENTNKLDSVPSTSNSDCVAADEDVIYHIQYDEYPESGTLEMNVKDLRPRARTILKWNELNVGDVVMVNYNVESPGQRGFWFDAEITTLKTISRTKKELRVKIFLGGSEGTLNDCKIISVDEIFKIERPGAHPLSFADGKFLRRNDPECDLCGGDPEKKCHSCSCRVCGGKHEPNMQLLCDECNVAYHIYCLNPPLDKVPEEEYWYCPSCKTDSSEVVKAGERLKMSKKKAKMPSASTESRRDWGRGMACVGRTRECTIVPSNHYGPIPGIPVGSTWRFRVQVSEAGVHRPHVGGIHGRSNDGAYSLVLAGGFADEVDRGDEFTYTGSGGKNLAGNKRIGAPSADQTLTNMNRALALNCDAPLDDKIGAESRNWRAGKPVRVIRSFKGRKISKYAPEEGNRYDGIYKVVKYWPEISSSHGFLVWRYLLRRDDVEPAPWTSEGIERSRRLCLRLQYPAGYPSDKEGKKPKGQSKKQPSGTTKRPISDDDCPSASKVYKASDSAEAIEAFQLTPQQQHLIREDCQNQKLWDEVLSHLVEGPNFLKKLEQSFMCVCCQELVYQPVTTECFHNVCKDCLQRSFKAQVFSCPACRHDLGQNYIMIPNEILQTLLDLFFPGYSKGR

SEQ ID NO: 244983 - protein, 112 aa, Artificial Sequence
  derived and/or modified sequence
MNVKDLRPRARTILKWNELNVGDVVMVNYNVESPGQRGFWFDAEITTLKTISRTKKELRVKIFLGGSEGTLNDCKIISVDEIFKIERPGAHPLSFADGKFLRRNDPECDLCG

SEQ ID NO: 244984 - DNA, 3720 bp, Artificial Sequence
  derived and/or modified sequence
gcgagatccggcttggcgccgtgacctccatgtgggagctccagctctataagtaaacactctgcgcggcgcagacatggcctcttcctatctttgaggcggtgtctgcggcagcgcctcagagtggttccggtcgtctctcctcaagtcggctagtcgggcgcgcgcgctgagagtcgtcgccgcctgtcgggcccggcgtccggtcggtccggtgggcgcgctcgcccgcctgccgctgagggcccgagccgcagggaaagcggcgcgggccgggcggggcgcggcgcccagagctcagggggagacaaaggggaccggttcctctctaggcgccaagatgtggatacaggttcgcaccattgatggctccaagacgtgcaccattgaggacgtgtctcgcaaagccacgattgaggagctgcgcgagcgggtgtgggcgctgttcgacgtgcggcccgaatgccagcgcctcttctaccggggcaagcagttggaaaatggatataccttatttgattatgatgttggactgaatgatataattcagctgctagttcgcccagaccctgatcatcttcctggcacatctacacagattgaggctaaaccctgttctaatagtccacctaaagtaaagaaagctccgagggtaggaccttccaatcagccatctacatcagctcgtgcccgtcttattgatcctggctttggaatatataaggtaaatgaattggtggatgccagagatgtcggccttggtgcttggtttgaagcacacatacatagtgttactagagcttctgatggacagtcacgtggcaaaactccactgaagaatggcagttcttgtaaaaggactaatggaaatataaagcataaatccaaagagaacacaaataaattggacagtgtaccctctacgtctaattcagactgtgttgctgctgatgaagacgttatttaccatatccagtatgatgaatacccagaaagcggtactctagaaatgaatgtcaaggatcttagaccacgagctagaaccattttgaaatggaatgaactaaatgttggtgatgtggtaatggttaattataatgtagaaagtcctggacaaagaggattctggtttgatgcagaaattaccacattgaagacaatctcaaggaccaaaaaagaacttcgtgtgaaaattttcctggggggttctgaaggaacattaaatgactgcaagataatatctgtagatgaaatcttcaagattgagagacctggagcccatcccctttcatttgcagatggaaagtttttaaggcgaaatgaccctgaatgtgacctgtgtggtggagacccagaaaagaaatgtcattcttgctcctgtcgtgtatgtggtgggaaacatgaacccaacatgcagcttctgtgtgatgaatgtaatgtggcttatcatatttactgtctgaatccacctttggataaagtcccagaagaggaatactggtattgtccttcttgtaaaactgattccagtgaagttgtaaaggctggtgaaagactcaagatgagtaaaaagaaagcaaagatgccgtcagctagtactgaaagccgaagagactggggcaggggaatggcttgtgttggtcgtacgagagaatgtactattgtcccttctaatcattatggacccattcctggtattcctgttggatcaacttggagatttagagttcaggtgagcgaagcaggtgttcacagaccccatgttggtggaattcatggtcgaagtaatgatggggcttattctcttgtactggctggtggatttgcggatgaagtcttgacagagttatgaatatgaatattgtggagtctgtccagataccgggtggaagactggttttgatcagtttaagaagtattctaaactgttctagatgaccgaggtgatgagttcacatacactggaagcggtggtaaaaatcttgctggtaacaaaagaattggtgcaccttcagctgatcaaacattaacaaacatgaacagggcattggccctaaactgtgatgctccattggatgataaaattggagcagagtctcggaattggagagctggtaagccagtcagagtgatacgcagttttaaagggaggaagatcagcaaatatgctcctgaagaaggcaacagatatgatggcatttataaggtggtgaaatactggccagagatttcatcaagccatggattcttggtttggcgctatcttttaagaagagatgatgttgaacctgctccttggacctctgaaggaatagaacggtcaaggagattatgtctacgtttacagtatccagcaggttacccttcagataaagaagggaagaagcctaaaggacagtcaaagaagcagcccagtggaaccacaaaaaggccaatttcagatgatgactgtccaagtgcctccaaagtgtacaaagcatcagattcagcagaagcaattgaggcttttcaactaactcctcaacagcaacatctcatcagagaagattgtcaaaaccagaagctgtgggatgaagtgctttcacatcttgtggaaggaccaaattttctgaaaaaattggaacaatcttttatgtgcgtttgctgtcaggagctagtttaccagcctgtgacaactgagtgcttccacaatgtctgtaaagattgcctacagcgctcctttaaggcacaggttttctcctgccctgcttgccggcatgatcttggccagaattacatcatgattcccaatgagattctgcagactctacttgaccttttcttccctggctacagcaaaggacgatgatctgcctgctttcactgtgttgttcatggtggctttttggacaataaagaatctaaaatgggtggggagggtggaagaaatggtggactgtatctctcacgttctgaagcagctaatcctctttcccacatagccatcatcttgtgtgtgtagtaagaggcccatttctcaactgtcttttaaatatctaaaggtagttcctgtaacaactagttttaatgagtaaaaagtcaaagcctcagctctagttgatatccaagttatgatttattttgcaactacctcaggacagaaaagatttatggggattttaaaaatcattgaataactagttaaatgaaattttagctacacactgcctcccaaatattagttgtgcctggttcttgtaatttgattttacagaaaaggaaatgacacttgagatccttggaatgaacacagcttctaaagtgtgcatatacttttttaacgtctcttcttccattacaatgtgtgttttgcaaggacaggttcattttttttagcccactttgtgaactccattgtgcttttttctggtgttttatgcaagttgactactaatgactaatgagaacaataatgaatgcattgttgctgcattagtgtaatgtggtgtggttttgcacttaaaagaggtattcatatgctctagttgtaaatgttcatgaaaatccacttctctactagtcgaactgcttttagtgtctcaccagtggttttacatctgcagagttttgagggctgtgctgacctttgagaggatttgaaattgcttcatattgtgatcctaaattttatattcactatattccctaaagtataccttaataaatattttatgatcagaa

SEQ ID NO: 244985 - DNA, 2409 bp, Artificial Sequence
  derived and/or modified sequence
atgtggatacaggtgcgcacgatagacgggtcaaaaacctgcactatcgaagatgtgtcccgcaaagccaccatcgaggagctcagggaaagagtgtgggctctcttcgacgttaggcctgaatgtcagaggcttttttaccggggcaaacagctggaaaatgggtataccctctttgattacgacgtgggattgaacgatatcatccagctcctggtgcgaccagaccctgaccaccttccagggaccagtacacagattgaagcaaaaccctgtagcaatagtccccccaaggtgaagaaagcgccgagagtggggcccagtaatcagccgtcaacaagcgcccgggcacgccttatcgatcccgggttcggcatctataaagttaatgagctcgttgatgcccgtgacgtcggccttggcgcgtggttcgaagctcatattcactcagtgaccagagcctccgatggacaaagtcgaggcaagactccactgaagaacgggagttcttgcaaaaggacaaacgggaacatcaagcataagagtaaagagaataccaataaattggacagtgtgccaagcacatcaaattccgactgcgttgccgctgatgaggatgtcatctaccacatccagtacgacgagtacccagaatctgggacgctcgaaatgaatgtcaaggacctgcgacctagggcacggaccatccttaagtggaatgaacttaatgtcggcgacgtggtgatggtcaactacaacgtcgaaagtccaggacagaggggcttctggtttgatgctgagatcaccacacttaaaaccatctcgcggactaagaaggagctacgcgttaagatcttcctcgggggtagcgaagggacgttaaacgattgtaaaatcatcagtgtggatgagattttcaagatcgagagacctggggctcatccactgtcgttcgccgatggtaaattcctacgcagaaatgatccagagtgcgacctctgcggaggcgaccccgaaaagaaatgccattcctgttcatgccgagtgtgtggtggcaagcacgagccaaatatgcagcttctatgcgacgagtgtaatgtggcttaccatatctactgcctgaatccgcctctggataaggttcccgaggaagaatattggtactgcccgtcatgcaagaccgattccagcgaggtcgtcaaagccggagaaaggcttaagatgtcaaagaaaaaggctaaaatgccaagcgcttccacagagagcagaagagattggggtaggggcatggcctgcgttggccggacacgtgagtgcacaattgtaccttctaaccactacggtcccataccaggaatccctgtcggtagcacttggcggtttcgtgtacaggtcagcgaggctggcgtacacagacctcatgtgggcggtattcacgggcgatctaacgacggagcctatagcctagtgttggctggaggattcgccgacgaggtggaccggggagacgagttcacttacacagggagtggcggtaagaacttagctggcaacaaaagaattggagctccaagcgccgaccagaccctgactaatatgaatagagccttggctctgaactgtgacgcccccctggacgataagattggcgccgagagcagaaactggagagccggaaagcctgtgagggtgattcgctcttttaagggcaggaagattagtaagtacgccccggaagaaggaaatcgttacgacggaatttacaaggtcgtaaagtactggcctgaaatttctagttcccacgggtttctcgtgtggagatacctcttaagacgagatgatgttgaaccggccccttggacatctgaaggaattgagagatccagaaggctctgccttagactgcagtaccctgctgggtatccctctgacaaggaggggaaaaagcccaaaggccagtcaaaaaagcagccgtcggggaccacaaagaggccaatatctgacgatgactgcccctccgcgtccaaagtgtacaaagccagtgactccgctgaagccatcgaggctttccagctgactccccagcagcaacatcttatccgcgaggattgtcaaaatcagaaactatgggatgaggtgctgtcacatctggtggagggacccaacttcctcaagaagctagagcaatccttcatgtgtgtgtgctgtcaagaactagtgtatcagccggtgaccaccgaatgtttccataatgtgtgtaaagactgtctgcagcgctcttttaaggctcaggtcttttcttgccctgcctgtcgtcacgaccttggccagaattatatcatgattccaaacgagattcttcagactctcttggacctgttctttcctggttactccaaggggcggtag

SEQ ID NO: 244986 - DNA, 2409 bp, Artificial Sequence
  derived and/or modified sequence
atgtggatccaggtgaggaccattgatggcagcaagacctgcaccattgaagatgtgtccaggaaggccaccatcgaggagctgcgggagcgggtgtgggccctgtttgatgtgcggcctgagtgccagaggctcttctaccggggcaagcagctggagaatggctacaccctgtttgattatgatgtgggcctgaatgacatcatccagctgctggtgcggccagaccctgaccacctgcccggcaccagcacccagatcgaggccaagccctgcagcaacagcccccccaaggtgaagaaggccccccgggtgggccccagcaaccagcccagcaccagcgcccgggcccggctgattgaccccggcttcggcatctacaaggtgaatgagctggtggatgccagagatgtgggcctgggcgcctggtttgaggcccacatccacagcgtgacccgggccagtgatggccagagccggggcaagacccccctgaagaatggcagcagctgcaagaggaccaatggaaacatcaagcacaagagcaaggagaacaccaacaagctggacagcgtgcccagcaccagcaacagcgactgtgtggccgcagatgaagatgtgatctaccacatccagtatgatgagtacccagagagcggcaccctggagatgaatgtgaaggacctgcggccccgggcccggaccatcctgaagtggaatgagctgaatgtgggagatgtggtgatggtgaactacaacgtggagagccctggccagaggggcttctggtttgatgctgagatcaccaccctgaagaccatcagcaggaccaagaaggagctgcgggtgaagatcttcctgggcggcagcgagggcaccctgaatgactgcaagatcatctctgtggatgagatcttcaagattgaaagacctggggcccaccccctgagctttgctgatggcaagttcctgcggagaaatgaccctgaatgtgacctgtgtggcggggaccctgagaagaagtgccacagctgcagctgccgggtgtgtggcggcaagcatgagcccaacatgcagctgctgtgtgatgagtgcaatgtggcctaccacatctactgcctgaacccccccctggacaaggtgcctgaggaggagtactggtactgccccagctgcaagacagacagcagcgaggtggtgaaggccggggagcggctgaagatgagcaagaagaaggccaagatgcccagcgccagcacagagagcagaagagactggggccggggcatggcctgtgtgggccgcacccgggagtgcaccatcgtgcccagcaaccactacggccccatccctggcatccctgtgggcagcacctggaggttccgggtgcaggtgtctgaggccggcgtgcaccggccccacgtgggcggcatccacggccgcagcaatgatggagcctacagcctggtgctggccggcggctttgctgatgaggtggacagaggagatgagttcacctacacaggcagcggcggcaagaacctggccggcaacaagagaattggagcccccagcgctgaccagaccctgaccaacatgaacagagccctggccctgaactgtgatgcccccctggatgacaagattggagctgagagcaggaactggagggctgggaagcctgtgcgggtcatccgctccttcaagggcaggaagatcagcaaatatgcccctgaggagggcaacagatatgatggcatctacaaggtggtgaagtactggccagagatcagcagcagccacggcttcctggtgtggagatacctgctgcggagagatgatgtggagcccgccccctggaccagcgagggcatcgagaggagccggcggctgtgcctgcggctgcagtacccagctggctaccccagcgacaaggagggcaagaagcccaagggccagagcaagaagcagcccagcggcaccaccaagaggcccatcagtgatgatgactgccccagcgccagcaaggtgtacaaggccagtgacagcgctgaggccatcgaggccttccagctgaccccccagcagcagcacctgatccgggaggactgccagaaccagaagctgtgggatgaggtgctgagccacctggtggagggccccaacttcctgaagaagctggagcagagcttcatgtgtgtgtgctgccaggagctggtgtaccagcctgtgaccacagagtgcttccacaacgtgtgcaaggactgcctgcagaggagcttcaaggcccaggtgttcagctgcccagcctgcagacatgacctgggccagaactacatcatgatccccaatgagatcctgcagaccctgctggacctcttcttccctggctacagcaagggccgctag

SEQ ID NO: 244987 - DNA, 2409 bp, Artificial Sequence
  derived and/or modified sequence
atgtggatccaggtgcggaccatcgacggcagcaagacctgcaccatcgaggatgtaagccgcaaagccacgatagaagagctgagggaaagagtttgggcgctattcgatgtgcggcccgaatgccagcgcctgttttaccgaggaaaacagcttgagaacggctatacacttttcgactacgatgtgggtcttaacgacatcatccaattgttggtgcggcctgaccctgatcacttgcccgggaccagcacccagatcgaagcaaaaccctgctccaactcacctcctaaggtgaagaaagcacccagggtgggaccctcaaatcaacccagtaccagcgctcgagcgcggctcatcgacccggggtttgggatatataaggttaatgagctggtggacgcccgggatgtcggcctgggagcatggttcgaggcacacatccacagcgtcacgcgggcatccgatgggcagtcacgaggcaagaccccgctgaagaatgggtcgtcgtgcaaaaggactaacgggaacataaagcacaaaagcaaggaaaatactaataaattggactccgtgccgagtacgtcaaactccgattgtgtggccgctgatgaagatgtgatctaccatattcagtatgacgagtatccggagtcaggaaccctggagatgaatgtgaaagacctccgtcctagagcccggactatcctgaagtggaatgaactgaacgttggagacgtggttatggtcaactacaatgtagagagcccaggacagcggggcttttggttcgatgcagaaattacgactttgaagaccattagccggacaaagaaagagttgagagttaagatctttctcggcgggagcgaggggactctgaacgactgtaagattatttctgttgatgagattttcaagatcgaacgaccaggggcccatcccctgagcttcgctgatgggaagttcctgagaaggaatgaccccgaatgtgacctgtgcgggggggacccggagaaaaaatgccattcctgcagctgcagagtgtgcggcggcaaacatgagcccaatatgcaactgctttgtgatgagtgtaatgttgcttatcatatctactgcctgaaccctcccttggacaaggtgccagaggaggagtattggtattgtccctcctgtaagaccgattcctccgaggtcgtgaaggctggggaaaggctgaagatgtctaagaaaaaggccaaaatgcccagtgcctcaaccgagtccagaagagattggggaagaggtatggcatgcgtggggaggacgagagagtgtaccattgtgccaagcaatcattatggtcccattcccgggatcccagtgggatccacatggaggttccgggtgcaggtctccgaagccggtgttcaccgaccccatgttgggggcatccacggcaggtctaacgacggtgcctacagtttggtcctagctggtggcttcgccgatgaggtggataggggcgacgagttcacgtacacgggaagtggcggcaaaaaccttgcaggaaacaagaggattggcgcgccttccgccgaccaaacactgaccaatatgaaccgagcactagctcttaactgtgacgcccccctggatgataaaataggagctgagtcccgaaactggagggcaggcaagcctgtgagggtcatcagatccttcaaaggaagaaagatcagcaaatacgcccctgaggagggtaatcgctacgacggaatatacaaggtcgtgaagtactggcctgagattagcagctcacacggctttctggtgtggaggtacctgctgagacgggacgatgttgagccagctccctggacatcagagggaatcgaacgctctcgaaggctgtgcctcagactgcagtaccctgctggatatccatcagataaggaagggaaaaaaccgaaaggacagtcgaaaaaacagccctccggtacaacaaaaaggcccattagcgacgatgattgcccttccgcgtcaaaagtgtacaaagcaagcgacagcgcagaggcgatcgaggcattccagctcaccccgcaacaacagcatctcatccgcgaggattgccagaaccagaaactttgggatgaggtactaagccacctcgtggagggacctaacttcctcaagaagctagaacagtctttcatgtgtgtttgttgccaggagctggtgtatcagccagtgacgacggagtgctttcacaatgtgtgcaaagactgtctacagaggtcattcaaagcccaagttttctcctgccctgcgtgccgccacgatttaggccagaattacataatgatcccaaatgagatactgcaaactttactggatctcttctttcccggatattcgaaaggacgctag

SEQ ID NO: 244988 - DNA, 2409 bp, Artificial Sequence
  derived and/or modified sequence
atgtggatccaggtgcggaccattgatggaagcaaaacatgcacaatcgaggacgtatccagaaaagccaccatcgaggaactacgcgaaagggtgtgggccctttttgacgtgcgacccgagtgtcaaaggctgttttatcgaggcaagcagctagaaaatggctacaccctatttgattatgatgtcggactcaacgacatcatacagttgttggtgcgacccgatccagaccatctcccaggaactagtacacaaatagaagccaaaccctgctcgaatagtccccctaaggtgaaaaaggctccccgagtcgggccatcaaatcagccaagcacttccgccagggctagactcattgatcccggatttggaatatataaagtgaatgaactggtggacgcaagggacgtcgggctaggggcatggtttgaggcacacatccatagtgtgaccagagcatccgacggccaaagtcgcggaaaaaccccccttaagaacgggagctcttgcaagaggactaacgggaacatcaagcataagagtaaggagaacacgaacaagctggacagcgtaccctccacctccaatagcgactgcgtcgccgctgatgaagatgttatttatcatatccaatacgatgagtacccggaatctggcaccctggaaatgaacgttaaagatcttcggccacgagcacgaacaattctcaagtggaacgagctgaatgtgggagacgttgtcatggtgaattataacgtggaatcaccagggcagcggggattctggttcgatgctgagatcacaactctgaaaaccataagcagaacaaaaaaggagctacgcgtgaagatctttctcggcggatctgaaggcactctgaacgactgtaaaatcatctccgtggacgagatctttaagatcgagcgccctggggctcatcccctgtccttcgccgatggaaagtttctgcgcaggaatgatcctgagtgcgacctctgtggtggcgatccggaaaagaagtgtcactcttgctcatgccgtgtatgcggcggaaagcatgagcccaacatgcagctgctttgtgatgagtgcaacgttgcttatcacatctattgtcttaatccccctctcgataaagtgccagaagaggagtattggtactgtccgtcttgtaagactgattcatccgaagtggttaaggccggtgagaggcttaaaatgtccaaaaagaaagcaaaaatgccatccgcttctacagagtctaggcgtgattgggggcgtggcatggcatgcgtcggcagaacccgcgaatgcaccatcgtgcccagtaatcattacggtccaattcccggtattcctgtagggtcaacctggcgctttcgcgtgcaggtgtcagaggccggtgtccaccgccctcacgttggaggtatccatggcagatccaacgatggcgcttacagcctcgtacttgccggaggcttcgccgatgaggtggaccgcggagacgagtttacttacacaggctccggcggaaaaaacctggccggaaataaacgtattggcgctccttccgcagatcaaacccttacaaacatgaatcgggctctggccctcaactgcgacgcaccactggatgacaagattggggcagaaagtaggaactggcgcgctggcaaacctgtcagggtcatccgttccttcaaaggcagaaaaatatccaaatacgcgccagaagaaggaaaccggtatgacggaatctacaaagtggtgaaatattggcctgaaatctcgtcttcacacggcttccttgtgtggcgctatcttctacgtcgggatgatgtcgagccggcaccatggacaagcgagggcatcgaaagaagtcgcagattgtgcctcagactgcagtatccagctggctacccttccgataaggagggcaaaaaacctaagggtcaatccaagaagcagcctagcgggacgaccaagagaccgatatctgatgacgactgtccttccgcctctaaggtgtacaaagcttctgactcagccgaggccattgaggcttttcagttaacgcctcagcagcagcatctgatcagagaggactgccagaatcagaagttgtgggatgaggtgctgagtcacctggtagaaggccctaactttctgaagaagctagagcagagcttcatgtgcgtctgttgccaggagttggtttatcagcctgttactaccgaatgcttccataatgtgtgcaaagactgcctccagaggtcattcaaggctcaggtgttctcctgtccggcatgtagacacgatcttgggcagaactatattatgataccaaacgaaatactgcagacccttctcgacttgttcttccccggttatagcaaaggccgttag

SEQ ID NO: 244989 - DNA, 3452 bp, Artificial Sequence
  derived and/or modified sequence
agagtcgtcgccgcctgtcgggcccggcgtccggtcggtccggtgggcgcgctcgcccgcctgccgctgagggcccgagccgcagggaaagcggcgcgggccgggcggggcgcggcgcccagagctcagggggagacaaaggggaccggttcctctctaggcgccaagatgtggatacaggttcgcaccattgatggctccaagacgtgcaccattgaggacgtgtctcgcaaagccacgattgaggagctgcgcgagcgggtgtgggcgctgttcgacgtgcggcccgaatgccagcgcctcttctaccggggcaagcagttggaaaatggatataccttatttgattatgatgttggactgaatgatataattcagctgctagttcgcccagaccctgatcatcttcctggcacatctacacagattgaggctaaaccctgttctaatagtccacctaaagtaaagaaagctccgagggtaggaccttccaatcagccatctacatcagctcgtgcccgtcttattgatcctggctttggaatatataaggtaaatgaattggtggatgccagagatgtcggccttggtgcttggtttgaagcacacatacatagtgttactagagcttctgatggacagtcacgtggcaaaactccactgaagaatggcagttcttgtaaaaggactaatggaaatataaagcataaatccaaagagaacacaaataaattggacagtgtaccctctacgtctaattcagactgtgttgctgctgatgaagacgttatttaccatatccagtatgatgaatacccagaaagcggtactctagaaatgaatgtcaaggatcttagaccacgagctagaaccattttgaaatggaatgaactaaatgttggtgatgtggtaatggttaattataatgtagaaagtcctggacaaagaggattctggtttgatgcagaaattaccacattgaagacaatctcaaggaccaaaaaagaacttcgtgtgaaaattttcctggggggttctgaaggaacattaaatgactgcaagataatatctgtagatgaaatcttcaagattgagagacctggagcccatcccctttcatttgcagatggaaagtttttaaggcgaaatgaccctgaatgtgacctgtgtggtggagacccagaaaagaaatgtcattcttgctcctgtcgtgtatgtggtgggaaacatgaacccaacatgcagcttctgtgtgatgaatgtaatgtggcttatcatatttactgtctgaatccacctttggataaagtcccagaagaggaatactggtattgtccttcttgtaaaactgattccagtgaagttgtaaaggctggtgaaagactcaagatgagtaaaaagaaagcaaagatgccgtcagctagtactgaaagccgaagagactggggcaggggaatggcttgtgttggtcgtacgagagaatgtactattgtcccttctaatcattatggacccattcctggtattcctgttggatcaacttggagatttagagttcaggtgagcgaagcaggtgttcacagaccccatgttggtggaattcatggtcgaagtaatgatggggcttattctcttgtactggctggtggatttgcggatgaagtcgaccgaggtgatgagttcacatacactggaagcggtggtaaaaatcttgctggtaacaaaagaattggtgcaccttcagctgatcaaacattaacaaacatgaacagggcattggccctaaactgtgatgctccattggatgataaaattggagcagagtctcggaattggagagctggtaagccagtcagagtgatacgcagttttaaagggaggaagatcagcaaatatgctcctgaagaaggcaacagatatgatggcatttataaggtggtgaaatactggccagagatttcatcaagccatggattcttggtttggcgctatcttttaagaagagatgatgttgaacctgctccttggacctctgaaggaatagaacggtcaaggagattatgtctacgtttacagtatccagcaggttacccttcagataaagaagggaagaagcctaaaggacagtcaaagaagcagcccagtggaaccacaaaaaggccaatttcagatgatgactgtccaagtgcctccaaagtgtacaaagcatcagattcagcagaagcaattgaggcttttcaactaactcctcaacagcaacatctcatcagagaagattgtcaaaaccagaagctgtgggatgaagtgctttcacatcttgtggaaggaccaaattttctgaaaaaattggaacaatcttttatgtgcgtttgctgtcaggagctagtttaccagcctgtgacaactgagtgcttccacaatgtctgtaaagattgcctacagcgctcctttaaggcacaggttttctcctgccctgcttgccggcatgatcttggccagaattacatcatgattcccaatgagattctgcagactctacttgaccttttcttccctggctacagcaaaggacgatgatctgcctgctttcactgtgttgttcatggtggctttttggacaataaagaatctaaaatgggtggggagggtggaagaaatggtggactgtatctctcacgttctgaagcagctaatcctctttcccacatagccatcatcttgtgtgtgtagtaagaggcccatttctcaactgtcttttaaatatctaaaggtagttcctgtaacaactagttttaatgagtaaaaagtcaaagcctcagctctagttgatatccaagttatgatttattttgcaactacctcaggacagaaaagatttatggggattttaaaaatcattgaataactagttaaatgaaattttagctacacactgcctcccaaatattagttgtgcctggttcttgtaatttgattttacagaaaaggaaatgacacttgagatccttggaatgaacacagcttctaaagtgtgcatatacttttttaacgtctcttcttccattacaatgtgtgttttgcaaggacaggttcattttttttagcccactttgtgaactccattgtgcttttttctggtgttttatgcaagttgactactaatgactaatgagaacaataatgaatgcattgttgctgcattagtgtaatgtggtgtggttttgcacttaaaagaggtattcatatgctctagttgtaaatgttcatgaaaatccacttctctactagtcgaactgcttttagtgtctcaccagtggttttacatctgcagagttttgagggctgtgctgacctttgagaggatttgaaattgcttcatattgtgatcctaaattttatattcactatattccctaaagtataccttaataaatattttatgatcagaaaaa

SEQ ID NO: 244990 - DNA, 2409 bp, Artificial Sequence
  derived and/or modified sequence
atgtggatccaggtgagaaccatcgacggcagcaagacctgcaccatcgaggacgtgagcagaaaggccaccatcgaggagctgagagagagagtgtgggccctgttcgacgtgagacccgagtgccagagactgttctacagaggcaagcagctggagaacggctacaccctgttcgactacgacgtgggcctgaacgacatcatccagctgctggtgagacccgaccccgaccacctgcccggcaccagcacccagatcgaggccaagccctgcagcaacagcccccccaaggtgaagaaggcccccagagtgggccccagcaaccagcccagcaccagcgccagagccagactgatcgaccccggcttcggcatctacaaggtgaacgagctggtggacgccagagacgtgggcctgggcgcctggttcgaggcccacatccacagcgtgaccagagccagcgacggccagagcagaggcaagacccccctgaagaacggcagcagctgcaagagaaccaacggcaacatcaagcacaagagcaaggagaacaccaacaagctggacagcgtgcccagcaccagcaacagcgactgcgtggccgccgacgaggacgtgatctaccacatccagtacgacgagtaccccgagagcggcaccctggagatgaacgtgaaggacctgagacccagagccagaaccatcctgaagtggaacgagctgaacgtgggcgacgtggtgatggtgaactacaacgtggagagccccggccagagaggcttctggttcgacgccgagatcaccaccctgaagaccatcagcagaaccaagaaggagctgagagtgaagatcttcctgggcggcagcgagggcaccctgaacgactgcaagatcatcagcgtggacgagatcttcaagatcgagagacccggcgcccaccccctgagcttcgccgacggcaagttcctgagaagaaacgaccccgagtgcgacctgtgcggcggcgaccccgagaagaagtgccacagctgcagctgcagagtgtgcggcggcaagcacgagcccaacatgcagctgctgtgcgacgagtgcaacgtggcctaccacatctactgcctgaacccccccctggacaaggtgcccgaggaggagtactggtactgccccagctgcaagaccgacagcagcgaggtggtgaaggccggcgagagactgaagatgagcaagaagaaggccaagatgcccagcgccagcaccgagagcagaagagactggggcagaggcatggcctgcgtgggcagaaccagagagtgcaccatcgtgcccagcaaccactacggccccatccccggcatccccgtgggcagcacctggagattcagagtgcaggtgagcgaggccggcgtgcacagaccccacgtgggcggcatccacggcagaagcaacgacggcgcctacagcctggtgctggccggcggcttcgccgacgaggtggacagaggcgacgagttcacctacaccggcagcggcggcaagaacctggccggcaacaagagaatcggcgcccccagcgccgaccagaccctgaccaacatgaacagagccctggccctgaactgcgacgcccccctggacgacaagatcggcgccgagagcagaaactggagagccggcaagcccgtgagagtgatcagaagcttcaagggcagaaagatcagcaagtacgcccccgaggagggcaacagatacgacggcatctacaaggtggtgaagtactggcccgagatcagcagcagccacggcttcctggtgtggagatacctgctgagaagagacgacgtggagcccgccccctggaccagcgagggcatcgagagaagcagaagactgtgcctgagactgcagtaccccgccggctaccccagcgacaaggagggcaagaagcccaagggccagagcaagaagcagcccagcggcaccaccaagagacccatcagcgacgacgactgccccagcgccagcaaggtgtacaaggccagcgacagcgccgaggccatcgaggccttccagctgaccccccagcagcagcacctgatcagagaggactgccagaaccagaagctgtgggacgaggtgctgagccacctggtggagggccccaacttcctgaagaagctggagcagagcttcatgtgcgtgtgctgccaggagctggtgtaccagcccgtgaccaccgagtgcttccacaacgtgtgcaaggactgcctgcagagaagcttcaaggcccaggtgttcagctgccccgcctgcagacacgacctgggccagaactacatcatgatccccaacgagatcctgcagaccctgctggacctgttcttccccggctacagcaagggcagatag

SEQ ID NO: 244991 - protein, 166 aa, Artificial Sequence
  derived and/or modified sequence
MAAYPESCVDTTVLDFVADLSLASPRRPLLCDFAPGVSLGDPALALREGRPRRMARFEEGDPEEEECEVDQGDGEEEEEEERGRGVSLLGRPKRKRVITYAQRQAANIRERKRMFNLNEAFDQLRRKVPTFAYEKRLSRIETLRLAIVYISFMTELLESCEKKESG

SEQ ID NO: 244992 - DNA, 501 bp, Artificial Sequence
  derived and/or modified sequence
atggccgcctatcccgagagttgcgtcgatacaactgtgttggattttgtggccgacctgtccctggccagccctcgaaggcccttgctgtgtgattttgcgccaggagtgagtttgggggatccggctctggccctgagggaaggtagaccaaggaggatggcaagattcgaggaaggtgaccccgaggaggaggagtgtgaggtagaccagggcgacggtgaagaagaagaggaagaagaaagggggcggggcgtttcacttctggggcgacccaaaaggaaacgggtgatcacatacgctcagcgacaggccgccaatattcgggaacgtaaaagaatgtttaacttaaacgaggccttcgaccagttacggaggaaagtccccacattcgcttacgagaaacggttgtctcggattgaaacgctgagactggctatcgtctacatcagctttatgacagagttgttagaatcgtgtgagaaaaaggagagcggttag

SEQ ID NO: 244993 - DNA, 501 bp, Artificial Sequence
  derived and/or modified sequence
atggccgcctacccagagagctgtgtggacaccaccgtgctggactttgtggccgacctgagcctggccagcccccggcggcccctgctgtgtgactttgcccctggggtgtccctgggggaccctgccctggccctgcgggagggccggcccaggaggatggccaggtttgaggagggggaccctgaggaggaggagtgtgaggtggaccagggagatggagaggaggaggaggaggaggagcggggccggggcgtgtccctgctgggccggcccaagaggaagagggtcatcacctacgcccagaggcaggccgccaacatccgggagaggaagaggatgttcaacctgaatgaggcctttgaccagctgcggaggaaggtgcccacctttgcctatgagaagaggctgagccgcatcgagaccctgcggctggccatcgtgtacatctccttcatgacagagctgctggagagctgtgagaagaaggagagcggctag

SEQ ID NO: 244994 - DNA, 501 bp, Artificial Sequence
  derived and/or modified sequence
atggccgcctaccccgagagctgcgtggacaccaccgtgctggacttcgttgcagacctttccctggcttccccacgccggcccctactgtgcgactttgccccaggagtgtccctcggcgatccggcactggctctacgggaggggcggccgagacgcatggcccggttcgaagagggggaccctgaggaagaagagtgcgaagtcgatcagggcgatggcgaggaggaggaggaggaggaaagggggcgaggagtctctctgctgggcagacccaaacgaaagcgcgtgatcacgtacgcccagaggcaggctgctaatataagggaacggaagaggatgtttaacttaaacgaagccttcgaccagctgcgccgtaaagtgcctacattcgcctatgagaaaagactctcccgcattgaaactctcagattggccatcgtgtacatctctttcatgaccgaacttctggaatcatgcgaaaagaaagaatctggctag

SEQ ID NO: 244995 - DNA, 501 bp, Artificial Sequence
  derived and/or modified sequence
atggcagcttacccggagtcttgcgtggataccacagtattggattttgtcgccgatctgtccttggccagcccccgtaggccgttgctgtgcgatttcgcccctggggtgtctcttggcgatcccgcattggctctgagagaaggaaggcccaggaggatggctcgtttcgaggagggagatccggaggaggaggagtgtgaggtggaccagggagacggagaagaagaagaggaggaagagcgaggtagaggtgtgtcactccttggccgtcccaagagaaagagagtcatcacttacgctcagcgtcaggccgcaaacattcgggagagaaagaggatgttcaacctcaatgaggctttcgaccagttgagaaggaaagtgcctactttcgcctacgagaaacgcctctctagaatcgaaaccctgcgcctggccattgtgtacatctctttcatgaccgagctgttggagagttgcgaaaaaaaggaatccgggtag

SEQ ID NO: 244996 - DNA, 640 bp, Artificial Sequence
  derived and/or modified sequence
accagcaacctcgcccctccctgcggaaaaccgatgagaggcagggccaagccgaagcgatggcggcctatccggagagctgcgtggacactacggtgctggacttcgtcgcagacctgtccctggcctccccgagacgccctctcctctgcgacttcgcacccggggtctccttgggggacccagcccttgcgctccgagagggaagacccaggaggatggcgcggtttgaagagggggacccagaagaagaggagtgcgaagtggaccagggggacggagaagaggaggaggaagaggagcgcggaagaggtgtctccctattaggccgccccaagaggaaaagggtgatcacctacgcccagcgccaggccgccaacatccgcgaaaggaagcggatgttcaacctcaacgaggcctttgaccagctgcggaggaaggtgcccacgtttgcttacgagaaaaggctgtcccggatcgagaccctccgcctggccatcgtctatatctccttcatgaccgagctcttggagagctgtgagaagaaggaaagcggctgagcctggtgtggagagtctgcccttcctcgtctggtagtgctggggtgtgtcaggaccgggcactgggtgaggctaaaggg

SEQ ID NO: 244997 - DNA, 501 bp, Artificial Sequence
  derived and/or modified sequence
atggccgcctaccccgagagctgcgtggacaccaccgtgctggacttcgtggccgacctgagcctggccagccccagaagacccctgctgtgcgacttcgcccccggcgtgagcctgggcgaccccgccctggccctgagagagggcagacccagaagaatggccagattcgaggagggcgaccccgaggaggaggagtgcgaggtggaccagggcgacggcgaggaggaggaggaggaggagagaggcagaggcgtgagcctgctgggcagacccaagagaaagagagtgatcacctacgcccagagacaggccgccaacatcagagagagaaagagaatgttcaacctgaacgaggccttcgaccagctgagaagaaaggtgcccaccttcgcctacgagaagagactgagcagaatcgagaccctgagactggccatcgtgtacatcagcttcatgaccgagctgctggagagctgcgagaagaaggagagcggctag

SEQ ID NO: 244998 - protein, 61 aa, Artificial Sequence
  derived and/or modified sequence
ADDRNPLEQCFRETDYEEFLEIARNNLKATSNPKHVVIVGAGMAGLSAAYVLSGGGHQVTV

SEQ ID NO: 244999 - protein, 498 aa, Artificial Sequence
  derived and/or modified sequence
ADDRNPLAECFQENDYEEFLEIARNGLKATSNPKHVVIVGAGMAGLSAAYVLAGAGHQVTVLEASERPGGRVRTYRNEEAGWYANLGPMRLPEKHRIVREYIRKFDLRLNEFSQENDNAWYFIKNIRKKVGEVKKDPGLLKYPVKPSEAGKSAGQLYEESLGKVVEELKRTNCSYILNKYDTYSTKEYLIKEGDLSPGAVDMIGDLLNEDSGYYVSFIESLKHDDIFAYEKRFDEIVDGMDKLPTAMYRDIQDKVHFNAQVIKIQQNDQKVTVVYETLSKETPSVTADYVIVCTTSRAVRLIKFNPPLLPKKAHALRSVHYRSGTKIFLTCTTKFWEDDGIHGGKSTTDLPSRFIYYPNHNFTNGVGVIIAYGIGDDANFFQALDFKDCADIVFNDLSLIHQLPKKDIQSFCYPSVIQKWSLDKYAMGGITTFTPYQFQHFSDPLTASQGRIYFAGEYTAQAHGWIDSTIKSGLRAARDVNLASENPSGIHLSNDNEL

SEQ ID NO: 245000 - protein, 38 aa, Artificial Sequence
  derived and/or modified sequence
  misc_feature (31)..(31): Xaa can be any naturally occurring amino acid
  misc_feature (37)..(37): Xaa can be any naturally occurring amino acid
DDRRSPLEECFQQNDYEEFLEIAKNGLKKTXNPKHVXV

SEQ ID NO: 245001 - protein, 499 aa, Artificial Sequence
  derived and/or modified sequence
ADDRRNPLGECFREADYEEFVDIATNGLKQTSNPKRVVVVGAGMAGLSAAYVLAGAGHNVMLLEASERVGGRVNTYRNEQEGWYVNLGPMRLPERHRIVREYIKKFGLQLNQFFQEDEDAWYFIKNIRKKVREVKENPSIFPYPVKPSEKGKSAPQLYRDSLQKIIEEYGRSNCSYILNKYDTYSTKDYLIKEGNLSPGAVDMIGDLLNEGSSYYLSFIESLKSDDIFSYENRFDEIVGGFDLLPKAMYKAIEEKVHLNARVIQIQQNAEGVRVTYQTPAKNLSYVTADYVIVCSTSRAARRIYFEPPLPPEKAHALQSIHYRSATKIFLTCTKKFWEDDGIHGGKSITDRPSRLIHYPNHNFPNGIGVLVIYTIADDADFFLALDNKTIADIVIHDLSLIHQLPKEKIRDLCYVSMIKKWSLDKYSMGSITTFAPYQFQEYFETVAAPVGRIYFAGEYTARAHGWIDSTIKSGLKAARDVNRASQKPSRIQLSNDNEL

SEQ ID NO: 245002 - protein, 498 aa, Artificial Sequence
  derived and/or modified sequence
AHDRNPLEECFRETDYEEFLEIAKNGLTATSNPKRVVIVGAGMAGLSAAYVLAGAGHQVTVLEASERVGGRVRTYRKKDWYANLGPMRLPTKHRIVREYIKKFDLKLNEFSQENENAWYFIKNIRKRVREVKNNPGLLEYPVKPSEEGKSAAQLYVESLRKVVKELKRTNCKYILDKYDTYSTKEYLLKEGNLSPGAVDMIGDLLNEDSGYYVSFIESLKHDDIFGYEKRFDEIVGGMDQLPTSMYEAIKEKVQVHFNARVIEIQQNDREATVTYQTSANEMSSVTADYVIVCTTSRAARRIKFEPPLPPKKAHALRSVHYRSGTKIFLTCKKKFWEDDGIRGGKSTTDLPSRFIYYPNHNFTSGVGVIIAYGIGDDANFFQALDFKDCADIVINDLSLIHQLPKEDIQTFCRPSMIQRWSLDKYAMGGITTFTPYQFQHFSEALTAPFKRIYFAGEYTAQFHGWIDSTIKSGLTAARDVNRASENPSGIHLSNDNEF

SEQ ID NO: 245003 - protein, 499 aa, Artificial Sequence
  derived and/or modified sequence
ADVRRNPLEECFREADYEEFLEIARNGLKKTSNPKHVVVVGAGMAGLSAAYVLAGAGHKVTLLEASERVGGRVHTYRNEKEGWYVNLGPMRLPERHRIIREYIRKFGLKLNEFFQENENAWYFIRNIRKRVWEVKKDPGVFKYPVKPSEEGKSASQLYRESLKKVIEELKRTNCSYILNKYDTYSTKEYLIKEGNLSRGAVDMIGDLLNEDSSYYLSFIESLKSDDLFSYEKRFDEIVGGFDQLPISMYQAIAEMVHLNAQVIKIQHNAEKVRVAYQTPAKTLSYVTADYVIVCSSSRAARRIYFEPPLPPKKAHALRSIHYKSGTKIFLTCSKKFWEADGIHGGKSTTDLPSRFIYYPNHNFTSGVGVIVAYTISDDADFFQSLDIKTSADIVINDLSLIHQLPKKEIQALCYPSMIKKWSLDKYAMGSITSFAPYQFQDFIERVAAPVGRIYFAGEYTARVHGWLDSTIKSGLTAARDVNRASQKPSRRQLSNDNEL

SEQ ID NO: 245004 - protein, 499 aa, Artificial Sequence
  derived and/or modified sequence
ADDRRRPLEECFREADYEEFLEIAKNGLQRTSNPKRVVVVGAGMAGLSAAYVLAGAGHQVTLLEASERVGGRVNTYRNEKDGWYVNLGPMRLPERHRIIREYIRKFGLELNEFIQENDNAWYFIKNIRKRVSEVKKDPGVFKYPVKPSEEGKSASQLYRESLQKVIEELKRTNCSYILNKYDTYSTKEYLIKEGNLSPGAVDMIGDLLNEDSSYYLSFIESLKSDDIFSYEKRFDEIVGGFDQLPRSMYQAIAEKVHLNAQVIKIQQNAEDVRVTYQTPAKTLSYVIADYVIVCSTSRAARRIHFEPPLPPKKAHALRSIHYRSSTKIFLTCSQKFWEADGIHGGKSTTDLPSRFIYYPNHSFTSGIGVIVAYTLADDTDFFQALDIETSADIVINDLSLIHQLPKEQIQALCYPSKIQKWSLDEYAMGAITSFTPYQFQDFFEIVAAPVGRIYFAGEYTASVHGWLDSTIKSGLTAARDVNLASQKPSRIQLSNDNEL

SEQ ID NO: 245005 - protein, 499 aa, Artificial Sequence
  derived and/or modified sequence
ADDRRRPLEECFQEADYEEFLEIARNGLNETSNPKHVVVVGAGMAGLSAAYVLAGAGHNVTLLEASERVGGRVNTYRNETEGWYVNLGPMRLPERHRIIREYIRKFGLKLNEFLQENENAWYFIRNIRKRVWEVKKDPGVFKYPVEPSEEGKSASQLYRESLEKVIEELKRTNCSYILNKYDTYSTKEYLIKEGNLSRGAVDMIGKLPNEDSSYYLSFIESLKSDDLFSYEKRFDEIVGGFDQLPISMYQAIAEMVHLNAQVIKIQHNAEEVRVAYQTPAKTLSYVTADYVIVCSTSRAARRIYFEPPLPPKKAHALRSIHYRSGTKIFLTCTRKFWEADGIHGGKSTTDLPSRFIYYPNHNFTSDVGVIVAYTLADDADFFQALDIKTSADIVINDLSLIHQLPKEEIQALCYPSMIKKWSLDKYAMGAITSFTPYQFQDFIETVAAPVGRIYFAGEYTARVHGWLDSTIKSGLTAARDVNRASQKPSRRQLSNDNEL

SEQ ID NO: 245006 - protein, 392 aa, Artificial Sequence
  derived and/or modified sequence
HRIVREYIRKFGLKLNEFVQETENGWYFIKNIRKRVGEVKKDPGLLKYPVKPSEAGKSAGQLYQESLGKAVEELKRTNCSYILNKYDTYSTKEYLIKEGNLSPGAVDMIGDLLNEDSGYYVSFIESLKHDDIFAYEKRFDEIVGGMDQLPTSMYRAIEESVRFKARVIKIQQNAEKVTVTYQTTQKNLLLETVDYVIVCTTSRAARRITFKPPLPPKKAHALRSVHYRSGTKIFLTCTKKFWEDDGIQGGKSTTDLPSRFIYYPNHNFTTGVGVIIAYGIGDDANFFQALNLNECADIVFNDLSSIHQLPKKDLQTFCYPSIIQKWSLDKYAMGAITTFTPYQFQHFSEALTAPVGRIFFAGEYTANAHGWIDSTIKSGLTAARDVNRASEL

SEQ ID NO: 245007 - protein, 484 aa, Artificial Sequence
  derived and/or modified sequence
ADDRNPLEECFRETDYEEFLEIAKNGLSTTSNPKRVVIVGAGMSGLSAAYVLANAGHQVTVLEASERAGGQVKTYRNEKEGWYANLGPMRLPEKHRIVREYIRKFGLQLNEFSQENENAWYFIKNIRKRVGEVNKDPGVLDYPVKPSEVGKSAGQLYEESLQKAVEELRRTNCSYMLNKYDTYSTKEYLLKEGNLSPGAVDMIGDLLNEDSGYYVSFIESLKHDDIFAYEKRFDEIVGGMDKLPTSMYQAIQEKVHLNARVIKIQQDVKEVTVTYQTSEKETLSVTADYVIVCTTSRAARRIKFEPPLPPKKAHALRSVHYRSGTKIFLTCTKKFWEDDGIHGGKSTTDLPSRFIYYPNHNFPNGVGVIIAYGIGDDANYFEALDFEDCGDIVINDLSLIHQLPKEEIQAICRPSMIQRWSLDKYAMGGITTFTPYQFQHFSEALTAPVDRIYFAGEYTAQAHGWIASTIKSGPEGLDVNRASE

SEQ ID NO: 245008 - protein, 472 aa, Artificial Sequence
  derived and/or modified sequence
ADDRNPLEECFRETDYEEFLEIAKNGLSTTSNPKRVVIVGAGMSGLSAAYVLANAGHQVTVLEASERAGGRVKTYRNEKEGWYANLGPMRLPEKHRIVREYIRKFDLQLNEFSQENENAWYFIKNIRKRVGEVNKDPGVLEYPVKPSEVGKSAGQLYEESLQKAVEELRRTNCSYMLNKYDTYSTKEYLLKEGNLSPGAVDMIGDLLNEDSGYYVSFIESLKHDDIFAYEKRFDEIVGGMDKLPTSMYQAIQEKVHLNARVIKIQQDVKEVTVTYQTSEKETLSVTADYVIVCTTSRAARRIKFEPPLPPKKAHALRSVHYRSGTKIFLTCTKKFWEDDGIHGGKSTTDLPSRFIYYPNHNFPNGVGVIIAYGIGDDANYFQALDFEDCGDIVINDLSLIHQLPKEEIQAICRPSMIQRWSLDKYAMGGITTFTPYQFQHFSEALTAPVDRIYFAGEYTAQAHGWIDSTIKW

SEQ ID NO: 245009 - protein, 486 aa, Artificial Sequence
  derived and/or modified sequence
ANDRNPLEECFRETDYEEFLEIARNGLKATSNPKHVVVVGAGMSGLSAAYVLSGAGHQVTVLEASERAGGRVRTYRNDKEDWYANLGPMRLPEKHRIVREYIRKFGLQLNEFSQENDNAWYFIKNIRKRVGEVKKDPGVLKYPVKPSEEGKSAGQLYEESLGKVVEELKRTNCSYILNKYDTYSTKEYLLKEGNLSPGAVDMIGDLMNEDSGYYVSFPESLRHDDIFAYEKRFDEIVGGMDKLPTSMYRAIEEKVHLNAQVIKIQKNAEKVTVVYQTPAKEMASVTADYVIVCTTSRATRRIKFEPPLPPKKAHALRSVHYRSGTKIFLTCTKKFWEDEGIHGGKSTTDLPSRFIYYPNHNFTSGVGVIIAYGIGDDANFFQALDFKDCADIVINDLSLIHQLPREEIQTFCYPSMIQKWSLDKYAMGGITTFTPYQFQHFSESLTASVDRIYFAGEHTAEAHGWIDSTIKSGLRAARDVNRASEQ

SEQ ID NO: 245010 - protein, 486 aa, Artificial Sequence
  derived and/or modified sequence
ADDRNPLEECFRETDYEEFLEIARNGLKATSNPKHVVIVGAGMSGLSAAYVLSGAGHQVTVLEASERAGGRVRTYRNDKEGWYANLGPMRLPEKHRIVREYIRKFGLQLNEFSQENDNAWYFIKNIRKRVGEVKKDPGVLKYPVKPSEEGKSAGQLYEESLGKVVEELKRTNCSYILNKYDTYSTKEYLLKEGNLSPGAVDMIGDLMNEDSGYYVSFPESLRHDDIFAYEKRFDEIVGGMDKLPTSMYRAIEEKVHLNAQVIKIQKNAEKVTVVYQTPAKEMASVTADYVIVCTTSRATRRIKFEPPLPPKKAHALRSVHYRSGTKIFLTCTKKFWEDEGIHGGKSTTDLPSRFIYYPNHNFTSGVGVIIAYGIGDDANFFQALDFKDCADIVINDLSLIHQLPREEIQTFCYPSMIQKWSLDKYAMGGITTFTPYQFQHFSEPLTASVDRIYFAGEHTAEAHGWIDSTIKSGLRAARDVNRASEQ

SEQ ID NO: 245011 - protein, 567 aa, Artificial Sequence
  derived and/or modified sequence
MAPLALHLLVLVPILLSLVASQDWKAERSQDPFEKCMQDPDYEQLLKVVTWGLNRTLKPQRVIVVGAGVAGLVAAKVLSDAGHKVTILEADNRIGGRIFTYRDQNTGWIGELGAMRMPSSHRILHKLCQGLGLNLTKFTQYDKNTWTEVHEVKLRNYVVEKVPEKLGYALRPQEKGHSPEDIYQMALNQALKDLKALGCRKAMKKFERHTLLEYLLGEGNLSRPAVQLLGDVMSEDGFFYLSFAEALRAHSCLSDRLQYSRIVGGWDLLPRALLSSLSGLVLLNAPVVAMTQGPHDVHVQIETSPPARNLKVLKADVVLLTASGPAVKRITFSPPLPRHMQEALRRLHYVPATKVFLSFRRPFWREEHIEGGHSNTDRPSRMIFYPPPREGALLLASYTWSDAAAAFAGLSREEALRLALDDVAALHGPVVRQLWDGTGVVKRWAEDQHSQGGFVVQPPALWQTEKDDWTVPYGRIYFAGEHTAYPHGWVETAVKSALRAAIKINSRKGPASDTASPEGHASDMEGQGHVHGVASSPSHDLAKEEGSHPPVQGQLSLQNTTHTRTSH

SEQ ID NO: 245012 - protein, 89 aa, Artificial Sequence
  derived and/or modified sequence
MGTKREAILKVLENLTPEELKKFKMKLGTVPLREGFERIPRGALGQLDIVDLTDKLVASYYEDYAAELVVAVLRDMRMLEEAARLQRAA

SEQ ID NO: 245013 - DNA, 270 bp, Artificial Sequence
  derived and/or modified sequence
atgggcacgaaacgggaagcaattctgaaggtgttagaaaatctgacgccggaggagctcaagaagttcaaaatgaaactgggcacagtccctttacgcgagggcttcgagagaattccacggggagctctagggcaactcgatatcgttgaccttactgacaagctggtagccagctattacgaagactacgccgcagaacttgtggtagcagtgctaagagatatgagaatgctggaagaagcagcccgccttcagagggccgcatag

SEQ ID NO: 245014 - DNA, 270 bp, Artificial Sequence
  derived and/or modified sequence
atgggcaccaagcgggaggccatcctgaaggtgctggagaacctgaccccagaggagctgaagaagttcaagatgaagctgggcaccgtgcccctgcgggagggctttgagcgcatccccaggggggccctgggccagctggacatcgtggacctgacagacaagctggtggccagctactatgaggactatgctgctgagctggtggtggccgtgctgcgggacatgaggatgctggaggaggccgcccggctgcagagagctgcctag

SEQ ID NO: 245015 - DNA, 270 bp, Artificial Sequence
  derived and/or modified sequence
atgggcaccaagcgggaggccatcctgaaggtgctggagaacctgaccccagaagagcttaagaagttcaagatgaaactcggtacagtcccattaagggagggattcgagcgaatcccgagaggagcgctgggacagctggatatcgtggacctcaccgacaagctagtggcatcttattatgaagactatgctgccgaacttgtggtggccgtgctaagggacatgcggatgttggaggaagccgccaggctgcagcgcgccgcctag

SEQ ID NO: 245016 - DNA, 270 bp, Artificial Sequence
  derived and/or modified sequence
atgggaacgaagagagaagctatcttaaaggtgctcgaaaacttgacacctgaggagctgaaaaaatttaaaatgaagctgggcacagtgcctttgcgtgagggttttgagcgaatcccgaggggagctctgggccagctggatattgtcgaccttacagataagcttgtggctagttactacgaggactacgcagccgagcttgtagtcgcagtgctcagggacatgcgaatgctagaggaggccgcaaggctgcagagggccgcatag

SEQ ID NO: 245017 - DNA, 547 bp, Artificial Sequence
  derived and/or modified sequence
gctgcaggaaaggtaggacctgatggctccaggccctcggaggctcagaggcgcagggctgagccatgggaacgaagcgcgaggccatcctgaaggtgctggagaacctgacaccggaggagctcaagaagttcaagatgaagctggggacggtgccgctgcgcgagggctttgagcgcatcccgcggggcgcgctcgggcagctagatatcgtggacctcaccgacaagctggtcgcctcctactacgaggactacgcagccgagctcgtcgtggccgtgctgcgcgacatgcgcatgttggaggaggccgcacggctgcagcgggctgcgtgagggccactctgagctggaggcgggtcaaggcaaaaggagtaatgcaacgcctgtgaagccagccccacgcgcgcaccagtcgcgtaagacaacagcagtgtctccacctcggggaccaaggacgcctccgtgcctccagaccccgcctcctccagcccctgcacctgtcatttattcttccactgcccaataaatattcatggcagacttta

SEQ ID NO: 245018 - DNA, 270 bp, Artificial Sequence
  derived and/or modified sequence
atgggcaccaagagagaggccatcctgaaggtgctggagaacctgacccccgaggagctgaagaagttcaagatgaagctgggcaccgtgcccctgagagagggcttcgagagaatccccagaggcgccctgggccagctggacatcgtggacctgaccgacaagctggtggccagctactacgaggactacgccgccgagctggtggtggccgtgctgagagacatgagaatgctggaggaggccgccagactgcagagagccgcctag

SEQ ID NO: 245019 - protein, 272 aa, Artificial Sequence
  derived and/or modified sequence
MMIHGFQSSHRDFCFGPWKLTASKTHIMKSADVEKLADELHMPSLPEMMFGDNVLRIQHGSGFGIEFNATDALRCVNNYQGMLKVACAEEWQESRTEGEHSKEVIKPYDWTYTTDYKGTLLGESLKLKVVPTTDHIDTEKLKAREQIKFFEEVLLFEDELHDHGVSSLSVKIRVMPSSFFLLLRFFLRIDGVLIRMNDTRLYHEADKTYMLREYTSRESKISSLMHVPPSLFTEPNEISQYLPIKEAVCEKLIFPERIDPNPADSQKSTQVE

SEQ ID NO: 245020 - DNA, 819 bp, Artificial Sequence
  derived and/or modified sequence
atgatgatccacggcttccagagcagccacagagacttctgcttcggcccctggaagctgaccgccagcaagacccacatcatgaagagcgccgacgtggagaagctggccgacgagctgcacatgcccagcctgcccgagatgatgttcggcgacaacgtgctgagaatccagcacggcagcggcttcggcatcgagttcaacgccaccgacgccctgagatgcgtgaacaactaccagggcatgctgaaggtggcctgcgccgaggagtggcaggagagcagaaccgagggcgagcacagcaaggaggtgatcaagccctacgactggacctacaccaccgactacaagggcaccctgctgggcgagagcctgaagctgaaggtggtgcccaccaccgaccacatcgacaccgagaagctgaaggccagagagcagatcaagttcttcgaggaggtgctgctgttcgaggacgagctgcacgaccacggcgtgagcagcctgagcgtgaagatcagagtgatgcccagcagcttcttcctgctgctgagattcttcctgagaatcgacggcgtgctgatcagaatgaacgacaccagactgtaccacgaggccgacaagacctacatgctgagagagtacaccagcagagagagcaagatcagcagcctgatgcacgtgccccccagcctgttcaccgagcccaacgagatcagccagtacctgcccatcaaggaggccgtgtgcgagaagctgatcttccccgagagaatcgaccccaaccccgccgacagccagaagagcacccaggtggagtag

SEQ ID NO: 245021 - DNA, 819 bp, Artificial Sequence
  derived and/or modified sequence
atgatgattcacgggtttcaaagctctcacagggatttttgctttggcccttggaaactgaccgccagtaagacccatatcatgaagtccgccgacgtggagaagctggctgacgagcttcacatgccaagcctaccagagatgatgtttggggataacgtgcttaggatccaacacggtagtggcttcggaattgaattcaacgccactgacgctctgagatgtgtgaataactaccaaggaatgctgaaagtggcctgtgcagaagagtggcaggagagtcgcactgaaggagaacacagcaaggaggtaataaagccgtacgattggacatatactacagattataaagggaccctcctgggggaatccctgaagctgaaagtcgttccaacaaccgaccacatcgacaccgagaagctgaaggccagggagcaaattaaattcttcgaagaggttctgctttttgaggatgaattgcacgatcatggagtgtcatctctgagcgtgaagattagagtcatgccatcctcattttttctgctgctgcgcttctttctcagaatcgatggggtgctcataaggatgaacgacactcgcctgtaccacgaggccgataagacttacatgttacgcgaatacaccagcagagaaagcaagatttctagcctgatgcacgtcccaccatccctgttcacggaacccaacgaaatcagtcaatacctgcccattaaagaggctgtctgcgagaagcttatctttcccgaaagaatcgatcccaaccctgcggactctcaaaagtcaacccaggttgaatag

SEQ ID NO: 245022 - DNA, 819 bp, Artificial Sequence
  derived and/or modified sequence
atgatgatccacggcttccagagcagccaccgggacttctgcttcggcccctggaagctgacagccagcaagacccacatcatgaagtctgcagatgtggagaagctggctgatgagctgcacatgcccagcctgcctgagatgatgtttggagacaacgtgctgcgcatccagcacggcagcggctttggaattgagttcaatgccacagatgccctgcgctgtgtgaacaactaccagggcatgctgaaggtggcctgtgccgaggagtggcaggagagcaggacagaaggagagcacagcaaggaggtgatcaagccctatgactggacctacaccacagactacaagggcaccctgctgggggagagcctgaagctgaaggtggtgcccaccacagaccacatcgacacagagaagctgaaggcccgggagcagatcaagttctttgaggaggtgctgctgtttgaagatgagctgcatgaccatggagtgagcagcctgtctgtgaagatccgggtgatgcccagcagcttcttcctgctgctgcgcttcttcctgagaattgatggagtgctgatccgcatgaatgacacccggctgtaccatgaagctgacaagacctacatgctgcgggagtacaccagccgggagagcaagatcagcagcctgatgcacgtgccccccagcctcttcacagagcccaatgagatcagccagtacctgcccatcaaggaggccgtgtgtgagaagctgatcttccctgagagaattgaccccaacccagctgacagccagaagagcacccaggtggagtag

SEQ ID NO: 245023 - DNA, 819 bp, Artificial Sequence
  derived and/or modified sequence
atgatgatccacggcttccagagcagccaccgggacttctgcttcggaccttggaagctgaccgcgagcaaaactcatataatgaaatctgcagacgtggagaagctggcagatgagctgcacatgccatcccttccggagatgatgttcggagataatgtactgcggattcagcacgggtctggctttggaatcgaattcaatgctactgatgccttgcgatgcgtcaataattaccagggaatgctgaaggttgcttgcgctgaggagtggcaggagagccggacagaaggagaacacagcaaagaggtgatcaaaccatacgattggacatacacgaccgattataaggggacgctgttgggggaaagccttaaactaaaagtcgttcccacaaccgatcatatcgacactgaaaaacttaaggctagggagcagatcaaatttttcgaggaggttcttttgtttgaggacgagctgcacgaccacggtgtctcctctctctctgtcaaaattcgagtgatgccttcgtctttctttctgttgctccggttttttttaaggattgatggggttctgattcgaatgaacgatacgcgcttgtatcacgaagctgacaaaacatacatgttgagagaatacacctccagggagtctaagatttcatccctcatgcatgttccacctagcctgtttactgagccaaatgagatctcccagtatctgcccataaaggaagcggtgtgcgagaagctgatcttcccggaacgaatcgatcccaatccggcggatagccagaaatcaacccaagttgaatag

SEQ ID NO: 245024 - DNA, 819 bp, Artificial Sequence
  derived and/or modified sequence
atgatgatccatggctttcagagttcccaccgcgatttttgcttcggcccatggaagctgacagcatcgaagacccacatcatgaaatctgctgacgtggagaagttagccgacgagctccacatgccatcactcccagaaatgatgttcggcgacaatgttctgagaatacaacatggctcgggcttcggaattgaatttaacgctactgatgctttgcgttgtgtgaataactaccaaggaatgctgaaggtggcgtgtgccgaggagtggcaggagagccggaccgagggggaacatagtaaggaggtgattaagccctatgattggacttacactactgactataaggggacattactgggggaatccctgaagttgaaggtcgtccctactacagatcacatcgataccgagaagctgaaagccagagaacagatcaagttctttgaggaggttctgctgtttgaagatgagctgcacgaccatggagtgagctctctttctgtgaagatcagggtgatgccttcctctttctttctgctgttacgattcttcctacgtatcgacggagttctgatacgcatgaacgatactaggctgtatcatgaagccgataagacctatatgctgcgcgagtacaccagtcgcgagagcaagatctcctcactcatgcacgtgcccccatccctgtttacggagccaaacgagatttctcaatacttgccaatcaaagaggccgtttgcgaaaaactgattttccctgagcggattgatcctaatccagccgactcccagaaaagtactcaggtggagtag

SEQ ID NO: 245025 - DNA, 1630 bp, Artificial Sequence
  derived and/or modified sequence
gggtcggccggcagggggcggggccgggcatggtaacggctcggaagcctaggaggctgggccggagggaggcggaggaaccggtgttcgccgccgccgctgcttcagcttattccttgtggcctctgcgggtcctgcctcagccatgatgatccacggcttccagagcagccaccgggatttctgcttcgggccctggaagctgacggcgtccaagacccacatcatgaagtcggcggatgtggagaaattagccgatgaattacatatgccatctctccctgaaatgatgtttggagacaacgttttaagaatccagcatgggtctggctttggaattgagttcaatgctacagatgcgttaagatgtgtaaacaactaccaaggaatgcttaaagtggcctgtgctgaagagtggcaagaaagcaggacggagggtgaacactccaaagaggttattaaaccatatgattggacctatacaacagattataagggaaccttacttggagaatctcttaagttaaaggttgtacctacaacagatcatatagatacagaaaaattgaaagccagagaacagattaagttttttgaagaagttctcctttttgaggatgaacttcatgatcatggagtttcaagcctgagtgtgaagattagagtaatgccttctagctttttcctgctgttgcggtttttcttgagaattgatggggtgcttatcagaatgaatgacacgagactttaccatgaggctgacaagacctacatgttacgagaatatacgtcacgagaaagcaaaatttctagtttgatgcatgttccaccttccctcttcacggaacctaatgaaatatcccagtatttaccaataaaggaagcagtttgtgagaagctaatatttccagaaagaattgatcctaacccagcagactcacaaaaaagtacacaagtggaataaaatgtgatacaacatatactcactatggaatctgactggacaccttggctatttgtaaggggttatttttattatgagaattaattgccttgtttatgtacagattttctgtagccttaaaggaaaaaaaaataaagatcgttacaggcaggtttcactcaactgctgtttgtactgtctgtcttcacattcatattccagatttatattttctggagttaaatttggatgatttctaaattatcacaaagtgggacctcagcagtagtgatgtgtgtgtctcatgagcagtgagcacagtctgcattcatcatgaaacactatcttctaccaggaggaggttaatgtaaatcaccaaatcccaatgccttgtgactttcataggattcctgatcatgcatgttgatgtactggctcttcactttgggctttctgatgtttattcacacctttggagagttgcaacttgccacatacgaaattagtctcatagtgtagtgaacttcaaccccaaaattttaaaaatgtatttccccccagttttaaattgcctttgaaatttaaaaaaaaaaaatttagacttagtaccagaaccaaaaatacctagatttttggagaacttattacatacatagaaacatgaatatggtttaccactgtgtgtgt

SEQ ID NO: 245026 - protein, 790 aa, Artificial Sequence
  derived and/or modified sequence
MRSAAKPWNPAIRAGGHGPDRVRPLPAASSGMKSSKSSTSLAFESRLSRLKRASSEDTLNKPGSTAASGVVRLKKTATAGAISELTESRLRSGTGAFTTTKRTGIPAPREFSVTVSRERSVPRGPSNPRKSVSSPTSSNTPTPTKHLRTPSTKPKQENEGGEKAALESQVRELLAEAKAKDSEINRLRSELKKYKEKRTLNAEGTDALGPNVDGTSVSPGDTEPMIRALEEKNKNFQKELSDLEEENRVLKEKLIYLEHSPNSEGAASHTGDSSCPTSITQESSFGSPTGNQMSSDIDEYKKNIHGNALRTSGSSSSDVTKASLSPDASDFEHITAETPSRPLSSTSNPFKSSKCSTAGSSPNSVSELSLASLTEKIQKMEENHHSTAEELQATLQELSDQQQMVQELTAENEKLVDEKTILETSFHQHRERAEQLSQENEKLMNLLQERVKNEEPTTQEGKIIELEQKCTGILEQGRFEREKLLNIQQQLTCSLRKVEEENQGALEMIKRLKEENEKLNEFLELERHNNNMMAKTLEECRVTLEGLKMENGSLKSHLQGEKQKATEASAVEQTAESCEVQEMLKVARAEKDLLELSCNELRQELLKANGEIKHVSSLLAKVEKDYSYLKEICDHQAEQLSRTSLKLQEKASESDAEIKDMKETIFELEDQVEQHRAVKLHNNQLISELESSVIKLEEQKSDLERQLKTLTKQMKEETEEWRRFQADLQTAVVVANDIKCEAQQELRTVKRKLLEEEEKNARLQKELGDVQGHGRVVTSRAAPPSLGSVS

SEQ ID NO: 245027 - protein, 78 aa, Artificial Sequence
  derived and/or modified sequence
MRSAAKPWNPAIRAGGHGPDRVRPLPAASSGMKSSKSSTSLAFESRLSRLKRASSEDTLNKPGSTAASGVVRLKKTAT

SEQ ID NO: 245028 - DNA, 2373 bp, Artificial Sequence
  derived and/or modified sequence
atgagaagcgccgccaagccctggaaccccgccatcagagccggcggccacggccccgacagagtgagacccctgcccgccgccagcagcggcatgaagagcagcaagagcagcaccagcctggccttcgagagcagactgagcagactgaagagagccagcagcgaggacaccctgaacaagcccggcagcaccgccgccagcggcgtggtgagactgaagaagaccgccaccgccggcgccatcagcgagctgaccgagagcagactgagaagcggcaccggcgccttcaccaccaccaagagaaccggcatccccgcccccagagagttcagcgtgaccgtgagcagagagagaagcgtgcccagaggccccagcaaccccagaaagagcgtgagcagccccaccagcagcaacacccccacccccaccaagcacctgagaacccccagcaccaagcccaagcaggagaacgagggcggcgagaaggccgccctggagagccaggtgagagagctgctggccgaggccaaggccaaggacagcgagatcaacagactgagaagcgagctgaagaagtacaaggagaagagaaccctgaacgccgagggcaccgacgccctgggccccaacgtggacggcaccagcgtgagccccggcgacaccgagcccatgatcagagccctggaggagaagaacaagaacttccagaaggagctgagcgacctggaggaggagaacagagtgctgaaggagaagctgatctacctggagcacagccccaacagcgagggcgccgccagccacaccggcgacagcagctgccccaccagcatcacccaggagagcagcttcggcagccccaccggcaaccagatgagcagcgacatcgacgagtacaagaagaacatccacggcaacgccctgagaaccagcggcagcagcagcagcgacgtgaccaaggccagcctgagccccgacgccagcgacttcgagcacatcaccgccgagacccccagcagacccctgagcagcaccagcaaccccttcaagagcagcaagtgcagcaccgccggcagcagccccaacagcgtgagcgagctgagcctggccagcctgaccgagaagatccagaagatggaggagaaccaccacagcaccgccgaggagctgcaggccaccctgcaggagctgagcgaccagcagcagatggtgcaggagctgaccgccgagaacgagaagctggtggacgagaagaccatcctggagaccagcttccaccagcacagagagagagccgagcagctgagccaggagaacgagaagctgatgaacctgctgcaggagagagtgaagaacgaggagcccaccacccaggagggcaagatcatcgagctggagcagaagtgcaccggcatcctggagcagggcagattcgagagagagaagctgctgaacatccagcagcagctgacctgcagcctgagaaaggtggaggaggagaaccagggcgccctggagatgatcaagagactgaaggaggagaacgagaagctgaacgagttcctggagctggagagacacaacaacaacatgatggccaagaccctggaggagtgcagagtgaccctggagggcctgaagatggagaacggcagcctgaagagccacctgcagggcgagaagcagaaggccaccgaggccagcgccgtggagcagaccgccgagagctgcgaggtgcaggagatgctgaaggtggccagagccgagaaggacctgctggagctgagctgcaacgagctgagacaggagctgctgaaggccaacggcgagatcaagcacgtgagcagcctgctggccaaggtggagaaggactacagctacctgaaggagatctgcgaccaccaggccgagcagctgagcagaaccagcctgaagctgcaggagaaggccagcgagagcgacgccgagatcaaggacatgaaggagaccatcttcgagctggaggaccaggtggagcagcacagagccgtgaagctgcacaacaaccagctgatcagcgagctggagagcagcgtgatcaagctggaggagcagaagagcgacctggagagacagctgaagaccctgaccaagcagatgaaggaggagaccgaggagtggagaagattccaggccgacctgcagaccgccgtggtggtggccaacgacatcaagtgcgaggcccagcaggagctgagaaccgtgaagagaaagctgctggaggaggaggagaagaacgccagactgcagaaggagctgggcgacgtgcagggccacggcagagtggtgaccagcagagccgccccccccagcctgggcagcgtgagctag

SEQ ID NO: 245029 - DNA, 2373 bp, Artificial Sequence
  derived and/or modified sequence
atgcggtccgcagctaagccctggaaccccgcaattcgcgctgggggtcacggccccgaccgtgtgagaccactgccagccgcatcgagtggcatgaagtcctcaaagagctccaccagcctcgccttcgagtctcggctgtcacgcttgaaaagagccagctccgaagacacattaaacaaacccgggagcactgctgcctccggcgtggtacggctgaagaagacggccaccgccggcgcaatttctgagctgacagagagcagactgcgaagcggcacgggcgcctttaccacaaccaaaaggaccgggattcctgccccacgcgaattctctgtaaccgtgtcgcgggaaagaagcgtgcccagaggcccctccaatccgaggaagagtgtaagttcgccaacttcttccaatacaccaacccctactaaacaccttcgcacaccttcaacgaagccgaagcaggaaaacgaggggggcgagaaggccgctttggagagccaggtaagagagcttctcgcagaggctaaggccaaagactccgaaattaacagattgaggtctgagctgaagaaatacaaagagaagagaaccctgaatgctgaaggcacggacgcgttgggacccaacgtggacggcacctctgtctctcccggggacaccgaacccatgatccgggctctggaggagaaaaataagaacttccagaaagaactgtcggacctggaggaagaaaatcgggtgctgaaagaaaagctcatatacctggaacatagcccaaactcagagggcgccgcatctcacacaggggactccagctgtcccacttcaattacccaggagtcctcttttggaagtcccacaggtaatcaaatgagctcagatattgacgagtataaaaagaatatccatggcaacgccctgagaactagcggctccagtagcagcgatgttacaaaggcctctctgtcccccgacgctagcgactttgaacacatcacagctgagaccccgtcccgtcccctcagttcaacgtcaaacccgtttaaatcaagcaagtgctctaccgccggctcatctcccaattccgtaagcgagttgagcctggcaagcctgaccgaaaagatccagaaaatggaggaaaatcaccatagcaccgccgaagaattacaagctaccttgcaggagctttcagatcaacaacagatggtccaggaactcactgccgaaaacgagaaacttgtggacgagaaaacaatcctggagacaagtttccaccaacatagggagcgcgccgagcaactgtctcaggagaacgagaagcttatgaatctactccaggagcgcgtgaagaacgaagagccgacgacccaggaggggaagataatagaattggaacagaaatgtaccggtattctggagcagggtaggttcgagagagaaaagctgctgaacattcagcagcagcttacctgctcccttcgcaaagttgaagaagagaatcagggagccctggagatgatcaagaggctgaaagaagaaaacgagaaactcaacgagtttttggaactggagcggcacaacaataacatgatggccaaaacactggaggagtgtcgcgtgacactggagggcctgaagatggagaacggctcactgaagagtcacctgcagggcgagaagcagaaggctactgaagcatcagcagtggagcaaacggctgagagctgtgaggtgcaggaaatgctcaaagtcgcccgcgctgaaaaggatctgctggagctgagctgtaatgagttgcggcaggaacttttaaaagccaacggtgaaatcaagcacgtgtccagtctgctggccaaggtcgagaaggactactcctacctcaaggagatttgtgatcaccaggccgaacagctgtcccgaaccagtctcaagctgcaggaaaaggcctccgagtctgatgctgaaataaaggacatgaaagaaacaattttcgaactggaagatcaggtcgaacagcatagggccgttaagcttcacaataaccagctgatctcagaactggagagtagtgtgattaagctggaggaacagaagtccgatttggaacggcagctgaagaccctcaccaagcagatgaaggaggaaacagaagaatggcgcaggtttcaggccgatctgcagaccgccgttgttgtggccaacgatatcaagtgcgaggcccagcaggaactccgcaccgttaagcggaagcttcttgaggaggaggaaaaaaacgccaggctccagaaagagctgggcgatgtgcagggacatggcagagtcgtcactagccgggccgcgcctccgagccttggctcagtgtcgtag

SEQ ID NO: 245030 - DNA, 2373 bp, Artificial Sequence
  derived and/or modified sequence
atgaggtctgctgccaagccctggaacccagccatccgggccggcggccacggccctgacagagtgcggcccctgcctgctgccagcagcggcatgaagagcagcaagagcagcaccagcctggcctttgagagccggctgagccggctgaagagggccagcagcgaggacaccctgaacaagccaggcagcacagctgccagcggcgtggtgcggctgaagaagacagccacagctggggccatcagcgagctgacagagagccggctgcggagcggcaccggggccttcaccaccaccaagaggacaggcatcccagccccccgggagttctctgtgacagtgtcccgggagaggtctgtgccccggggccccagcaaccccaggaagtctgtgagcagccccaccagcagcaacacccccacccccaccaagcacctgcggacccccagcaccaagcccaagcaggagaatgaaggaggagagaaggccgccctggagagccaggtgcgggagctgctggccgaggccaaggccaaggacagcgagatcaaccggctgcggtctgagctgaagaagtacaaggagaagaggaccctgaatgctgagggcacagatgccctgggccccaacgtggatggcacctctgtgtcccctggggacacagagcccatgatccgggccctggaggagaagaacaagaacttccagaaggagctgagtgacctggaggaggagaacagagtgctgaaggagaagctgatctacctggagcacagccccaacagcgagggcgccgccagccacactggagacagcagctgccccaccagcatcacccaggagagcagctttggcagccccactggaaaccagatgagcagtgacattgatgagtacaagaagaacatccatggaaatgccctgcggaccagcggcagcagcagcagtgatgtgaccaaggccagcctgagcccagatgccagtgactttgagcacatcacagctgagacccccagccggcccctgagcagcaccagcaaccccttcaagagcagcaagtgcagcacagctggcagcagccccaacagcgtgtctgagctgagcctggccagcctgacagagaagatccagaagatggaggagaaccaccacagcacagctgaggagctgcaggccaccctgcaggagctgagtgaccagcagcagatggtgcaggagctgacagcagaaaatgagaagctggtggatgagaagaccatcctggagaccagcttccaccagcaccgggagagagctgagcagctgagccaggagaatgagaagctgatgaacctgctgcaggagcgggtgaagaatgaggagcccaccacccaggagggcaagatcatcgagctggagcagaagtgcaccggcatcctggagcagggccgctttgagcgggagaagctgctgaacatccagcagcagctgacctgcagcctgaggaaggtggaggaggagaaccagggcgccctggagatgatcaagaggctgaaggaggagaatgagaagctgaatgagttcctggagctggagcggcacaacaacaacatgatggccaagaccctggaggagtgccgggtgaccctggagggcctgaagatggagaatggcagcctgaagagccacctgcagggcgagaagcagaaggccacagaggccagcgctgtggagcagacagctgagagctgtgaggtgcaggagatgctgaaggtggcccgggcagagaaggacctgctggagctgagctgcaatgagctgcggcaggagctgctgaaggccaatggagagatcaagcacgtgagcagcctgctggccaaggtggagaaggactacagctacctgaaggagatctgtgaccaccaggccgagcagctgagcaggaccagcctgaagctgcaggagaaggccagcgagagtgatgctgagatcaaggacatgaaggagaccatctttgagctggaggaccaggtggagcagcacagagctgtgaagctgcacaacaaccagctgatcagcgagctggagagcagcgtcatcaagctggaggagcagaagagtgacctggagcggcagctgaagaccctgaccaagcagatgaaggaggagacagaggagtggaggcgcttccaggccgacctgcagacagctgtggtggtggccaatgacatcaagtgtgaggcccagcaggagctgaggacagtgaagaggaagctgctggaggaggaggagaagaatgcccggctgcagaaggagctgggagatgtgcagggccacggccgggtggtgaccagcagagctgccccacccagcctgggctctgtgtcctag

SEQ ID NO: 245031 - DNA, 2373 bp, Artificial Sequence
  derived and/or modified sequence
atgcggagcgccgccaagccctggaaccccgccatccgggccggcggccacgggcctgacagggttcgtccacttcccgcggcttcatcaggcatgaagagctccaagagcagtacatcattagctttcgagtcaaggctcagtcgactcaaacgcgcgtcctccgaagacacgttaaacaaacctggctccacagcggcttcgggtgtcgttaggctgaagaagactgccaccgcaggggcgatttccgagctgactgagagccgcctgaggagcggaactggtgcgtttacaacgactaagcgcacaggtatcccagcgcccagggagttcagtgttactgtgtctcgagagcgaagcgtgcctaggggaccctcaaacccgagaaagtctgtcagctcccccacgagcagcaatacacctactccaacgaaacatttacgaacaccctcgaccaaacctaagcaggaaaacgagggcggggaaaaggccgccctcgaaagccaggtgagggaactacttgctgaagccaaggccaaagactcggagataaatcgactccgcagcgagcttaagaagtacaaggagaaaaggaccctcaatgctgaaggcaccgatgcactggggcccaatgtagatggcacctcggtgtctcccggggacaccgaaccaatgattcgagcgttagaggaaaagaacaaaaacttccagaaagaactctctgatctggaggaggagaatagagtcctgaaagaaaaattgatctacctggaacattcccctaattcggagggagccgcaagccacacaggcgactcatcatgtccaactagcatcactcaggagtcatcctttggaagtccgaccggaaatcagatgtcttcagatattgatgagtacaaaaaaaatatccacggtaacgctctgcggaccagcggcagtagctcatctgatgtgactaaggcttcactgtctcctgacgcctctgacttcgagcatatcaccgctgagacaccatcccgcccgctgtcatccaccagcaatccgttcaaatcatctaagtgctccactgccggctctagcccaaattccgtatccgagctgtccttagcttcactcacggaaaaaatacaaaaaatggaggagaaccaccacagcaccgccgaggagctccaggccacactccaggaactttccgaccagcagcaaatggtgcaggagctgaccgcggagaacgagaaactggtggacgagaaaactatcttagagacgagtttccaccagcatcgcgagagagccgagcaacttagccaggagaacgagaaactcatgaacctactgcaggagagagtgaagaacgaggagcctacaacacaggaaggaaagattatagaattggaacagaagtgtactggcattttggagcagggccgattcgaaagggaaaagctgttaaacattcaacagcagttaacgtgctcactccggaaggtggaggaggagaatcaaggcgcgctcgagatgattaagcgtcttaaggaggagaacgaaaaactcaatgaattcctggagctcgaacggcacaacaataacatgatggcaaaaactttggaagaatgtcgtgtcacactggaaggccttaagatggaaaatggcagcttaaaatcgcatttacagggcgagaaacaaaaggctaccgaggcatccgcagtggagcagacagcagaatcatgcgaggtccaggagatgttgaaggtcgcacgggccgaaaaagatctgttggagctctcgtgtaatgaacttcgacaggagctcttaaaagccaatggcgagataaagcatgtgagttctctacttgcaaaagttgaaaaggattattcttaccttaaagagatctgcgatcaccaagctgaacaacttagtcgcacttcactgaagctgcaggaaaaagcctctgagagtgacgctgaaatcaaggatatgaaggagacaatctttgaactggaggaccaggtcgaacagcaccgcgcggtgaagctccacaacaaccagctgatatctgagctcgaatcttccgtgattaagcttgaggagcagaagtctgacctggagcgccagttgaagacactcaccaagcagatgaaagaggagacggaggagtggcgccggttccaggctgatctgcaaactgcagtggttgtggccaacgacatcaagtgcgaggctcagcaagagctgagaactgtgaagcgcaagctgctggaggaagaggagaaaaatgcccggcttcagaaggaattgggggatgttcagggacacggcagagtggtcacctcccgcgcagctccacctagcctgggttccgtgagctag

SEQ ID NO: 245032 - DNA, 2373 bp, Artificial Sequence
  derived and/or modified sequence
atgcggtccgcggcaaagccttggaaccctgctattagagctgggggtcacggcccagacagggtcagacctctccccgcagcctcttcgggcatgaagtcgagcaagtcctccacaagtttagcattcgagtctcggctttcccgcctcaaacgggcaagctccgaggacacgctgaacaaaccgggatctaccgccgcaagtggagtcgtgcggctcaagaagacagccactgccggagcgatctccgaactgacagagagccggctgaggtcgggaactggcgctttcactaccaccaagaggactggcattcccgctcccagggagttctcagtcaccgtgtccagggaaaggagtgtgcccagggggccttccaaccctagaaaatccgttagtagcccaacctcatccaacacacccacccccacaaagcatctgcgtacccctagtactaagccaaagcaggagaatgaaggaggggagaaggcggctctggaatctcaggtgcgcgagttgttggccgaggctaaagctaaagattccgagatcaatcgcctgcggtccgagctgaagaagtataaggaaaagcgtactttaaatgctgagggaacggacgctctgggacctaacgtggatggcacctctgtgtcaccaggtgatacagagccaatgatacgggctctggaggagaaaaataaaaactttcagaaagagttaagcgatctcgaggaggaaaatcgagtcctcaaagaaaaacttatctacttagagcacagcccaaatagtgaaggagcggctagtcacaccggtgattcatcctgtcctacttcaattacccaggaaagctcattcggttcccctacagggaatcaaatgagttccgatattgatgaatataagaaaaatattcacggtaacgcactccgtacatctggatcttcttcctcggacgtgacaaaggcatctttatcccctgatgctagtgactttgagcatattactgcagagaccccatcacggcctctcagttctacctccaaccctttcaaaagtagtaagtgcagcaccgcagggtcaagccctaactctgtcagcgagctgtcactggctagtctgaccgagaaaatccaaaagatggaggaaaatcatcactccacagcagaagaactccaggccactctgcaagagttgtccgatcagcagcagatggtgcaggaattgactgctgagaatgaaaaactcgtcgacgaaaaaacaatccttgaaactagtttccatcagcacagagaacgggctgaacagctttctcaggagaacgagaaactcatgaatcttctgcaagaaagggtgaaaaacgaggagccaactactcaggagggcaaaattattgagctcgaacagaagtgtacaggaattcttgaacaaggaaggtttgagcgcgagaaactgttgaatattcagcagcagctgacctgcagcctgaggaaggtcgaggaagagaatcagggagccctcgaaatgattaagaggctgaaagaggagaatgaaaaactcaacgagtttctggagctcgagaggcacaataacaacatgatggccaagaccctggaggaatgccgggtgacacttgaggggctaaaaatggaaaatggttctctgaagtcacatttgcagggagagaaacaaaaagccacagaggctagtgccgtggaacaaaccgccgagtcttgcgaggtgcaagagatgcttaaagtggcacgcgctgagaaggacctgctggagctcagttgtaacgaactccgccaagagctcctgaaggccaatggtgagattaaacatgtgtctagtctccttgcgaaggtggagaaagattatagctatttaaaggagatctgcgaccatcaggccgagcagttgtctcgcacatccctgaagttgcaagaaaaggctagtgagagtgatgccgaaattaaggatatgaaggagaccatcttcgaactggaagatcaagtcgagcaacacagagcagttaagctgcataacaaccaacttatctcggaacttgaatctagtgtgatcaaattggaggaacaaaagagcgatttggagcgtcagttgaaaaccttgaccaaacagatgaaggaggaaactgaagagtggagaagatttcaggccgatctccaaacagctgtggtggtggcgaacgacataaagtgcgaggctcagcaggaactgcgaaccgtgaaacgaaaactgctggaggaggaggaaaaaaacgcccgtctccagaaagagcttggagatgtgcagggacacggcagagttgtgacctccagagcggcaccaccttcgctgggtagcgtgagctag

SEQ ID NO: 245033 - DNA, 4969 bp, Artificial Sequence
  derived and/or modified sequence
gaagcagaaaaggttggataaaagataaggacagacccacgaagtcaagcatgcggagtgcagccaagccctggaacccagccatcagagcagggggccacggcccagaccgggtgcggcctctgcctgcagcctcttccggcatgaagagttctaagtcttcaacttccttggcttttgagtcccgactcagcaggctcaagagggccagcagtgaggacacgctcaacaagccaggaagtaccgctgcatcgggggtggttcgcctgaagaagaccgccactgccggagccatctcggagctcacggagagccgcctgaggagcggcacaggggcctttacaacaactaaacggacaggcattccagccccacgggaattttcagtaactgtctcaagagagaggtctgtgccacgtggtccctccaaccccaggaaatcagtgtccagtccaacttcttccaacactcccactcctacgaaacacctgaggaccccttccacaaagcccaagcaagagaatgaaggtggagaaaaggctgcgcttgagtcccaagttcgggaacttttggcagaagccaaagcaaaagatagtgaaattaacaggcttcgaagtgaactaaagaaatacaaagagaaaaggactctgaacgctgaggggactgatgctttgggcccaaatgtcgatggaacatcagtctccccaggtgacacggaacctatgataagagctcttgaggagaagaacaagaactttcagaaagagctttccgatctagaggaagaaaaccgggtcctgaaggagaaactgatctatcttgagcactccccaaattcagaaggggcagcaagtcacactggcgacagcagctgcccaacatccataactcaagagtcaagcttcggaagcccaactggaaatcagatgtccagtgacattgatgagtataaaaaaaacatacatggaaatgcattacggacatcaggctcctcaagtagcgatgttaccaaagcttctttgtcgccagatgcttccgactttgagcacattacagcagagacaccctcaaggcccctgtcctccaccagtaacccctttaagagttcaaagtgttctactgctgggagttccccaaacagcgtaagtgaattgtccctggcttccctcacagagaagatacaaaagatggaagaaaaccaccatagcactgcagaagaactacaggctactctacaagaattatcagaccagcaacaaatggtacaggaattgacagctgaaaatgagaagctggtggatgaaaagacgattttagagacatcctttcatcagcatcgagagagggcagagcagctaagtcaagaaaatgagaagctgatgaatcttttacaagagcgagtaaagaatgaagagcccaccactcaggaaggaaaaattattgaactggagcagaagtgcacaggtattcttgaacagggccgctttgaaagagagaagctactcaacattcagcagcagttgacctgtagcttgcggaaggttgaggaagaaaaccaaggagctttagaaatgattaaacgtctgaaggaagaaaatgaaaaactgaatgagtttctagaactggaacggcataataataacatgatggccaaaactttggaagagtgtagagttaccttggaagggctaaaaatggagaatggatctttgaagtctcatttgcagggtgagaagcagaaagccacagaggccagtgctgtggagcagacggcagagagctgcgaagttcaagaaatgttgaaagtagcccgagcagagaaagatctactggaactgtcttgcaatgagctcagacaagaattactaaaggcaaacggtgaaattaaacatgtttccagtctgctggccaaggtggaaaaggattattcatacctgaaggagatatgtgatcaccaagccgaacagctgagcagaaccagcctaaagctgcaagaaaaagcatcagagagtgatgcagagatcaaagacatgaaagaaaccatatttgaattggaagatcaggtggaacagcaccgggctgtcaagttacacaataatcaactcatcagtgagctagaaagtagtgtgatcaagctggaggaacagaagtcagacctggagaggcagctgaagactctgaccaagcagatgaaggaggagaccgaggaatggaggcggttccaggcggatctgcagaccgcagtggtggtggccaatgacatcaagtgtgaggcccagcaggagctgcgcaccgtgaagaggaaactgctggaggaggaggagaagaatgcccggttgcagaaggagctgggggatgtgcagggccacggcagggtggtcaccagcagagccgcccctccctccctgggctctgtcagctagcagagcatttggtggaagaaagacagcccagctcttgccatgattgggagccgcagccatctctagatgaaagggggaatgtgtagaggagaaattgcctctttataaagagcccagttgtctccttgtgacattctctgtttctcagagtcattgccgtcgagtctctgctttttgtccacattttgggatcagcttactgcatgatcaaagatgatgtttccctctttttacttttcctcagaagattgagctgtcttttatttggagaataaaatgaagttctgaaaaaaacaaagtacaagtcttatgaaaagttatttgcagctggagtgctgaaaagggcacagtggcagagcagatgcagagctgggtacagcgcaggcccgagttcttttgttttttgttgttgttgttgttgttgttttgttttgttttttttttttttttgagacagagtttcactcttgttgcccaggctggagtgcaatggtacgatctcggctcactgcaacctctgcctcccgggttcaagtgattctcttgcctcagccttccaagtagctggaattacaggcgcctgccaccacacccagctaatttttgtattgttagtagagatggggtttcaccgtgttggccaggctgctcttgaactcctgacctcaggtgatccccacctcagcctcccaaagtgctgggattacagacatgagccaccgcacccagaacctaaggcccaagttctactttttggtgttcatttctctgcttccttttgatcgtggtgtctgatcatcttggaattcacattactcaaggcaaaataggaagccatctgcgtgatgtcacattccgaagaagtcagaaggttcggcgagttggagctttactcttgttgcccaggctagagtgcagtggtgcgatcttggctcattgcaagctccgcttcctgggtttaagctattctcctgccttggcctcccaagtagctgggattacaggcatgtgccgtcactcctggctaattttgtatttttagtagagatgcaatttcaccatgttggtcaggctggtctcgaactcctgacctcaagtgatctggccgcctcagcctcccaaagtgctgggattacaggcttgagaccccatgtctggccccttctgtggggtcttgattgagccccttcacttggagtctgacttcattacctcgtctgaaacaaggtgcctccaagctttgggttgatttccagaatcttgttgggttaaacataagtagaagtttgatcataaaggatgttattaagccggataggtaagcacggtgacaatggcaatagaaatctaatggaaaacgattgaatgacaactacaccaaagtttcatggatgaaactcaccccagaaacttagtgttcaaatcagagtgatacacaattcaaaatgtgattttaaacttctggaaatatgtgtgtttgtgaagatccaaatccaattcagcaacctccatcaggcagaaaccttctgcaatcctcacatgaggaactggttcacagtgtacacagcatggagccattagtgacgttatccaaaggatgagacaagacaaaagttactgtctaataaaaggaaaattaggaacaggaatgctctttaaactcaggaagatcttttggggtgtcaaactggacagcacagaatcattagaaaaattagcttggcgtgagaagagacattgaggtcttctctgtaaaatttacttagatacttgtgaataggactgaaatttatattttgggcactctttacctcagattcagagttcttaggattatttaaaattcatttgctggatgttttcaagtataaacaataagaaaactgcaacttcaacttaaaaggcactgctgtatttgcaccctatattttgacctgtcgttaggtactgttgaatatttttatctgtaagcatttatgaagtgcaaaataaacatgttattatatagaagcgtctgctgcttagttttaatcaccagctacgtttctgcagggcctttatgtcgttttgttctacatttttttctgaatacagtttcagaacttcaaagtcacatcaagtaactagaatttgaggtagaaaaaagctggatgtaagttgtaaataggaggttgacatggaatatgaacagtttcattagtagaacaaaagggcatggagtaaaaatgctaattttgcataaatttttaaaactctagggtctcagaaaatatagcatggacttaaagtctagatgtgttttgttgacatttaaatatgaatagattgatgatttaatgtattggattttttcttaattatgaagtattatttaggtatactaataacaaaatggagacgtgtgaagaaaaatattaatctttcttctccctcagtaccacctgtgaggaaatcagtgttaacagtgtgtacatttttctttactcatgaatatgtatagggttcattttcatatttttaataaaaattggattatattcttttca

SEQ ID NO: 245034 - protein, 511 aa, Artificial Sequence [sequence omitted]

SEQ ID NO: 245035 - protein, 232 aa, Artificial Sequence
  derived and/or modified sequence
MESTGSVGEAPGGPRVLVVGGGIAGLGAAQRLCGHSAFPHLRVLEATARAGGRIRSERCFGGVVEVGAHWIHAAPELQDAWFRKLIGFVVLPAFASVHVLCGFIAGLESEFMETLSDEEVLLCLTQVLRRVTGNPRLPAPKSVLRSRWHSAPYTRGSYSYVAVGSTGGDLDLLAQPLPADGAGAQLQILFAGEATHRTFYSTTHGALLSGWREADRLLSLWAPQVQQPRPRL

SEQ ID NO: 245036 - protein, 69 aa, Artificial Sequence
  derived and/or modified sequence
MESTGSVGEAPGGPRVLVVGGGIAGLGAAQRLCGHSAFPHLRVLEATARAGGRIRSERCFGAIKDSQTA

SEQ ID NO: 245037 - protein, 463 aa, Artificial Sequence
  derived and/or modified sequence
MESTGSVGEAPGGPRVLVVGGGIAGLGAAQRLCGHSAFPHLRVLEATARAGGRIRSERCFGGVVEVGAHWIHGPSRGNPVFQLAAEYGLLGEKELSQENQLVETGGHVGLPSVSYASSGASVSLQLVAEMATLFYGLIDQTREFLHAAETPVPSVGEYLKKEIGQHVAGWTEDEETRKLKLAVLNSFFNLECCVSGTHSMDLVALAPFGEYTVLPGLDCTFSKGYQGLTNCMMAALPEDTVVFEKPVKTIHWNGSFQEAAFPGETFPVSVECEDGDRFPAHHVIVTVPLGFLREHLDTSPLEDAAPELQDAWFRKLIGFVVLPAFASVHVLCGFIAGLESEFMETLSDEEVLLCLTQVLRRVTGNPRLPAPKSVLRSRWHSAPYTRGSYSYVAVGSTGGDLDLLAQPLPADGAGAQLQILFAGEATHRTFYSTTHGALLSGWREADRLLSLWAPQVQQPRPRL

SEQ ID NO: 245038 - protein, 83 aa, Artificial Sequence
  derived and/or modified sequence
MESTGSVGEAPGGPRVLVVGGGISRSCLRGKPHIARFTPRRTGLCCRDGGRPTASSVCGPRRCSSPGPGSSWAQPTLFHPCRG

SEQ ID NO: 245039 - DNA, 1536 bp, Artificial Sequence
  derived and/or modified sequence
atggagagcaccggcagcgtgggcgaggcccccggcggccccagagtgctggtggtgggcggcggcatcgccggcctgggcgccgcccagagactgtgcggccacagcgccttcccccacctgagagtgctggaggccaccgccagagccggcggcagaatcagaagcgagagatgcttcggcggcgtggtggaggtgggcgcccactggatccacggccccagcagaggcaaccccgtgttccagctggccgccgagtacggcctgctgggcgagaaggagctgagccaggagaaccagctggtggagaccggcggccacgtgggcctgcccagcgtgagctacgccagcagcggcgccagcgtgagcctgcagctggtggccgagatggccaccctgttctacggcctgatcgaccagaccagagagttcctgcacgccgccgagacccccgtgcccagcgtgggcgagtacctgaagaaggagatcggccagcacgtggccggctggaccgaggacgaggagaccagaaagctgaagctggccgtgctgaacagcttcttcaacctggagtgctgcgtgagcggcacccacagcatggacctggtggccctggcccccttcggcgagtacaccgtgctgcccggcctggactgcaccttcagcaagggctaccagggcctgaccaactgcatgatggccgccctgcccgaggacaccgtggtgttcgagaagcccgtgaagaccatccactggaacggcagcttccaggaggccgccttccccggcgagaccttccccgtgagcgtggagtgcgaggacggcgacagattccccgcccaccacgtgatcgtgaccgtgcccctgggcttcctgagagagcacctggacaccttcttcgacccccccctgcccgccgagaaggccgaggccatcagaaagatcggcttcggcaccaacaacaagatcttcctggagttcgaggagcccttctgggagcccgactgccagctgatccagctggtgtgggaggacaccagccccctggaggacgccgcccccgagctgcaggacgcctggttcagaaagctgatcggcttcgtggtgctgcccgccttcgccagcgtgcacgtgctgtgcggcttcatcgccggcctggagagcgagttcatggagaccctgagcgacgaggaggtgctgctgtgcctgacccaggtgctgagaagagtgaccggcaaccccagactgcccgcccccaagagcgtgctgagaagcagatggcacagcgccccctacaccagaggcagctacagctacgtggccgtgggcagcaccggcggcgacctggacctgctggcccagcccctgcccgccgacggcgccggcgcccagctgcagatcctgttcgccggcgaggccacccacagaaccttctacagcaccacccacggcgccctgctgagcggctggagagaggccgacagactgctgagcctgtgggccccccaggtgcagcagcccagacccagactgtag

SEQ ID NO: 245040 - DNA, 699 bp, Artificial Sequence
  derived and/or modified sequence
atggagagcaccggcagcgtgggcgaggcccccggcggccccagagtgctggtggtgggcggcggcatcgccggcctgggcgccgcccagagactgtgcggccacagcgccttcccccacctgagagtgctggaggccaccgccagagccggcggcagaatcagaagcgagagatgcttcggcggcgtggtggaggtgggcgcccactggatccacgccgcccccgagctgcaggacgcctggttcagaaagctgatcggcttcgtggtgctgcccgccttcgccagcgtgcacgtgctgtgcggcttcatcgccggcctggagagcgagttcatggagaccctgagcgacgaggaggtgctgctgtgcctgacccaggtgctgagaagagtgaccggcaaccccagactgcccgcccccaagagcgtgctgagaagcagatggcacagcgccccctacaccagaggcagctacagctacgtggccgtgggcagcaccggcggcgacctggacctgctggcccagcccctgcccgccgacggcgccggcgcccagctgcagatcctgttcgccggcgaggccacccacagaaccttctacagcaccacccacggcgccctgctgagcggctggagagaggccgacagactgctgagcctgtgggccccccaggtgcagcagcccagacccagactgtag

SEQ ID NO: 245041 - DNA, 1392 bp, Artificial Sequence
  derived and/or modified sequence
atggagagcaccggcagcgtgggcgaggcccccggcggccccagagtgctggtggtgggcggcggcatcgccggcctgggcgccgcccagagactgtgcggccacagcgccttcccccacctgagagtgctggaggccaccgccagagccggcggcagaatcagaagcgagagatgcttcggcggcgtggtggaggtgggcgcccactggatccacggccccagcagaggcaaccccgtgttccagctggccgccgagtacggcctgctgggcgagaaggagctgagccaggagaaccagctggtggagaccggcggccacgtgggcctgcccagcgtgagctacgccagcagcggcgccagcgtgagcctgcagctggtggccgagatggccaccctgttctacggcctgatcgaccagaccagagagttcctgcacgccgccgagacccccgtgcccagcgtgggcgagtacctgaagaaggagatcggccagcacgtggccggctggaccgaggacgaggagaccagaaagctgaagctggccgtgctgaacagcttcttcaacctggagtgctgcgtgagcggcacccacagcatggacctggtggccctggcccccttcggcgagtacaccgtgctgcccggcctggactgcaccttcagcaagggctaccagggcctgaccaactgcatgatggccgccctgcccgaggacaccgtggtgttcgagaagcccgtgaagaccatccactggaacggcagcttccaggaggccgccttccccggcgagaccttccccgtgagcgtggagtgcgaggacggcgacagattccccgcccaccacgtgatcgtgaccgtgcccctgggcttcctgagagagcacctggacaccagccccctggaggacgccgcccccgagctgcaggacgcctggttcagaaagctgatcggcttcgtggtgctgcccgccttcgccagcgtgcacgtgctgtgcggcttcatcgccggcctggagagcgagttcatggagaccctgagcgacgaggaggtgctgctgtgcctgacccaggtgctgagaagagtgaccggcaaccccagactgcccgcccccaagagcgtgctgagaagcagatggcacagcgccccctacaccagaggcagctacagctacgtggccgtgggcagcaccggcggcgacctggacctgctggcccagcccctgcccgccgacggcgccggcgcccagctgcagatcctgttcgccggcgaggccacccacagaaccttctacagcaccacccacggcgccctgctgagcggctggagagaggccgacagactgctgagcctgtgggccccccaggtgcagcagcccagacccagactgtag

SEQ ID NO: 245042 - DNA, 1536 bp, Artificial Sequence
  derived and/or modified sequence
atggaaagtaccggatccgtgggagaggccccgggcggaccccgggtgctggtggtgggagggggtatcgcggggctcggcgcggctcagcggctgtgtggacactccgccttccctcacctgagggtgctagaagccaccgcacgcgcgggaggacgcatacgtagcgagagatgctttggcggagtagtcgaggtgggggctcattggatacacggccccagccgggggaaccctgtgtttcaactggccgccgagtacggtttacttggggagaaggagctgagtcaagagaaccagcttgtcgagaccggcgggcatgtcgggcttccctctgtctcctacgcctcctctggcgcctccgtgagtcttcaattagttgcagaaatggctaccctgttttatggtctcattgaccagacgcgcgaatttcttcatgccgctgaaacacccgtcccatccgtgggggagtacctgaagaaggagattgggcagcacgtcgctggatggactgaagatgaagagacacgcaaacttaaactagccgtcttgaacagctttttcaacctcgagtgctgtgtaagtggcacacactctatggatttagtggcgttagcgcctttcggggaatacaccgtgctgccaggacttgattgtaccttctcaaagggctaccaggggcttaccaactgtatgatggctgcgcttccggaagatacggtggtttttgaaaaaccagtcaaaaccatccattggaatggatcttttcaggaggcagcgtttcccggtgagacatttccagttagtgtggagtgtgaagacggtgaccgttttccagctcatcatgtgatcgtgacagtgcctttaggattcctgcgagagcacctcgacaccttctttgatccacctttgccagcagagaaggccgaggctatccggaagattggcttcggaaccaataataagatatttttagaattcgaggagccgttctgggagcccgattgccagctgatccagctggtctgggaggatacctcgcctctcgaggatgcagcccccgagttacaggatgcttggttccggaagcttatcgggtttgtagtcctccccgccttcgcctccgtgcatgttttatgcggctttattgctggcctggagagtgaattcatggaaaccctgtccgacgaggaggtacttttatgcctgactcaggtactgcgcagagttactggtaatccacgattacccgcccccaaatcagtgctacggtcaaggtggcacagtgctccgtacaccaggggaagctattcttacgtggctgtcggctcaaccggcggagatttggacttactggcccagcctctcccagcagacggtgctggcgcacagttgcagatcctatttgctggcgaggccacgcaccggactttttattctactacgcatggcgcgctgctgtcagggtggagggaggccgatagattgttgagtctctgggcaccacaggtccagcagccgcgcccacggctttag

SEQ ID NO: 245043 - DNA, 699 bp, Artificial Sequence
  derived and/or modified sequence
atggagtcaactggtagtgtaggggaggcgcccggagggccacgggttctcgtggtggggggggggatagctggccttggagccgctcagaggctgtgcggtcacagcgcttttcctcatctgagagtgctggaagccacagcgcgggccggcgggagaatacggagcgagcgctgtttcggaggtgtcgttgaggtgggggcccactggatccacgctgcgccggagctgcaggacgcatggttcagaaagctgatcggatttgtagttctgcccgctttcgcctccgtgcacgtcctgtgcggcttcatcgctggactggagagtgagttcatggaaactttgagcgacgaagaggtgcttctttgcctgacccaggttctccggcgggttaccggcaacccgcgactgccagcccctaagagcgtcttgaggtcaaggtggcattccgcaccttacacccggggatcttacagctatgtggccgttggaagtacaggtggggacttggatctcctcgcccagcccttacccgccgacggagccggcgcccaattgcagatacttttcgcaggggaagcaactcatcgcactttctactccactacacacggcgcgcttttgtctgggtggcgcgaagcagacagactgctgagtctttgggccccccaggtacagcagccccgccctaggctgtag

SEQ ID NO: 245044 - DNA, 1392 bp, Artificial Sequence
  derived and/or modified sequence
atggaatccactggatccgtgggggaagcgcctgggggaccaagagtgcttgtggtgggtggcgggatcgcaggcctgggagcggcccagagactgtgcggccactcggctttcccacacctgcgcgtattggaggccacggcaagggccggggggcgcatcagaagtgagaggtgcttcggcggggttgtagaggtcggagcgcactggatacacggtccaagccgcggtaatccggtttttcaactggcagcggaatatggcctgctgggcgaaaaagagttgagccaagagaaccagctcgtggaaacaggtggacatgttggtttgcctagcgtcagttacgcaagcagcggcgcttccgtttcactacagctggtcgctgagatggcaactctgttctacggtctgatcgatcagactcgtgagtttttgcatgccgctgagacaccggtgccatctgttggcgagtacttgaagaaagaaataggacaacacgtggccggctggacggaggacgaagagactcgaaaactgaaacttgccgtattaaatagctttttcaatctcgaatgctgtgtgtctggcacccatagcatggatttagtcgcactagccccattcggcgaatacacggtgttgcccggcctagactgcacatttagcaaaggctaccagggcctgacaaattgcatgatggccgcgctcccagaggatactgtcgtgttcgagaaacccgtgaagactatccattggaatggatcatttcaggaggcggccttccctggagaaacctttcccgtatcagtggagtgcgaagatggtgatcgttttcccgcccatcatgtaatagtcactgtccctctagggtttctccgcgagcacttggatacttcgcctctggaggatgctgcacctgaactccaggacgcctggttccggaaactcattggttttgtcgtgctgcccgcttttgcttcggtccatgtgctctgtgggttcatcgccggccttgaatcggagtttatggaaacgctgtccgacgaagaggtactcctttgtctgactcaggtgctgcggagagtgactggaaaccctcggctacccgcgccaaagtcagtcctcagatcacgatggcacagtgccccatatacacgggggtcatattcatatgtcgccgtgggaagtaccggaggtgacttagacctcctggcccaacccttgcctgccgatggggccggcgctcagcttcaaatactgtttgcaggtgaagctacccaccggacgttctacagtacaactcacggcgccctcctgagcgggtggcgggaagcagacaggttgctgagcctctgggctccccaggtacaacagcctcgaccaagattgtag

SEQ ID NO: 245045 - DNA, 252 bp, Artificial Sequence
  derived and/or modified sequence
atggagagtaccggatcggtgggtgaggcgccgggcggaccgcgcgttctggtcgtaggtggaggaatttcgcgctcttgtctacggggcaagccccacattgcacgttttaccccccggcggacaggactttgctgccgggacggaggccgcccaacagcatcatctgtgtgtggccctcgccgttgcagttcccctggtcctgggagttcatgggcacaacccaccttatttcacccttgcaggggctag

SEQ ID NO: 245046 - DNA, 1536 bp, Artificial Sequence
  derived and/or modified sequence
atggagagcacaggctctgtgggggaggcccctgggggcccccgggtgctggtggtgggcggcggcattgctggcctgggcgccgcccagaggctgtgtggccacagcgccttcccccacctgcgggtgctggaggccacagcccgggccggcggccgcatccgctctgagcgctgcttcggcggcgtggtggaggtgggcgcccactggatccacggccccagccggggcaaccctgtgttccagctggccgcagaatatggcctgctgggggagaaggagctgagccaggagaaccagctggtggagaccggcggccacgtgggcctgcccagcgtgtcctatgccagcagcggggcctctgtgtccctgcagctggtggccgagatggccaccctcttctacggcctgattgaccagacccgggagttcctgcatgctgctgagacccctgtgcccagcgtgggggagtacctgaagaaggagatcggccagcacgtggccggctggacagaagatgaggagaccaggaagctgaagctggccgtgctgaacagcttcttcaacctggagtgctgcgtgtctggcacccacagcatggacctggtggccctggccccctttggagagtacacagtgctgcccggcctggactgcaccttcagcaagggctaccagggcctgaccaactgcatgatggccgccctgcctgaggacacagtggtgtttgagaagcctgtgaagaccatccactggaatggcagcttccaggaggccgccttccctggagagaccttccctgtgtctgtggagtgtgaagatggagaccgcttccctgcccaccacgtgattgtgacagtgcccctgggcttcctgcgggagcacctggacaccttctttgacccccccctgcctgctgagaaggccgaggccatcaggaagattggatttggcaccaacaacaagatcttcctggagtttgaggagcccttctgggagccagactgccagctgatccagctggtgtgggaggacaccagccccctggaggatgctgcccctgagctgcaggatgcctggttcaggaagctgattggatttgtggtgctgcctgcctttgcctctgtgcacgtgctgtgtggcttcatcgccggcctggagagcgagttcatggagaccctgagtgatgaggaggtgctgctgtgcctgacccaggtgctgcggcgggtgactggaaacccccggctgcctgcccccaagtctgtgctgcggagccgctggcacagcgccccctacacccggggcagctacagctatgtggccgtgggcagcactggaggagacctggacctgctggcccagcccctgcctgcagatggagctggggcccagctgcagatcctgtttgctggggaggccacccacaggaccttctacagcaccacccatggagccctgctgagcggctggagggaggccgaccggctgctgagcctgtgggccccccaggtgcagcagccccggccccggctgtag

SEQ ID NO: 245047 - DNA, 699 bp, Artificial Sequence
  derived and/or modified sequence
atggagagcacaggctctgtgggggaggcccctgggggcccccgggtgctggtggtgggcggcggcattgctggcctgggcgccgcccagaggctgtgtggccacagcgccttcccccacctgcgggtgctggaggccacagcccgggccggcggccgcatccgctctgagcgctgcttcggcggcgtggtggaggtgggcgcccactggattcatgctgcccctgagctgcaggatgcctggttcaggaagctgattggatttgtggtgctgcctgcctttgcctctgtgcacgtgctgtgtggcttcatcgccggcctggagagcgagttcatggagaccctgagtgatgaggaggtgctgctgtgcctgacccaggtgctgcggcgggtgacaggcaacccccggctgcctgcccccaagtctgtgctgcggagccgctggcacagcgccccctacacccggggcagctacagctatgtggccgtgggcagcactggaggagacctggacctgctggcccagcccctgcctgcagatggagctggggcccagctgcagatcctgtttgctggggaggccacccacaggaccttctacagcaccacccacggggccctgctgagcggctggagggaggccgaccggctgctgagcctgtgggccccccaggtgcagcagccccggccccggctgtag

SEQ ID NO: 245048 - DNA, 1392 bp, Artificial Sequence
  derived and/or modified sequence
atggagagcacaggctctgtgggggaggcccctgggggcccccgggtgctggtggtgggcggcggcattgctggcctgggcgccgcccagaggctgtgtggccacagcgccttcccccacctgcgggtgctggaggccacagcccgggccggcggccgcatccgctctgagcgctgcttcggcggcgtggtggaggtgggcgcccactggatccacggccccagccggggcaaccctgtgttccagctggccgcagaatatggcctgctgggggagaaggagctgagccaggagaaccagctggtggagaccggcggccacgtgggcctgcccagcgtgtcctatgccagcagcggggcctctgtgtccctgcagctggtggccgagatggccaccctcttctacggcctgattgaccagacccgggagttcctgcatgctgctgagacccctgtgcccagcgtgggggagtacctgaagaaggagatcggccagcacgtggccggctggacagaagatgaggagaccaggaagctgaagctggccgtgctgaacagcttcttcaacctggagtgctgcgtgtctggcacccacagcatggacctggtggccctggccccctttggagagtacacagtgctgcccggcctggactgcaccttcagcaagggctaccagggcctgaccaactgcatgatggccgccctgcctgaggacacagtggtgtttgagaagcctgtgaagaccatccactggaatggcagcttccaggaggccgccttccctggagagaccttccctgtgtctgtggagtgtgaagatggagaccgcttccctgcccaccacgtgattgtgacagtgcccctgggcttcctgcgggagcacctggacaccagccccctggaggatgctgcccctgagctgcaggatgcctggttcaggaagctgattggatttgtggtgctgcctgcctttgcctctgtgcacgtgctgtgtggcttcatcgccggcctggagagcgagttcatggagaccctgagtgatgaggaggtgctgctgtgcctgacccaggtgctgcggcgggtgactggaaacccccggctgcctgcccccaagtctgtgctgcggagccgctggcacagcgccccctacacccggggcagctacagctatgtggccgtgggcagcactggaggagacctggacctgctggcccagcccctgcctgcagatggagctggggcccagctgcagatcctgtttgctggggaggccacccacaggaccttctacagcaccacccatggagccctgctgagcggctggagggaggccgaccggctgctgagcctgtgggccccccaggtgcagcagccccggccccggctgtag

SEQ ID NO: 245049 - DNA, 1536 bp, Artificial Sequence
  derived and/or modified sequence
atggagagcaccggcagcgtgggcgaggcccccggcggcccccgggtgctggtggttgggggtggtatagccggcttgggcgccgctcagagattatgcggccacagcgcttttccacatctcagagtcctagaagctaccgcaagagcgggcggtagaatcagatccgaaaggtgtttcggcggagttgtagaagtgggggcgcactggatacatggtccatcccggggaaaccctgtgtttcaactcgccgccgaatacggcttgcttggcgagaaagaactctctcaggagaatcagcttgtggaaacggggggacacgtcggtctgcccagtgtgagctatgcctcgtccggcgcttctgtgtcgctgcagctcgtcgctgagatggcaactttgttttacggactcattgatcaaacacgggagttcctccatgccgctgagacccctgtaccttctgtaggggagtaccttaagaaggaaattggacagcatgtggctggctggactgaagacgaggaaactcgaaaattgaaactggctgtcctcaactccttctttaaccttgagtgttgtgtcagcggaacccattccatggacctagtggctttggccccatttggtgagtatactgtgctccccggtttagactgtacctttagtaaggggtatcagggcttaactaattgcatgatggccgcactgcccgaagacaccgtggttttcgagaaacccgtgaagaccatccactggaatggctcattccaggaagccgccttcccaggcgagacttttccggtgtcagtggagtgtgaagacggtgacaggtttcctgcacaccacgtgattgtgaccgtgccccttggcttcctcagagaacacctcgatactttttttgaccccccgctgccggctgaaaaagcggaagccatacgaaagatcggcttcggaacaaataacaaaatctttttagagtttgaagagccattttgggagccagattgtcagctgatccagttggtgtgggaggacacctcccccctggaagacgccgcacccgagctgcaagatgcctggttccggaaactgataggctttgtggtgttaccggctttcgctagcgttcacgttctgtgcggattcatcgcaggattagagagcgagttcatggagaccctgtccgacgaagaagtcttgctgtgtttaacacaggtcctgcgcagagttaccggtaatcctcgcttacccgcaccgaagtctgttttacgcagtcgctggcactctgccccatatacaagagggtcctactcctatgtggctgtgggatcaaccggcggagacctagatctcctggcacagcccctgcccgcggacggcgcgggggctcagctgcaaattctgttcgccggtgaagctacccaccggactttctattctaccacccacggagcccttctatcagggtggcgcgaagcagaccggctgctgtccttgtgggctccccaggtgcagcagcccaggccaaggctctag

SEQ ID NO: 245050 - DNA, 699 bp, Artificial Sequence
  derived and/or modified sequence
atggagagcaccggcagcgtgggcgaggcccccggcggcccccgggtgctagtggttggaggcggaattgccggactgggggccgcacagaggttatgcggccatagtgcctttccacacttgcgagtgctggaggctacagcccgggccgggggccggatccgatcagaacgctgcttcggcggagtggtggaggttggtgcccactggatccacgccgctcccgaactgcaggacgcttggttccgaaagctgataggcttcgtcgtactgcctgccttcgcgtccgtccatgtgctctgcggctttatcgcggggcttgagtcggagttcatggagacgctgtcagatgaggaagtgctcctctgtctgacccaggtattaaggcgtgtgacaggcaatcctcgactccctgctcctaaatccgtattaagaagtcgttggcatagcgcgccttatactcgtggtagctattcctacgtcgccgtcgggtccacagggggagacctcgatctgctggcccagcctctgcctgcagatggggcaggcgcccaattgcagatcctgttcgcaggcgaagcgacccatcgcacgttctacagtaccacccacggagccttgctcagtggatggcgggaagctgatcggcttctctccttatgggccccccaggttcagcaaccgcgaccgagactgtag

SEQ ID NO: 245051 - DNA, 1392 bp, Artificial Sequence
  derived and/or modified sequence
atggagagcaccggcagcgtgggcgaggcccccggcggcccccgggttttggtagtggggggtgggattgcgggtctgggagctgcccaacgcctgtgtggacacagtgcttttcctcatctaagggtgctcgaggccacagcaagagccggagggcgaattcggtccgagcgttgttttggtggtgtggtcgaggtcggggcacattggattcatggcccctcacgcggcaaccctgtgtttcagttggctgcagagtacggtctgttaggggaaaaagagttatcccaggagaaccagctggtcgagacgggaggacatgttggcctaccgagcgtttcatacgcaagctctggcgcatccgtttctctccaactcgttgccgagatggctacgctgttctatggcctaatcgatcagaccagggaatttttgcacgccgcagaaaccccagtaccgtctgtaggagagtacctgaaaaaggaaatcggccagcacgttgctggttggactgaagatgaggagacacggaaattaaagctcgccgtcctcaattctttctttaatctcgagtgctgcgtgtctggcacacatagtatggacctcgtggcactcgccccattcggtgaatacacagtcttaccgggactcgactgtaccttcagcaaggggtatcagggcctaaccaactgtatgatggccgctctgcctgaagatacagtagttttcgaaaaacccgttaagactatccattggaatggcagttttcaggaggctgcgttccctggcgagacttttccagtatcagttgaatgcgaggacggcgatcgctttccagcccatcacgtaattgtcacagtacctttaggattcctgcgcgaacacctcgatacctctccgctggaagatgccgccccagaactgcaggacgcctggtttaggaagctcatagggtttgtggtgctgcccgcctttgcctcggtgcacgtactgtgcggttttatcgcaggtctcgagagtgaatttatggagactctgagcgatgaggaggtgctgctatgcctgacacaggttttacgaagggttacaggcaacccaagactgccagctcctaaatcagttttaaggagccgatggcacagcgcgccttatacacggggtagttatagctacgtagcggtgggcagcacggggggtgacttggacctgctggcccagccactccctgcggacggtgcaggtgcgcagctccaaatcctcttcgccggcgaagctacacataggactttttattcaacaacgcacggcgcccttttgtccggatggcgggaggctgaccgattgctaagtttgtgggcaccgcaagtgcagcagcccaggccgcgtctgtag

SEQ ID NO: 245052 - DNA, 1858 bp, Artificial Sequence
  derived and/or modified sequence
ccccctcgctccgcctccggcctcctccgagagctccagacctcccggctactcagaagccctcggactgcccggaccgcgcgatggagtcgaccggcagcgtcggggaggccccgggcggaccccgggtgctggtggtgggcggcggcatcgcggggctgggcgcggcgcagaggctctgcggccactccgccttcccgcacctgcgggtcctggaggccacggcccgcgccgggggccgcatccgctcggagcgctgcttcggtggcgtggtggaggtgggcgcgcactggatccatgggccctcccggggtaaccccgtcttccagctggctgctgagtacgggctgctgggggagaaggagctgtcccaggagaaccagctggtggagaccgggggtcacgtgggcctgccctccgtgagctacgccagctccggggccagcgtgagcctccagctggtggcggagatggcgactctgttctacggcctgatagaccagacccgggagttcctgcacgctgcagagaccccggtgcccagcgtcggggagtacctcaagaaggagattggccagcacgtggccggctggacagaggatgaggagaccaggaagctgaagctggccgtcctgaactccttcttcaacctggaatgctgtgtgagcggcacccacagcatggacctggtggccctggcaccctttggggagtataccgtgctgccggggctggactgcaccttttctaagggctatcaaggactcacaaactgcatgatggccgccctgccggaggacactgtagtttttgagaagcctgtgaagaccatccactggaacgggtccttccaggaggcagcctttcccggggagacctttccagtgtcggtagagtgtgaggatggagaccggttcccggcgcaccatgtcatcgtcaccgtgcccttaggttttcttagggaacatttggacaccttctttgaccctcccctgccggctgagaaggcagaagcaatcaggaagataggctttgggaccaacaacaaaatcttcctggagtttgaggagcccttctgggagccagactgccagctgatccagctggtgtgggaggacacgtcgcccctggaggatgctgcccctgagctacaggacgcctggttccggaagctcattggctttgtggtcctgcctgcctttgcgtctgtccacgttctctgtgggttcattgccggacttgagtctgagttcatggagactctgtcggatgaagaagtacttctgtgtctcacccaagtgctccggagagtgacaggaaacccacggctccccgcgcccaagagcgtcctgcggtctcgctggcacagcgccccgtacactagggggtcctacagctacgtggccgtgggcagtactgggggcgacctggacctgctggctcagcccctccctgcagacggcgccggcgcccagctccagatcctgtttgcgggggaagccacacatcgcacgttttactccacgacgcacggggctctgctgtcgggatggagggaggccgaccgcctcctcagtctgtgggccccgcaggtgcagcagcccaggcccaggctctagctgggcccagcctactctgttccacccgtgtcgggggtaggctgggaccctcatttcttctgacagatttcagtctggcttgaaatttggggatgttaatgagggtcctctggtttttggtaaccagggccaccttctcagttcttgtgtctgttattggagtctggccagggttgacttgagctgagacaccagatgctcacggagatgctggacacataaagcaagttacagccaca

SEQ ID NO: 245053 - DNA, 1061 bp, Artificial Sequence
  derived and/or modified sequence
ccgcgcctccccgcccctccccgcccctcccagcgcctccccgccccctcgctccgcctccggcctcctccgagagctccagacctcccggctactcagaagccctcggactgcccggaccgcgcgatggagtcgaccggcagcgtcggggaggccccgggcggaccccgggtgctggtggtgggcggcggcatcgcggggctgggcgcggcgcagaggctctgcggccactccgccttcccgcacctgcgggtcctggaggccacggcccgcgccgggggccgcatccgctcggagcgctgcttcggtggcgtggtggaggtgggcgcgcactggatccatgctgcccctgagctacaggacgcctggttccggaagctcattggctttgtggtcctgcctgcctttgcgtctgtccacgttctctgtgggttcattgccggacttgagtctgagttcatggagactctgtcggatgaagaagtacttctgtgtctcacccaagtgctccggagagtgacaggaaacccacggctccccgcgcccaagagcgtcctgcggtctcgctggcacagcgccccgtacactagggggtcctacagctacgtggccgtgggcagtactgggggcgacctggacctgctggctcagcccctccctgcagacggcgccggcgcccagctccagatcctgtttgcgggggaagccacacatcgcacgttttactccacgacgcacggggctctgctgtcgggatggagggaggccgaccgcctcctcagtctgtgggccccgcaggtgcagcagcccaggcccaggctctagctgggcccagcctactctgttccacccgtgtcgggggtaggctgggaccctcatttcttctgacagatttcagtctggcttgaaatttggggatgttaatgagggtcctctggtttttggtaaccagggccaccttctcagttcttgtgtctgttattggagtctggccagggttgacttgagctgagacaccagatgctcacggagatgctggacacataaagcaagttacagcc

SEQ ID NO: 245054 - DNA, 1411 bp, Artificial Sequence
  derived and/or modified sequence
ccgcgcctccccgcccctccccgcccctcccagcgcctccccgccccctcgctccgcctccggcctcctccgagagctccagacctcccggctactcagaagccctcggactgcccggaccgcgcgatggagtcgaccggcagcgtcggggaggccccgggcggaccccgggtgctggtggtgggcggcggcatcgcggggctgggcgcggcgcagaggctctgcggccactccgccttcccgcacctgcgggtcctggaggccacggcccgcgccgggggccgcatccgctcggagcgctgcttcggggctatcaaggactcacaaactgcatgatggccgccctgccggaggacactgtagtttttgagaagcctgtgaagaccatccactggaacgggtccttccaggaggcagcctttcccggggagacctttccagtgtcggtagagtgtgaggatggagaccggttcccggcgcaccatgtcatcgtcaccgtgcccttaggttttcttagggaacatttggacaccttctttgaccctcccctgccggctgagaaggcagaagcaatcaggaagataggctttgggaccaacaacaaaatcttcctggagtttgaggagcccttctgggagccagactgccagctgatccagctggtgtgggaggacacgtcgcccctggaggatgctgcccctgagctacaggacgcctggttccggaagctcattggctttgtggtcctgcctgcctttgcgtctgtccacgttctctgtgggttcattgccggacttgagtctgagttcatggagactctgtcggatgaagaagtacttctgtgtctcacccaagtgctccggagagtgacaggaaacccacggctccccgcgcccaagagcgtcctgcggtctcgctggcacagcgccccgtacactagggggtcctacagctacgtggccgtgggcagtactgggggcgacctggacctgctggctcagcccctccctgcagacggcgccggcgcccagctccagatcctgtttgcgggggaagccacacatcgcacgttttactccacgacgcacggggctctgctgtcgggatggagggaggccgaccgcctcctcagtctgtgggccccgcaggtgcagcagcccaggcccaggctctagctgggcccagcctactctgttccacccgtgtcgggggtaggctgggaccctcatttcttctgacagatttcagtctggcttgaaatttggggatgttaatgagggtcctctggtttttggtaaccagggccaccttctcagttcttgtgtctgttattggagtctggccagggttgacttgagctgagacaccagatgctcacggagatgctggacacataaagcaagttacagcc

SEQ ID NO: 245055 - DNA, 1754 bp, Artificial Sequence
  derived and/or modified sequence
ccgcgcctccccgcccctccccgcccctcccagcgcctccccgccccctcgctccgcctccggcctcctccgagagctccagacctcccggctactcagaagccctcggactgcccggaccgcgcgatggagtcgaccggcagcgtcggggaggccccgggcggaccccgggtgctggtggtgggcggcggcatcgcggggctgggcgcggcgcagaggctctgcggccactccgccttcccgcacctgcgggtcctggaggccacggcccgcgccgggggccgcatccgctcggagcgctgcttcggtggcgtggtggaggtgggcgcgcactggatccatgggccctcccggggtaaccccgtcttccagctggctgctgagtacgggctgctgggggagaaggagctgtcccaggagaaccagctggtggagaccgggggtcacgtgggcctgccctccgtgagctacgccagctccggggccagcgtgagcctccagctggtggcggagatggcgactctgttctacggcctgatagaccagacccgggagttcctgcacgctgcagagaccccggtgcccagcgtcggggagtacctcaagaaggagattggccagcacgtggccggctggacagaggatgaggagaccaggaagctgaagctggccgtcctgaactccttcttcaacctggaatgctgtgtgagcggcacccacagcatggacctggtggccctggcaccctttggggagtataccgtgctgccggggctggactgcaccttttctaagggctatcaaggactcacaaactgcatgatggccgccctgccggaggacactgtagtttttgagaagcctgtgaagaccatccactggaacgggtccttccaggaggcagcctttcccggggagacctttccagtgtcggtagagtgtgaggatggagaccggttcccggcgcaccatgtcatcgtcaccgtgcccttaggttttcttagggaacatttggacacgtcgcccctggaggatgctgcccctgagctacaggacgcctggttccggaagctcattggctttgtggtcctgcctgcctttgcgtctgtccacgttctctgtgggttcattgccggacttgagtctgagttcatggagactctgtcggatgaagaagtacttctgtgtctcacccaagtgctccggagagtgacaggaaacccacggctccccgcgcccaagagcgtcctgcggtctcgctggcacagcgccccgtacactagggggtcctacagctacgtggccgtgggcagtactgggggcgacctggacctgctggctcagcccctccctgcagacggcgccggcgcccagctccagatcctgtttgcgggggaagccacacatcgcacgttttactccacgacgcacggggctctgctgtcgggatggagggaggccgaccgcctcctcagtctgtgggccccgcaggtgcagcagcccaggcccaggctctagctgggcccagcctactctgttccacccgtgtcgggggtaggctgggaccctcatttcttctgacagatttcagtctggcttgaaatttggggatgttaatgagggtcctctggtttttggtaaccagggccaccttctcagttcttgtgtctgttattggagtctggccagggttgacttgagctgagacaccagatgctcacggagatgctggacacataaagcaagttacagcc

SEQ ID NO: 245056 - DNA, 448 bp, Artificial Sequence
  derived and/or modified sequence
atggagtcgaccggcagcgtcggggaggccccgggcggaccccgggtgctggtggtgggcggcggcatctccagatcctgtttgcgggggaagccacacatcgcacgttttactccacgacgcacggggctctgctgtcgggatggagggaggccgaccgcctcctcagtctgtgggccccgcaggtgcagcagcccaggcccaggctctagctgggcccagcctactctgttccacccgtgtcgggggtaggctgggaccctcatttcttctgacagatttcagtctggcttgaaatttggggatgttaatgagggtcctctggtttttggtaaccagggccaccttctcagttcttgtgtctgttattggagtctggccagggttgacttgagctgagacaccagatgctcacggagatgctggacacataaagcaagttacagcc

SEQ ID NO: 245057 - DNA, 773 bp, Artificial Sequence
  derived and/or modified sequence
atggagtcgaccggcagcgtcggggaggccccgggcggacgccacggcccgcgccgggggccgcatccgctcggagcgctgcttcggtggcgtggtggaggtgggcgcgcactggatccatgctgcccctgagctacaggacgcctggttccggaagctcattggctttgtggtcctgcctgcctttgcgtctgtccacgttctctgtgggttcattgccggacttgagtctgagttcatggagactctgtcggatgaagaagtacttctgtgtctcacccaagtgctccggagagtgacaggaaacccacggctccccgcgcccaagagcgtcctgcggtctcgctggcacagcgccccgtacactagggggtcctacagctacgtggccgtgggcagtactgggggcgacctggacctgctggctcagcccctccctgcagacggcgccggcgcccagctccagatcctgtttgcgggggaagccacacatcgcacgttttactccacgacgcacggggctctgctgtcgggatggagggaggccgaccgcctcctcagtctgtgggccccgcaggtgcagcagcccaggcccaggctctagctgggcccagcctactctgttccacccgtgtcgggggtaggctgggaccctcatttcttctgacagatttcagtctggcttgaaatttggggatgttaatgagggtcctctggtttttggtaaccagggccaccttctcagttcttgtgtctgttattggagtctggcc

SEQ ID NO: 245058 - DNA, 1536 bp, Artificial Sequence
  derived and/or modified sequence
atggagagtacagggagcgtgggggaagctccgggaggacccagggtccttgtggtcggagggggtattgctggccttggggcagcacagcgcctgtgtggacattccgcatttcctcaccttcgggtgctcgaggccaccgctagggcgggtgggcgtatccggtctgaacgatgctttggtggcgttgtcgaggtaggcgctcattggatccatggaccgagccgaggcaaccctgtattccagcttgcggcagagtatggtctgctcggggaaaaagagctcagtcaggaaaaccagttggtggaaactggtggccacgtgggcctaccatccgtctcttacgcgagctccggagcttctgtctctctccagcttgtggccgagatggccaccctgttttatgggctaatcgaccaaacccgagagtttctgcatgccgctgagactcccgttccctcggtcggagaatacctgaagaaggagattgggcaacatgtggctggttggacggaggatgaagagacgaggaaactcaagcttgccgtgctcaattccttctttaacctcgaatgctgcgtgagcggcacccattcaatggatctagtggccctggctccatttggtgaatacaccgtgctgcctggcttagattgtacctttagcaagggctatcagggccttactaactgtatgatggccgcacttccagaagacactgtcgtgtttgaaaaaccagtgaagactatccactggaatggctctttccaggaagcagcattccctggcgaaacttttcccgtatccgtggaatgcgaagacggagataggttccccgctcatcacgtcatcgtgaccgtcccactcggatttttgagggaacacttggataccttttttgacccaccactgccagccgagaaggccgaggctatccgcaaaatcgggtttgggacaaacaataaaatatttttggaattcgaggagccattttgggagccagactgtcagttgattcagcttgtatgggaagacacttcccccttagaggatgcggcaccagagctgcaggacgcctggttccggaagctgattggctttgtagtgcttcccgctttcgcttcagtacatgtgctatgcggcttcattgcagggctcgagtccgaattcatggagactctgtccgacgaagaagtcctgctgtgcctgacccaggtgctgcgtcgtgtgactggtaacccacgtctgcctgcgccaaaatccgtattacgcagcaggtggcacagtgctccttatacacgcggatcctattcttatgtggccgtgggctctaccggaggggacctggatttgctcgcacagccccttcctgcagacggggctggtgctcaactacagatcctgttcgccggtgaggccacacaccgtacattctattctactacccacggggctttattgagcgggtggagagaggctgacagactcctctcgctgtgggcaccccaagtccagcagcccagacctcgtctttag

SEQ ID NO: 245059 - DNA, 699 bp, Artificial Sequence
  derived and/or modified sequence
atggagagcacgggaagcgtcggggaggcacccggtgggcctcgggtcctggtggtcggcggtggaatcgcagggctgggcgcagctcagagactgtgcggccactcagcgttcccgcatctaagggtgctggaggccaccgctagagctgggggaaggattcgctcagaacgctgttttgggggtgtcgtagaggttggtgcacattggatccacgcagcaccggaactccaggacgcctggtttcgcaagctcatcggctttgttgtcctccccgcattcgctagcgtgcatgttttgtgcggcttcatagctggcctagaatccgaattcatggagaccttgtcagacgaagaggtcttgctgtgtctgacccaggtcctcagacgtgttaccggtaacccccgactgccggctcccaaaagtgtgctaagaagtaggtggcattcagctccctacactaggggatcctactcctatgtggcagtgggcagtacaggtggggacctcgatctcctggctcagcccctgcccgctgatggagcaggtgcccaactacaaattttgtttgccggagaggctacccaccgcacgttttactcgacgacccatggcgctctgctcagcgggtggagagaggctgaccgcctgttatctctgtgggctccccaggttcagcagcccagaccaagactttag

SEQ ID NO: 245060 - DNA, 1392 bp, Artificial Sequence
  derived and/or modified sequence
atggagtcaaccggaagcgtaggcgaggctccaggtggccctcgagtgctggttgtcggaggtggaatagctggattgggcgcagcccagaggctctgcggacacagcgcgtttccccatctgcgcgtgttggaggcaactgctagggccggtggcagaatccgatctgagcgctgtttcgggggagtagtggaagtcggtgctcactggattcacggacctagccgtggcaacccagtttttcagcttgcagccgaatacggactgctgggggaaaaagagttgtcacaggaaaaccagcttgtggaaactgggggtcacgtcgggctcccgtcggtgagttacgcctctagcggtgctagcgttagtttgcagctggtggctgagatggccacactgttctacgggctgattgaccaaactcgcgagtttctgcacgcggcagaaacacccgtgccaagcgttggggaatatttgaagaaagaaatagggcagcacgttgcaggctggacagaagatgaggagaccaggaaactgaagcttgctgtcctgaactcattcttcaacctcgagtgctgcgttagtggaactcattcaatggacctagttgccctggcccctttcggagagtacaccgttttacctgggttggattgcacgttttccaaaggctaccaggggctgaccaactgtatgatggcagcacttcctgaggacacagtcgtcttcgagaaacccgtcaagactatccattggaacgggtcatttcaggaagccgcatttcccggtgagacgttccctgtctctgtcgagtgcgaagacggagacagatttccagcccaccacgtgatcgttacagtgccgctagggttcctgcgcgagcatctggacacttcaccactggaggatgccgcaccagaactgcaggacgcctggttcagaaagctgattggtttcgtggttctacccgcttttgcttctgttcatgtactgtgcggcttcattgccggactggaatcagagttcatggagacactttccgatgaagaagtcctcctttgtttgacgcaggtgctccgaagagtgactggaaacccgcgactccccgctcccaagtccgtgttgagatctagatggcattccgctccatacaccagaggtagctacagttacgtcgccgtgggatcgactgggggagatcttgaccttctcgcgcaacctctgccggctgacggagccggagctcagcttcagattctctttgctggggaagcgacacacagaaccttttactcaacaacccacggcgctctgttgagtggctggcgcgaggccgacaggctgctgtccctctgggcacctcaggtgcaacagcctcgccctcgactgtag

SEQ ID NO: 245061 - protein, 537 aa, Artificial Sequence
  derived and/or modified sequence
MAHCVTLVQLSISCDHLIDKDIGSKSDPLCVLLQDVGGGSWAELGRTERVRNCSSPEFSKTLQLEYRFETVQKLRFGIYDIDNKTPELRDDDFLGGAECSLGQIVSSQVLTLPLMLKPGKPAGRGTITVSAQELKDNRVVTMEVEARNLDKKDFLGKSDPFLEFFRQGDGKWHLVYRSEVIKNNLNPTWKRFSVPVQHFCGGNPSTPIQVQCSDYDSDGSHDLIGTFHTSLAQLQAVPAEFECIHPEKQQKKKSYKNSGTIRVKICRVETEYSFLDYVMGGCQINFTVGVDFTGSNGDPSSPDSLHYLSPTGVNEYLMALWSVGSVVQDYDSDKLFPAFGFGAQVPPDWQVSHEFALNFNPSNPYCAGIQGIVDAYRQALPQVRLYGPTNFAPIINHVARFAAQAAHQGTASQYFMLLLLTDGAVTDVEATREAVVRASNLPMSVIIVGVGGADFEAMEQLDADGGPLHTRSGQAAARDIVQFVPYRRFQNAPREALAQTVLAEVPTQLVSYFRAQGWAPLKPLPPSAKDPAQAPQA

SEQ ID NO: 245062 - protein, 304 aa, Artificial Sequence
  derived and/or modified sequence
MAHCVTLVQLSISCDHLIDKDIGSKSDPLCVLLQDVGGGSWAELGRTERVRNCSSPEFSKTLQLEYRFETVQKLRFGIYDIDNKTPELRDDDFLGGAECSLGQIVSSQVLTLPLMLKPGKPAGRGTITVSAQELKDNRVVTMEVEARNLDKKDFLGKSDPFLEFFRQGDGKWHLVYRSEVIKNNLNPTWKRFSVPVQHFCGGNPSTPIQVQCSDYDSDGSHDLIGTFHTSLAQLQAVPAEFECIHPEKQQKKKSYKNSGTIRVKICRVETEYSFLDYVMGGCQINFTVGVDFTGSNGDPSSPDS

SEQ ID NO: 245063 - protein, 152 aa, Artificial Sequence
  derived and/or modified sequence
MAHCVTLVQLSISCDHLIDKDIGSKSDPLCVLLQDVGGGSWAELGRTERVRNCSSPEFSKTLQLEYRFETVQKLRFGIYDIDNKTPELRDDDFLGGAECSLGQIVSSQVLTLPLMLKPGKPAGRGTITVSAQELKDNRVVTMEVEARNLDKK

SEQ ID NO: 245064 - protein, 358 aa, Artificial Sequence
  derived and/or modified sequence
MDAKSLTAWSRTLVTFKDVFVDFTREEWKLLDTAQQIVYRNVMLENYKNLVSLGYQLTKPDVILRLEKGEEPWLVEREIHQETHPDSETAFEIKSSVSSRSIFKDKQSCDIKMEGMARNDLWYLSLEEVWKCRDQLDKYQENPERHLSIPRVLSLPARHTKLTVGMATRVRTASIWVPPLQERNSSWDRIRKLQGQESILGQGTPGLQPLPGTPRQKQKSRRIEKVLEWLFISQEQPKITKSWGPLSFMDVFVDFTWEEWQLLDPAQKCLYRSVMLENYSNLVSLGYQHTKPDIIFKLEQGEELCMVQAQVPNQTCPILKAGKSKAKVLAGLVSGEGLLCASKMTPCCCILWRHSLEN

SEQ ID NO: 245065 - DNA, 1077 bp, Artificial Sequence
  derived and/or modified sequence
atggacgccaagagcctgaccgcctggagcagaaccctggtgaccttcaaggacgtgttcgtggacttcaccagagaggagtggaagctgctggacaccgcccagcagatcgtgtacagaaacgtgatgctggagaactacaagaacctggtgagcctgggctaccagctgaccaagcccgacgtgatcctgagactggagaagggcgaggagccctggctggtggagagagagatccaccaggagacccaccccgacagcgagaccgccttcgagatcaagagcagcgtgagcagcagaagcatcttcaaggacaagcagagctgcgacatcaagatggagggcatggccagaaacgacctgtggtacctgagcctggaggaggtgtggaagtgcagagaccagctggacaagtaccaggagaaccccgagagacacctgagcatccccagagtgctgagcctgcccgccagacacaccaagctgaccgtgggcatggccaccagagtgagaaccgccagcatctgggtgccccccctgcaggagagaaacagcagctgggacagaatcagaaagctgcagggccaggagagcatcctgggccagggcacccccggcctgcagcccctgcccggcacccccagacagaagcagaagagcagaagaatcgagaaggtgctggagtggctgttcatcagccaggagcagcccaagatcaccaagagctggggccccctgagcttcatggacgtgttcgtggacttcacctgggaggagtggcagctgctggaccccgcccagaagtgcctgtacagaagcgtgatgctggagaactacagcaacctggtgagcctgggctaccagcacaccaagcccgacatcatcttcaagctggagcagggcgaggagctgtgcatggtgcaggcccaggtgcccaaccagacctgccccatcctgaaggccggcaagagcaaggccaaggtgctggccggcctggtgagcggcgagggcctgctgtgcgccagcaagatgaccccctgctgctgcatcctgtggagacacagcctggagaactag

SEQ ID NO: 245066 - DNA, 1077 bp, Artificial Sequence
  derived and/or modified sequence
atggacgcaaagagcttgactgcttggtctaggaccctggttacgttcaaggacgtattcgtggacttcacccgcgaagagtggaagttgctcgatactgctcagcaaattgtgtatagaaacgtgatgctggaaaactacaagaacctggtatctctcgggtaccagctgaccaagcctgacgtgattcttagactggagaaaggggaggaaccctggctggtagagcgagagattcatcaggagacacatccagacagtgagaccgcattcgaaattaaaagttcagttagctcccgatcgatcttcaaagacaagcagagttgtgatatcaagatggaggggatggcgcgcaacgatttgtggtatctttctcttgaagaggtctggaagtgtcgggaccaactcgataagtatcaagagaatcctgaacgccacctgagcattccgcgggtactttcccttccagccagacatacgaaactaaccgtgggcatggccacaagagtgaggaccgcaagtatttgggtgcctccactccaagagaggaacagcagttgggaccgtattcggaaattgcagggtcaggaatcaatcctcgggcaggggacacctggcctccagcccttacccgggacgccacgtcaaaaacagaaaagtaggaggatagaaaaggtgctggaatggctctttataagccaagagcagccaaaaattactaagtcctggggaccgctctcgttcatggatgtattcgtggacttcacctgggaggagtggcagctgctggacccagcacaaaaatgcctgtatcggtcagtaatgctagagaattattccaatctcgtctccttaggttaccagcacaccaagcccgatattattttcaagttggagcagggggaggagctgtgcatggtacaggcacaggtgccaaatcagacgtgcccaatactcaaagccggtaagtctaaggccaaggttttagctggcttagtcagtggggaaggcctgctttgcgcttcaaagatgactccgtgctgttgtattctctggcgccattccttggagaattag

SEQ ID NO: 245067 - DNA, 1077 bp, Artificial Sequence
  derived and/or modified sequence
atggatgccaagagcctgacagcctggagcaggaccctggtgaccttcaaggatgtgtttgtggacttcacccgggaggagtggaagctgctggacacagcccagcagatcgtgtacagaaatgtgatgctggagaactacaagaacctggtgtccctgggctaccagctgaccaagccagatgtgatcctgcggctggagaagggggaggagccctggctggtggagcgggagatccaccaggagacccacccagattctgaaacagcctttgagatcaagagctctgtgagcagccgcagcatcttcaaggacaagcagagctgtgacatcaagatggagggcatggccagaaatgacctgtggtacctgagcctggaggaggtgtggaagtgccgggaccagctggacaagtaccaggagaaccctgagcggcacctgagcatcccccgggtgctgagcctgcctgcccggcacaccaagctgactgtgggcatggccaccagggtgaggacagccagcatctgggtgccccccctgcaggagaggaacagctcctgggaccgcatcaggaagctgcagggccaggagagcatcctgggccagggcaccccaggcctgcagcccctgcccggcaccccccggcagaagcagaagagcagaagaattgagaaggtgctggagtggctgttcatcagccaggagcagcccaagatcaccaagtcctggggccccctgtccttcatggatgtgtttgtggacttcacctgggaggagtggcagctgctggaccctgcccagaagtgcctgtacagatctgtgatgctggagaactacagcaacctggtgtccctgggctaccagcacaccaagccagacatcatcttcaagctggagcagggcgaggagctgtgcatggtgcaggcccaggtgcccaaccagacctgccccatcctgaaggccggcaagagcaaggccaaggtgctggccggcctggtgtctggagagggcctgctgtgtgccagcaagatgaccccctgctgctgcatcctgtggaggcacagcctggagaactag

SEQ ID NO: 245068 - DNA, 1077 bp, Artificial Sequence
  derived and/or modified sequence
atggacgccaagagcctgaccgcctggagccggaccctggtgaccttcaaggacgtattcgtcgattttacccgcgaggaatggaaactcctggatacagcgcagcagatcgtatatcgcaatgtcatgctggagaactataaaaatcttgtgtcccttgggtatcaactgacgaagcctgatgtgatcctccgcctagagaagggggaggaaccctggctggtagaacgggagatacaccaggagacacatcccgactccgagacagcctttgagataaaatccagcgtcagcagtagaagcatcttcaaggacaagcaatcttgcgacattaaaatggagggcatggccaggaatgatctgtggtacctttccctcgaggaggtgtggaaatgccgggaccagctggataaataccaagagaaccccgagaggcatttgagcattccccgagtgctgagtctcccagcacgccacactaagctcaccgtgggtatggctactcgcgtacgaaccgcttccatctgggttcctcccctccaggaaaggaatagcagctgggacaggatccggaagcttcaggggcaggaaagtattttaggacagggaaccccagggctccagcccctgcctgggacgcccagacagaaacaaaaatctcgcagaattgagaaggtgctggagtggcttttcatctcccaggaacagcctaaaataactaagagttggggaccactgtctttcatggatgtcttcgtcgatttcacatgggaggaatggcagctgctggatcctgcacagaagtgcctctaccgatcggtgatgctggaaaactattctaacctggtctcactgggctaccaacacacaaagcccgacattatttttaagctggagcagggagaagagctgtgcatggtgcaagcccaggtacctaaccagacttgccccatccttaaggccggcaagtctaaggctaaggtgctggcgggtctggtgagtggggagggcctgctttgcgcaagcaagatgactccttgctgttgcatcttgtggcgccactcacttgagaactag

SEQ ID NO: 245069 - DNA, 1077 bp, Artificial Sequence
  derived and/or modified sequence
atggacgccaagtcactgacagcctggagccggactctggttaccttcaaagatgtattcgtagacttcacaagggaggagtggaaactccttgacaccgctcagcagattgtgtataggaacgtgatgttggagaactacaagaacctcgtgagccttggttatcagctgactaagccagatgtcatcctgcggctcgaaaaaggagaggagccatggcttgtggagcgggaaattcaccaggaaactcatcccgactcagagaccgcattcgaaatcaaatcatctgtttctagcaggagcatctttaaggacaagcagagctgcgatattaagatggaaggaatggcaaggaatgatctgtggtacctgtcactggaggaagtctggaaatgtcgggaccaactggacaagtatcaggagaatcccgagcgacacttgtccattccgcgagttctatctctgccagccagacacacaaaacttaccgtggggatggccacaagagtacgtactgcctccatttgggttccaccactgcaggaaagaaatagcagttgggaccgcataaggaaactgcaggggcaggaatcaattctaggacagggaacgccagggctgcaaccactgccaggtacgccaaggcagaaacagaaatctaggcggattgaaaaagtcttggaatggctgttcatcagccaggagcagcccaagatcactaaatcatggggaccgctgtctttcatggacgtgttcgtggacttcacctgggaagaatggcagctgcttgaccctgctcaaaagtgcctgtaccgatctgttatgcttgagaactactcaaacctggttagcctcggttaccaacatactaaacccgatatcatttttaagcttgagcaaggggaagaactgtgcatggtacaggcacaggtccccaatcagacgtgcccaatactaaaggctggaaaatccaaggcaaaggtactggctggactcgtctccggtgaggggctactttgcgcatctaagatgactccttgttgctgcattctctggcggcattctcttgaaaattag

SEQ ID NO: 245070 - DNA, 1374 bp, Artificial Sequence
  derived and/or modified sequence
ggagattgacgcagagtgggcggcggtggtgctttgtctcctcagcactctgctgtcactcaaggaagtatcatcaagaacaaggagggcatggatgctaagtcactaactgcctggtcccggacactggtgaccttcaaggatgtatttgtggacttcaccagggaggagtggaagctgctggacactgctcagcagatcgtgtacagaaatgtgatgctggagaactataagaacctggtttccttgggttatcagcttactaagccagatgtgatcctccggttggagaagggagaagagccctggctggtggagagagaaattcaccaagagacccatcctgattcagagactgcatttgaaatcaaatcatcagtttccagcaggagcatttttaaagataagcaatcctgtgacattaaaatggaaggaatggcaaggaatgatctctggtatttgtcattagaagaagtctggaaatgtagagaccagttagacaagtatcaggaaaacccagagagacatttgagcatccctcgcgtcctgtcacttccagcgaggcacacaaaactgaccgtagggatggccaccagggtccggacagcttctatttgggtcccacctctccaagaacgaaacagttcatgggataggatcagaaagctccaaggtcaggaatccatcttgggccaagggactcctggtctgcaacctctccctggaacacccaggcagaagcagaagagtcgcagaatagagaaagtcctagagtggctgtttatttcccaagagcagccaaaaatcaccaagtcctggggacctttgtcattcatggatgtgtttgtggattttacctgggaggagtggcagctgctagacccagcacagaagtgcctgtacaggagtgtgatgttggagaactatagcaacctggtgtccctagggtaccaacacaccaaacctgatatcatcttcaagttggaacaaggagaagagctgtgtatggtgcaggcccaagttccaaatcagacctgtccaattttgaaggctggaaagtccaaagccaaggtgctggcaggtttggtgtctggtgagggcctgctctgtgcttccaagatgacgccttgttgctgcatcctctggagacacagtctggaaaattgatgatcttatggattggcatcaggaaaataaagacaagctgggaagtacggcaaaaagctttgaatgcactacatttggaaaactatgtcttcttagtacaaagtatctttcaagacaaaaacctcataaatgtggcacgcatggaaagagtttgaaatatatagatttcactagtgattatgctagaaataatcctaatgggtttca

SEQ ID NO: 245071 - protein, 474 aa, Artificial Sequence
  derived and/or modified sequence
MDEAGSSASGGGFRPGVDSLDEPPNSRIFLVISKYTPESVLRERFSPFGDIQDIWVVRDKHTKESKGIAFVKFARSSQACRAMEEMHGQCLGPNDTKPIKVFIAQSRSSGSHRDVEDEELTRIFVMIPKSYTEEDLREKFKVYGDIEYCSIIKNKVTGESKGLGYVRYLKPSQAAQAIENCDRSFRAILAEPKNKASESSEQDYYSNMRQEALGHEPRVNMFPFEQQSEFSSFDKNDSRGQEAISKRLSVVSRVPFTEEQLFSIFDIVPGLEYCEVQRDPYSNYGHGVVQYFNVASAIYAKYKLHGFQYPPGNRIGVSFIDDGSNATDLLRKMATQMVAAQLASMVWNNPSQQQFMQFGGSSGSQLPQIQTDVVLPSCKKKAPAETPVKERLFIVFNPHPLPLDVLEDIFCRFGNLIEVYLVSGKNVGYAKYADRISANDAIATLHGKILNGVRLKVMLADSPREESNKRQRTY

SEQ ID NO: 245072 - protein, 135 aa, Artificial Sequence
  derived and/or modified sequence
  misc_feature (1)..(1): Xaa can be any naturally occurring amino acid
XQLASMVWNNPSQQQFMQFGGSSGSQLPQIQTDVVLPSCKKKAPAETPVKERLFIVFNPHPLPLDVLEDIFCRFGNLIEVYLVSGKNVGYAKYADRISANDAIATLHGKILNGVRLKVMLADSPREESNKRQRTY

SEQ ID NO: 245073 - DNA, 1785 bp, Artificial Sequence
  derived and/or modified sequence
cgagccggcaaaggcttgggtgtgagacagcagcggtggcagacaccgcagaagcaaagagcagtgaggctcctgcattcgggtggagcaccatggacgaagctggcagctctgcgagcggcgggggcttccgcccgggcgtggacagcctggacgaaccgcccaacagccgcatcttccttgtgatcagcaagtacacacctgagtcggtgctgagggagcgcttctcgccttttggcgacatccaggacatctgggtggtgcgggacaagcacaccaaggagtccaagggcattgctttcgtcaagttcgcccgcagctcacaggcctgcagggccatggaggagatgcatggccagtgcctcggccccaacgacaccaagcccatcaaggttttcattgctcagtcccgatcatctggaagtcaccgagatgttgaagatgaagaacttacaagaatctttgttatgataccaaagtcctacacagaagaagatctgcgggaaaaatttaaggtgtatggagatatcgagtattgcagcattattaagaataaagtgactggagaaagtaaaggtttgggctacgtacgatacttaaaaccatcacaagctgcccaagcaatagaaaactgtgatcgaagttttagagcaatcttggctgaacctaaaaataaagcatctgaatcctctgaacaagattattatagtaatatgaggcaagaagctttgggacatgaacctagagtaaatatgtttccatttgaacaacaatctgaattttcaagttttgacaagaatgatagccgaggccaggaagcaatctccaaacgcttgtcagttgtatcaagagttcctttcactgaagaacagcttttcagcatttttgatatagtaccaggattggaatattgtgaagttcaacgagatccttattcaaattatggtcatggagtggttcagtattttaatgtagcatcagctatttatgcaaaatacaaattacatggatttcagtaccctcctgggaaccgaataggtgtttccttcattgatgatggaagtaatgcaacagatctccttagaaaaatggcaacacagatggtagctgcacagcttgcatcaatggtgtggaataacccaagtcagcaacaatttatgcaatttggaggaagctctggatcacagttgcctcaaatccagacagatgttgtacttccatcatgcaaaaaaaaagctcctgctgaaactcctgtgaaagaaagactttttattgtgtttaatcctcatcctttacctttagacgtattagaagatatattctgtcgttttggtaacctgatcgaagtttaccttgtgtcaggaaaaaatgtggggtatgccaagtatgccgatagaataagtgctaatgatgccattgccactctacatggaaagattctgaatggggtgagacttaaagttatgctggcagattcgccaagagaagaatctaacaaacggcaaagaacttactgattcttgagaacaaagactaaataatgacataatcctcagctgactgactgaaaatgtgactggacgcattccctgtggacagttgacagctttttttttttccatatacctgatagtctgtgtacagcattgttttgtctgggaagcagggattgctgacatgtatttttgaatccatacattaatgctaaaacgaatatagtagttgttccttagagcaatatgttgttacgtgtagcagaaataaagttttctttgcttaactaaa

SEQ ID NO: 245074 - DNA, 757 bp, Artificial Sequence
  derived and/or modified sequence
cacagcttgcatcaatggtgtggaataacccaagtcagcaacaatttatgcaatttggaggaagctctggatcacagttgcctcaaatccagacagatgttgtacttccatcatgcaaaaaaaaagctcctgctgaaactcctgtgaaagaaagactttttattgtgtttaatcctcatcctttacctttagacgtattagaagatatattctgtcgttttggtaacctgatcgaagtttaccttgtgtcaggaaaaaatgtggggtatgccaagtatgccgatagaataagtgctaatgatgccattgccactctacatggaaagattctgaatggggtgagacttaaagttatgctggcagattcgccaagagaagaatctaacaaacggcaaagaacttactgattcttgagtggccctgaagctgcactatgttggaggtttccttgactaagagaaccacatgcggcattcagctcagtaggggagtcataaaagatctcgcctctgaccagaagagtatgaatgacaaaggtgacataaccagcacagaaagatgtcttagcctctgcacatcagctgatttagaatacttatgtagatagcggttggggtcgggggggtgcggaatgttcttttcagcttctttgccctgagaactttgatcttattgcaaggaagtcccttaccctcttctaccctagatctgatggacctcctgggatttcctggggaaatgaaatgagtctaacacc

SEQ ID NO: 245075 - DNA, 408 bp, Artificial Sequence
  derived and/or modified sequence
tgacagctggccagcatggtgtggaacaaccccagccagcagcagttcatgcagttcggcggcagcagcggcagccagctgccccagatccagaccgacgtggtgctgcccagctgcaagaagaaggcccccgccgagacccccgtgaaggagagactgttcatcgtgttcaacccccaccccctgcccctggacgtgctggaggacatcttctgcagattcggcaacctgatcgaggtgtacctggtgagcggcaagaacgtgggctacgccaagtacgccgacagaatcagcgccaacgacgccatcgccaccctgcacggcaagatcctgaacggcgtgagactgaaggtgatgctggccgacagccccagagaggagagcaacaagagacagagaacctactag

SEQ ID NO: 245076 - DNA, 1425 bp, Artificial Sequence
  derived and/or modified sequence
atggacgaggcagggtcctcggctagcggcgggggcttccggccaggagtcgatagtcttgacgagccacctaactcacgtatttttttagtgatctcaaaatacactcctgagtccgtgctgagagagaggttcagccctttcggcgacatccaggacatctgggtagtgagagataaacatacaaaagagagtaagggtattgcatttgtgaagttcgcccgctcctcacaagcatgtcgtgcaatggaggaaatgcacggccagtgcttggggcctaacgacaccaagcccatcaaagttttcattgcgcaatcccgctcttctgggagccatagggatgtcgaagacgaggagctgacacgtatattcgttatgattccgaaatcctacactgaggaggaccttagagagaagtttaaggtctacggcgatattgagtattgtagcatcatcaaaaacaaggtaacgggggagagtaagggactgggctacgtgcgctacctgaaaccctctcaggctgctcaggccatagaaaactgtgaccgttccttccgggccatcctggccgaaccaaaaaacaaggcatcggagtccagcgagcaggactactacagtaacatgagacaggaggcactgggccatgaaccccgagttaatatgtttcctttcgagcagcagtctgagtttagctccttcgataaaaatgacagcagaggccaggaggcaatcagcaagcgcctgtcagtggtgtctagagtcccgttcacagaggagcagctctttagcatcttcgatatcgtgcccggactcgagtattgtgaggtgcagcgcgatccgtattcaaactacggtcatggagtcgtgcagtacttcaacgtggcgagtgcaatctacgctaaatacaaactccatggcttccagtatcctcctgggaaccggatcggcgtctcttttatcgacgacggatccaacgcgactgatctgctcaggaagatggccactcagatggtggccgcccagttagcctctatggtctggaacaatccgagccaacagcagttcatgcaattcgggggatcttctggttcccaactgccacagattcagaccgacgttgtgttgccgtcatgtaagaagaaggccccagccgagacaccagtcaaagagaggctcttcatcgttttcaatccccatcccctaccgttggacgtgcttgaggatattttctgtaggtttggtaatctgatcgaggtctacctggtttccggtaagaacgtgggttatgctaagtatgccgaccggatcagcgcgaacgatgccattgccacactccacgggaagattttaaatggcgtgcggctcaaagtaatgttggctgatagccctcgcgaggaatctaacaagcgccagcggacttactag

SEQ ID NO: 245077 - DNA, 408 bp, Artificial Sequence
  derived and/or modified sequence
tagcagctggcaagcatggtatggaataacccaagtcagcagcaatttatgcagttcggcgggagcagtggctcacaactgccccagatccagactgatgtggtgctccctagttgtaagaaaaaagcccctgccgaaactccagtgaaggagcggctcttcattgtctttaacccccaccctctgccccttgatgtcttggaggatatcttttgtaggttcgggaatctcatcgaagtgtacctcgtctcgggtaagaatgtcggctatgcaaaatacgctgacaggatcagcgctaatgacgcgatcgctacactccatggtaagatactgaatggcgtcagattaaaggtgatgctggcagactcccctcgggaagagagcaacaaaaggcagaggacatattag

SEQ ID NO: 245078 - DNA, 1425 bp, Artificial Sequence
  derived and/or modified sequence
atggatgaggccggcagcagcgccagcggcggcggcttccggcctggggtggacagcctggatgagccccccaacagccgcatcttcctggtgatcagcaagtacaccccagagagcgtgctgcgggagcgcttcagcccctttggagacatccaggacatctgggtggtgcgggacaagcacaccaaggagagcaagggcatcgcctttgtgaagtttgcccggagcagccaggcctgccgggccatggaggagatgcacggccagtgcctgggccccaatgacaccaagcccatcaaggtgttcatcgcccagagccgcagcagcggcagccacagagatgtggaggatgaggagctgacccgcatctttgtgatgatccccaagagctacacagaggaggacctgcgggagaagttcaaggtgtatggagacatcgagtactgcagcatcatcaagaacaaggtgactggagagagcaagggcctgggctacgtgcgctacctgaagcccagccaggccgcccaggccatcgagaactgtgacaggagcttccgggccatcctggccgagcccaagaacaaggccagcgagagcagcgagcaggactactacagcaacatgaggcaggaggccctgggccacgagccccgggtgaacatgttcccctttgagcagcagagcgagttcagcagctttgacaagaatgacagccggggccaggaggccatcagcaagaggctgtctgtggtgtcccgggtgcccttcacagaggagcagctgttcagcatctttgatattgtgcccggcctggagtactgtgaggtgcagagggacccctacagcaactacggccacggcgtggtgcagtacttcaacgtggccagcgccatctatgccaagtacaagctgcacggcttccagtacccacctggcaacagaattggagtgtccttcattgatgatggcagcaatgccacagacctgctgaggaagatggccacccagatggtggccgcccagctggcctccatggtgtggaacaaccccagccagcagcagttcatgcagtttggaggcagcagcggcagccagctgccccagatccagacagatgtggtgctgcccagctgcaagaagaaggccccagctgagacccctgtgaaggagcggctcttcatcgtgttcaacccccaccccctgcccctggatgtgctggaggacatcttctgccgctttggaaacctgattgaggtgtacctggtgtctgggaagaatgtgggctacgccaagtatgctgaccgcatcagcgccaatgatgccatcgccaccctgcacggcaagatcctgaatggagtgcggctgaaggtgatgctggccgacagcccccgggaggagagcaacaagaggcagaggacctactag

SEQ ID NO: 245079 - DNA, 408 bp, Artificial Sequence
  derived and/or modified sequence
tgacagctggcctccatggtgtggaacaaccccagccagcagcagttcatgcagtttggaggcagcagcggcagccagctgccccagatccagacagatgtggtgctgcccagctgcaagaagaaggccccagctgagacccctgtgaaggagcggctcttcatcgtgttcaacccccaccccctgcccctggatgtgctggaggacatcttctgccgcttcggcaacctgattgaggtgtacctggtgtctgggaagaatgtgggctacgccaagtatgctgaccgcatcagcgccaatgatgccatcgccaccctgcacggcaagatcctgaatggagtgcggctgaaggtgatgctggccgacagcccccgggaggagagcaacaagaggcagaggacctactag

SEQ ID NO: 245080 - DNA, 1425 bp, Artificial Sequence
  derived and/or modified sequence
atggacgaggccggcagcagcgccagcggcggcggcttccggcccggggtggattccttggatgaaccccctaactctagaatcttcttagtgatatcaaagtacacccctgaaagtgtacttcgcgaacggttcagtcctttcggtgatatccaagatatctgggtggtgagagacaagcatactaaggagagcaagggcattgcttttgtgaagtttgcccgctcttcccaggcttgccgcgccatggaagagatgcatggtcagtgccttggccctaatgacaccaaacctatcaaggtctttattgcacagtctcggagctctggttctcatcgagatgtagaagatgaagagctgaccaggatctttgtgatgatccccaaatcatataccgaggaggacctgcgggaaaaatttaaagtttacggcgacatcgagtactgctccattatcaagaataaagtgaccggcgagagcaagggcttaggctacgtcaggtaccttaaacccagccaggcggcccaggcaatcgaaaactgcgatcgatcgttcagagccatcctggcagagcccaaaaataaagccagcgaatctagcgagcaagattactactctaatatgcggcaagaagctctgggacacgagccacgcgttaatatgttcccgtttgagcaacagtctgagttttcttcttttgacaaaaacgactcccgtggccaagaggctatctccaagcgattatctgttgtttctcgtgtacccttcaccgaggagcagcttttttctatttttgatatcgtgcccggcctcgaatactgcgaggtacagcgagatccttactcaaactatggccacggcgtggtgcagtattttaacgttgcaagcgctatctacgctaagtacaaattacatggctttcagtaccctcccggcaatcggataggcgttagcttcatcgacgacggaagcaatgccaccgatcttctccgaaaaatggcaacccagatggtcgccgcgcaattagcaagcatggtctggaataatccatcccagcagcaatttatgcaattcggcggttcatccgggagccagttacctcagatacagacagatgttgtgctgccttcctgtaagaagaaagcgccggccgaaacgccagtgaaagagaggctattcatcgtcttcaacccacatccgctgccgctggacgtactagaagacatcttctgccgattcggtaatctcatcgaagtgtacttagtgtcagggaaaaacgtgggttacgctaaatatgctgaccgcatctcagccaacgacgccatagcaaccttgcatggcaagatattgaacggagtcaggctgaaagtcatgttggccgactcacctcgggaggaatcaaacaaaaggcagaggacttactag

SEQ ID NO: 245081 - DNA, 408 bp, Artificial Sequence
  derived and/or modified sequence
tgacagctggccagcatggtgtggaacaaccccagccagcagcagttcatgcagttcggcggaagcagcggatctcaactcccacagatacagacagacgttgtcctcccgtcttgcaagaaaaaggccccggcagagacaccggtgaaagaacgtctgtttattgtcttcaaccctcatcctctgccgctggatgtgctggaggatatcttttgtaggttcggtaaccttattgaggtgtatttggtttcgggcaaaaacgtaggttacgccaagtatgccgatcgcataagcgccaacgacgctatagctacactgcacgggaagatcctgaacggagtacggctgaaggtgatgctggctgacagcccccgggaagaatccaacaaaagacagcgcacatattag

SEQ ID NO: 245082 - DNA, 1425 bp, Artificial Sequence
  derived and/or modified sequence
atggatgaggctggcagcagcgcctccggcggtgggtttcgccctggcgtggactccctagacgaaccccctaatagccgaatatttctcgttatttccaagtacacaccggagtccgtattgcgagaacgtttttctccgttcggggacattcaggatatctgggttgtccgagataagcacacaaaggagtcaaaaggtatcgcctttgtcaagttcgctaggtcgtctcaggcctgtcgcgcaatggaagagatgcacggacaatgtttgggtccaaacgacacaaagcctattaaggtctttattgctcagtccaggagttctggtagccaccgcgacgtagaggacgaagagctcactaggatattcgtgatgatcccaaagagttatactgaagaggacctgagagagaagttcaaggtctacggagacatagaatattgcagtattatcaagaataaagtcaccggcgagtccaagggactcggctacgttagatacctgaagccctcacaggctgcccaggccatagagaactgtgacaggagctttagggcaattctggcagaacctaaaaacaaggcctccgagagctccgagcaggattactacagcaatatgcgccaggaggctctgggccacgagccgagagtgaatatgttcccgttcgaacagcaatccgagttttcttccttcgacaaaaacgactccagagggcaagaggcgatttccaagcgcctcagcgtggtaagcagggttccgttcaccgaagagcagctgttttcaattttcgacatagtgcccggtcttgaatactgtgaggtgcagcgggacccgtattctaattatgggcatggtgtggtccagtactttaatgtggccagcgcaatttatgccaaatacaagctgcacgggtttcagtatccgcctggaaaccgcatcggggttagctttattgatgatggctccaacgccactgacctactccggaagatggccacgcagatggtggccgcacagctcgcatccatggtatggaacaatccatctcaacaacagttcatgcagtttggaggaagctctggcagccaactgcctcaaattcagactgacgtggtcttacccagttgcaaaaaaaaagcgccagctgagacgccggttaaggagagactctttatcgtcttcaatccacatcctctgcccttagacgttcttgaggacattttttgtcgatttggaaacctgatcgaagtgtaccttgtgtcaggtaaaaacgtggggtacgcaaaatacgctgatcgaatttcggcaaatgacgcaatcgctaccctacacgggaaaatcctaaatggagtcagactcaaagtcatgcttgcagatagcccgagagaggaaagtaacaaacgccagcggacttactag

SEQ ID NO: 245083 - DNA, 408 bp, Artificial Sequence
  derived and/or modified sequence
taacagttagcatcgatggtgtggaacaatccttctcagcagcagtttatgcagttcggcggatccagtggctcccaactgccgcaaattcagactgacgtggtattaccttcttgcaaaaagaaggctccagctgagactcccgtgaaagagcggttgtttatcgtctttaaccctcaccctcttccactggacgtgctggaagatattttctgcagatttggcaacctcatcgaggtttatcttgtttctggaaaaaacgtcggatacgcaaagtacgcggaccgcatttcggccaacgacgccatcgcaacattgcacggaaaaatattaaacggagtgagattaaaagtgatgctcgcggattcgcctcgggaggaaagtaataagagacagagaacatattag

SEQ ID NO: 245084 - DNA, 1425 bp, Artificial Sequence
  derived and/or modified sequence
atggacgaggccggcagcagcgccagcggcggcggcttcagacccggcgtggacagcctggacgagccccccaacagcagaatcttcctggtgatcagcaagtacacccccgagagcgtgctgagagagagattcagccccttcggcgacatccaggacatctgggtggtgagagacaagcacaccaaggagagcaagggcatcgccttcgtgaagttcgccagaagcagccaggcctgcagagccatggaggagatgcacggccagtgcctgggccccaacgacaccaagcccatcaaggtgttcatcgcccagagcagaagcagcggcagccacagagacgtggaggacgaggagctgaccagaatcttcgtgatgatccccaagagctacaccgaggaggacctgagagagaagttcaaggtgtacggcgacatcgagtactgcagcatcatcaagaacaaggtgaccggcgagagcaagggcctgggctacgtgagatacctgaagcccagccaggccgcccaggccatcgagaactgcgacagaagcttcagagccatcctggccgagcccaagaacaaggccagcgagagcagcgagcaggactactacagcaacatgagacaggaggccctgggccacgagcccagagtgaacatgttccccttcgagcagcagagcgagttcagcagcttcgacaagaacgacagcagaggccaggaggccatcagcaagagactgagcgtggtgagcagagtgcccttcaccgaggagcagctgttcagcatcttcgacatcgtgcccggcctggagtactgcgaggtgcagagagacccctacagcaactacggccacggcgtggtgcagtacttcaacgtggccagcgccatctacgccaagtacaagctgcacggcttccagtacccccccggcaacagaatcggcgtgagcttcatcgacgacggcagcaacgccaccgacctgctgagaaagatggccacccagatggtggccgcccagctggccagcatggtgtggaacaaccccagccagcagcagttcatgcagttcggcggcagcagcggcagccagctgccccagatccagaccgacgtggtgctgcccagctgcaagaagaaggcccccgccgagacccccgtgaaggagagactgttcatcgtgttcaacccccaccccctgcccctggacgtgctggaggacatcttctgcagattcggcaacctgatcgaggtgtacctggtgagcggcaagaacgtgggctacgccaagtacgccgacagaatcagcgccaacgacgccatcgccaccctgcacggcaagatcctgaacggcgtgagactgaaggtgatgctggccgacagccccagagaggagagcaacaagagacagagaacctactag

SEQ ID NO: 245085 - protein, 307 aa, Artificial Sequence
  derived and/or modified sequence
MAAAVAAALARLLAAFLLLAAQVACEYGMVHVVSQAGGPEGKDYCILYNPQWAHLPHDLSKASFLQLRNWTASLLCSAADLPARGFSNQIPLVARGNCTFYEKVRLAQGSGARGLLIVSRERLVPPGGNKTQYDEIGIPVALLSYKDMLDIFTRFGRTVRAALYAPKEPVLDYNMVIIFIMAVGTVAIGGYWAGSRDVKKRYMKHKRDDGPEKQEDEAVDVTPVMTCVFVVMCCSMLVLLYYFYDLLVYVVIGIFCLASATGLYSCLAPCVRRLPSGKKRPQARMLLLALFCVAVSVVWGVFRNEDQ

SEQ ID NO: 245086 - protein, 750 aa, Artificial Sequence
  derived and/or modified sequence
MSSKRPASPYGEADGEVAMVTSRQKVEEEESDGLPAFHLPLHVSFPNKPHSEEFQPVSLLTQETCGHRTPTSQHNTMEVDGNKVMSSFAPHNSSTSPQKAEEGGRQSGESLSSTALGTPERRKGSLADVVDTLKQRKMEELIKNEPEETPSIEKLLSKDWKDKLLAMGSGNFGEIKGTPESLAEKERQLMGMINQLTSLREQLLAAHDEQKKLAASQIEKQRQQMELAKQQQEQIARQQQQLLQQQHKINLLQQQIQVQGQLPPLMIPVFPPDQRTLAAAAQQGFLLPPGFSYKAGCSDPYPVQLIPTTMAAAAAATPGLGPLQLQQLYAAQLAAMQVSPGGKLPGIPQGNLGAAVSPTSIHTDKSTNSPPPKSKDEVAQPLNLSAKPKTSDGKSPTSPTSPHMPALRINSGAGPLKASVPAALASPSARVSTIGYLNDHDAVTKAIQEARQMKEQLRREQQVLDGKVAVVNSLGLNNCRTEKEKTTLESLTQQLAVKQNEEGKFSHAMMDFNLSGDSDGSAGVSESRIYRESRGRGSNEPHIKRPMNAFMVWAKDERRKILQAFPDMHNSNISKILGSRWKAMTNLEKQPYYEEQARLSKQHLEKYPDYKYKPRPKRTCLVDGKKLRIGEYKAIMRNRRQEMRQYFNVGQQAQIPIATAGVVYPGAIAMAGMPSPHLPSEHSSVSSSPEPGMPVIQSTYGVKGEEPHIKEEIQAEDINGEIYDEYDEEEDDPDVDYGSDSENHIAGQAN

SEQ ID NO: 245087 - DNA, 129 bp, Artificial Sequence
  derived and/or modified sequence
atggtgtgcagccccgtgaccgtgagaatcgccccccccgacagaagattcagcagaagcgccatccccgagcagatcatcagcagcaccctgagcagccccagcagcaacgcccccgacccctgctag

SEQ ID NO: 245088 - DNA, 129 bp, Artificial Sequence
  derived and/or modified sequence
atggtgtgttcccccgtcactgttcgtatagcgccacctgatagaaggttcagtaggtctgccattcctgaacagattattagttcaaccttgtcctcaccttcgagcaatgcaccagacccctgctag

SEQ ID NO: 245089 - DNA, 129 bp, Artificial Sequence
  derived and/or modified sequence
atggtgtgcagccctgtgacagtgcgcatcgcccccccagaccggcgcttcagccgcagcgccatccctgagcagatcatcagcagcaccctgagcagccccagcagcaatgccccagacccctgctag

SEQ ID NO: 245090 - DNA, 129 bp, Artificial Sequence
  derived and/or modified sequence
atggtgtgcagccccgtgaccgtgcggatcgccccccccgaccggcgcttcagtcgctccgctattccagagcagattatttcctccaccctctcctctcctagttcgaacgctcccgacccgtgctag

SEQ ID NO: 245091 - DNA, 129 bp, Artificial Sequence
  derived and/or modified sequence
atggtttgttctcctgtgactgtgcgaatcgctcctcctgacaggcgcttctctcgttcagccatacccgagcagatcatcagctctaccctgtcaagtccaagttcgaatgccccagatccctgctag

SEQ ID NO: 245092 - DNA, 348 bp, Artificial Sequence
  derived and/or modified sequence
atggtttgcagccccgtgactctgagaatcgccccccccgataggcggttctctaggtctgctatcccagagcaaatcatttcctccaccttgtcgtcgccatcttctaacgctcccgatccttgcgccaaggaaacagtgttgagtgctcttaaggagaagaagaaaaagaggaccgtggaggaagaagaccaaatattcttggatggccaagagaataagcggtcctgcctagtggacggccttacagatgcttcatctgcctttaaagtgccgagacccggacctgacaccttgcagtttactgtggatgtcttccactttgctaacgactcccggaacatgtag

SEQ ID NO: 245093 - DNA, 348 bp, Artificial Sequence
  derived and/or modified sequence
atggtgtgcagccctgtgaccctgcgcatcgcccccccagaccggcgcttcagccgcagcgccatccctgagcagatcatcagcagcaccctgagcagccccagcagcaatgccccagacccctgtgccaaggagaccgtgctgagcgccctgaaggagaagaagaagaagaggacagtggaggaggaggaccagatcttcctggatggccaggagaacaagaggagctgcctggtggatggcctgacagatgccagcagcgccttcaaggtgccccggcccggccctgacaccctgcagttcaccgtggatgtgttccactttgccaatgacagcaggaacatgtag

SEQ ID NO: 245094 - DNA, 348 bp, Artificial Sequence
  derived and/or modified sequence
atggtgtgcagccccgtgaccctgcggatcgccccccccgaccggcgcttcagtagaagtgcgatcccggagcaaataatctccagcacactgtcctccccctcctctaacgccccagatccttgtgcgaaggagacagtcctcagtgcgttgaaagagaaaaagaagaagaggactgtggaggaagaggaccagatttttttggacggccaagagaacaagcgcagctgtttggttgacggtcttactgatgcctcaagcgccttcaaggtgcctagacctgggcctgatactctacagttcactgtcgacgttttccattttgctaacgactcacgaaacatgtag

SEQ ID NO: 245095 - DNA, 348 bp, Artificial Sequence
  derived and/or modified sequence
atggtgtgcagtccggtcacacttaggatcgctccgccagatcgcaggttctctcgtagtgcgatccctgaacagattatttccagcacgctgagttcaccatctagcaacgcgcctgacccgtgcgccaaagaaaccgtgctctccgcactcaaagaaaaaaagaagaaacgaaccgtggaggaggaagaccagatatttctggatggccaagaaaataagcggagctgcctcgtggacggtctcacagacgcgtcctccgcctttaaagtgccacgcccaggtcctgacacgttgcaatttactgtggacgtattccactttgccaacgacagtcggaatatgtag

SEQ ID NO: 245096 - DNA, 348 bp, Artificial Sequence
  derived and/or modified sequence
atggtgtgcagccccgtgaccctgagaatcgccccccccgacagaagattcagcagaagcgccatccccgagcagatcatcagcagcaccctgagcagccccagcagcaacgcccccgacccctgcgccaaggagaccgtgctgagcgccctgaaggagaagaagaagaagagaaccgtggaggaggaggaccagatcttcctggacggccaggagaacaagagaagctgcctggtggacggcctgaccgacgccagcagcgccttcaaggtgcccagacccggccccgacaccctgcagttcaccgtggacgtgttccacttcgccaacgacagcagaaacatgtag

SEQ ID NO: 245097 - protein, 514 aa, Artificial Sequence
  derived and/or modified sequence
MSWPRRLLLRYLFPALLLHGLGEGSALLHPDSRSHPRSLEKSAWRAFKESQCHHMLKHLHNGARITVQMPPTIEGHWVSTGCEVRSGPEFITRSYRFYHNNTFKAYQFYYGSNRCTNPTYTLIIRGKIRLRQASWIIRGGTEADYQLHNVQVICHTEAVAEKLGQQVNRTCPGFLADGGPWVQDVAYDLWREENGCECTKAVNFAMHELQLIRVEKQYLHHNLDHLVEELFLGDIHTDATQRMFYRPSSYQPPLQNAKNHDHACIACRIIYRSDEHHPPILPPKADLTIGLHGEWVSQRCEVRPEVLFLTRHFIFHDNNNTWEGHYYHYSDPVCKHPTFSIYARGRYSRGVLSSRVMGGTEFVFKVNHMKVTPMDAATASLLNVFNGNECGAEGSWQVGIQQDVTHTNGCVALGIKLPHTEYEIFKMEQDARGRYLLFNGQRPSDGSSPDRPEKRATSYQMPLVQCASSSPRAEDLAEDSGSSLYGRAPGRHTWSLLLAALACLVPLLHWNIRR

SEQ ID NO: 245098 - protein, 565 aa, Artificial Sequence
  derived and/or modified sequence
MKRRCSCGGGGGHCSSERRRTRPEAEGRARAQLPGHQIGARRAGGPRAGLEMSWPRRLLLRYLFPALLLHGLGEGSALLHPDSRSHPRSLEKSAWRAFKESQCHHMLKHLHNGARITVQMPPTIEGHWVSTGCEVRSGPEFITRSYRFYHNNTFKAYQFYYGSNRCTNPTYTLIIRGKIRLRQASWIIRGGTEADYQLHNVQVICHTEAVAEKLGQQVNRTCPGFLADGGPWVQDVAYDLWREENGCECTKAVNFAMHELQLIRVEKQYLHHNLDHLVEELFLGDIHTDATQRMFYRPSSYQPPLQNAKNHDHACIACRIIYRSDEHHPPILPPKADLTIGLHGEWVSQRCEVRPEVLFLTRHFIFHDNNNTWEGHYYHYSDPVCKHPTFSIYARGRYSRGVLSSRVMGGTEFVFKVNHMKVTPMDAATASLLNVFNGNECGAEGSWQVGIQQDVTHTNGCVALGIKLPHTEYEIFKMEQDARGRYLLFNGQRPSDGSSPDRPEKRATSYQMPLVQCASSSPRAEDLAEDSGSSLYGRAPGRHTWSLLLAALACLVPLLHWNIRR

SEQ ID NO: 245099 - DNA, 1545 bp, Artificial Sequence
  derived and/or modified sequence
atgtcttggccccgccgtctcctcctgaggtacctgtttcctgctctgctgctgcatgggcttggtgaaggaagcgctctcctgcacccagacagccgctcccacccacggtccctagaaaagtctgcatggagggcgtttaaagagtcccagtgtcatcatatgctgaagcatctgcataatggggcaagaattactgtccagatgccgcccactatcgagggacattgggtgtctacaggatgtgaagtcaggagcggacctgagttcattacgagatcgtatcgcttttatcacaacaatacatttaaagcctatcagttttattatgggtccaatcgctgcaccaacccaacctacacactcattattcggggcaaaatccggttgagacaggccagttggatcattcgtggaggcacagaggctgattaccagctccacaacgttcaggtgatctgtcacacagaggctgttgcagagaaactagggcaacaggtgaaccgaacgtgccctggctttctggccgatggagggccctgggtgcaggatgtggcttatgatctttggagagaagagaacggctgcgaatgtacaaaggcggtgaattttgccatgcatgagcttcagcttatccgcgtggagaagcaatacctgcaccataatctggatcatctggttgaggaactgttcctgggcgacatccacacagacgccacgcagcgcatgttctacagaccatcttcctaccagccccctttgcaaaatgcgaagaaccacgaccacgcgtgcatcgcctgtcggataatataccggagtgatgagcaccatcctcctatcctgcctccaaaggctgacctgaccatcggactgcacggggagtgggtctctcagcggtgcgaagtcaggcccgaagtattgttcctgacccgacacttcatctttcatgacaacaataacacttgggaaggccactattatcattattcagacccagtttgcaagcacccaaccttctccatatacgccagagggagatattcaagaggcgtgctgtcctctcgggtgatgggcgggaccgaattcgtttttaaagtgaatcatatgaaagtgacacctatggacgcggcaaccgctagtctgttgaatgtcttcaatggtaacgagtgtggcgctgaaggcagttggcaggtgggcattcagcaagacgtgacccatacgaatggctgcgtggcactcggaatcaagctgccccataccgagtatgaaatctttaaaatggagcaggatgctcgggggagatacctcctgtttaatggccagagaccaagtgatgggtcgtcccctgatcgcccagagaaaagagcaacctcctatcaaatgccacttgtgcaatgcgcatccagctcacctcgggcggaagatttagccgaggactcagggtcgtcactgtatggaagggcccccggtaggcacacatggtccctgctgcttgcagcactggcatgtctggttcctttgctgcattggaatattaggcgatag

SEQ ID NO: 245100 - DNA, 1698 bp, Artificial Sequence
  derived and/or modified sequence
atgaaacggcgctgcagctgcggggggggaggtggccattgttcaagcgagcggagaaggactaggcccgaagcagaaggcagggcgagagctcagttgccaggacaccagattggagcaagacgcgccgggggccctcgggccgggctcgagatgtcgtggcctcgaaggctgttgttgaggtatctctttccagcactacttctccacggacttggggagggctcagcgctgcttcaccctgattctcggagccacccccggagtctggagaaatctgcctggagggcgttcaaagagagccagtgtcaccacatgctaaaacacctgcacaatggtgcgcgaataacagtgcagatgccacccactatcgagggacactgggtcagcacagggtgcgaggtccgctcagggccagagttcataactcggtcctatcgtttttatcataacaatactttcaaggcctatcaattctactatggcagcaatagatgtacgaaccccacctatacattgatcatcaggggaaaaatccgacttcggcaagcgtcatggattattagaggaggcacggaagccgattatcagctccataacgtacaagtcatatgccataccgaagcggttgccgagaagctcggccagcaggtgaaccgaacgtgtcccggctttctggccgacggcggtccctgggtacaagacgttgcctacgatttatggagggaagaaaatggctgcgagtgcacgaaagcagtcaatttcgctatgcatgaattgcaactcattcgagtagaaaagcaatatcttcaccacaatctggaccatctggtggaggagctctttcttggagacatccacacagatgccacacagcgcatgttttaccgaccaagctcgtatcagcctcctttgcagaatgcaaaaaatcacgaccacgcttgtatcgcttgccggatcatttaccgctccgacgaacaccacccgcccatactcccaccaaaggctgaccttaccatcggacttcacggcgagtgggtaagtcagaggtgcgaagtgcggcccgaggtgctattcctcacccggcacttcatcttccatgataataacaacacatgggagggccattactatcactattcagacccggtgtgtaaacatccaacgttcagtatctatgctcgagggaggtacagtcgcggcgtcctctcaagccgggttatgggcggcacggagttcgtgttcaaggtcaatcatatgaaggtcacacccatggacgctgccaccgcctcactgttaaacgtttttaatggcaacgaatgcggcgccgaaggaagttggcaggtcggaatccagcaggatgtgacccatactaatgggtgcgtggccctggggatcaagctgccgcacacagagtacgaaattttcaaaatggagcaggacgcgaggggcagatacctattattcaatggccagagaccatcagatgggtcatcccctgatcggcctgagaaaagggccacatcctaccagatgcctctggtacagtgtgccagctcaagtccgagggccgaggatctggcagaggactcggggtcgagcctttatggcagggcacctggacgccacacctggtcactcctgctcgccgcgctggcttgcttggtccctctgttacactggaacattagacggtag

SEQ ID NO: 245101 - DNA, 2562 bp, Artificial Sequence
  derived and/or modified sequence
gaaatatgaagagacgctgcagctgcggtggcggtggcggccactgcagctcagagcggcgcacgcggcggccggggcgggacgcggggccgggcgcggagaagtcggggcgggcggcagagaggccgggacgcggaccgggccggggcgcccacagccgcccgacggcgcccagagagcgcgcgccccgcagccccgcgcctagcccgccgggcatggggcgcgcggcagccgcctgaagccccggcctggcccggccgcacccggccggaggcggagggcagagcgcgcgcccagttgcccgggcaccaaatcggagcgcggcgtgcgggaggccccagagcaggactggaaatgtcctggccgcgccgcctcctgctcagatacctgttcccggccctcctgcttcacgggctgggagagggttctgccctccttcatccagacagcaggtctcatcctaggtccttagagaaaagtgcctggagggcttttaaggagtcacagtgccatcacatgctcaaacatctccacaatggtgcaaggatcacagtgcagatgccacctacaatcgagggccactgggtctccacaggctgtgaagtaaggtcaggcccagagttcatcacaaggtcctacagattctaccacaataacaccttcaaggcctaccaattttattatggcagcaaccggtgcacaaatcccacttatactctcatcatccggggcaagatccgcctccgccaggcctcctggatcatccgagggggcacggaagccgactaccagctgcacaacgtccaggtgatctgccacacagaggcggtggccgagaagctcggccagcaggtgaaccgcacatgcccgggcttcctcgcagacgggggtccctgggtgcaggacgtggcctatgacctctggcgagaggagaacggctgtgagtgcaccaaggccgtgaactttgccatgcatgaacttcagctcatccgggtggagaagcagtaccttcaccacaacctcgaccacctggtcgaggagctcttccttggtgacattcacactgatgccacccagaggatgttctaccggccctccagttaccagccccctctgcagaatgccaagaaccacgaccatgcctgcatcgcctgtcggatcatctatcggtcagacgagcaccaccctcccatcctgcccccaaaggcagacctgaccatcggcctgcacggggagtgggtgagccagcgctgtgaggtgcgccccgaagtcctcttcctcacccgccacttcatcttccatgacaacaacaacacctgggagggccactactaccactactcagacccggtgtgcaagcaccccaccttctccatctacgcccggggccgctacagccgcggcgtcctctcgtccagggtcatgggaggcaccgagttcgtgttcaaagtgaatcacatgaaggtcacccccatggatgcggccacagcctcactgctcaacgtcttcaacgggaatgagtgcggggccgagggctcctggcaggtgggcatccagcaggatgtgacccacaccaatggctgcgtggccctgggcatcaaactacctcacacggagtacgagatcttcaaaatggaacaggatgcccgggggcgctatctgctgttcaacggtcagaggcccagcgacgggtccagcccagacaggccagagaagagagccacgtcctaccagatgcccttggtccagtgtgcctcctcttcgccgagggcagaggacctcgcagaagacagtggaagcagcctgtatggccgggcccctgggaggcacacctggtccctgctgctggctgcacttgcctgccttgtccctctgctgcattggaacatccgcagatagaagttttagaaagttctatttttccaaaccaggattccttactattgacagatttgctttaccaaaagaaaagacatttattcttttgatgcacttgaatgccagagaactgtccttctttttctcctctccctccctcccagcccctgagtcatgaacagcaaggagtgtttgaagtttctgctttgaactccgtccagcctgatccctggcctgagcaacttcacaacagtaattgcactttaagacagcctagagttctggacgagcgtgtttggtagcagggatgaaagctagggcctcttatttttttctcttaattattattatatttctgagttaaacttagaagaaacaactatcaagctacaacttttcctgccattttcctgtggttgcagcctgtcttcctttgaaattgttttactctctgagttttatatgctggaatccaatgcagagttggtttgggactgtgatcaagacaccttttattaataaagaagagacacaggtgtagatatgtatatacaaaaagatgtacggtctggccaaaccaccttcccagcctttatgcaaaaaaaggggagaatcaaagctttcatttcagaaatgttgcgtggaaaagtatctgtaattaaagtttcgaagtaatttaaccta

SEQ ID NO: 245102 - DNA, 2360 bp, Artificial Sequence
  derived and/or modified sequence
atgaagagacgctgcagctgcggtggcggtggcggccactgcagctcagagcggcgccgcacccggccggaggcggagggcagagcgcgcgcccagttgcccgggcaccaaatcggagcgcggcgtgcgggaggccccagagcaggactggaaatgtcctggccgcgccgcctcctgctcagatacctgttcccggccctcctgcttcacgggctgggagagggttctgccctccttcatccagacagcaggtctcatcctaggtccttagagaaaagtgcctggagggcttttaaggagtcacagtgccatcacatgctcaaacatctccacaatggtgcaaggatcacagtgcagatgccacctacaatcgagggccactgggtctccacaggctgtgaagtaaggtcaggcccagagttcatcacaaggtcctacagattctaccacaataacaccttcaaggcctaccaattttattatggcagcaaccggtgcacaaatcccacttatactctcatcatccggggcaagatccgcctccgccaggcctcctggatcatccgagggggcacggaagccgactaccagctgcacaacgtccaggtgatctgccacacagaggcggtggccgagaagctcggccagcaggtgaaccgcacatgcccgggcttcctcgcagacgggggtccctgggtgcaggacgtggcctatgacctctggcgagaggagaacggctgtgagtgcaccaaggccgtgaactttgccatgcatgaacttcagctcatccgggtggagaagcagtaccttcaccacaacctcgaccacctggtcgaggagctcttccttggtgacattcacactgatgccacccagaggatgttctaccggccctccagttaccagccccctctgcagaatgccaagaaccacgaccatgcctgcatcgcctgtcggatcatctatcggtcagacgagcaccaccctcccatcctgcccccaaaggcagacctgaccatcggcctgcacggggagtgggtgagccagcgctgtgaggtgcgccccgaagtcctcttcctcacccgccacttcatcttccatgacaacaacaacacctgggagggccactactaccactactcagacccggtgtgcaagcaccccaccttctccatctacgcccggggccgctacagccgcggcgtcctctcgtccagggtcatgggaggcaccgagttcgtgttcaaagtgaatcacatgaaggtcacccccatggatgcggccacagcctcactgctcaacgtcttcaacgggaatgagtgcggggccgagggctcctggcaggtgggcatccagcaggatgtgacccacaccaatggctgcgtggccctgggcatcaaactacctcacacggagtacgagatcttcaaaatggaacaggatgcccgggggcgctatctgctgttcaacggtcagaggcccagcgacgggtccagcccagacaggccagagaagagagccacgtcctaccagatgcccttggtccagtgtgcctcctcttcgccgagggcagaggacctcgcagaagacagtggaagcagcctgtatggccgggcccctgggaggcacacctggtccctgctgctggctgcacttgcctgccttgtccctctgctgcattggaacatccgcagatagaagttttagaaagttctatttttccaaaccaggattccttactattgacagatttgctttaccaaaagaaaagacatttattcttttgatgcacttgaatgccagagaactgtccttctttttctcctctccctccctcccagcccctgagtcatgaacagcaaggagtgtttgaagtttctgctttgaactccgtccagcctgatccctggcctgagcaacttcacaacagtaattgcactttaagacagcctagagttctggacgagcgtgtttggtagcagggatgaaagctagggcctcttatttttttctcttaattattattatatttctgagttaaacttagaagaaacaactatcaagctacaacttttcctgccattttcctgtggttgcagcctgtcttcctttgaaattgttttactctctgagttttatatgctggaatccaatgcagagttggtttgggactgtgatcaagacaccttttattaataaagaagagacacaggtgtagatatgtatatacaaaaagatgtacggtctggccaaaccaccttcccagcctttatgcaaaaaaaggggagaatcaaagctttcatttcagaaatgttgcgtggaaaagtatctgtaattaaagtttcgaagtaatttaacct

SEQ ID NO: 245103 - DNA, 1545 bp, Artificial Sequence
  derived and/or modified sequence
atgtcctggccccggcggctgctgctgcgctacctgtttcctgccctgctgctgcacggcctgggggagggcagcgccctgctgcacccagacagccgcagccaccccaggagcctggagaagagcgcctggagggccttcaaggagagccagtgccaccacatgctgaagcacctgcacaatggagcccgcatcaccgtgcagatgccacccaccatcgagggccactgggtgtccacaggctgtgaggtgcgcagcggccctgagttcatcaccaggagctaccgcttctaccacaacaacaccttcaaggcctaccagttctactacggcagcaaccgctgcaccaaccccacctacaccctcatcatccggggcaagatccggctgcggcaggcctcctggatcatccggggcggcacagaagctgactaccagctgcacaacgtgcaggtgatctgccacacagaggccgtggccgagaagctgggccagcaggtgaacagaacctgccccggcttcctggctgatggcggcccctgggtgcaggatgtggcctatgacctgtggagagaagaaaatggctgtgaatgtaccaaggctgtgaactttgccatgcatgagctgcagctgatccgggtggagaagcagtacctgcaccacaacctggaccacctggtggaggagctgttcctgggggacatccacacagatgccacccagaggatgttctaccggcccagcagctaccagccccccctgcagaatgccaagaaccacgaccacgcctgcatcgcctgccgcatcatctacagaagtgatgagcaccacccccccatcctgccccccaaggctgacctgaccatcggcctgcacggggagtgggtgtcccagagatgtgaggtgcggcctgaggtgctcttcctgaccaggcacttcatcttccatgacaacaacaacacctgggagggccactactaccactacagcgaccctgtgtgcaagcaccccaccttcagcatctatgcccggggccgctacagccggggcgtgctgagcagccgggtgatgggcggcacagaatttgtgttcaaggtgaaccacatgaaggtgacccccatggatgctgccacagccagcctgctgaatgtgttcaatggaaatgaatgtggggctgagggctcctggcaggtgggcatccagcaggatgtgacccacaccaacggctgtgtggccctgggcatcaagctgccccacacagaatatgagatcttcaagatggagcaggatgcccggggccgctacctgctcttcaacggccagaggcccagtgatggcagcagcccagacaggcctgagaagagggccaccagctaccagatgcccctggtgcagtgtgccagcagcagccccagggctgaggacctggccgaggacagcggcagcagcctgtatggccgggcccctggccgccacacctggagcctgctgctggccgccctggcctgcctggtgcccctgctgcactggaacatcagaagatag

SEQ ID NO: 245104 - DNA, 1698 bp, Artificial Sequence
  derived and/or modified sequence
atgaagaggcgctgcagctgtggcggcggcggcggccactgcagcagcgagaggaggaggaccaggcctgaggccgagggccgggcccgggcccagctgcccggccaccagatcggggccaggagagctgggggcccccgggccggcctggagatgtcctggccccggcggctgctgctgcgctacctgtttcctgccctgctgctgcacggcctgggggagggcagcgccctgctgcacccagacagccgcagccaccccaggagcctggagaagagcgcctggagggccttcaaggagagccagtgccaccacatgctgaagcacctgcacaacggggcccgcatcaccgtgcagatgccacccaccatcgagggccactgggtgtccacaggctgtgaggtgcgcagcggccctgagttcatcaccaggagctaccgcttctaccacaacaacaccttcaaggcctaccagttctactacggcagcaaccgctgcaccaaccccacctacaccctcatcatccggggcaagatccggctgcggcaggcctcctggatcatccggggcggcacagaggccgactaccagctgcacaacgtgcaggtgatctgccacacagaagctgtggccgagaagctgggccagcaggtgaacagaacctgccccggcttcctggctgatggcggcccctgggtgcaggatgtggcctatgacctgtggagggaggagaatggctgtgagtgcaccaaggctgtgaactttgccatgcatgagctgcagctgatccgggtggagaagcagtacctgcaccacaacctggaccacctggtggaggagctgttcctgggggacatccacacagatgccacccagaggatgttctaccggcccagcagctaccagccccccctgcagaatgccaagaaccacgaccacgcctgcatcgcctgccgcatcatctacagaagtgatgagcaccacccccccatcctgccccccaaggctgacctgaccatcggcctgcatggagagtgggtgtcccagagatgtgaggtgcggcctgaggtgctcttcctgaccaggcacttcatcttccatgacaacaacaacacctgggagggccactactaccactacagcgaccctgtgtgcaagcaccccaccttcagcatctatgcccggggccgctacagcagaggagtgctgagcagccgggtgatgggcggcacagaatttgtgttcaaggtgaaccacatgaaggtgacccccatggatgctgccacagccagcctgctgaatgtgttcaatggaaatgaatgtggggctgagggctcctggcaggtgggcatccagcaggatgtgacccacaccaacggctgtgtggccctgggcatcaagctgccccacacagaatatgagatcttcaagatggagcaggatgcccggggccgctacctgctcttcaacggccagaggcccagtgatggcagcagcccagacaggcctgagaagagggccaccagctaccagatgcccctggtgcagtgtgccagcagcagccccagggctgaggacctggctgaagattctggcagcagcctgtatggccgggcccctggccgccacacctggagcctgctgctggccgccctggcctgcctggtgcccctgctgcactggaacatcagaagatag

SEQ ID NO: 245105 - DNA, 1545 bp, Artificial Sequence
  derived and/or modified sequence
atgagctggccccggcggctgctgctgcggtacctgttccccgcccttctcctccacgggttgggagaggggagtgcactcctgcaccctgatagccggagccacccgcgcagcctcgaaaaatctgcttggcgtgcattcaaggaaagccagtgtcatcacatgctgaaacacctgcacaacggggcgagaatcaccgtacaaatgccacctactatcgaaggccactgggtatcaacaggctgcgaggtccgctctggaccagagtttatcacacgtagctataggttctatcataacaatactttcaaggcatatcagttttattacggctccaaccggtgcaccaaccccacttatacactcattatcagaggaaagatccggctgcgacaggcaagctggattatccggggtggaacagaggcggactaccagcttcataatgttcaagtcatatgccacacggaagccgtcgccgaaaagctggggcaacaggtgaatcgaacctgtccggggttcctggctgatgggggtccatgggtgcaggatgtggcctatgatctttggagagaggagaatggctgtgaatgcacaaaggcagtgaacttcgctatgcacgaactccagctaatccgcgttgagaaacaatatctgcaccacaatttggaccacctggtggaggaactttttctgggagacattcacacagacgctacacagcgcatgttctaccgcccgagctcttaccaaccacccctacaaaacgcgaaaaaccacgatcacgcttgtattgcttgccgaattatttacagatcagatgagcaccatccccccatcttaccgccaaaggccgaccttacaattggccttcatggggaatgggtctcccagaggtgtgaggtgaggcccgaggttctgtttctgaccagacattttatattccacgacaataacaatacttgggaggggcactactaccattacagtgaccctgtatgcaagcatcctacattctcgatctacgcgagagggaggtattcgagaggcgtcctgtctagcagagttatgggggggacagaattcgtgtttaaggtgaatcacatgaaggtgacccccatggacgccgcaactgcgagcctgcttaacgtgtttaatggtaacgaatgcggcgccgaaggctcttggcaggtggggattcagcaggacgtgacacataccaacggttgcgtggcattaggtattaaactaccccacaccgagtatgagatctttaaaatggagcaggacgcccgaggaaggtatttgttgttcaacggacagaggcccagcgacgggagctcccctgaccgtcctgaaaaacgggcgactagttaccagatgccacttgtgcagtgcgcatcgtcatccccgcgcgcggaagacctcgccgaagactctggttccagcctttatggcagagccccgggtaggcatacgtggtcactactgctggccgcccttgcctgtctggtgcccttgttacactggaacatccggcggtag

SEQ ID NO: 245106 - DNA, 1698 bp, Artificial Sequence
  derived and/or modified sequence
atgaagcggcggtgcagctgcggcggcggcggcggccactgcagcagcgaacgtagacgcaccagacccgaagctgaggggcgagcgcgggcgcaactccccggccatcagattggagcccgaagggctggcggtccccgggcggggctggagatgtcttggccgcgcaggcttctactgaggtacctgtttccggccctgcttcttcacggactcggagagggttctgctttattgcaccccgattcaaggagccaccctcggtctctggagaagtccgcatggcgggccttcaaagaaagccaatgccatcacatgttgaagcatctgcacaatggcgctcgaattaccgttcaaatgccccccactatcgaaggccactgggtttccacaggatgtgaggtgcggtctggccctgaattcatcactcggagctacaggttctatcataacaacaccttcaaagcatatcagttttattacggatcaaaccgttgtacgaatcctacgtatacgctgatcatcaggggcaaaatccgcctcaggcaagcctcctggattatcaggggcgggacagaggccgactatcagttacacaacgttcaggtaatatgtcacactgaggctgtcgctgagaagctgggccagcaagtgaacagaacttgtccgggctttttagccgacggagggccttgggttcaggatgtggcttacgacctgtggcgagaagaaaacggatgtgagtgcactaaggccgtaaattttgccatgcacgaactgcaactcattagggttgagaagcagtatctgcaccataacctggaccacctcgttgaggaactgttcttgggggatatccataccgacgctactcagcggatgttttaccggccaagcagctaccaaccccctttgcagaacgcaaagaaccatgaccatgcttgtatcgcctgccgtattatctatcgcagcgacgagcaccaccctcctatcctaccaccaaaggctgacttgactatcggcctccatggggaatgggtgtcacagcgctgtgaggttcgtccagaggtgctttttcttacccggcactttatctttcacgacaacaacaacacatgggaagggcactactatcactactctgacccggtctgcaaacaccctacattttcaatatatgcccgtggacgctattcaaggggagtgctctccagcagagtgatggggggaacggagttcgtattcaaggtcaatcacatgaaagtaacaccaatggacgcagctaccgcaagcctgttgaacgtcttcaatggaaatgaatgtggggcggagggctcatggcaggtgggaatacagcaagatgttacgcacactaatggatgtgtggctctcggaattaagctgcctcacacggaatatgagatctttaaaatggagcaagacgcccgaggccggtatctgctgttcaatggtcagaggcctagcgacggcagctctccagatcggcccgaaaagcgggcaaccagctaccagatgcccttggtccagtgtgcgagcagctcccctcgcgctgaagacttagctgaggacagtggatctagcctgtatggaagagccccaggacgacacacttggtccttactgctggctgccctggcctgcctggtgccactgcttcactggaatattcgacggtag

SEQ ID NO: 245107 - DNA, 1545 bp, Artificial Sequence
  derived and/or modified sequence
atgtcatggcccagaagactgctgctacgatatctcttcccagctttgctcctacacggcctgggcgagggttccgctctcttgcaccccgacagccgctcccaccccagaagtctggaaaagtccgcctggagggcgttcaaggagagtcagtgtcatcacatgctgaaacacttgcacaatggtgcccgaattacagtccagatgcctccaacaatagaagggcactgggtgtctacaggatgtgaagtccgctcaggacctgaatttatcaccagatcttacaggttctaccataacaacaccttcaaagcatatcaattctactacggttcaaatcgctgcacaaacccaacatatacactcattatcaggggcaagatacgcctcaggcaggcgagttggattattaggggcggtacggaggctgattaccagctccacaatgtgcaggtgatctgtcatactgaagccgtcgccgagaagctaggacaacaagtgaaccgcacctgccctggattcctggcagatgggggaccatgggtccaggatgtggcatatgacttgtggcgggaagagaacggatgtgagtgcaccaaggccgtcaatttcgctatgcacgaattacagctcattcgagtggaaaaacagtatttacaccataacctcgatcatctggtggaggaactatttttgggggatattcacacagacgccactcaacgcatgttttaccgcccttcctcatatcagcccccactgcagaatgccaagaaccacgatcatgcatgcattgcttgcagaatcatttaccggagcgacgagcatcatccacccatcctcccccctaaagctgaccttactattggcctgcatggagagtgggtcagtcagcggtgtgaggtgcgacctgaggtcttgtttctcactaggcatttcatcttccacgacaacaacaacacatgggaagggcattactaccactactccgacccagtctgcaagcaccccacattttccatttatgccaggggccgatactcgaggggggtactgagttctagggtgatgggtggcactgagttcgttttcaaagtaaaccatatgaaggtcacccctatggatgccgcaactgcttcactcctaaacgtgtttaatggaaatgaatgcggggcagagggtagttggcaggtaggcatccagcaagacgtaacacatacaaacggctgtgttgccttggggattaagctgccccatactgagtacgagatcttcaagatggagcaggacgcgagaggccgttacctcttgttcaacgggcaacggcctagtgatggttcttcacccgacaggcctgagaagcgggcaacaagctaccagatgccacttgtgcagtgcgctagctcctcccccagggcggaggaccttgcagaagacagtggttcctcgctgtatggcagagcacctggacgtcacacatggagcctcctgttggcggctctagcgtgcttagtccctttgctgcattggaacatccgacggtag

SEQ ID NO: 245108 - DNA, 1698 bp, Artificial Sequence
  derived and/or modified sequence
atgaagagaaggtgttcttgcggcggtggaggaggccactgttcttcagagcggagacgcacaagacccgaggccgaaggtagagctcgagcccagctgcccggacaccagatcggcgctagaagagcaggtggcccaagggccggactggagatgagctggccacgtagactcctattacggtacctctttccggctttactgctgcacggtctgggcgagggctcagcactattgcaccctgatagccggtcgcaccccagatctctggagaaaagcgcctggcgtgccttcaaggagtcccagtgtcatcacatgctcaaacacctccacaatggggcacgaatcacagttcagatgcctcctactatcgagggtcattgggtttctaccggctgcgaggtgcgctccggacccgaatttataacccgctcctataggttctaccacaataacacattcaaagcctaccagttttactacggttctaaccggtgtactaaccccacatatactctaatcattcgcggtaagattaggctgcgccaagcgtcctggatcattagaggaggcaccgaggctgattatcaactgcataatgttcaagtgatttgtcacacagaagctgtggccgaaaaactgggacagcaggttaaccgaacatgtccgggtttcttggccgatggcggtccatgggttcaggacgtcgcgtacgatctctggcgcgaggagaacggttgcgagtgtacgaaagccgtcaattttgctatgcacgagctgcaacttatccgtgtcgaaaaacagtacttgcatcataatctggatcatttggttgaggagctcttcttgggggacatccatacggacgcgacccagcgtatgttctatcggccaagctcctatcaaccaccactgcaaaatgcaaaaaatcacgatcacgcgtgtattgcctgccgcattatatacagatccgacgaacaccatcctccaatcctgcctcccaaggctgatctcaccataggcctccacggggagtgggtgtcacaaagatgtgaagtaagaccagaggtacttttcctgactaggcacttcatatttcatgataacaataatacttgggaaggccactattaccactacagcgaccccgtctgtaaacacccaaccttcagtatctacgctagagggcgatactctagaggtgtgttgagtagccgggtgatgggaggtacagaatttgtcttcaaggttaaccacatgaaagtaacacctatggatgctgcgacagcctccctcctgaacgtgttcaatgggaacgagtgtggggctgaagggagctggcaggtaggaatccagcaggacgttacacataccaacggttgtgttgctctcggtatcaaactgccgcataccgagtacgagatcttcaagatggaacaagacgcaagaggtaggtatctgttattcaacggccagcgacctagtgacggttcttcccccgaccggcctgagaaaagggcaacttcctaccagatgccgttggtccagtgtgcttcttcctccccgcgtgcagaggatctggccgaggacagtgggagttccttatacggcagagcccctgggagacatacatggagcctgttgctggcggcactagcctgcctagtcccccttctccattggaacattcggcgttag

SEQ ID NO: 245109 - DNA, 1545 bp, Artificial Sequence
  derived and/or modified sequence
atgagctggcccagaagactgctgctgagatacctgttccccgccctgctgctgcacggcctgggcgagggcagcgccctgctgcaccccgacagcagaagccaccccagaagcctggagaagagcgcctggagagccttcaaggagagccagtgccaccacatgctgaagcacctgcacaacggcgccagaatcaccgtgcagatgccccccaccatcgagggccactgggtgagcaccggctgcgaggtgagaagcggccccgagttcatcaccagaagctacagattctaccacaacaacaccttcaaggcctaccagttctactacggcagcaacagatgcaccaaccccacctacaccctgatcatcagaggcaagatcagactgagacaggccagctggatcatcagaggcggcaccgaggccgactaccagctgcacaacgtgcaggtgatctgccacaccgaggccgtggccgagaagctgggccagcaggtgaacagaacctgccccggcttcctggccgacggcggcccctgggtgcaggacgtggcctacgacctgtggagagaggagaacggctgcgagtgcaccaaggccgtgaacttcgccatgcacgagctgcagctgatcagagtggagaagcagtacctgcaccacaacctggaccacctggtggaggagctgttcctgggcgacatccacaccgacgccacccagagaatgttctacagacccagcagctaccagccccccctgcagaacgccaagaaccacgaccacgcctgcatcgcctgcagaatcatctacagaagcgacgagcaccacccccccatcctgccccccaaggccgacctgaccatcggcctgcacggcgagtgggtgagccagagatgcgaggtgagacccgaggtgctgttcctgaccagacacttcatcttccacgacaacaacaacacctgggagggccactactaccactacagcgaccccgtgtgcaagcaccccaccttcagcatctacgccagaggcagatacagcagaggcgtgctgagcagcagagtgatgggcggcaccgagttcgtgttcaaggtgaaccacatgaaggtgacccccatggacgccgccaccgccagcctgctgaacgtgttcaacggcaacgagtgcggcgccgagggcagctggcaggtgggcatccagcaggacgtgacccacaccaacggctgcgtggccctgggcatcaagctgccccacaccgagtacgagatcttcaagatggagcaggacgccagaggcagatacctgctgttcaacggccagagacccagcgacggcagcagccccgacagacccgagaagagagccaccagctaccagatgcccctggtgcagtgcgccagcagcagccccagagccgaggacctggccgaggacagcggcagcagcctgtacggcagagcccccggcagacacacctggagcctgctgctggccgccctggcctgcctggtgcccctgctgcactggaacatcagaagatag

SEQ ID NO: 245110 - DNA, 1698 bp, Artificial Sequence
  derived and/or modified sequence
atgaagagaagatgcagctgcggcggcggcggcggccactgcagcagcgagagaagaagaaccagacccgaggccgagggcagagccagagcccagctgcccggccaccagatcggcgccagaagagccggcggccccagagccggcctggagatgagctggcccagaagactgctgctgagatacctgttccccgccctgctgctgcacggcctgggcgagggcagcgccctgctgcaccccgacagcagaagccaccccagaagcctggagaagagcgcctggagagccttcaaggagagccagtgccaccacatgctgaagcacctgcacaacggcgccagaatcaccgtgcagatgccccccaccatcgagggccactgggtgagcaccggctgcgaggtgagaagcggccccgagttcatcaccagaagctacagattctaccacaacaacaccttcaaggcctaccagttctactacggcagcaacagatgcaccaaccccacctacaccctgatcatcagaggcaagatcagactgagacaggccagctggatcatcagaggcggcaccgaggccgactaccagctgcacaacgtgcaggtgatctgccacaccgaggccgtggccgagaagctgggccagcaggtgaacagaacctgccccggcttcctggccgacggcggcccctgggtgcaggacgtggcctacgacctgtggagagaggagaacggctgcgagtgcaccaaggccgtgaacttcgccatgcacgagctgcagctgatcagagtggagaagcagtacctgcaccacaacctggaccacctggtggaggagctgttcctgggcgacatccacaccgacgccacccagagaatgttctacagacccagcagctaccagccccccctgcagaacgccaagaaccacgaccacgcctgcatcgcctgcagaatcatctacagaagcgacgagcaccacccccccatcctgccccccaaggccgacctgaccatcggcctgcacggcgagtgggtgagccagagatgcgaggtgagacccgaggtgctgttcctgaccagacacttcatcttccacgacaacaacaacacctgggagggccactactaccactacagcgaccccgtgtgcaagcaccccaccttcagcatctacgccagaggcagatacagcagaggcgtgctgagcagcagagtgatgggcggcaccgagttcgtgttcaaggtgaaccacatgaaggtgacccccatggacgccgccaccgccagcctgctgaacgtgttcaacggcaacgagtgcggcgccgagggcagctggcaggtgggcatccagcaggacgtgacccacaccaacggctgcgtggccctgggcatcaagctgccccacaccgagtacgagatcttcaagatggagcaggacgccagaggcagatacctgctgttcaacggccagagacccagcgacggcagcagccccgacagacccgagaagagagccaccagctaccagatgcccctggtgcagtgcgccagcagcagccccagagccgaggacctggccgaggacagcggcagcagcctgtacggcagagcccccggcagacacacctggagcctgctgctggccgccctggcctgcctggtgcccctgctgcactggaacatcagaagatag

SEQ ID NO: 245111 - protein, 387 aa, Artificial Sequence
  derived and/or modified sequence
MEEIGILVEKAQDEIPALSVSRPQTGLSFLGPEPEDLEDLYSRYKEEVKRIQSIPLVIGQFLEAVDQNTAIVGSTTGSNYYVRILSTIDRELLKPNASVALHKHSNALVDVLPPEADSSIMMLTSDQKPDVMYADIGGMDIQKQEVREAVELPLTHFELYKQIGIDPPRGVLMYGPPGCGKTMLAKAVAHHTTAAFIRVVGSEFVQKYLGEGPRMVRDVFRLAKENAPAIIFIDEIDAIATKRFDAQTGADREVQRILLELLNQMDGFDQNVNVKVIMATNRADTLDPALLRPGRLDRKIEFPLPDRRQKRLIFSTITSKMNLSEEVDLEDYVARPDKISGADINSICQESGMLAVRENRYIVLAKDFEKAYKTVIKKDEQEHEFYK

SEQ ID NO: 245112 - DNA, 1164 bp, Artificial Sequence
  derived and/or modified sequence
atggaggagattggaatactagtagagaaggctcaggacgagatcccagctctcagcgtttcgcggcctcagacgggtctgtcttttctgggtcctgaaccggaggatctggaagatctctacagcaggtataaagaggaggtgaagaggatacagtccatcccactggtcattggtcagttccttgaggccgtggatcagaataccgcaatcgtgggctccactaccggctcaaattattatgtgagaatactgtctactatcgaccgagaattacttaaaccaaacgcaagcgtagcactacataaacattctaatgctctcgtcgatgtgctgcctcctgaggctgactcatcaatcatgatgctgacctcagaccagaagcccgatgttatgtacgctgacattggcggaatggatatccagaagcaggaagttagagaagccgtggagctgcccctcacgcattttgaactgtataagcagatcgggattgatccccctaggggagttctgatgtacggtccacctggatgcggaaaaaccatgcttgccaaagcggtcgcccatcataccacagccgcctttatccgagttgtcgggtctgagtttgtgcagaaatacctcggggaaggcccccgaatggttagggatgtgttcaggctagcaaaagagaacgcgcctgcaataatctttatagacgagattgatgccattgccactaagaggtttgatgcacaaacaggagccgacagggaggtccagagaatacttctagaactcttgaaccagatggacggctttgatcagaatgtcaatgttaaggtgatcatggccaccaatcgcgccgacactctggaccctgctctcctcagaccgggccgcctagatcggaagatcgaattccctctgcctgataggcgccagaaacggctgatatttagtacaataactagcaagatgaatctgtccgaagaggtagatctggaggactatgtggcccgacccgataaaatttctggggctgacattaacagtatctgtcaagagtctggtatgctcgcagtcagggagaatcggtatatcgtgctggctaaggatttcgagaaggcctataaaactgtgatcaaaaaggacgaacaagagcacgagttctacaagtag

SEQ ID NO: 245113 - DNA, 1164 bp, Artificial Sequence
  derived and/or modified sequence
atggaggagatcggcatcctggtggagaaggcccaggatgagatcccagccctgtctgtgtcccggccccagacaggcctgtccttcctgggccctgagcctgaggacctggaggacctgtacagccgctacaaggaggaggtgaagaggatccagagcatccccctggtgattggccagttcctggaggccgtggaccagaacacagccatcgtgggcagcaccaccggcagcaactactacgtgcgcatcctgagcaccatcgaccgggagctgctgaagcccaatgcctctgtggccctgcacaagcacagcaatgccctggtggatgtgctgcccccagaggccgacagcagcatcatgatgctgaccagtgaccagaagccagatgtgatgtatgctgacatcggcggcatggacatccagaagcaggaggtgcgggaggccgtggagctgcccctgacccactttgagctgtacaagcagattggaattgatcctccccggggcgtgctgatgtatggccccccaggctgcggcaagaccatgctggccaaggctgtggcccaccacaccacagctgccttcatccgggtggtgggcagcgagtttgtgcagaagtacctgggggagggccccaggatggtgagagatgtgttccggctggccaaggaaaatgccccagccatcatcttcattgatgaaattgatgccatcgccaccaagagatttgatgcccagacaggagctgaccgggaggtgcagaggatcctgctggagctgctgaaccagatggatggctttgaccagaatgtgaatgtgaaggtgatcatggccaccaacagagctgacaccctggaccctgccctgctgcggcccggccgcctggacaggaagattgagttccccctgcctgaccggcggcagaagaggctcatcttcagcaccatcaccagcaagatgaacctgtctgaggaggtggacctggaggactatgtggcccggccagacaagatcagcggggctgacatcaacagcatctgccaggagagcggcatgctggccgtgcgggagaaccgctacatcgtgctggccaaggactttgagaaggcctacaagacagtcatcaagaaggatgagcaggagcacgagttctacaagtag

SEQ ID NO: 245114 - DNA, 1164 bp, Artificial Sequence
  derived and/or modified sequence
atggaggagatcggcatcctggtggagaaggcccaggacgagatccccgccctgtcagtgtctcgccctcagacgggcttgtcctttctcggcccggagccagaagatctggaagacctttacagccgatataaggaagaggtcaaaaggatccagtctatacccctcgtgatcggacaatttcttgaggctgtggaccagaacaccgctattgttggttcaacgactgggtccaattattatgtgcgcattctgtccacaatcgatcgagaactcctcaagccgaatgcttctgttgctctccacaaacattcaaatgcactggtagacgtgctgccacctgaagctgatagttcaatcatgatgcttacctcagaccaaaaaccagatgtgatgtatgcggatattggagggatggacatccagaaacaagaggttcgggaggccgtggaactgcctttaacacacttcgaattgtacaaacagatcgggatagatcctccgaggggtgtcctcatgtacggtcccccagggtgcggcaagaccatgcttgcaaaggccgtggcccatcacacaacagcggcgtttatcagggtggttgggtccgaattcgttcagaagtacctgggcgaggggccaagaatggtgagagatgtgttccggctggcaaaggaaaatgcccccgctattattttcattgacgagatcgacgctatcgccacgaagcgcttcgacgcacagaccggagccgatagggaggtacagaggatattgttggagctgctgaatcaaatggatggctttgaccagaatgttaacgtgaaggtgattatggctaccaaccgggctgacacactcgaccccgccctgctgcgccctgggcgcttagacaggaaaattgagtttccactcccagatagaagacagaaacggctgatttttagtaccatcacttccaaaatgaatctgtcggaggaggttgatctcgaagactatgtcgcccgacccgacaagatttccggcgccgatatcaactccatttgccaggaaagcggtatgctggcagtgcgcgaaaaccgatatattgtgctggcaaaagattttgagaaggcctacaagactgtcatcaagaaggacgagcaggagcatgagttttacaagtag

SEQ ID NO: 245115 - DNA, 1164 bp, Artificial Sequence
  derived and/or modified sequence
atggaagaaattggcattctggtggaaaaggcccaggatgagatccccgcactcagcgtgagccggcctcagaccgggcttagcttcctgggacccgagcccgaagatttggaagacctctattctcgatataaagaagaggtgaagcgcattcaatctatcccactggtgatcggccagttcttagaagccgttgaccagaacacggccattgtggggagtacaaccggtagcaactattacgtgagaatcttatctaccattgatcgggagttgctgaagcccaacgcatcagtggcacttcataagcattctaacgcactggtggacgtgctgccccctgaggctgattcatctattatgatgctcactagtgatcaaaagcccgacgtgatgtacgccgacattggtgggatggatattcagaaacaagaggtgagggaagccgtggagctgcctctaacgcattttgaattgtacaaacaaatcggcatcgaccctcccaggggtgtcttgatgtacggccctcccggttgtggaaaaacaatgctggccaaagctgttgcgcaccatacgacagcagctttcatccgagtggtaggcagcgaattcgttcagaagtatctcggagaaggacctcgtatggttagagacgtgtttcggctggccaaagagaacgccccagctataatatttatcgatgagattgatgcaatagccacaaagagattcgacgcccaaacaggcgcagaccgggaggttcaaagaattctcttagagttgcttaatcagatggatggtttcgatcaaaatgttaatgtgaaggtgatcatggccactaatagagcagataccctggaccccgcattgctgagacccggaagactggatcggaagatcgaatttcccctgccagatcggagacagaagagattaatctttagcacgattacttcaaagatgaatctttccgaagaggttgatctggaagattatgtggctcggccagacaaaatttctggcgctgacataaattctatctgccaggagtccggcatgcttgcagtccgggaaaacaggtatattgtgcttgccaaggacttcgaaaaggcttataaaaccgtaattaagaaagacgagcaggagcacgaattttacaaatag

SEQ ID NO: 245116 - DNA, 1340 bp, Artificial Sequence
  derived and/or modified sequence
gatcatcccaggccacacagaggccggcttggtcactatggaggagataggcatcttggtggagaaggctcaggatgagatcccagcactgtccgtgtcccggccccagaccggcctgtccttcctgggccctgagcctgaggacctggaggacctgtacagccgctacaaggaggaggtgaagcgaatccaaagcatcccgctggtcatcggacaatttctggaggctgtggatcagaatacagccatcgtgggctctaccacaggctccaactattatgtgcgcatcctgagcaccatcgatcgggagctgctcaagcccaacgcctcagtggccctccacaagcacagcaatgcactggtggacgtgctgccccccgaagccgacagcagcatcatgatgctcacctcagaccagaagccagatgtgatgtacgcggacatcggaggcatggacatccagaagcaggaggtgcgggaggccgtggagctcccgctcacgcatttcgagctctacaagcagatcggcatcgatcccccccgaggcgtcctcatgtatggcccacctggctgtgggaagaccatgttggcaaaggcggtggcacatcacacaacagctgcattcatccgggtcgtgggctcggagtttgtacagaagtatctgggtgagggcccccgcatggtccgggatgtgttccgcctggccaaggagaatgcacctgccatcatcttcatagacgagattgatgccatcgccaccaagagattcgatgctcagacaggggccgacagggaggttcagaggatcctgctggagctgctgaatcagatggatggatttgatcagaatgtcaatgtcaaggtaatcatggccacaaacagagcagacaccctggatccggccctgctacggccaggacggctggaccgtaaaattgaatttccacttcctgaccgccgccagaagagattgattttctccactatcactagcaagatgaacctctctgaggaggttgacttggaagactatgtggcccggccagataagatttcaggagctgatattaactccatctgtcaggagagtggaatgttggctgtccgtgaaaaccgctacattgtcctggccaaggacttcgagaaagcatacaagactgtcatcaagaaggacgagcaggagcatgagttttacaagtgacccttcccttccctccaccacaccactcaggggctggggcttctctcgcacccccagcacctctgtcccaaaacctcattcccttttttctttacccaggattggtttcttcaataaatagataagatcgaatccattt

SEQ ID NO: 245117 - DNA, 1164 bp, Artificial Sequence
  derived and/or modified sequence
atggaggagatcggcatcctggtggagaaggcccaggacgagatccccgccctgagcgtgagcagaccccagaccggcctgagcttcctgggccccgagcccgaggacctggaggacctgtacagcagatacaaggaggaggtgaagagaatccagagcatccccctggtgatcggccagttcctggaggccgtggaccagaacaccgccatcgtgggcagcaccaccggcagcaactactacgtgagaatcctgagcaccatcgacagagagctgctgaagcccaacgccagcgtggccctgcacaagcacagcaacgccctggtggacgtgctgccccccgaggccgacagcagcatcatgatgctgaccagcgaccagaagcccgacgtgatgtacgccgacatcggcggcatggacatccagaagcaggaggtgagagaggccgtggagctgcccctgacccacttcgagctgtacaagcagatcggcatcgacccccccagaggcgtgctgatgtacggcccccccggctgcggcaagaccatgctggccaaggccgtggcccaccacaccaccgccgccttcatcagagtggtgggcagcgagttcgtgcagaagtacctgggcgagggccccagaatggtgagagacgtgttcagactggccaaggagaacgcccccgccatcatcttcatcgacgagatcgacgccatcgccaccaagagattcgacgcccagaccggcgccgacagagaggtgcagagaatcctgctggagctgctgaaccagatggacggcttcgaccagaacgtgaacgtgaaggtgatcatggccaccaacagagccgacaccctggaccccgccctgctgagacccggcagactggacagaaagatcgagttccccctgcccgacagaagacagaagagactgatcttcagcaccatcaccagcaagatgaacctgagcgaggaggtggacctggaggactacgtggccagacccgacaagatcagcggcgccgacatcaacagcatctgccaggagagcggcatgctggccgtgagagagaacagatacatcgtgctggccaaggacttcgagaaggcctacaagaccgtgatcaagaaggacgagcaggagcacgagttctacaagtag

SEQ ID NO: 245118 - protein, 814 aa, Artificial Sequence
  derived and/or modified sequence
MEPEINCSELCDSFPGQELDRRPLHDLCKTTITSSHHSSKTISSLSPVLLGIVWTFLSCGLLLILFFLAFTIHCRKNRIVKMSSPNLNIVTLLGSCLTYSSAYLFGIQDVLVGSSMETLIQTRLSMLCIGTSLVFGPILGKSWRLYKVFTQRVPDKRVIIKDLQLLGLVAALLMADVILLMTWVLTDPIQCLQILSVSMTVTGKDVSCTSTSTHFCASRYSDVWIALIWGCKGLLLLYGAYLAGLTGHVSSPPVNQSLTIMVGVNLLVLAAGLLFVVTRYLHSWPNLVFGLTSGGIFVCTTTINCFIFIPQLKQWKAFEEENQTIRRMAKYFSTPNKSFHTQYGEEENCHPRGEKSSMERLLTEKNAVIESLQEQVNNAKEKIVRLMSAECTYDLPEGAAPPASSPNKDVQAVASVHTLAAAQGPSGHLSDFQNDPGMAARDSQCTSGPSSYAQSLEGPGKDSSFSPGKEEKISDSKDFSDHLDSGCSQKPWTEQSLGPERGDQVPMNPSQSLLPERGGSDPQRQRHLENSEEPPERRSRVSSVIREKLQEVLQDLGLGPEASLSTAPSCHQQTWKNSAAFSPQKMPLSKELGFSPYMVRRRRAAQRARSHFPGSAPSSVGHRANRTVPGAHSRLHVQNGDSPSLAPQTTDSRVRRPSSRKPSLPSDPQDRPGTLEGSKQSQTEPEGARGSKAAFLRQPSGSGRAPSPAAPCLSKASPDLPEQWQLWPPVPSGCASLSSQHSYFDTESSSSDEFFCRCHRPYCEICFQSSSDSSDSGTSDTDPEPTGGLASWEKLWARSKPIVNFKDDLKPTLV

SEQ ID NO: 245119 - DNA, 4193 bp, Artificial Sequence
  derived and/or modified sequence
ggagcctagcgaaataaccctttgcttctacctgaatgggttgttcactctggattctgagcctgcagccagctccaaaatggggcctctgaagaaaagatttgagttgctcttgtgtcttagtcaaagatctacatccctaccagtgggtaaccaagactgtgaataagcacacaccaacaggggcatgtggtgacatggagcctgaaataaactgctctgaattgtgtgacagttttcctggccaggagctggatcggagaccccttcatgatctctgcaagacaacaattacatcttcccaccacagcagtaagaccatctcttcattatctcctgtcctcttgggtattgtttggacttttctcagctgtggacttctgctgatacttttctttcttgcctttacaattcactgcaggaagaacaggattgtgaagatgtccagtcccaatctgaacattgtgaccttactgggcagttgtctcacttacagtagcgcttacctctttgggattcaggatgttttagtggggagctcaatggaaactctcattcagacaagactgtccatgctgtgcattgggacctcccttgtgtttggccccattctgggaaagagctggcgactctacaaggtgtttacccaaagggtcccggacaagagagtgattatcaaagacctgcagttgctggggttggtggcagccctgttgatggctgatgtgatcctgctcatgacgtgggtgctgactgatcccatccagtgcctccagattctcagtgtcagtatgacggtgacagggaaagacgtgtcctgcacttcgaccagcacccacttctgtgcttcccggtattccgatgtttggattgctctcatttggggatgcaagggtctgctcctgctgtatggtgcctacctggctggcctgactggccatgtcagctcccctcctgtgaatcagtccttaaccatcatggtgggggtcaacctccttgtactggctgctgggctgctttttgtagtcaccagatacttgcattcctggcccaacctggtctttggactcacatctggagggatctttgtttgtacaactacaatcaactgcttcatcttcattccccagctgaagcaatggaaggcatttgaagaggaaaaccaaacaatcagacgcatggccaaatatttcagcactcccaacaaaagcttccatacccagtatggtgaggaggagaactgccacccgaggggagagaaaagctccatggagaggctcctcacagaaaaaaatgctgtgattgaaagcctgcaggaacaagtaaacaacgccaaagagaagattgtgaggctgatgtcagctgagtgcacctatgacctcccagagggggctgccccacctgcctcttccccgaacaaggacgtccaggcggtagcctcggtccacaccctggcagctgctcaggggccttcgggtcacctctctgactttcagaatgatcctggcatggctgcccgggattcccagtgcacttcagggccctcctcatatgcacaaagccttgaggggcctgggaaggactccagcttctccccagggaaggaggagaagatatctgactcaaaagacttttctgatcatttagactcaggttgtagccagaagccatggactgagcaaagcctgggtccagaaagaggagaccaagtccccatgaaccccagccagagtctcctaccagaaagaggcggctcagatccccagagacagaggcatctggagaactcagaggagcccccagagcggcggtcacgggttagttcagtaatcagggagaaacttcaggaggtcttacaagatctgggcctgggccctgaggcttccctctccaccgccccctcttgtcatcagcaaacctggaagaacagtgctgccttcagcccccaaaagatgcccctctccaaggagctcggctttagcccttacatggtgaggagaaggcgggcagctcagcgggcccgctcacactttcctggctctgcaccctcatctgtggggcatcgggcaaacaggactgttcctggggcacacagcaggctacatgtgcagaatggggacagccccagcctggccccacaaactactgattccagagtacgaagaccttcttccaggaagccttcactaccttcagatcctcaagacagaccaggtaccctggagggcagcaaacaaagccagacagagcccgagggggctagagggagcaaagcagcctttcttcgccagccttctggttctggccgggccccaagtcctgctgccccatgcctctccaaagcctcacctgacttgcctgaacagtggcagctgtggcccccagtgccctcaggctgtgcctccctgtcttctcaacacagctattttgatactgagtccagcagctcagatgagttcttctgccgctgccaccggccctactgtgaaatctgcttccagagctcttctgactctagtgacagtggcacatcagacactgaccctgagcctactggggggctggcttcctgggaaaagctgtgggcccgctccaagcctattgtgaacttcaaagatgacttgaaacccacgctggtgtgaaaagcaacagagctggtctagacacagaggtcagtccaagagaagctgtaccaaggcccacaggagaagagccaatttctggtctttggggaacagattagtgccctgcatttgaccagcccataccatgtttcagctaggctcactgtgttactttgagtacttcttgatctataaaaagagaggcattgcctgtcctgttactacctcgcagccttactataaaagactccagttgagtgactatgaaagacactgactccttggataaaaggtgctgaatgaacacataggattttctgtccaggtcagcctacattctgtaaaactcttaatatattcagatggatggctgaatggacagacagatggagagatgcatgggaaatttctgtagaacttgaggtgtggactgtgacccatcaaactggccttttggtggacagacctaccaggaagataagtctcctacatccttgggcctcccactcctggaaggcagtggttttatttctgctgaatgttgtgaacagcacctccctagattccagcttctggccagacccagctcagagccacccctacaccactatttcttgatggtgtctttccaccattatggcactttaccctcctctctgagacagatctccatgcgcccgcaggcttcccagatctctcccctgggatcggatgtacctgaggtcctgactgtccccactgtccccttgtcctgtggctcatcctcgattcacccactgatgcagttttgtactgcggggaggcacacaccagcaatttctgttggggtatgggagaacctgttggtcaagagtgcttttggttccattggggttacatgactaccaacagacacataaacctggaagccaaatggagaaataaaaaggaagacacgagggacacgaaaacaggaaagaaaacaggatttgaatatttcacttgagtccagcatagtacttggcaatatcatatttttgtgattccttttgataaccctgtgaagtagacactttcatttttacagacaaggattatgaggcttagagaaatgaggtagtttcccgcaacatcacactgctggacagagatgtacacacagctcctgggactcaagtaggtgggttttcccagggacacatggcttcatgtgttcttctgggaatggcaggtgacgcttggcagacgagacaacaaagcaaggctcatgtaagaaagctgggatgtgctcccctatagtccagaataatagacctgggtcctcacctcaggaaacgggcctccacttcctcactgccaaaggccacactggcacctcccaagggagctggggagctggtgaaggatgagtgcgaggaactcagccaccaccagagccacagggagagcacacctgggtccactgtgcttattgctgagctggctgtcatgtccaggctgtcccctgccccgagtcctgtgtatacatctgtgggtgtgcacatgtttgcatgaaggaattcaggccttattaaatattctcagaggggg

SEQ ID NO: 245120 - DNA, 4442 bp, Artificial Sequence
  derived and/or modified sequence
ggggaccgtgggcgtcctgcacatagcagcgggcttggcgcttctcggcggtccgacgctgatgaggaaccagagtgagggtactcgaacagtgactgccatctggtggttaaccagaatcatcaccttgtgtagcctgatggttactaagatgtccactcttgactcacatggcatgcactcgcagcaggggaccagttgaaggatgtctgactttggagggtcaccagttgaaggatgtctgatgaaggagcctagcgaaataaccctttgcttctacctgaatgggttgttcactctggattctgagcctgcagccagctccaaaatggggcctctgaagaaaagatttgagttgctcttgtgtcttagtcaaagatctacatccctaccagtgggtaaccaagactgtgaataagcacacaccaacaggggcatgtggtgacatggagcctgaaataaactgctctgaattgtgtgacagttttcctggccaggagctggatcggagaccccttcatgatctctgcaagacaacaattacatcttcccaccacagcagtaagaccatctcttcattatctcctgtcctcttgggtattgtttggacttttctcagctgtggacttctgctgatacttttctttcttgcctttacaattcactgcaggaagaacaggattgtgaagatgtccagtcccaatctgaacattgtgaccttactgggcagttgtctcacttacagtagcgcttacctctttgggattcaggatgttttagtggggagctcaatggaaactctcattcagacaagactgtccatgctgtgcattgggacctcccttgtgtttggccccattctgggaaagagctggcgactctacaaggtgtttacccaaagggtcccggacaagagagtgattatcaaagacctgcagttgctggggttggtggcagccctgttgatggctgatgtgatcctgctcatgacgtgggtgctgactgatcccatccagtgcctccagattctcagtgtcagtatgacggtgacagggaaagacgtgtcctgcacttcgaccagcacccacttctgtgcttcccggtattccgatgtttggattgctctcatttggggatgcaagggtctgctcctgctgtatggtgcctacctggctggcctgactggccatgtcagctcccctcctgtgaatcagtccttaaccatcatggtgggggtcaacctccttgtactggctgctgggctgctttttgtagtcaccagatacttgcattcctggcccaacctggtctttggactcacatctggagggatctttgtttgtacaactacaatcaactgcttcatcttcattccccagctgaagcaatggaaggcatttgaagaggaaaaccaaacaatcagacgcatggccaaatatttcagcactcccaacaaaagcttccatacccagtatggtgaggaggagaactgccacccgaggggagagaaaagctccatggagaggctcctcacagaaaaaaatgctgtgattgaaagcctgcaggaacaagtaaacaacgccaaagagaagattgtgaggctgatgtcagctgagtgcacctatgacctcccagagggggctgccccacctgcctcttccccgaacaaggacgtccaggcggtagcctcggtccacaccctggcagctgctcaggggccttcgggtcacctctctgactttcagaatgatcctggcatggctgcccgggattcccagtgcacttcagggccctcctcatatgcacaaagccttgaggggcctgggaaggactccagcttctccccagggaaggaggagaagatatctgactcaaaagacttttctgatcatttagactcaggttgtagccagaagccatggactgagcaaagcctgggtccagaaagaggagaccaagtccccatgaaccccagccagagtctcctaccagaaagaggcggctcagatccccagagacagaggcatctggagaactcagaggagcccccagagcggcggtcacgggttagttcagtaatcagggagaaacttcaggaggtcttacaagatctgggcctgggccctgaggcttccctctccaccgccccctcttgtcatcagcaaacctggaagaacagtgctgccttcagcccccaaaagatgcccctctccaaggagctcggctttagcccttacatggtgaggagaaggcgggcagctcagcgggcccgctcacactttcctggctctgcaccctcatctgtggggcatcgggcaaacaggactgttcctggggcacacagcaggctacatgtgcagaatggggacagccccagcctggccccacaaactactgattccagagtacgaagaccttcttccaggaagccttcactaccttcagatcctcaagacagaccaggtaccctggagggcagcaaacaaagccagacagagcccgagggggctagagggagcaaagcagcctttcttcgccagccttctggttctggccgggccccaagtcctgctgccccatgcctctccaaagcctcacctgacttgcctgaacagtggcagctgtggcccccagtgccctcaggctgtgcctccctgtcttctcaacacagctattttgatactgagtccagcagctcagatgagttcttctgccgctgccaccggccctactgtgaaatctgcttccagagctcttctgactctagtgacagtggcacatcagacactgaccctgagcctactggggggctggcttcctgggaaaagctgtgggcccgctccaagcctattgtgaacttcaaagatgacttgaaacccacgctggtgtgaaaagcaacagagctggtctagacacagaggtcagtccaagagaagctgtaccaaggcccacaggagaagagccaatttctggtctttggggaacagattagtgccctgcatttgaccagcccataccatgtttcagctaggctcactgtgttactttgagtacttcttgatctataaaaagagaggcattgcctgtcctgttactacctcgcagccttactataaaagactccagttgagtgactatgaaagacactgactccttggataaaaggtgctgaatgaacacataggattttctgtccaggtcagcctacattctgtaaaactcttaatatattcagatggatggctgaatggacagacagatggagagatgcatgggaaatttctgtagaacttgaggtgtggactgtgacccatcaaactggccttttggtggacagacctaccaggaagataagtctcctacatccttgggcctcccactcctggaaggcagtggttttatttctgctgaatgttgtgaacagcacctccctagattccagcttctggccagacccagctcagagccacccctacaccactatttcttgatggtgtctttccaccattatggcactttaccctcctctctgagacagatctccatgcgcccgcaggcttcccagatctctcccctgggatcggatgtacctgaggtcctgactgtccccactgtccccttgtcctgtggctcatcctcgattcacccactgatgcagttttgtactgcggggaggcacacaccagcaatttctgttggggtatgggagaacctgttggtcaagagtgcttttggttccattggggttacatgactaccaacagacacataaacctggaagccaaatggagaaataaaaaggaagacacgagggacacgaaaacaggaaagaaaacaggatttgaatatttcacttgagtccagcatagtacttggcaatatcatatttttgtgattccttttgataaccctgtgaagtagacactttcatttttacagacaaggattatgaggcttagagaaatgaggtagtttcccgcaacatcacactgctggacagagatgtacacacagctcctgggactcaagtaggtgggttttcccagggacacatggcttcatgtgttcttctgggaatggcaggtgacgcttggcagacgagacaacaaagcaaggctcatgtaagaaagctgggatgtgctcccctatagtccagaataatagacctgggtcctcacctcaggaaacgggcctccacttcctcactgccaaaggccacactggcacctcccaagggagctggggagctggtgaaggatgagtgcgaggaactcagccaccaccagagccacagggagagcacacctgggtccactgtgcttattgctgagctggctgtcatgtccaggctgtcccctgccccgagtcctgtgtatacatctgtgggtgtgcacatgtttgcatgaaggaattcaggccttattaaatattctcagaggggg

SEQ ID NO: 245121 - DNA, 2445 bp, Artificial Sequence
  derived and/or modified sequence
atggagcccgaaatcaactgtagcgagttgtgtgactctttccctgggcaagaactcgatcgcaggccccttcatgacctctgcaaaactactattacgtcatctcatcattctagcaagaccattagctcgttgtctcccgtgcttctaggaatagtctggacgttcctgtcctgtggcttgctgctgattctgttcttccttgctttcacgattcactgcagaaagaaccgaattgtgaagatgtccagccccaatttgaacatagtgacactcttgggctcctgtctgacctacagcagcgcatacctgtttggaatccaagacgtgctcgtagggtcttccatggagaccttaatccaaaccagactgagcatgttgtgcatcggcacttctctggttttcgggccaatcctcggaaaatcctggcggctctacaaagtgttcacgcagcgggtgcccgataagcgagtcattattaaagacttgcagttgctgggtctggttgccgcgcttctcatggccgatgtgatactcctgatgacatgggtgctgactgacccaatccagtgcttgcagatactgtcagtctccatgacagtgaccggtaaggatgtttcatgcaccagtacgtctacccatttctgcgcatctcggtactctgatgtgtggatcgcacttatctggggctgcaaagggcttttattactttacggggcatacctggctgggctgacgggccatgtcagctcccctcccgtgaatcaatctctgaccattatggtgggcgtgaatcttctggttttagccgccggactcctgtttgtcgttaccaggtacctccactcatggccaaacctggtgttcggcctgacatccgggggcatatttgtgtgcacaaccactatcaattgcttcatctttattcctcagctgaaacagtggaaagcctttgaggaagaaaatcaaacaatccgccggatggccaaatacttcagtacgcctaacaagtctttccatacccagtatggcgaagaggagaactgtcatcccaggggggaaaagtcctctatggagagattgctgaccgagaagaacgccgtgattgaaagcctgcaggagcaggtgaacaacgccaaagaaaaaatagtcagactgatgtcagccgaatgtacctatgacctgccagaaggcgcagcacctcctgcttcatcgcctaacaaggatgtccaggccgtggcttccgttcacaccctggccgccgcccagggtccctctggccatctgtcagattttcagaacgacccaggcatggcagcgagggactctcagtgtacgagtggacctagcagctatgctcagagtctggagggtcccggcaaggatagctccttcagcccaggtaaggaagaaaagatctcagacagtaaagatttctcagaccacctggactcgggttgctcccagaagccctggacggagcagtctcttggaccagaacgcggcgaccaagtgcccatgaacccctcccagtctttactcccagagcggggcggctctgacccacagcgccagagacacttggaaaactccgaagagccgccagagagaaggtcccgcgtatcttccgtgatccgggaaaagctgcaagaggtcctgcaagacttgggcttgggccccgaggcatctctcagcaccgcgccctcttgccaccagcaaacctggaaaaatagcgccgccttcagtccgcaaaaaatgccactttccaaggagctggggttcagcccttacatggtccgtcggcgaagggcggctcagcgcgcacggagccactttcctggatccgcaccttcatccgtgggtcaccgcgctaatcggacagtgccaggggcgcactcccgcttgcacgtacagaatggagattcaccctccctggcccctcagacgactgacagtcgggtgcgccgcccttcttcacgaaagccttccctgccttccgaccctcaggaccggccggggaccctcgagggcagcaaacagtcgcagacagagccggagggagcacggggctccaaagccgcttttctgaggcagccgtctggatccgggcgcgctccttccccagcagcaccttgcttaagtaaggccagtcctgaccttcccgagcagtggcagctttggcccccagtgccttcaggctgcgcctctctatcgtcccagcattcctattttgatacagaaagctccagtagcgacgaattcttttgtcgctgtcatcggccctattgtgagatatgctttcagagctcatctgacagctccgactctggcacctccgataccgaccctgagccaaccggggggctcgcaagttgggagaaactttgggcccgatctaagcctattgtgaattttaaggacgatctaaaacccactctggtgtag

SEQ ID NO: 245122 - DNA, 2445 bp, Artificial Sequence
  derived and/or modified sequence
atggaacccgaaatcaactgttccgagctgtgcgattccttccccggacaggagcttgatcgccgaccactacacgatctgtgtaagaccacaattaccagcagccaccacagctccaagacgatctcctccctgtcccccgtactgctggggatcgtgtggacttttctaagttgcgggttactcctaatccttttttttctcgcctttacaatccactgtcgtaagaaccggatagtgaaaatgagcagcccaaacctgaatatcgtcacactcttaggcagctgcctgacgtattcatcagcctacctgtttggaatccaggacgtacttgtggggtcatccatggaaacgttgatacagacacgtctcagtatgctctgcatcggaacttcgctggtctttggtccaattcttggaaagtcctggcgcttgtataaagtgttcacacaacgggtgccagataaacgggtcatcattaaagacctccagttactgggtctagtggctgcactccttatggcggatgttatcctgctgatgacttgggtccttaccgaccctattcagtgtctgcaaatcctgagcgtttctatgacggtgacggggaaggacgtgtcatgcactagcacgagtacacacttctgcgcctcgcgatatagcgacgtgtggattgctctgatttggggctgcaagggcctgctattgctgtacggggcttatctcgctggcttgactggccacgttagttcaccacccgtcaaccagagtctgaccatcatggtgggagtgaacttactagtgcttgccgctggccttctctttgttgtaacccggtatctgcattcttggcctaacctggtcttcggcttaacaagcgggggcatctttgtgtgcactaccactatcaactgtttcattttcattcctcagctgaaacaatggaaggcctttgaagaggaaaaccaaacaatccgccggatggcaaaatattttagcacgcctaataaatcctttcacactcaatatggagaagaggagaattgtcatccaaggggcgagaagtcgtctatggagagactgttgacagagaagaatgcggtgattgaaagccttcaggagcaggtcaataacgcaaaggagaaaattgtgcgacttatgtctgccgagtgtacctacgacttgccggagggcgctgcaccgcccgctagtagtccgaataaagatgtacaggcagtagctagcgtgcatacacttgcagccgcccaagggcccagcgggcatctgagtgacttccaaaacgatcctgggatggccgcgcgagacagccaatgcacaagcggaccctcatcatacgctcaaagcctagaaggacccggaaaagactcctcattcagcccagggaaagaggagaagatctcagattctaaggacttttcagatcacttggattctgggtgttcacaaaagccttggactgaacagtcactgggaccagagaggggtgatcaggtacctatgaatccctcccagagcctcttaccagagcgggggggaagcgacccccaacgccagagacacctcgaaaattcggaagaacccccagaaagacgctctcgagtctcttcggtaatcagggagaagctgcaggaggttctgcaggatttgggattggggccggaggctagcctttctaccgctcctagctgccaccagcagacctggaagaattctgctgcattttctccccagaagatgcccctgtccaaagagctgggattctcgccttacatggtcagaaggaggagagcggcgcaacgagctcggagtcattttccagggtcagcccccagcagtgtcggacacagggccaaccggactgtaccgggcgcccatagtcgactccacgtgcagaatggtgatagtcctagtttagctccccaaaccacagactctcgtgtgagaagacccagctcgcggaagccctcactgcctagcgacccacaggatcggccgggtacactggaagggtcaaagcagagccagaccgagccagaaggagcaaggggatcaaaagccgccttcttgaggcagccctcaggctctggtagagctccttccccagccgcgccttgtctcagtaaggctagccctgacctcccggaacagtggcaactttggccccccgtgccatctggctgcgcttcgctctctagtcagcactcctattttgatacggagtcctctagcagcgatgagttcttttgccgctgccatcgtccctattgcgagatctgtttccagtcctccagtgacagtagcgacagcggcacgtccgacaccgaccccgaacccacagggggccttgccagttgggaaaagctttgggctcgcagtaagccaattgtgaatttcaaggacgacttaaagcccactctcgtgtag

SEQ ID NO: 245123 - DNA, 2445 bp, Artificial Sequence
  derived and/or modified sequence
atggagcctgagatcaactgcagcgagctgtgtgacagcttccctggccaggagctggacagaagacccctgcatgacctgtgcaagaccaccatcaccagcagccaccacagcagcaagaccatcagcagcctgagccctgtgctgctgggcatcgtgtggaccttcctgagctgtggcctgctgctgatcctcttcttcctggccttcaccatccactgcaggaagaacagaattgtgaagatgagcagccccaacctgaacatcgtgaccctgctgggcagctgcctgacctacagcagcgcctacctgtttggcatccaggatgtgctggtgggcagctccatggagaccctcatccagacccggctgtccatgctgtgcatcggcaccagcctggtgtttggccccatcctgggcaagtcctggaggctgtacaaggtgttcacccagagggtgcctgacaagagggtcatcatcaaggacctgcagctgctgggcctggtggccgccctgctgatggctgatgtgatcctgctgatgacctgggtgctgacagaccccatccagtgcctgcagatcctgtctgtgtccatgacagtgacaggcaaggatgtgtcctgcaccagcaccagcacccacttctgtgccagccgctacagtgatgtgtggatcgccctgatctggggctgcaagggcctgctgctgctgtatggagcctacctggccggcctgaccggccacgtgagcagcccccctgtgaaccagagcctgaccatcatggtgggcgtgaacctgctggtgctggccgccggcctgctgtttgtggtgacccgctacctgcacagctggcccaacctggtgtttggcctgaccagcggcggcatctttgtgtgcaccaccaccatcaactgcttcatcttcatcccccagctgaagcagtggaaggcctttgaggaggagaaccagaccatccggaggatggccaagtacttcagcacccccaacaagagcttccacacccagtatggagaggaggagaactgccaccccagaggagagaagagctccatggagcggctgctgacagagaagaatgctgtgattgagagcctgcaggagcaggtgaacaatgccaaggagaagatcgtgcggctgatgtctgctgagtgcacctatgacctgcctgagggcgccgcccccccagccagcagccccaacaaggatgtgcaggccgtggcctctgtgcacaccctggccgccgcccagggccccagcggccacctgagtgacttccagaatgaccccggcatggccgcccgggacagccagtgcaccagcggccccagcagctatgcccagagcctggagggccctgggaaggacagcagcttcagccctgggaaggaggagaagatcagtgacagcaaggacttcagtgaccacctggacagcggctgcagccagaagccctggacagagcagagcctgggccctgagcggggggaccaggtgcccatgaaccccagccagagcctgctgcctgagcggggcggcagtgacccccagaggcagaggcacctggagaacagcgaggagcccccagagaggaggagccgggtgtcctctgtcatccgggagaagctgcaggaggtgctgcaggacctgggcctgggccctgaggccagcctgagcacagcccccagctgccaccagcagacctggaagaacagcgctgccttcagcccccagaagatgcccctgagcaaggagctgggcttcagcccctacatggtgagaagaagaagagctgcccagagggcccggagccacttccctggcagcgcccccagctctgtgggccaccgggccaacagaacagtgcctggggcccacagccggctgcacgtgcagaatggagacagccccagcctggccccccagaccacagacagccgggtgagaagacccagcagcaggaagcccagcctgcccagcgacccccaggaccggcccggcaccctggagggcagcaagcagagccagacagagcctgagggcgcccggggcagcaaggccgccttcctgcggcagcccagcggcagcggccgggcccccagccctgctgccccctgcctgagcaaggccagcccagacctgcctgagcagtggcagctgtggccccctgtgcccagcggctgtgccagcctgagcagccagcacagctactttgacacagagagcagcagcagtgatgagttcttctgccgctgccaccggccctactgtgagatctgcttccagagcagcagtgacagcagtgacagcggcaccagtgacacagatcctgagcccaccggcggcctggcctcctgggagaagctgtgggcccggagcaagcccatcgtgaacttcaaggatgacctgaagcccaccctggtgtag

SEQ ID NO: 245124 - DNA, 2445 bp, Artificial Sequence
  derived and/or modified sequence
atggagcccgagatcaactgcagcgagctgtgcgacagcttccccggccaggaattggaccgtcgtcctcttcacgacctgtgtaagacaactattactagtagtcaccacagtagcaaaacaatcagcagcctgagtcccgtcctgctggggatagtgtggacattcctttcttgtggactgctgctgatactgttctttttggcgttcactatccattgtcgaaaaaacagaatcgttaagatgtcatcccctaacctgaatattgtgaccttgcttgggtcttgcttgacatattcttccgcctacttgttcggaatccaagatgttctggtaggatcttccatggaaactttgatccagacacgactgtccatgctttgcattggaacaagcctagtctttggtcctatcctggggaagagttggcggctgtataaagtcttcactcagcgggtccctgataaacgcgttattattaaggacctgcagctgttaggcctggtggccgcactgttgatggctgatgtgatccttttaatgacatgggttctcactgatcccatccagtgcctgcaaattcttagcgtgtctatgaccgtgaccggcaaggacgtctcttgtacctcaactagcacccacttttgtgcttccaggtatagtgacgtgtggatagcactgatctggggatgcaaaggattgctcctgctgtatggggcctatctggcaggcctgactggccacgtgtcaagtcctcccgtcaatcagtcattaacgataatggtcggggtgaacctactggtgctggcggcaggcctgttgttcgttgtgacaagatatctgcacagttggccgaacttggtgtttggcttgacttccgggggcatcttcgtttgtactaccacaattaactgcttcatttttatcccacaattgaagcagtggaaggcctttgaggaagagaaccagacaatcagacggatggccaagtatttttccacccccaataagtcattccacacccaatacggcgaagaagaaaactgtcacccgcgcggcgaaaaaagctcaatggagagattgctgactgaaaagaatgctgtgattgaatcactgcaggagcaggtcaacaacgctaaagagaaaatcgtccggctcatgtccgccgagtgtacgtacgacctgcccgagggagcagcgccccctgccagttccccgaataaagacgttcaagcggtagcctccgtgcatacgctcgctgcagcccagggacccagcggccacctgagcgattttcaaaatgatccaggaatggctgctcgcgacagccagtgtacgtccgggccaagctcatacgcccagtccctggaagggcctggcaaggactcctcattctcaccaggcaaggaggagaagatttctgactccaaggatttttctgatcacttggattcaggctgcagccaaaaaccttggaccgagcagagtctggggccagagcgaggcgaccaggtgccaatgaatccctcgcaatcactgctgccagaacgcgggggcagtgatcctcaacgccagcggcacctggaaaactccgaagaaccgcctgagcggaggagccgcgtaagttccgtcatcagggaaaagctccaggaggttcttcaggatcttggtctcggacccgaagcctcattgtcgacggctcctagttgccatcaacagacctggaaaaactccgcagccttcagtccacaaaagatgccgctatctaaggaattggggttctcaccctacatggtgcgcagaaggcgcgcggctcagcgcgcacggagccactttcctggaagcgccccaagtagtgtgggtcacagagctaatcgcaccgtacctggagcacattctagattacacgtccagaatggcgattcgccctccttagccccacaaaccactgactcccgagtgaggcgaccctcttcacgtaaaccgagtctcccaagcgacccacaagaccgccctggaacactcgagggctcaaagcagagccagaccgagccagaaggtgcacggggtagcaaagccgctttcctcagacagccgtccggctcaggccgggctccctctcctgccgccccctgcctttccaaagccagcccggatctccctgagcagtggcagctctggcctcctgtgcccagtggttgtgctagcttaagtagccagcactcttactttgacactgaatcttcttcttctgacgagttcttctgccgttgtcacagaccctattgcgagatctgcttccagtcctcctctgactcgtcagatagcggtacttccgatactgatccggagcccacagggggcctcgcatcttgggagaagttgtgggctcgcagcaaacctatagtaaatttcaaagatgacctgaagcccactctcgtttag

SEQ ID NO: 245125 - DNA, 2445 bp, Artificial Sequence
  derived and/or modified sequence
atggagcccgagatcaactgcagcgagctgtgcgacagcttccccggccaagaattagaccgccgccccctgcatgatctatgcaaaactactataacctcttcccaccacagctccaaaaccatttcatctttatctcccgtgctccttgggattgtatggacatttctaagctgtggcctgctgctgatcctttttttcctcgcttttactattcactgtagaaagaatcggatcgtgaagatgagttcacctaatctgaacatcgtgaccctgctgggatcctgtcttacttactcttctgcttatctgtttggtatccaggatgtcttggtaggctcgtcaatggagaccctcatccagaccaggctgagcatgctttgtatcggcacaagcttagtgtttggacccattctgggcaaaagctggagactttataaagtattcacacaacgagtgcccgacaaaagggtgatcataaaggaccttcagctgctcgggctagtggccgccctcttaatggccgacgtgattctgctgatgacatgggtgctgactgaccccattcagtgcctgcagatcctctccgtgagcatgacagtaaccggcaaggacgtctcctgcacaagcacatccacccatttttgcgcaagccgttacagtgacgtttggatcgcactgatctggggatgtaaaggtctgcttcttctatatggcgcatacctagcaggactgactggacacgtttcttcgccacctgtgaatcagagtctcacaatcatggtgggcgttaacctgctggtgcttgcagctggcctcctgtttgtggtgactcgatatttacattcctggcccaacctggtttttggactcaccagtggcggcatctttgtgtgcaccacgacaatcaactgttttatcttcatccctcagctcaaacagtggaaggcatttgaagaggaaaatcagacaatacggagaatggccaaatacttctctacaccaaacaaatccttccacacccagtacggagaagaagaaaactgccatccccgtggcgaaaaatcttctatggagaggttgctgacggaaaaaaacgccgtcatcgaatccctgcaggaacaggtcaacaacgccaaggaaaaaatcgtgcgcttaatgagcgcagaatgcacctatgatttgccagaaggcgccgcccctccggccagttcccccaacaaggacgtccaggcggtagcatcggtgcatactcttgctgctgctcagggcccctcaggccacttgtcagatttccaaaatgatcctggaatggccgctcgcgattcccaatgtacgagcggcccaagctcttacgctcagtcgctcgaaggtccagggaaagacagcagttttagccctggaaaagaagaaaagatcagcgactcaaaggatttctccgaccatttggactcaggatgtagtcaaaaaccatggacggagcagtccctcggacccgagaggggggaccaagtgccaatgaacccaagccagtccctgcttccagaacgcgggggatccgatcctcagaggcagcgtcacctagagaacagcgaggagccccccgaacgaagaagccgcgtgtcgtcggtgatcagggagaagcttcaggaagtgctccaagacctgggcctaggccccgaggcttcactgtccactgcaccttcctgtcaccagcagacctggaagaatagtgccgccttcagtccacagaagatgcccttgtccaaggagcttggcttctccccctatatggtccgcagacggagagctgcacagcgtgcccggtcccacttccctgggtccgctcccagttcggtgggccaccgagctaacagaaccgtacctggagcacacagtcgcctccacgtccagaatggcgactctcctagcctggcaccgcagactactgactccagggtcagacgaccaagtagtcggaagccttccctccccagcgatcctcaggacagaccaggcacccttgaaggctcgaagcagtcacagaccgaacccgaaggggctagggggtccaaggccgccttcctgagacagccgagcggcagcggtagggcaccaagtcctgccgccccgtgcctctccaaagctagccctgacttgcccgagcagtggcagctttggcctccagtgccaagtggatgcgcatctctttcctcgcagcacagttattttgatactgagtcgtccagcagtgatgaattcttctgcagatgccaccgtccttattgcgagatctgttttcagagctcttcagatagctcagactctgggaccagcgacacagacccggagcctacggggggcctcgccagttgggagaagttatgggctaggtccaagccaatcgtcaactttaaggacgatctgaaacccactctcgtgtag

SEQ ID NO: 245126 - DNA, 2445 bp, Artificial Sequence
  derived and/or modified sequence
atggagcctgagatcaactgctccgaactctgcgattcctttccaggccaagagctggacaggaggccattgcacgacctttgcaagactactatcacgagcagtcaccattcatcaaaaacaatatctagtctttcccctgttctgctcggaatcgtgtggaccttcttgagctgtgggctactccttatactgttcttcctagcgttcaccatccattgtcggaagaataggatagtgaaaatgtcaagccctaaccttaacatcgtgacactgctcgggtcctgcctgacttacagctcagcatatttgtttggtatccaggatgttctcgtcggtagcagcatggagaccttaatacaaacacgcctctccatgctctgtatcggcactagtctggtgttcgggccaattctgggcaaatcttggcgcctctataaagtgtttacacagcgagttccggataagagagtaatcatcaaggatctacagttacttgggctcgttgccgcactcctgatggcagatgtcattctgttgatgacttgggtcttgactgaccctattcagtgtctacaaatcctgagtgtgagcatgaccgtcaccgggaaggatgtgtcttgtacttctacgtctactcacttttgcgcaagccggtactccgacgtgtggattgcgttgatttggggctgtaaggggcttctgttactttatggcgcttacctagccggactgaccggacatgtgagtagccctccggtgaatcaatcactgacaatcatggtcggcgtgaacctcctcgtgctcgccgcaggccttttgtttgtggtcaccaggtacctacactcatggcccaacctagtcttcgggttgaccagcgggggtatatttgtgtgcacaacaaccattaattgtttcatttttatacctcagctcaagcagtggaaggcattcgaggaggaaaaccagaccatccgacggatggcgaagtacttcagcactccaaataagtcgtttcacacacagtacggggaggaggaaaactgtcacccaaggggagagaaaagcagtatggagaggttgctgacagagaagaatgccgtcatagagtccctgcaggagcaagtgaacaacgcgaaggagaagatcgtgaggcttatgagcgctgagtgcacctacgacctccccgagggggcagcccctcctgcgtctagccccaacaaggatgtccaggcagtggcctcggtgcacaccctggcagctgctcagggcccaagcggacatctatcagacttccagaacgacccaggtatggccgcacgagatagccagtgcacgtcagggccttccagttacgctcaatctctggagggacccggaaaagacagcagcttcagtcccggaaaagaagagaaaatatctgactccaaagacttctcggaccatcttgatagtggctgttctcagaagccatggactgagcagagtctgggtcccgagagaggcgatcaagttcccatgaacccatcccaaagtctgctaccggagagaggcggatctgatccacagaggcagcgacacctggagaactcagaggaaccacctgaacgtaggagcagggtatcttccgtgatacgggagaaactccaggaagtactgcaggacttaggacttggacctgaggcatccctgtcgacggcaccttcatgtcaccagcagacatggaaaaatagtgcagctttttccccccagaagatgcccctgagcaaagagttaggtttcagcccctacatggtgaggcgacggagagctgctcagagggcgcgaagccacttcccaggcagtgcaccctcaagcgtcggccaccgcgcaaacaggacagtgcccggtgcccatagccggctgcatgtgcaaaacggcgactcaccaagccttgcgccacaaactacagattcacgagtgaggcggccttcttccagaaagccctccctgcccagcgaccctcaggatcgccctggaacccttgaaggatcgaagcagtctcaaacggagccagaaggggctagggggtcaaaggctgcgtttttaagacagcccagcggaagtggcagagccccttcccccgcagccccatgcctcagtaaagcttcccctgatcttcctgaacagtggcagttatggcccccagttccctctggctgcgctagccttagctcacaacattcttacttcgacaccgagagcagctctagcgacgaatttttctgccgctgtcaccgcccttattgcgaaatttgcttccaatcctcctccgactcttcggatagtggcacctcggacacagatcctgaaccaaccggaggcctggctagctgggaaaagctgtgggccagaagcaagcccatcgtgaactttaaagacgatctcaagccaacccttgtgtag

SEQ ID NO: 245127 - DNA, 2445 bp, Artificial Sequence
  derived and/or modified sequence
atggaaccagagataaattgttccgaactgtgcgattcgtttcccggacaggaactcgatcgtcgccctcttcacgacttatgtaagaccacaatcacctcctctcaccactcttccaaaaccatcagcagtctttcacctgtactcctgggaatcgtctggacatttctgtcgtgcggactacttctgatactctttttcctggcatttacgatccactgtagaaaaaatagaatagtgaaaatgtcgtcgcctaacctgaatatcgtgaccctgctgggaagttgtcttacatactcgtctgcttacctgtttgggattcaggacgtcctggtgggctccagtatggagacactgattcaaactcggttgagtatgctgtgcatcgggacatctcttgtctttggccctattttgggaaagtcctggcgcctgtacaaagttttcacccagcgcgtgcctgataagagagtcatcattaaagacctgcagcttctgggccttgtggctgcattgctgatggctgatgtgattctgctgatgacctgggtgctcaccgatcccattcagtgtctccagatcctttctgtgagcatgactgttaccggaaaagacgtcagttgcactagcacctcgacccacttttgtgccagtcggtacagtgacgtctggatagcacttatttggggttgtaaaggactcctcttactgtacggagcatatcttgctggccttacaggacacgtcagtagcccgcctgtgaatcagtcacttactattatggtcggtgttaacctgctggtgcttgccgcaggattgctcttcgtggttacaaggtatctccatagctggccgaatctagtatttggattgacgagtggcggtatctttgtctgcaccaccaccatcaactgcttcatcttcatccctcagctgaagcagtggaaggcctttgaagaagaaaaccagacgattaggagaatggccaaatatttttcaactccgaacaagtcttttcatacacagtacggtgaggaggagaactgtcatccacggggagaaaagtcatctatggagcgtctgcttaccgagaaaaacgctgtcattgaaagcctgcaagagcaggtgaacaatgcaaaggagaagatcgtaagactcatgtctgccgaatgcacttatgacttgcctgagggcgcagcaccacccgcttctagtcccaacaaggacgtacaggcggtcgctagcgtgcacacgctggctgccgctcagggtccttcagggcatctatccgattttcagaacgatccaggaatggcggctcgagattcacagtgcacctccggccctagctcatacgcacagtcgctggagggccctgggaaagactccagtttctccccaggcaaggaggagaagatctccgattctaaggattttagtgatcatctcgactccggctgctcccagaaaccatggaccgaacaatccctaggtccggaaaggggggatcaggtccctatgaaccccagccagagcctgctccccgaacggggaggctcagacccgcagaggcagcgccatctggagaattccgaggagccaccagaaagaaggagtcgcgttagctccgtgattagagaaaagctgcaggaagttctccaggacctgggcttaggacccgaggcctcactcagcaccgcaccatcgtgtcatcagcagacttggaaaaatagcgcagctttttcacctcagaaaatgcccctctctaaagagttgggtttctccccttatatggttcgcagacggcgagccgcacaacgagcacggtcccatttcccgggttccgcacccagctccgttggccatagggctaaccggactgtgcctggtgctcactctcgcctgcatgtgcagaacggcgatagcccaagcctagctcctcagaccaccgatagccgggttcgcagacctagcagcaggaagccatccctgccctcggacccccaggatcgtccagggaccctagagggctcaaagcagtcccagaccgagcccgaaggcgcaagagggagtaaagccgctttcctgcgacagccttcaggcagcgggcgagctccatctccggcagcaccctgtctgtctaaagctagtcctgacctgcccgagcagtggcagctgtggcctccagtgccctccgggtgtgccagccttagcagtcagcacagctactttgacaccgaatcctcgtcgtctgacgagttcttctgtcggtgccaccgtccatattgtgaaatttgcttccagagtagtagcgactcttccgactcaggaacaagtgacacagatcccgagcctaccggaggcctggcctcttgggagaaactctgggcacgttccaagcccattgtgaattttaaggatgatttaaagcccacgctagtctag

SEQ ID NO: 245128 - DNA, 2445 bp, Artificial Sequence
  derived and/or modified sequence
atggagcccgagatcaactgcagcgagctgtgcgacagcttccccggccaggagctggacagaagacccctgcacgacctgtgcaagaccaccatcaccagcagccaccacagcagcaagaccatcagcagcctgagccccgtgctgctgggcatcgtgtggaccttcctgagctgcggcctgctgctgatcctgttcttcctggccttcaccatccactgcagaaagaacagaatcgtgaagatgagcagccccaacctgaacatcgtgaccctgctgggcagctgcctgacctacagcagcgcctacctgttcggcatccaggacgtgctggtgggcagcagcatggagaccctgatccagaccagactgagcatgctgtgcatcggcaccagcctggtgttcggccccatcctgggcaagagctggagactgtacaaggtgttcacccagagagtgcccgacaagagagtgatcatcaaggacctgcagctgctgggcctggtggccgccctgctgatggccgacgtgatcctgctgatgacctgggtgctgaccgaccccatccagtgcctgcagatcctgagcgtgagcatgaccgtgaccggcaaggacgtgagctgcaccagcaccagcacccacttctgcgccagcagatacagcgacgtgtggatcgccctgatctggggctgcaagggcctgctgctgctgtacggcgcctacctggccggcctgaccggccacgtgagcagcccccccgtgaaccagagcctgaccatcatggtgggcgtgaacctgctggtgctggccgccggcctgctgttcgtggtgaccagatacctgcacagctggcccaacctggtgttcggcctgaccagcggcggcatcttcgtgtgcaccaccaccatcaactgcttcatcttcatcccccagctgaagcagtggaaggccttcgaggaggagaaccagaccatcagaagaatggccaagtacttcagcacccccaacaagagcttccacacccagtacggcgaggaggagaactgccaccccagaggcgagaagagcagcatggagagactgctgaccgagaagaacgccgtgatcgagagcctgcaggagcaggtgaacaacgccaaggagaagatcgtgagactgatgagcgccgagtgcacctacgacctgcccgagggcgccgccccccccgccagcagccccaacaaggacgtgcaggccgtggccagcgtgcacaccctggccgccgcccagggccccagcggccacctgagcgacttccagaacgaccccggcatggccgccagagacagccagtgcaccagcggccccagcagctacgcccagagcctggagggccccggcaaggacagcagcttcagccccggcaaggaggagaagatcagcgacagcaaggacttcagcgaccacctggacagcggctgcagccagaagccctggaccgagcagagcctgggccccgagagaggcgaccaggtgcccatgaaccccagccagagcctgctgcccgagagaggcggcagcgacccccagagacagagacacctggagaacagcgaggagccccccgagagaagaagcagagtgagcagcgtgatcagagagaagctgcaggaggtgctgcaggacctgggcctgggccccgaggccagcctgagcaccgcccccagctgccaccagcagacctggaagaacagcgccgccttcagcccccagaagatgcccctgagcaaggagctgggcttcagcccctacatggtgagaagaagaagagccgcccagagagccagaagccacttccccggcagcgcccccagcagcgtgggccacagagccaacagaaccgtgcccggcgcccacagcagactgcacgtgcagaacggcgacagccccagcctggccccccagaccaccgacagcagagtgagaagacccagcagcagaaagcccagcctgcccagcgacccccaggacagacccggcaccctggagggcagcaagcagagccagaccgagcccgagggcgccagaggcagcaaggccgccttcctgagacagcccagcggcagcggcagagcccccagccccgccgccccctgcctgagcaaggccagccccgacctgcccgagcagtggcagctgtggccccccgtgcccagcggctgcgccagcctgagcagccagcacagctacttcgacaccgagagcagcagcagcgacgagttcttctgcagatgccacagaccctactgcgagatctgcttccagagcagcagcgacagcagcgacagcggcaccagcgacaccgaccccgagcccaccggcggcctggccagctgggagaagctgtgggccagaagcaagcccatcgtgaacttcaaggacgacctgaagcccaccctggtgtag

SEQ ID NO: 245129 - protein, 534 aa, Artificial Sequence
  derived and/or modified sequence
MATALMAVVLRAAAVAPRLRGRGGTGGARRLSCGARRRAARGTSPGRRLSTAWSQPQPPPEEYAGADDVSQSPVAEEPSWVPSPRPPVPHESPEPPSGRSLVQRDIQAFLNQCGASPGEARHWLTQFQTCHHSADKPFAVIEVDEEVLKCQQGVSSLAFALAFLQRMDMKPLVVLGLPAPTAPSGCLSFWEAKAQLAKSCKVLVDALRHNAAAAVPFFGGGSVLRAAEPAPHASYGGIVSVETDLLQWCLESGSIPILCPIGETAARRSVLLDSLEVTASLAKALRPTKIIFLNNTGGLRDSSHKVLSNVNLPADLDLVCNAEWVSTKERQQMRLIVDVLSRLPHHSSAVITAASTLLTELFSNKGSGTLFKNAERMLRVRSLDKLDQGRLVDLVNASFGKKLRDDYLASLRPRLHSIYVSEGYNAAAILTMEPVLGGTPYLDKFVVSSSRQGQGSGQMLWECLRRDLQTLFWRSRVTNPINPWYFKHSDGSFSNKQWIFFWFGLADIRDSYELVNHAKGLPDSFHKPASDPGS

SEQ ID NO: 245130 - protein, 368 aa, Artificial Sequence
  derived and/or modified sequence
MDMKPLVVLGLPAPTAPSGCLSFWEAKAQLAKSCKVLVDALRHNAAAAVPFFGGGSVLRAAEPAPHASYGGIVSVETDLLQWCLESGSIPILCPIGETAARRSVLLDSLEVTASLAKALRPTKIIFLNNTGGLRDSSHKVLSNVNLPADLDLVCNAEWVSTKERQQMRLIVDVLSRLPHHSSAVITAASTLLTELFSNKGSGTLFKNAERMLRVRSLDKLDQGRLVDLVNASFGKKLRDDYLASLRPRLHSIYVSEGYNAAAILTMEPVLGGTPYLDKFVVSSSRQGQGSGQMLWECLRRDLQTLFWRSRVTNPINPWYFKHSDGSFSNKQWIFFWFGLADIRDSYELVNHAKGLPDSFHKPASDPGS

SEQ ID NO: 245131 - DNA, 1602 bp, Artificial Sequence
  derived and/or modified sequence
atggcaaccgccctcatggccgtggtcttgcgggccgctgctgtagccccgcgcctgcggggaaggggcggaactggaggggctcggagactgtcttgcggagccagaagaagagcagcccgaggcacttccccgggacgcagactgtcgactgcgtggtcccaaccgcagccaccgccggaagaatacgcgggagcggatgacgtgtctcagtcgccggttgcagaggaaccgagttgggtcccatccccgcgtccacccgtcccgcacgaatccccggagcctccgtctggccgtagcctcgtgcagcgagatatccaggcattcctcaaccaatgtggtgcctcccctggagaggcaagacactggctgacgcagtttcaaacttgccatcacagcgcggataaaccatttgcggtgatcgaggtggatgaagaggtgctcaagtgtcaacagggcgtgtcctcgctggcgttcgcactggctttcctgcagcgcatggacatgaagcctttggtggtcctgggcctcccagccccgactgcaccttccggatgcctctccttttgggaggcaaaggcgcagctcgccaagtcttgcaaggttttggtggatgctcttcgacataacgcggcggccgcagtacctttcttcggaggaggtagcgtgctccgggccgctgagcctgccccgcacgccagctacggtggtatcgtctccgtggagactgacctcctgcagtggtgcttggaatccggctccatccctatcctgtgcccaatcggggaaaccgcagcgaggcgcagcgtcctcctggactcgctggaggtgaccgcgtctctggccaaggccctgcgcccaaccaaaatcatcttcttgaacaataccgggggcctccgtgattcatcgcacaaggtgctttcgaacgtgaaccttccggccgatcttgatctcgtgtgtaatgctgaatgggtgtcgaccaaggaacgacaacaaatgcgcctgatcgtggacgtcctgagccgcctgcctcatcactcatcagccgtcatcaccgccgcctcaaccctcctgaccgaattgtttagcaataagggaagcggtaccctgtttaagaacgccgagcgcatgttgcgggtgcgctcgttggacaaactggaccagggacgcttggttgatctggtgaatgcatcattcgggaagaagctgagggatgactacctggcttcgcttcggccccgattgcacagcatttacgtgagcgagggttacaacgccgctgcgatcctgactatggaaccagtcctcggcgggactccataccttgacaaattcgtggtgtcatcaagccgccagggacaaggttccggacagatgctctgggaatgcttgagacgcgatctgcaaactctgttctggagaagccgcgtgactaacccgattaatccatggtactttaagcactcagacgggtccttctccaataagcagtggattttcttttggttcggactcgcggacatacgcgacagctatgaacttgtgaaccatgcgaaaggactccctgattcgttccataaaccagcctcagaccctggaagc

SEQ ID NO: 245132 - DNA, 1602 bp, Artificial Sequence
  derived and/or modified sequence
atggccactgccctgatggccgtcgtgctgagagcagcggccgtcgctccaaggctgcgcggtagaggcggtaccggtggtgctcgccgcctttcctgcggagctcgcaggagggcagcaaggggcacttctcctggcagaaggcttagtaccgcatggtcacagccccaacctcccccagaggagtatgccggcgcagacgatgtctcacagagtcccgttgcagaagaaccatcctgggtgccatctccgaggccccccgttccacacgagtcccccgaacctccctcaggaaggtcccttgtccaaagggacatacaggctttcctcaatcagtgtggtgcgagtcccggtgaagcaagacactggcttacacagtttcagacctgtcatcatagtgccgacaaacctttcgccgtcattgaggtggacgaggaggttctgaagtgccagcaaggcgtgtcctctcttgctttcgccttggcgtttctccagcgcatggatatgaagcccctggttgtattgggactgccagctcctaccgctccctctggatgcctgtccttttgggaggctaaggcccaactggcaaagagttgcaaagtgcttgtagatgcactcagacacaacgcggctgcagccgttcctttctttggtggaggttcagttctcagagccgctgagccggctcctcacgctagctatggcggcatcgtatctgttgagaccgatcttctgcagtggtgtctggagtccggttctatcccgattctctgccccatcggtgagaccgctgcgagaaggagcgtcctcctggacagcctggaggtgacggcctccttggctaaggcccttcgcccaacaaagataatcttcttgaataataccggaggccttcgcgattcatcacataaggtgctgagcaatgtcaatcttcccgcggaccttgacctggtctgtaacgccgagtgggtatctacaaaagagcgccaacagatgagactgatcgtggatgtgttgtcccgccttccccaccatagctctgctgtcatcaccgcggccagtaccctcctcaccgaactgttctctaataagggtagtggcaccctgtttaagaacgcggaaaggatgctgagggtgagatctcttgataaactcgaccaaggaaggctggtcgatctcgtaaatgcctcctttggcaagaagctgagagatgattacctggccagcctccgcccacgcctccatagcatctacgtgtccgagggctataatgctgctgccatcctcacaatggaaccagtccttggtggaacaccataccttgacaaatttgtagtgagtagttctaggcagggccaaggttcaggccagatgctttgggaatgcctgaggagagacctccaaacactgttctggagatccagagtgactaacccaattaacccctggtactttaaacacagtgacggatcattctccaacaaacaatggatcttcttctggttcggtttggccgacatcagggactcctatgagctggtcaatcacgctaagggccttcccgactctttccataagcctgcctcagacccgggctct

SEQ ID NO: 245133 - DNA, 1602 bp, Artificial Sequence
  derived and/or modified sequence
atggcgaccgcactcatggcagtggtgctgagagccgctgccgtggcaccacggctccggggcagaggtggaaccggaggggcacgtaggcttagctgtggggcccgtaggcgtgcagctcgagggacctcgccaggccggaggcttagcactgcgtggagccagccccagcccccacctgaggaatacgcgggtgcagacgatgtgtcccagtccccagtggctgaagaaccctcctgggtcccaagcccgaggcctcctgtgcctcatgaatcccctgaaccaccctcaggaaggtcccttgttcaaagggatatccaagcatttcttaaccaatgtggagcctccccaggagaggccagacactggctgactcaatttcaaacttgccaccactcggcagacaagccgttcgcggtcattgaagtggatgaggaggtgcttaagtgtcagcagggagtctcgtcacttgccttcgccttggcatttctccagaggatggacatgaagccactggtggtcctgggtctgcctgcccctactgcacccagcggatgtctttccttttgggaagcaaaggcccagctggccaagtcgtgtaaagttctggtggacgcgctgagacataacgccgcagccgcagtgccatttttcggaggaggctccgtgcttcgggcagcagaaccggccccacatgcatcgtacggcggaattgtgtcagtggagactgatctcctgcagtggtgtctcgagtcaggatcaatacctatcctgtgccccattggtgagactgcagcgcgccgctccgtcctgctcgattcgcttgaagttacggccagcctggccaaggcactgcggcctactaagattatctttctcaacaacacgggtggactccgagattcctcccataaggtcctgagcaacgttaacctgccagcagacctggacctcgtgtgtaatgcagaatgggtgtccactaaagaaaggcagcagatgagactgattgtggacgtcctctcaagacttcctcaccatagctcggcagtcataaccgcagcatcgaccctcttgaccgagctctttagcaacaaaggttccggtactttgtttaagaacgccgagcggatgctgcgtgtgcggtcgcttgacaaactggaccaaggacgtcttgtggacctggtgaatgcatcctttggtaagaagttgagggatgattacctcgcgtccctgcgcccgaggctgcattcgatctatgtgtcagagggttacaacgccgccgccattctgaccatggaaccagtgcttggaggcaccccctatctcgataagtttgtggtgtcatcatcgcggcaggggcaaggttccggacaaatgctttgggaatgcctgcggagagatctgcagactttgttttggcgctcaagggtgacgaatccgattaacccttggtactttaagcatagcgacgggtccttttcgaataaacagtggattttcttctggtttgggcttgcagatataagggactcgtacgagctggtgaaccatgccaaaggattgcccgattcgtttcacaaaccagcaagtgatcctggttcg

SEQ ID NO: 245134 - DNA, 1602 bp, Artificial Sequence
  derived and/or modified sequence
atggccacagccctgatggcagtggtgcttcgcgccgctgcggtcgcccctcggctcagggggcggggaggcactgggggggcccgaaggctaagctgtggagcacgaaggagagcagcccgaggcacctctccgggccgaagattatctacggcgtggtcacagcctcagccccccccagaagaatatgccggggccgacgacgtgtcacaaagtcccgtggccgaagagccaagctgggtgccctctccgcggccacccgtcccacacgagtctcccgaacctccttcgggccgctcccttgtgcagcgggacatacaggccttcctgaatcaatgcggcgcctcacctggcgaagcgaggcactggctcacacagtttcagacgtgccatcatagtgcggacaagccttttgctgtcatcgaggtggatgaggaggtcctgaagtgtcaacagggcgtgtcaagcctggcctttgctcttgccttcctccagaggatggacatgaaacctctggtggtgctgggcctgccagccccaacagccccaagtgggtgcctctcattctgggaggcaaaggcacagctggctaagagctgcaaggtgcttgtggacgcccttaggcacaatgcggccgccgcggtgcccttctttgggggtgggagcgtccttcgagccgctgagccagcccctcatgcaagctacggcgggatcgtctccgtcgagaccgacctgctccagtggtgcctggaaagcgggagcattcccattctgtgccctataggggaaaccgcggcccgacgaagcgtgttgctggattctctggaggtgaccgccagtcttgcaaaggctctgagaccaaccaagatcatatttcttaacaatactggcggtctgcgcgattcgtcccataaagttctttccaatgtaaatctccctgccgatttggacctggtgtgcaacgcggagtgggtgtccacaaaggagaggcagcaaatgagactcatcgttgacgtcttgtcaaggctgccacaccattcttcagccgtcatcactgctgcatccacgttgctgacagagctctttagcaataagggaagcggcacactctttaagaatgcagaacgaatgctgagggtccgaagtctggataagctggatcagggacggcttgtggacctggtgaatgcctcgttcggcaagaagttgcgcgatgactatctggcgtcgctgagaccaagactacatagcatatacgtctccgaaggctacaacgcagcagctatcctgaccatggaacctgtgctagggggtactccctacctggacaagttcgtcgtatcctcttcccgacaaggccagggtagtgggcaaatgctgtgggaatgtctccggcgggacctccagacgcttttctggcgcagcagagtaactaaccccattaacccatggtattttaaacactcggacggaagtttcagcaataagcagtggatttttttctggtttgggcttgcagacataagagattcctacgagctcgttaatcacgcgaaaggacttcctgactccttccataagcctgcaagcgaccccggtagc

SEQ ID NO: 245135 - DNA, 1602 bp, Artificial Sequence
  derived and/or modified sequence
atggccactgctctcatggcagtcgtgctcagagccgcagcagttgctcccaggctcaggggaaggggcggaactggtggagcgcgaaggctctcgtgtggcgccagacggagagcagccaggggtactagcccaggtcgtagactgtcgaccgcgtggtcgcagcctcagcccccacctgaagagtatgccggtgcagacgatgtgtcacaatcgccagtggcagaagagcccagctgggttccttccccccgccctcctgtccctcatgaatcgccagagccgcctagcgggcgctcactggtccaaagagatatccaggcattcctcaaccaatgcggtgcgagccctggagaggcacgtcattggcttactcaatttcaaacttgccatcattcagcggataagccatttgcagtgatcgaagtggatgaagaggtgctcaagtgtcagcagggcgtctcatcccttgcatttgcactggcctttcttcagaggatggatatgaagcccctcgtcgtgctgggactgcccgcacctactgcgccaagcggttgtcttagcttttgggaagcaaaagcacagctggctaaaagctgtaaggtgcttgtggacgcacttagacataacgcggcggcagcagtgcccttttttgggggtgggtcggttctccgcgcagcagagcctgcaccacatgcatcctacggcggaatcgtctccgtggaaactgacctgcttcaatggtgtctggagtcggggtcgattccgatcctttgtcctatcggagaaactgcggcacgaaggagcgtgcttcttgactcgttggaggtcacggcatcgcttgccaaggccctcagacctactaagataatcttcctgaacaacaccggtgggcttcgggactcgagccataaggtgctttcaaacgtgaatcttcccgcagacctggacttggtgtgtaacgccgaatgggtgagcaccaaggaacgacagcagatgcgcttgattgtggacgtgctgtctcgccttccccatcatagctccgcagtgattaccgcggcgtcaacccttcttaccgaactttttagcaacaaaggttcaggcaccctgtttaagaacgctgagcggatgctgagagtgaggagcctggataaactcgaccaagggcggcttgtggacctggtgaacgcttcatttgggaagaagctccgcgatgattacctggcatccctgcggccacgactgcactcaatttacgtatccgaagggtacaacgccgcagcgatccttaccatggaaccagtgctcggcggaaccccatacctggataagtttgttgtgtcctccagtagacaggggcaagggtcagggcagatgctgtgggaatgtctgagaagagatctgcaaacccttttttggcgatcccgggtcactaatccaattaacccatggtacttcaaacattcagatggatccttttctaacaagcagtggatctttttctggtttggactggcagatattcgggattcgtacgagcttgtgaaccatgcaaagggactgccagacagctttcataagccggcctccgatcctgggtcc

SEQ ID NO: 245136 - DNA, 1602 bp, Artificial Sequence
  derived and/or modified sequence
atggccactgccctgatggcagtggtgctccgggctgcagcagttgccccaagactacggggtcggggaggcactggcggcgcccgccgcctgtcctgcggggcaagacgacgggctgcaaggggcacatcccccgggcgaagattatcaaccgcatggagccagccccagccccccccagaagaatatgctggcgccgacgatgtttcacagtctcctgtcgctgaagaacccagctgggtacccagcccaaggccccccgtaccacacgagtcacctgaacctccttccggccgctccctggtccagcgggatattcaagcattcctgaaccagtgtggcgccagccccggagaggctagacattggctgacccagttccaaacttgtcatcattcagcagacaagcctttcgccgtgatcgaggtggatgaggaggtgctgaaatgccagcagggtgttagcagcctagctttcgccttagcatttcttcaacggatggatatgaagcccctggtggtgctgggactgcccgcacctacagcccccagtggctgtctgagtttctgggaggctaaggctcagctggctaagtcttgtaaagttctggtggacgctttgagacacaacgctgctgccgccgtgcccttttttgggggcggaagcgtactgagggctgccgagcctgcaccacatgcatcctatggcggtatcgtttccgtcgaaactgatctcctacagtggtgcctggaatcaggaagcataccgatactttgcccaataggcgagactgccgcccgccggtctgtgctactggactcactggaagtcaccgcttctttggcaaaggccctgcggccaaccaagattatttttctgaataacacaggcgggctcagagactccagtcacaaggtgttgtccaacgtgaatttgcccgccgatctggatttggtgtgcaacgctgagtgggtgtctacaaaggaacgacagcagatgcggctaatcgtcgatgttctatccagactaccacatcactctagtgctgtgataaccgccgcaagcactctgctcactgagctattttccaataagggcagcgggaccctatttaaaaatgctgaacgaatgctcagggtgaggtccctcgacaagctggaccaaggccggctagttgatttggtcaacgcttcttttggtaaaaagttgagggacgattaccttgctagcctccggcccagactgcatagtatatatgttagcgaagggtataacgctgcagccattctaaccatggaaccagtgctgggggggacaccctacctagacaaattcgtggtgagcagttcccggcaagggcaggggagtggccaaatgctgtgggagtgcttaaggcgggacctacagactctgttctggcggtcaagagtgaccaacccaataaacccatggtacttcaaacattccgacggcagcttctctaataaacagtggatcttcttttggtttggtctcgctgatatacgcgattcttatgaactggttaatcatgctaaaggtctccctgatagtttccataagcccgcctctgaccctggcagt

SEQ ID NO: 245137 - DNA, 1602 bp, Artificial Sequence
  derived and/or modified sequence
atggcgacggcgctaatggcggtagtactacgagcggcggcggtagcgccgcgattacgtggtcgaggtggtacgggtggtgcgcgacgattatcgtgtggtgcgcgtcgacgagcggcgcgaggtacgtcgccgggtcgtcgattatcgacggcgtggtcgcaaccgcaaccgccgccggaagaatatgcgggtgcggatgatgtatcgcaatcgccggtagcggaagaaccgtcgtgggtaccgtcgccgcgaccgccggttccgcatgaatcgccggaaccgccgtcgggtcgatcgttagttcaacgtgatatacaagcgtttttaaatcaatgtggtgcgtcgccgggtgaagcgcgtcattggctaacgcaatttcaaacgtgtcatcattcggcggataaaccgtttgcggttatagaagtagatgaagaagtattaaaatgtcaacaaggtgtatcgtcgttagcgtttgcgctagcgtttctacaacgtatggatatgaaaccgttagtagtattaggtctaccggcgccgacggcgccgtcgggttgtctatcgttttgggaagcgaaagcgcaattagcgaaatcgtgtaaagttttagtagatgcgttacgacataatgcggcggcggcggttccgttttttggtggtggttcggttttacgtgcggcggaaccggcgccgcatgcgtcgtatggtggtatagtatcggttgaaacggatttattacaatggtgtctagaatcgggttcgataccgatactatgtccgataggtgaaacggcggcgcgtcgttcggtactactagattcgttagaagtaacggcgtcgctagcgaaagcgctacgtccgacgaaaataatatttttaaataatacgggtggtttacgtgattcgtcgcataaagtactatcgaatgtaaatctaccggcggatctagatttagtttgtaatgcggaatgggtatcgacgaaagaacgtcaacaaatgcgactaatagttgatgtactatcgcgactaccgcatcattcgtcggcggtaataacggcggcgtcgacgttattaacggaattattttcgaataaaggttcgggtacgttatttaaaaatgcggaacgtatgttacgagtacgatcgctagataaattagatcaaggtcgtctagtagatttagtaaatgcgtcgtttggtaaaaaactacgtgatgattatctagcgtcgttacgtccgcgtttacattcgatatatgtatcggaaggttataatgcggcggcgatattaacgatggaaccggtattaggtggtacgccgtatttagataaatttgttgtttcgtcgtcgcgtcaaggtcaaggttcgggtcaaatgctatgggaatgtctacgtcgtgatctacaaacgttattttggcgttcgcgagtaacgaatccgataaatccgtggtattttaaacattcggatggttcgttttcgaataaacaatggatatttttttggtttggtttagcggatatacgtgattcgtatgaactagtaaatcatgcgaaaggtttaccggattcgtttcataaaccggcgtcggatccgggttcg

SEQ ID NO: 245138 - DNA, 1602 bp, Artificial Sequence
  derived and/or modified sequence
atggctacagctttaatggcagtcgttctccgtgcggctgctgtggcacctcgcctgcgtggccgcggtggtaccgggggggctcgacggctgtcctgcggcgcccgacgccgcgccgcccgtggcacctcgccggggcgtaggctgagcacagcctggagtcaacctcagcctcccccagaggaatacgctggcgctgacgatgtgagccagagccctgtggcagaggagcccagctgggttccgtccccacggccccccgtgccgcacgagtcccctgaaccaccgtcgggacgcagtctggtgcaacgagacattcaggcgtttttgaaccagtgtggtgcgagcccgggagaggctaggcattggctcactcagtttcagacatgccaccactcagctgacaagcccttcgccgtgatcgaggttgatgaagaagtcctgaaatgccagcagggtgtatcatcgctagccttcgcattggcatttttgcagcggatggatatgaaacctctggtggtgctgggcttaccagcccccaccgctccatcgggttgtctctcgttctgggaggcgaaggcgcaactcgcaaagtcttgcaaggtcctggttgatgcgctcagacataacgcggctgctgccgtaccgttttttggaggaggttcggttctccgcgcagcagaaccggcgccacatgccagctatggaggtatcgtttcggtcgagacggacttgctccaatggtgcctcgaatcgggatctattcccatcttgtgtccaatcggagagaccgcggcccgacgatccgtcttgctcgactcgttagaggtcaccgccagtcttgcaaaggctttgcggccaacaaagataatctttcttaacaatactggcggactgcgagactctagccataaggtcctgagtaatgtaaacctcccagccgatcttgatctagtgtgcaacgcagaatgggtctctaccaaggaacgacagcagatgcgtctgattgttgatgtcctctcacggctgcctcatcattccagcgccgtcataactgcggcgtcaacccttttgaccgaacttttttcaaataaaggctccggcaccctgttcaagaacgccgaaaggatgcttcgagtgcggtcccttgacaaacttgatcaaggtcgcttggtcgatttggtcaatgccagttttggcaagaagctccgagacgattacctcgcttctctgcgtccgcgcctccactcaatctatgtttccgagggatataacgctgccgcgattttaacgatggagccagtcttaggtggcacaccttatcttgataagtttgtcgtttctagcagccgacaaggtcagggttcaggtcagatgttatgggagtgcctgaggcgagatcttcagactcttttctggagaagccgggtcaccaatccaatcaatccgtggtattttaagcactcggatggaagtttttccaataaacagtggatttttttctggttcggcctcgctgacattcgtgattcctacgaattggtgaatcacgccaaaggcctccctgattccttccataagcctgcttcagatccaggctca

SEQ ID NO: 245139 - DNA, 1602 bp, Artificial Sequence
  derived and/or modified sequence
atggccacagcgctgatggctgtggtgctgcgggccgcagcggttgcacccagacttcgcggacggggaggaaccggtggcgctcgcagactgtcctgcggcgcccggaggcgggccgcaagaggcacgtctcctggcaggagactgagcaccgcttggagccagccgcagccaccgccagaagaatacgccggcgctgacgacgtgagccagtccccggtggcagaggagccgagttgggtccccagtccccgcccacccgttcctcacgaatctcctgagcccccgtctggccggtctctcgtgcagcgcgacattcaggcatttctgaatcagtgtggagccagtcccggagaagcgcgccattggttaactcagttccagacttgtcatcattcagccgacaagccttttgctgtgattgaggtcgatgaagaggtgcttaaatgccagcagggagtctcctcacttgcctttgccctcgcctttctccagagaatggatatgaaaccgctcgtcgtgcttggtctgccagcacccaccgccccatctggttgtctgtcattctgggaggctaaggctcaattggccaagagttgtaaggttcttgtcgatgctcttcggcataacgcagcagcggccgtgcccttctttggagggggaagtgtgctgcgtgctgcagagccagctccccatgctagttacggaggtatcgtgtccgttgaaactgacctgttgcagtggtgtttggagagcggctccatccctatcctgtgcccgattggagaaaccgcggcccggcgctcggtgttactcgatagcttggaggtgacagcatcactggcgaaagccctaagacccacaaaaataatcttcctgaacaacaccggcggcctcagggattcttctcataaagtcctgagtaacgtcaacctgcctgcggatcttgatctggtgtgcaatgcagagtgggtaagcaccaaggagcggcagcaaatgagattgattgtggatgtgctgtcacgtttaccgcaccattcaagcgcagtgatcacagctgccagtacattgctgaccgaacttttctcaaataagggtagcgggaccctgttcaaaaacgccgagagaatgctccgtgttagatccctagacaagctcgaccagggccgccttgtcgatctcgtcaatgcctctttcggaaaaaaactaagggatgattacctcgcgtcactgagaccccgtctgcacagtatctatgtatctgaaggatataatgcagccgcaatactgacaatggagcctgtcctggggggcaccccttaccttgacaagtttgtagtgtcttcaagccggcaggggcaagggtccggccagatgttgtgggaatgtctgagaagggacctgcagacgctcttttggcggagccgagtgacaaaccccatcaatccctggtattttaagcacagtgacggctctttttcgaacaagcagtggattttcttttggttcggactagcagacatacgcgatagctacgaactggttaaccatgctaagggtcttccggacagcttccacaagcccgcctccgaccccggtagc

SEQ ID NO: 245140 - DNA, 1602 bp, Artificial Sequence
  derived and/or modified sequence
atggccacagctttaatggcagtcgtgctccgagccgcagcggtggcaccacgattgagaggaagaggcggcaccggtggtgccaggcgactgtcgtgtggagctaggcgcagggctgcgagagggaccagccctgggaggcggttgtccacagcttggagtcagccccagccgccgccagaagagtatgctggcgctgacgatgtgagccagtcccccgtggctgaggagccgtcgtgggtccccagccccaggcctcccgtccctcatgagtcccccgagccccctagcgggcgttctttggtccaaagggatatacaggcattcctgaaccagtgtggcgccagtcccggcgaagctaggcactggctaacacagtttcagacatgccaccactcggcggacaagccgtttgccgtgattgaagttgatgaggaagtgctaaagtgccagcagggcgtgagctcccttgcgttcgcactcgcttttctgcagcgaatggacatgaagcccctagtggttcttggccttccggcccccactgcacccagcggttgcctgtccttctgggaggccaaagctcaactggctaagtcatgcaaagtacttgtagacgccctgcgccataacgccgcagcggccgtgccattcttcggcgggggaagcgtcttgagggccgcagagcctgccccccacgctagctacggtgggatcgtgagtgtagagacggatcttctccaatggtgtttagaatccgggtctattccaatcctatgcccaatcggagagacagctgcacgacgatccgttctgctggactcccttgaggtcacagcttctctggccaaggcccttaggccaaccaagattatctttctgaataacaccggcgggcttagagactcttctcacaaagttttgtctaatgtgaacttgcctgccgacctcgacctggtatgtaatgccgaatgggtctctaccaaagaaaggcagcagatgcgacttatagtggacgtgttaagcagacttccccaccactctagcgccgtaatcaccgccgcatctacattgctgactgaactgttctcgaacaaggggagtggaaccctgttcaagaacgccgaacgtatgctccgcgtgagatctctagacaaactcgaccaggggagactggtcgacctcgtcaacgcttctttcggcaagaagttgagagatgactacctggcttcattgcgtccacgcctgcatagtatttacgtgagcgagggatataatgccgccgcaatacttacaatggaacccgtcctgggaggaacaccgtatctggacaagttcgtagtctcgagtagccgacagggccaaggctccggccagatgttatgggaatgtctcaggcgagatctccaaacactcttctggcgaagtcgagtcactaacccaattaacccctggtacttcaaacattccgatgggtccttcagcaacaaacagtggatcttcttttggttcggcttagctgatattagggatagctatgagctagtaaaccatgccaagggtctgcctgactccttccataagcccgcctctgatcccgggtcc

SEQ ID NO: 245141 - DNA, 1602 bp, Artificial Sequence
  derived and/or modified sequence
atggcaaccgcgctgatggcggtggtcctgcgggcagcagccgtggcgccgcgcttgagaggccggggaggaaccggcggggctagacggttgtcctgcggggccagacgccgggccgcccggggcacttcgccaggacgccgcctgtctactgcctggtcgcagccacaaccgcctccagaggaatacgccggagccgacgacgtgtcgcagagcccggtggccgaagaaccatcatgggtgccgagcccgcgaccgccggttccccacgaatcgccggaaccgccgtccggacgctcgctggtgcagagggacatccaggccttccttaaccagtgtggcgcatccccgggagaagcacgccactggcttacccagttccaaacttgccatcattccgccgacaaaccgttcgccgtgatcgaggtcgatgaagaggttctgaagtgccagcagggggtgagttccctggctttcgcactggcattcctccagagaatggatatgaagccgctcgtggtactggggttgccagcgccgactgcgccgtcaggatgcctctcgttttgggaagcgaaggcccagctcgccaagtcctgcaaggtgctggtggacgcgctgcgccataacgcggccgctgcggtcccgtttttcggaggggggtccgtgctgcgcgctgccgagccagcgcctcatgcgagctacggaggaatcgtgtcggtggagactgacctcctgcagtggtgcctcgaatcaggatcgatccctatcctgtgcccgatcggggaaaccgccgcacggcgatccgtcctgttggactcccttgaggtgaccgcatccctggccaaggcgttgcgccccaccaagatcatcttcctcaacaatactgggggactgcgggactcctctcacaaggtgctttcgaatgtcaacctcccagcagacctggatctggtctgcaacgccgaatgggtgtcaactaaggagcgtcaacaaatgagactgatcgtggatgtgctgtcacgcttgccgcaccactcgtccgcagtgatcacggcggcttcaaccctcctgaccgagctgttctcgaacaagggctcaggaaccctgttcaaaaacgccgaacgcatgttgcgggtgcgctcccttgacaagctggaccaaggacggctggtggacctcgtaaacgccagctttggtaagaagctgcgcgacgactaccttgcatccctccggccgcgcctgcactcgatttacgtttccgagggttacaatgcagccgccatcctcactatggaaccggtgttgggcggaacgccgtacctggacaagttcgtggtgtcgagctcacgccaaggtcagggatcgggtcaaatgctgtgggagtgtctgcggcgcgatcttcagaccctgttttggcgcagccgcgtgacgaatccgattaacccctggtactttaaacactccgatggatcattttcgaacaaacagtggatcttcttctggtttggcctcgcggatatcagagactcatacgagttggtgaaccatgctaaaggactcccggactccttccacaaaccggccagcgatcctggatcc

SEQ ID NO: 245142 - DNA, 1602 bp, Artificial Sequence
  derived and/or modified sequence
atggcaacagcattaatggctgttgttttaagagctgcagctgtggcacctagattaagaggacgtggaggaacaggaggagcacgtagactttcatgtggagctagaagaagagctgcaagaggtacatcaccaggtagacgacttagtacagcttggtctcaacctcaaccaccacctgaagaatatgctggagcagatgatgtgagtcaatctccagttgcagaggaaccatcatgggttccttctccaagacctccagttcctcatgaatctccagaaccaccttctggaagatctttagttcaacgtgacattcaagcttttttaaatcaatgtggtgcttcacctggggaagcaagacattggttaactcaatttcaaacatgtcatcactcagcagataaaccatttgctgtaattgaagttgatgaagaagttttaaaatgtcagcaaggtgtcagttcattagcttttgcactagcttttttgcaacgtatggatatgaaacctttagttgttcttggattaccagctccaactgctccatcaggatgcctttcattctgggaagcaaaagcacaattagctaagtcatgtaaagttcttgttgatgctttgagacataatgcagcagctgcagtaccatttttcggaggaggaagtgtattaagagcagctgaaccagctccacatgcatcatatggaggtattgttagtgttgaaactgatttattacaatggtgtttagaatctggaagtatacctattctttgtccaattggagaaactgctgctaggcgatctgtccttcttgattctttagaagtaactgcaagccttgctaaagctcttagaccaacaaaaattatttttcttaataatacaggtggattaagagatagtagtcataaagttttatcaaatgtaaatcttccagcagatcttgatcttgtttgtaatgcagaatgggtgtctactaaggaaagacaacaaatgagacttattgtggacgtattatcaagattaccacatcattcatcagcagttattactgcagcaagtactttattaactgaattatttagtaataagggttcaggtactcttttcaaaaatgctgaaagaatgttaagagttagaagtttggacaaactagatcaaggaagattagttgatcttgtaaatgcatcttttggtaaaaaattaagagacgattatttagcatcacttcgtccaagattacattctatatatgttagtgaaggatataatgcagcagcaattctaacaatggaaccagttttaggtggtactccatatttagataagttcgttgtttcatcatctagacaaggacaaggatctggacaaatgttatgggaatgtttacgtagagatttacaaactttattttggagatcacgtgttacaaatccaataaatccatggtattttaaacattctgatggatctttctctaataaacaatggattttcttttggttcggattagctgatataagagacagttatgaattagtaaatcacgcaaaaggattaccagattcattccataaacctgcatcagatccaggatct

SEQ ID NO: 245143 - DNA, 1602 bp, Artificial Sequence
  derived and/or modified sequence
atggccaccgccctgatggccgtggtgttgcgggccgccgccgtggctccaaggctccgcggaagaggagggactggaggtgctaggcggctgtcctgcggcgcgcggcggcgggcagctcgcggaacttcaccggggcggcgcctttccacggcctggagccagccacaacccccgccagaagagtatgcgggtgcagatgacgtgtcacaaagccctgtcgctgaagagccgtcttgggtgccgtctccccgtccgccggtcccgcacgaatcgcctgaaccgccctccggacggtcgctggtgcaacgcgacattcaggccttccttaaccaatgcggagccagcccgggagaggcccgacattggctcacccagttccagacctgccaccactcagccgataaaccatttgccgtcatcgaggtcgatgaagaggtgctgaaatgtcaacaaggcgtgagcagcctggcctttgctttggccttcctccagcggatggacatgaagccgctggtggttctcggtctgccggcgccgaccgctccttcgggatgcctgagcttctgggaagcaaaggctcaactcgcaaagtcgtgcaaggtgctggtggacgcactccggcataatgcagcggcggcagtgccgttctttgggggagggagcgtcctgcgcgctgcagagcccgcaccgcatgcctcgtacggcggaatcgtgtcagtggagactgatttgctccagtggtgtctggaatctggctccattccgatcctgtgtcctatcggagaaacggcagctcgccggtcagtcctgttggactcgctggaggtgaccgcatcgctggcgaaggcgcttcgcccgaccaaaatcatttttctgaacaataccggagggctgagagactcgagccataaggtcctgtcgaatgtgaatctgccggccgatctcgacctggtttgcaacgcagaatgggtgagcacgaaggagcggcagcagatgcgcctgatcgtggatgtgctctcaagactcccacaccactcgtcagccgtgatcaccgcagcgtcaaccctgctgaccgagctgttctcgaacaagggatcgggaaccctgttcaaaaacgctgaacgcatgctgagggtgcgaagcctggataaacttgatcaaggacgcctggtggacctcgtcaatgcgagcttcggcaagaagctgagagacgattacctggcttcgctgcgcccgcgcctgcactcgatctatgtctccgaggggtacaacgcggccgccatcctgaccatggaaccagttctcggaggaaccccatacctggacaaattcgtcgtcagctcgtcgaggcaaggccaaggcagcggacagatgctgtgggaatgccttcggagagatcttcagaccttgttctggcggtcgagagtgactaacccgattaatccatggtacttcaaacactcggacggatcattcagcaacaagcaatggattttcttttggttcggactggctgacatccgcgactcctacgaactcgtgaaccatgctaagggactgccggactcgttccacaagccagcatccgaccctggctca

SEQ ID NO: 245144 - DNA, 1602 bp, Artificial Sequence
  derived and/or modified sequence
atggctactgctttgatggcagttgttttgcgtgctgccgctgttgctccaagattgaggggtaggggggggacaggtggtgctagacggctaagttgtggtgcacgtaggcgtgctgctcgcggaacgtcacctggacgcagactgtccacagcttggagtcaacctcagccccctcctgaggagtatgctggagccgatgacgtgagtcaatcccccgttgctgaggaaccttcctgggtgcctagcccccgaccacctgtccctcacgagtccccagaacctccaagcggaagaagtcttgtgcaacgtgatatacaggcttttcttaaccagtgcggggcaagtcctggggaagctagacactggttgacccaattccagacttgccatcactccgccgacaaacctttcgctgtcatagaagttgacgaggaagttcttaaatgccaacagggggtgagtagcctagcctttgcgcttgctttccttcagaggatggatatgaaaccactggtggttctgggcttgcctgcacctaccgccccatccgggtgcctatcattctgggaggctaaagcacagctggctaagagttgcaaggtcttagttgatgccctccgacacaacgcagcagctgctgtgccgtttttcgggggtggctccgtcttgcgtgctgccgagccagcaccacatgcttcatatggaggtattgtgtcggttgaaacagatttgttgcagtggtgcttggaatctggttctatcccaatcttgtgccctattggggagactgctgctaggcggagtgttttgctagattccctggaagtgactgcttcactagctaaggctcttcggcctacgaagattatttttctcaacaatacaggggggttgagggatagttcccataaggttctcagtaacgtcaacttgcctgctgatcttgaccttgtatgcaatgccgaatgggtttccactaaggaacgtcaacagatgaggctcatagttgatgttctttctagactacctcaccattctagcgcagtgattacagcagcttccacactgctgaccgagctattctccaacaaaggatccggaaccctatttaaaaatgctgagaggatgctaagggttcgctcacttgataagcttgatcaaggaagattagttgacctggtcaacgcctcatttggaaaaaaacttagggatgattacttggcttctttgaggccacgattgcattctatttatgtttcagaaggttacaacgctgctgctattcttacaatggagcctgtcctcggcggaacaccttatctggacaagtttgtcgtaagttcttctcggcaggggcaaggctcagggcagatgctttgggaatgtctccgtagagatcttcagacgcttttttggcggtctcgagttacaaacccgattaacccctggtactttaaacatagtgacggcagtttctccaataagcaatggatcttcttttggttcggtctagctgacatacgagactcttacgaattagtaaaccacgctaaaggacttcccgacagttttcataagcctgcatctgatccgggctcg

SEQ ID NO: 245145 - DNA, 1602 bp, Artificial Sequence
  derived and/or modified sequence
atggcgacagctttaatggcggtggtcctgcgggcagcagctgttgcccctagactacgagggcgggggggaactggcggcgcaaggcgactgagttgcggtgcacgaagacgcgccgccagagggacgtctcccggacgacggctaagtactgcgtggagccaacctcaacctccccctgaggaatacgctggggcagatgacgtaagtcagtctcccgtggccgaagagcccagctgggtcccctcccctcggccccctgtgccgcacgagagccccgagcctcccagtgggaggagtctggtacaacgggatatccaagcattcttaaatcagtgtggagcatcacctggtgaagcacggcactggttgactcagtttcaaacctgccaccattccgcagacaaacccttcgctgtcatagaggtcgatgaggaagtgttgaaatgccagcagggagtctcttctctggcgtttgccctggcctttctgcaacgtatggacatgaagcctctggttgtattagggctcccggccccgactgccccttctggctgcttgtcattttgggaagctaaggctcagctggcaaagagctgtaaagttctagtcgatgctctgcgacataacgcggctgcagctgtccccttcttcggaggggggagcgtcctgcgcgccgccgagccagctcctcacgcttcttatggaggcatcgtctccgtggagactgatctcctacagtggtgcctggagtcaggaagcattccaattttatgcccgatcggggagacggccgctagacgctcagtgctgctcgactctctggaggtgaccgcttcattagcgaaggctctgcgccccacgaagatcatatttctcaataatactggcgggctgagagactccagccataaagtgctttccaacgtcaacctccctgcagacctggacctggtttgtaatgctgaatgggtgtccactaaagagcggcagcagatgcggttgatcgtggacgtcctgagcaggctgcctcaccactcttcggcggtcatcaccgccgcctccaccctgctgacagagctctttagcaacaaaggcagtggcaccctcttcaagaacgctgaaaggatgctgagggtacgatctctggataaactcgatcagggacgtctggtcgacctggttaacgcttccttcggaaaaaaactgcgggacgactatcttgcctctctgagacctcgcctgcattccatttacgtctctgagggttacaatgccgcagccatcttaacaatggagcccgttctcggtgggaccccctacctggataagtttgtggtgtctagctctcgccagggtcaaggcagcgggcagatgctgtgggaatgtcttaggcgcgacctgcagacactattctggaggtcccgggtgacaaatcccattaatccttggtactttaagcatagcgatggatcttttagcaacaagcaatggatctttttctggttcggcctggccgatatccgagattcgtacgaactggtgaatcacgctaaaggactgccagactccttccacaaacctgcaagtgatcccggtagc

SEQ ID NO: 245146 - DNA, 1602 bp, Artificial Sequence
  derived and/or modified sequence
atggctaccgccctgatggctgtggtgctgcgcgccgccgctgtcgccccacggctgcgcggacgcggaggcactggaggagccagacggctgtcatgcggagcccgccgccgggcggcccggggaacctcaccgggacgccgcctcagcaccgcatggtcgcaaccgcagccaccacctgaagaatacgcgggagcagatgacgtctcgcagtcccctgtcgcggaagaaccaagctgggtgccgagcccgcggccgccagtccctcatgagagccctgaaccgccttctggacgctcacttgtgcagagagacatccaggcctttctcaatcaatgcggagccagcccgggagaggcacgtcactggctgacccaatttcaaacttgccaccactccgctgacaaaccatttgcggtcatcgaagtggacgaagaagtgctgaaatgccagcaaggcgtgtcgtcactggcctttgcgctggctttcctgcagcgcatggatatgaagcccctggtggtcctgggacttcccgcgccgaccgcaccatcaggatgcctgtccttctgggaagctaaggctcaattggcaaagtcatgcaaggtgctcgtggacgcgttgcgccacaacgccgcagccgccgtgccatttttcggaggaggatcagttctgagagcagccgaacccgcaccgcacgcttcgtacggcggtatcgtgagcgtggaaaccgatctgctccagtggtgcctggagtcaggaagcatccctatactgtgcccgatcggcgaaaccgccgcccgcagatcggtgttgctggactcccttgaagtgactgcctcgcttgccaaggcgctgcgcccgactaaaatcatcttccttaacaacaccggcggtctgcgcgactccagtcataaggtgctgtccaacgtgaatctgcctgcggacctcgacctcgtctgtaacgcagagtgggtgtccaccaaggagagacagcaaatgagactgatcgtggacgtgctctcaaggctccctcaccatagcagcgccgtgatcaccgccgcatcaactctgctgaccgagctcttcagtaacaaaggctccggaacccttttcaagaacgctgaacgaatgctgcgcgtgcggtccctggacaaactcgatcagggacggcttgtggacttggtgaacgcttccttcggaaagaaacttcgcgacgactacctcgctagcctgcgtccgcgcctgcactccatctacgtgtcggaaggctataacgcagccgccattctcaccatggagccggtcttgggagggacgccctatctggataagttcgtcgtgagctcatcgaggcagggccaaggatccgggcagatgctctgggagtgcctgagacgggacctgcaaactctcttctggcggtcccgcgttactaatccgatcaacccatggtacttcaagcattcggatggcagcttctcaaacaagcagtggattttcttttggtttgggctggccgacatccgggattcgtacgaactcgtgaaccacgccaaagggttgcctgactcgtttcataagcctgcctccgatccgggctct

SEQ ID NO: 245147 - DNA, 1602 bp, Artificial Sequence
  derived and/or modified sequence
atggctaccgctctgatggccgtggtactgcgggcagccgctgtggcgcccagactccggggaagaggcggcaccggaggtgcaaggaggctgtcgtgcggggcccggagaagagccgcacgcggcacttcaccaggcagacgattaagcaccgcctggagccagccccagccaccaccagaagagtatgcaggggctgacgacgtgtctcaaagcccggtggctgaggagccaagttgggtgcccagcccaaggccacccgtcccgcacgaatcacccgagccccccagcgggcgatccttggtccagcgggatatccaggctttcctcaaccagtgtggtgctagcccgggggaagctcgccattggcttacacaattccaaacctgccatcactccgccgataaaccttttgccgtgattgaagtcgacgaggaggtgctaaaatgccagcaaggcgttagttctctggcattcgcgctcgcttttttgcagagaatggatatgaaaccgttggtggtactcgggctgcctgcacccaccgcaccctcggggtgtctaagcttctgggaagctaaggcacaattagccaagtcctgcaaagtgctggtggacgccttacggcacaacgctgccgccgccgttcccttctttggaggcggcagcgtgctaagggcggccgaacccgcgccacatgcatcatacggcggaatcgtgtccgttgaaaccgatctactgcagtggtgcctcgaatccggaagcatcccaatactgtgccctataggggagacagccgcaagacgaagcgtgcttcttgatagcttggaagtgaccgcaagcctggccaaggctctgcggcctacgaagatcatctttctcaataacacgggcggcctgcgtgactctagccacaaagtgctctcaaacgtgaatctgccagcagatctagatctggtctgtaacgctgagtgggtctccacaaaagagcggcagcagatgcggttaattgtagacgtgctctcaaggctgccccaccatagtagtgccgtgattaccgctgcgagcactctgttgacagaattgttctccaacaaagggagcgggactttgttcaagaacgccgagcggatgcttcgggtgaggtcgctggataagttagatcagggccggctggtcgaccttgtgaatgccagttttggtaaaaagctgcgggacgattacctggcctctctgcgtccccggttacactctatctacgtgtccgaaggatacaatgccgccgccattttgaccatggagcccgtgctcggggggacgccatatttggacaagtttgttgtgtctagttcccggcagggtcaggggagcgggcagatgttgtgggagtgtctgaggagggacttgcagacactgttctggcgttccagagtgaccaaccctatcaacccttggtactttaaacacagtgatggctcgttctccaataaacagtggatattcttctggtttggactcgctgacatccgggacagctatgaactggtgaatcacgcaaagggcctgcctgactcattccacaagccagccagtgacccaggtagc

SEQ ID NO: 245148 - DNA, 1602 bp, Artificial Sequence
  derived and/or modified sequence
atggcaactgcgcttatggccgttgtcctccgcgcggcggccgtggccccgcgactgagaggacgcggagggaccggaggcgcccgcagactgtcgtgtggcgcccggagacgcgcggcacggggtacttcgccgggacgccgactgtccactgcgtggtcacagcctcagcctccaccggaagagtacgccggagcggacgacgtgtcccaatcgcccgttgcggaagaaccgtcgtgggtgccgtccccaagaccccccgtcccgcacgagtcacctgaaccccctagtggacggtcgttggtccagagagacattcaggcctttctcaaccaatgtggtgcgtcccctggagaagcgcggcactggctgacccagttccagacttgccatcatagcgccgacaagccgtttgccgtcatcgaggtggacgaggaagtgctgaagtgccaacagggagtctcaagcctggcgttcgccttggcattcctgcagcggatggacatgaaacctttggtcgtgcttggactgccggccccaaccgccccttccgggtgcctctcattctgggaggcaaaggcacaactggccaagtcatgcaaagtcctcgtggatgcgctccgccacaacgccgctgctgccgtgccatttttcggaggaggatcggtgttgcgggccgcagaacctgccccacatgcttcatacggaggtatcgtgagcgtggaaaccgatctgctccagtggtgcctggagtcagggagcattccgatcctttgcccgatcggagagacggcggcgagacgctcggttctcctggactcgctggaggtcactgcatcactggccaaagccctgcgcccaaccaagatcattttcctcaacaatactggaggattgagggactcatcccataaagtcctgagcaacgtgaacctgccggctgacttggatctcgtctgtaacgcggaatgggtgagcactaaggaacgtcaacagatgcgcctcattgtggatgtgctgtcgcgtctgcctcaccattccagcgccgtgatcactgccgcgtcaactctcctgactgaactgttctcgaataaaggaagcggcacgctgttcaagaatgcagaacgcatgctgcgggtccggtcgctggacaagctggaccagggacgccttgtggacctcgtgaacgcctcatttgggaaaaagctgcgggacgattacctggcgtcccttaggcctaggctgcactcaatctacgtgtcggaaggttacaatgccgcagccatcttgactatggaacctgtccttggaggaaccccgtacttggataagttcgtggtcagttcgtctcggcaaggtcagggatcgggtcaaatgctgtgggaatgcctgcggagggacctgcaaactctgttttggcggtcgcgggtgactaacccgatcaacccttggtacttcaagcattcggatggctccttctcaaataagcagtggatcttcttctggttcggactcgcggacatccgggactcctacgagcttgtgaatcacgccaaggggttgcctgattcatttcacaagccagccagcgacccaggatca

SEQ ID NO: 245149 - DNA, 1602 bp, Artificial Sequence
  derived and/or modified sequence
atggctactgctctgatggctgtggtgctgagggcagccgccgtcgccccaaggctgcggggacgcggcggcacagggggggctcggcgcctttcatgtggtgctcgccggcgcgccgctcgcggcacctctccaggacgccgcctcagtacggcgtggtcacagcctcagccgcctcccgaggagtacgcaggagctgatgacgttagccagagtcctgtggccgaggagccttcatgggtgccctccccccggcccccagtgccacatgagtctcctgaacccccgtcaggacggagcctcgttcagagagatatccaggcattcctgaatcagtgcggggcaagtccaggcgaggctcgacactggttgacgcaatttcaaacctgccaccatagcgctgataagcctttcgccgtaatcgaagttgatgaggaggtgctcaagtgccagcagggagtttcgtctcttgcattcgctctggctttcctccaacgcatggacatgaagcctcttgtggtgctgggcctcccagccccgacggcaccttcgggatgcctctccttctgggaggctaaagctcaactagctaagtcatgtaaggtgctcgtggacgccctgcgtcataatgccgccgctgccgtcccattctttggaggtggcagcgtgttgagggctgcagagcccgctccacatgccagttatgggggtatagttagtgtagaaactgatcttttacagtggtgtttggagagtggcagcattcccatcctatgccctatcggcgagaccgccgccagacgctccgtcttgctggactcattagaggttaccgctagtttagcaaaggcgttaagacctacaaaaattatcttcttgaataacacgggaggtttgagagactccagccataaggtgctctcaaacgtgaatctgccggcagacttagatctggtctgcaacgctgagtgggtgagtactaaggagcgccagcagatgaggttgatagtggatgttctctccagactgccccaccattctagtgcagtcattacggcggctagcacactgctgactgagctcttcagtaacaagggctcagggacattgttcaagaatgcagagcgaatgttgcgtgttcggagcttagataaactggaccaggggcgacttgtagatctggtgaatgcatcatttggcaagaagttgcgcgatgattacttggcctcattacgacccaggctgcatagtatctatgttagcgagggctacaatgccgcagctatcctgactatggaaccagtactcgggggaacgccctatctcgataaattcgttgtgagcagctctaggcaggggcaaggaagcggccagatgctgtgggagtgtctgagaagagatctgcagacgttgttttggaggtcccgggtaaccaaccctatcaatccatggtatttcaagcacagtgatggttcattcagcaacaaacagtggatttttttctggtttggcctggctgatatcagagacagctacgaactggttaatcacgccaaggggctgcccgattcttttcacaagcctgctagcgaccccggaagc

SEQ ID NO: 245150 - DNA, 1602 bp, Artificial Sequence
  derived and/or modified sequence
atggcgactgctctgatggcagtggtactgcgggcagccgccgtcgccccccgtttgaggggtcgagggggaacaggaggggccaggcggctgagctgcggagccagacgccgcgccgcgcgtggaaccagccccgggcgcaggctctctaccgcatggagtcaaccccagccaccgcccgaggagtacgccggcgccgatgacgtgtcccagtcaccggtagctgaggaacctagctgggtaccttcgccccgcccgcccgtcccacacgaatctcccgaaccgccatctggacgctcgctcgtgcagagggacatccaggctttcctgaatcagtgcggtgcatcgcccggagaggctcgtcattggttgacccaattccagacctgtcaccatagtgcagacaagccctttgccgtgatcgaggtcgacgaggaagtcctgaaatgccaacagggagtctcgtctctggcgttcgctctggcgtttctgcaacgcatggacatgaagccgctggtggttttagggcttcccgccccaacagctccgtcaggctgtctcagtttttgggaggctaaagcccagctcgcgaaaagttgcaaggttttggttgatgccctgcgtcacaacgctgcagctgccgtccctttctttggcggcggcagcgttctgcgagctgccgaaccagctccacatgcatcctacggcggcatcgtttcagttgagacagatctgctgcagtggtgcctcgaatcgggtagcattccgattttgtgccccatcggggaaaccgccgccagaagaagcgtactcctggacagtctggaggtgacagccagcctggccaaagccctgcgtcccacaaagatcatttttctgaataacaccggaggactgcgagatagctcgcataaagtgctatcaaacgttaacctaccggctgacctcgatctcgtctgcaacgcggaatgggtttccacaaaggagaggcagcaaatgcgtctgattgtggatgtgttgtcgcggttgccacaccatagttcggctgttattactgccgcctcaaccctcttgacagagctgttttctaacaaaggatccggcaccctttttaagaacgccgagagaatgctgcgggtgagaagtttggacaagctggatcagggccgactggttgacctggttaacgcctcttttggcaagaagctgagagacgactaccttgccagcttaagaccaaggctgcactccatttatgtgtcagagggctacaacgcagcggctattctgactatggagccagtgctgggcggcacaccctatcttgacaaatttgtagttagctcttcccggcaaggccaagggagtggccaaatgttgtgggaatgcctgagacgggatctccagacgctcttctggcgatctcgggtgaccaacccgattaatccatggtacttcaagcactccgacggatctttcagtaataaacaatggatatttttttggttcggattagctgatatccgcgactcctatgagctcgtcaatcatgcgaaaggactgcccgactcatttcacaaacctgcaagcgaccccggatca

SEQ ID NO: 245151 - DNA, 1602 bp, Artificial Sequence
  derived and/or modified sequence
atggccacagccttgatggccgtggttctgcgggcagctgcggtggcgccaagactgcgggggagagggggtacaggcggcgcccgccgactgagctgtggcgctcgacgacgggccgccaggggtactagtcccggacgaagactctctaccgcttggtctcagccccagcctccccccgaggagtacgctggggccgatgacgtatctcaatctccagttgctgaggaaccgtcatgggtgccatccccgcgaccacctgtgccacacgaaagccccgagccacccagcggcagaagcctggtccaacgagacatccaggcatttctgaatcaatgtggcgcgagccccggtgaggcaaggcattggcttactcagttccagacctgccaccactcagctgacaaaccttttgctgtgatagaggtggatgaagaggttctgaagtgccagcagggcgttagcagcttggccttcgccctcgcctttctgcagcgcatggatatgaaaccactggtggtgctggggctgcctgcgccaacagcccctagtggatgcttgtctttctgggaagccaaggctcagctggcaaagagctgcaaggttcttgtagacgcattgaggcacaatgctgcggctgccgtgcccttctttggaggggggagtgtgcttagggccgccgaacctgccccacatgccagttatgggggaattgtgtctgttgaaacagatctcctccaatggtgtctggagagcggatcaattcctattttgtgccctattggggagactgcggctagaaggagcgtattgcttgactctctggaagtcactgcgagtctggccaaagcgctgcggcctaccaaaatcatcttcttgaacaacacaggcggcttgcgggacagttcccataaggtgctgagtaacgtgaacctgcccgctgacctggacttggtctgtaacgctgagtgggttagcacaaaggagagacaacagatgcggctgattgtggacgttctgagccggctgcctcaccacagcagcgctgtgattactgccgcctcaaccctgctgaccgagctgttctccaacaaagggagcggcacgcttttcaagaacgccgaaaggatgctcagagtgcggagcctggataaactcgatcaggggaggctcgtggacctggtgaacgcttcctttgggaagaagctgcgggacgactacctggctagcctgcgaccccgattgcactctatctatgtgagcgaaggttataacgccgcagctatcctgactatggagccagtgcttggaggcactccctatttggacaagttcgtggtgtcaagcagtcgacaaggacaaggaagcgggcaaatgttgtgggaatgccttaggagggacctgcagaccttgttttggagatcccgcgtcacaaacccgattaacccatggtactttaagcacagcgatggttctttctcaaacaaacagtggatctttttttggttcggtctggctgatattcgagacagctacgagcttgtcaaccatgcaaagggattgcccgactcctttcataaacccgccagcgacccgggctcc

SEQ ID NO: 245152 - DNA, 1602 bp, Artificial Sequence
  derived and/or modified sequence
atggccaccgcactaatggccgtggttctgagagccgctgctgtggctccacggctgcgcggccggggtggaactggaggagccaggagattaagctgtggtgccagaagacgtgccgccagagggacctcccctgggcgaaggctatcgaccgcgtggtctcaaccgcagcccccccccgaggaatacgcgggcgccgacgatgtttctcagtcaccggttgcagaggagccatcgtgggttcctagccccagaccaccagtgccccacgagtccccagagccccctagtggccgctcgctggttcagagggatattcaggccttcctgaatcagtgtggcgcatctcctggggaggccagacactggcttactcagtttcaaacctgtcaccactctgctgacaagccattcgcggttatagaggttgatgaggaagtactgaagtgccagcaaggtgtctccagcctagcctttgctttagcgtttctccagcgaatggatatgaagcccttagtggttctggggctgcccgcgcccacggccccctcagggtgtttgagcttttgggaagcaaaggcccaacttgcaaaatcatgtaaagtgttggtagacgccctgaggcacaacgcagccgccgctgtgccgttctttgggggcggtagtgtgcttagagccgcggagcctgcgccacacgcctcttatggaggcattgtcagcgttgaaacggatctcctacagtggtgcctggaaagtggatcaatccccattttatgcccaatcggcgaaacagcagccagacgatccgtgcttctcgactcattggaagtcaccgcctcccttgccaaggcgcttagacctaccaaaatcatctttctgaacaatactgggggcctgcgcgattcatctcacaaggtcctctctaatgttaatttgcccgcggatctggatctggtgtgtaacgcggagtgggtttcaactaaagagcggcaacagatgcgcctgattgtggatgtactctcacggctccctcatcacagcagcgcagtcattaccgccgcctccactttgctcacagagctctttagcaataaaggaagcgggactctctttaaaaacgcagagaggatgctgcgggtgagatccctggataaactggatcagggtaggctggtggacctcgtgaatgccagctttgggaaaaagctccgtgatgactacttggctagcctgcgcccgaggcttcactccatatatgtttctgaaggatataacgcagctgctatactaactatggagccagtgctaggaggcacgccctacttggacaaattcgttgtttcctcctccagacaagggcagggctccgggcaaatgttgtgggaatgtctgcggcgggacctgcaaactttgttctggaggtcccgggtgacgaacccaattaacccttggtacttcaaacatagtgacggcagttttagtaataagcagtggatttttttttggttcggcctggcggacatccgggattcctatgaacttgtaaaccatgctaaagggctcccggactcattccacaagcctgcatccgaccctggttcc

SEQ ID NO: 245153 - DNA, 1602 bp, Artificial Sequence
  derived and/or modified sequence
atggcaacggcactgatggccgttgtgcttagggccgctgccgtggcccccagactccgcggtaggggcggtactggaggcgccaggcgactgtcttgcggggccaggagacgcgctgcacgaggaaccagtcccggtcggagactctcaacagcatggtctcagccacagcccccgcccgaagagtacgccggggccgacgacgtatcacagagtccggtggctgaagaaccgtcttgggtacctagcccccggcctcctgtgccccatgagagtcccgagccaccttccggcagaagcctggtgcagcgcgacattcaggctttcctgaaccagtgtggggcctcaccaggcgaagctagacattggctgacccaatttcagacttgtcaccatagcgctgataagccatttgccgtgatcgaggttgacgaggaggtgctgaagtgtcagcagggtgtgtcttccctggcctttgcactcgcgttcctgcaacgcatggatatgaaacctcttgtagtgctgggcctgccagctcctacggctccaagcggttgcctgtcattttgggaggccaaagcccagctggcaaagtcttgcaaggtcctcgtagatgccttgcgccacaatgctgcggcagccgttccattctttggcggcgggtctgtcctgcgagccgccgagcccgctcctcacgccagctatggggggatagtgtctgtcgagacagacttgctgcagtggtgtctcgaaagcggttccattcccattctgtgccctataggagagacggcagcccggaggtctgttctgctcgactctcttgaagttaccgcctcccttgccaaggctctcagacctactaaaatcatcttccttaataataccggaggcctcagagattctagtcacaaggtgctttcaaacgtcaatcttccagccgacctggatctggtgtgtaatgccgagtgggtgagcacaaaggagaggcagcagatgaggctcattgtggacgtgctctcaaggctccctcatcatagtagtgctgtgataactgcggcaagcaccctcttgacggagctcttctccaacaagggctcaggaaccctctttaagaacgccgaaagaatgctgcgggtgcgatcactggacaagctggaccaagggaggctcgtcgatctcgtgaatgcttctttcggtaagaagctcagggacgactatctcgctagtttgcgacctagactgcactccatctacgtctctgaggggtacaatgcagctgcaatcctgacgatggaaccggtgctgggaggtacaccatatctcgacaagtttgttgtgagcagctcccggcagggccaggggtcaggccagatgttgtgggagtgcctgaggagagacctccagacacttttctggaggagcagggtgacaaacccaattaatccctggtattttaaacattctgatgggagctttagtaataaacaatggatattcttttggttcgggctggccgatattagggattcttacgaactggtgaatcatgctaaaggcctccctgattcctttcataaacccgctagcgatcctggctcc

SEQ ID NO: 245154 - DNA, 1602 bp, Artificial Sequence
  derived and/or modified sequence
atggcaactgcactgatggctgtcgtcctgcgtgcggccgccgtggccccccggctaagagggcggggagggaccggcggcgcccggcgattgagctgcggggccagacgcagggccgcgagaggaacttcccccggacgacgactgtccactgcctggtcacagccacagcccccccctgaggagtacgcgggggccgacgatgtctctcagtcccctgttgctgaagagccttcttgggtgccttctccccgaccccctgtgcctcatgaatcaccagagcctcctagtggacgctccctggtgcaaagggatatccaggcgtttctgaatcagtgtggagcctcgcccggggaggcgcggcactggctgacacagttccagacctgccaccacagcgccgacaaaccctttgctgtcatcgaggtggatgaggaggtgctgaaatgccaacagggtgtctcttcactggcctttgcgttggccttcctgcagcgcatggacatgaaacctcttgtggtgctgggactgccggcaccaaccgctcccagcgggtgtctatcattttgggaagccaaagcgcagcttgccaagtcatgtaaggtcctcgtggacgcactgcgacataatgccgctgccgcagtcccattcttcggcggaggatctgtgctgcgcgcggccgaaccggccccccatgccagttacggaggtattgtatccgtagagacggatttgcttcaatggtgcctcgagagcggtagcattccgatcctgtgtccaattggcgagacggcggcacgccgttctgtactgctggactctttggaggttaccgcttcgctggccaaggcactccgccctaccaagattatcttcttgaacaacacagggggcctccgggattcttcgcacaaggttctgtcaaacgtgaatctgcctgccgacctggatctcgtgtgcaatgccgagtgggttagcacaaaagagcgtcagcagatgcggctgatcgtcgatgtgctcagccggctgccgcaccactcaagcgccgtgattacagcggcctctaccttactgaccgagctgttttccaacaagggatcaggtacactgtttaagaatgcggagcggatgctaagggtgcgttctctagataagctagatcaaggccgtttagttgatctcgtaaatgctagtttcggaaagaagcttcgtgatgactacctagccagcctccgcccgagactgcattcaatttacgtgtctgaaggttataatgcggcggctatcttgactatggaacctgtgttaggggggacaccctacttggacaaattcgtggtcagcagcagccggcagggtcaggggtccgggcagatgctttgggaatgccttagacgagatctccagaccctgttttggcgatctcgggttacaaatcccatcaacccatggtattttaaacacagcgacgggtctttttctaataaacagtggattttcttttggtttggactagcagacatcagggattcttatgagttggttaaccacgctaaaggactccccgatagttttcacaagcccgcgtcagatcccgggtcg

SEQ ID NO: 245155 - DNA, 1602 bp, Artificial Sequence
  derived and/or modified sequence
atggcgactgctctcatggccgtggttctccgtgctgcggctgtagcaccacgcctgagaggacgaggtggtacaggcggcgcacggagattgagctgtggcgccaggcgccgtgctgcgcgaggaacgtccccaggacgcaggctcagtacagcctggtcacaaccccagccgcctcccgaagaatacgctggcgccgatgatgttagccaatcccccgtcgcagaagaaccctcttgggtcccgtctccgcgacctcctgtgccacacgaatctcccgaaccacccagcggcagatctctcgttcagcgggatattcaggccttcctgaaccagtgcggggcctcccccggcgaagcccgccactggctcactcagttccagacctgccatcactccgcggacaaacccttcgctgtgattgaagtggacgaggaagtactgaagtgtcagcagggcgtctcctctctggcattcgccctggctttcctgcagaggatggacatgaagcctctagtggtgctaggtctgcccgctccgacagcgccgagcggatgcctttctttctgggaggcaaaagctcaattagcaaaatcctgtaaagtgttggttgacgccttaaggcataacgccgccgccgcagtgccattttttggcggcggcagtgtactccgcgcggcagaacccgcccctcacgcatcttatggaggcatcgttagcgttgaaacagacctactgcaatggtgtttagagagcgggagtattccgatcctgtgtcccatcggtgagaccgctgcacgacggagtgtgttgctggattcattagaggtcacagccagtctggcaaaggcgctccgaccaacgaagatcattttcctgaacaataccggaggtctgcgggactctagccataaagtcttgagtaacgtaaatctgcccgctgacctggacctcgtatgcaacgcggagtgggtctcgactaaggaaaggcaacaaatgaggctgatagttgatgttctctcacgcctacctcaccacagttccgccgtcattacagccgcctcgactttgttaaccgaactgttctccaacaaagggtcaggcacgctcttcaagaatgccgagagaatgctgcgagtgcgctcactggataagcttgaccagggtcgcctcgtcgacctggtcaatgcatcatttggaaaaaaactgcgggacgattatcttgcatcactacggcccagactacacagtatttatgtctcggaggggtataatgcagccgccattttgaccatggagcccgttctaggggggaccccttatttggataaatttgttgtatcaagttcgaggcagggtcaggggtctggtcaaatgctgtgggagtgtctgaggagagatctgcagaccttgttttggcgcagtagggtcaccaaccctatcaatccttggtatttcaagcactctgacgggtcgttcagtaataaacagtggatctttttttggttcggactggccgatatacgcgactcctatgagctggttaatcacgctaaaggcttgcccgatagtttccataaaccggcctcagatcctggctca

SEQ ID NO: 245156 - DNA, 1602 bp, Artificial Sequence
  derived and/or modified sequence
atggcgactgcgttgatggcggtggtgctgcgcgccgccgctgtcgcaccccgtctcaggggtcgcggcggcacagggggagcccgtcggcttagttgcggagctcgtagacgcgcggctcgcggcacctctcctggtcggcggctcagcactgcctggagtcagccacagccacccccagaggagtacgctggagctgacgacgtcagccagtctcctgttgccgaagagccgtcctgggtcccttccccccgtccgccagtccctcacgagagccctgagccccccagcggccgctcccttgtccaacgggacattcaggccttcctcaaccagtgtggcgcatcgccgggagaagctcgccactggctgacccagtttcagacctgtcatcacagtgcggacaagccgtttgcagtaattgaggtcgacgaagaggtcctaaagtgccaacagggtgtttcttccttggcattcgccctggctttcttgcagcgcatggacatgaagcccctcgtcgtcctcggcctccccgcgccgaccgccccctcgggctgcctgtctttctgggaggccaaggcccagctcgccaagtcgtgcaaggtcctcgtggatgcgctgaggcacaatgccgccgccgccgtccctttctttggtgggggatctgtgctgcgcgccgcggagccggccccgcacgcttcctacggtggtatcgtgtccgtcgaaactgatctgctgcagtggtgcctcgaatctggctccatccctatcctctgccccattggcgagaccgcggctcgtcgctccgtgctgctcgattcacttgaagttaccgccagcctggccaaggctttgcgccccaccaagatcatctttctcaacaataccggcggcttgcgcgactcatcccataaagtgctctccaacgttaacctccctgctgaccttgatttagtctgcaacgcagagtgggtgtcgactaaggagcgtcagcaaatgcgtctgatcgtcgacgtactgagcaggctgcctcatcattcttccgccgtaatcaccgccgcctcgaccctccttaccgagctgttctcaaacaagggctccggtaccctgttcaagaatgccgaacgcatgctccgggtgcgttccctggacaaactcgatcaagggcggctggtcgatttagttaacgcctccttcggcaagaagttgcgtgatgattacctcgcctcgctccgcccccgcctgcactcgatttacgtgtctgaaggatacaacgcggctgccatactcactatggaaccggtgctggggggtactccctatctggacaagttcgtcgtaagttctagccggcaagggcagggatccggccagatgctttgggagtgtctcagacgtgacctccaaaccttattctggagatcccgtgtcactaatccaatcaacccgtggtactttaagcattccgacggcagtttctccaacaagcagtggatcttcttttggttcggcctggcagatattcgtgattcgtatgagctggtcaatcatgccaagggcctgcctgactcatttcataagcccgcaagcgaccctgggtcc

SEQ ID NO: 245157 - DNA, 1602 bp, Artificial Sequence
  derived and/or modified sequence
atggcaaccgcactgatggcagtggtgctgcgcgcggcagccgtggcaccgagactgcggggacgcgggggcaccggcggtgccagacgcctctcgtgtggcgcaagaagaagagctgcgagaggaacttcgccaggccgccgcctgtcgactgcctggagccaaccgcagccacccccagaagaatacgcaggagcggacgatgtgagccagtcccctgtggctgaggaaccaagctgggtcccctccccaagacctcctgtgccacatgagagccctgagcccccttcaggaagatcacttgtacaacgcgatattcaagcatttctgaatcagtgcggcgcgtccccaggtgaagcgaggcattggcttactcagtttcaaacctgccatcattccgcagacaagccgtttgctgtgattgaagtggacgaagaagtcctgaagtgtcagcagggcgtctcgtccctggcatttgctcttgcctttcttcagcgaatggacatgaaacctcttgtcgtgctcggacttcctgcaccaactgctccatccgggtgcctgagcttttgggaggccaaagcgcagcttgccaaatcatgtaaagtgctggtcgatgcactgcgccacaacgcggccgccgccgtcccatttttcgggggaggctcggtcctcagagcagcagagcctgcaccccatgcgtcgtacggcggaatagtgagcgtggaaaccgatctgctgcaatggtgtctcgagagcggctctatacctatcctctgccctattggtgaaacggcggcaaggcgatccgtccttcttgatagcctggaagtcaccgcaagcctggccaaggcactccgacccaccaagattatcttccttaacaacaccggtggacttagggattcctctcacaaagtcctcagcaacgtgaacctcccagcagaccttgacctcgtgtgtaacgcagaatgggtgagcacgaaggagagacaacaaatgcggcttattgtcgatgtgctctcgcgcttgccccatcatagctccgcagtgatcaccgcggcctcaaccctcctgactgaactgttttcgaataagggatcggggactctctttaagaacgcggaaagaatgcttcgggtccgatcccttgacaagctggatcaaggacgtcttgtggatttggtcaacgccagcttcggaaaaaagttgagagatgactatctcgctagccttaggccgagactccattctatctatgtgagcgagggttacaacgcggctgcaattcttactatggagcctgttctgggaggtaccccttacctcgataagttcgtggtgtcgtctagccggcaaggacaaggttccggtcagatgctctgggaatgtttgcgtcgagacttgcagacgctgttttggcgcagccgtgtgactaaccctattaacccatggtactttaaacactcagacggctcgttcagcaacaagcaatggattttcttctggttcggacttgcagatatcagagattcttacgagcttgtgaaccatgcaaaggggctgcccgattcctttcataagccagcatccgacccaggttcg

SEQ ID NO: 245158 - DNA, 1602 bp, Artificial Sequence
  derived and/or modified sequence
atggctaccgccctgatggccgtggtgcttagagcagcagcagtggcccctcggctgcgcggcagaggtggcaccggaggcgcaaggagactgtcctgtggtgctcggcgccgcgctgcacggggcacttcccccggtaggcggctctcaacagcatggtcacagccccagccaccacccgaagagtatgccggcgcggatgatgtatcgcagagtcctgtggcagaagagccctcctgggtgccttcgccccgtcctcctgtgcctcacgagagtccagagccaccatctggccggagcctcgttcagcgtgatatccaagccttccttaaccagtgcggcgcctcccctggtgaggccaggcactggctaactcaatttcagacctgccaccattccgcagacaagccgttcgccgtgatcgaggtcgatgaggaggtgttaaagtgtcagcagggggtctcctccttagcgttcgccctagcgtttctgcaaagaatggatatgaagcctctcgtggtgttagggttaccagcccccacagctcccagtggctgtctcagtttttgggaggctaaagctcagctcgctaaatcctgcaaagtgcttgtggacgcgttaagacacaacgcagccgcagctgttccgttcttcggcgggggctcagtgctgagggccgccgaaccagctccccacgcgagttatggtgggatcgtcagcgtggagaccgatctcctgcaatggtgcttagagagcggaagcatcccgatcctgtgcccaatcggcgaaacagcggcgaggagatcagtcctgctggactcgctggaggtcaccgcgtcgttggcgaaggctctacgtcctactaaaatcattttcctgaacaacacaggaggattgcgcgacagctcccacaaggtactcagcaacgtaaacttgcctgccgatctcgatctggtatgtaacgccgaatgggtgagcacgaaggagcgtcaacagatgcggctaatcgtggatgtgctctcccgcttaccccatcactcgtcagcagtgattacagcagcaagtacattactgactgagctgttcagtaataagggcagcgggaccctatttaagaacgcagagaggatgttgcgcgtaaggagtcttgataagttggatcagggaagactcgtcgatctggtgaacgcaagctttgggaagaaactacgagatgactatctcgctagcctgaggccgagacttcacagcatttatgtgtccgaaggctacaatgccgccgctattttgaccatggagcccgtattgggcggtaccccgtacctcgacaagtttgtcgtgagtagctcccggcaggggcagggctcagggcagatgctgtgggagtgccttcgtcgggacttgcagacacttttttggcggagtcgagtcacgaaccctattaacccgtggtattttaagcattcggatgggtccttctccaacaagcagtggatatttttttggtttggcctggctgatatcagagattcatacgaactggtcaaccatgctaaaggtctacccgactctttccacaagccggcttcggaccctggctca

SEQ ID NO: 245159 - DNA, 1602 bp, Artificial Sequence
  derived and/or modified sequence
atggccaccgcgctgatggcagtggtgcttcgggccgctgcagtggcaccgcggctgcggggacgtggaggaacgggtggggctcgccggctgtcatgcggagcccgccggcgcgcagccagagggacctccccagggagacgtctctccactgcctggtcgcagccccagccgccgccagaagagtacgcaggcgctgacgacgtctcacagtccccggtggccgaagagccttcctgggtgccgagcccccgcccgcccgtgccacacgagtcacctgagccgccgagcggccgcagcctcgtccagcgggatatccaggcttttctgaatcagtgcggtgcatcgccaggtgaagcgagacactggctcactcaattccaaacttgccaccacagcgcggacaagccatttgctgtgatcgaagtcgatgaggaggtgctgaagtgtcagcaaggggtttcatcactggcgttcgcattggcgttcctgcaacgcatggatatgaagcccctggtggtcctcggattgccggccccaactgctccatcaggatgcctctcgttctgggaagcaaaagcgcaactcgcgaagtcatgtaaggtcctcgtcgacgcgttgcgccataacgcagccgcagccgtgccgtttttcggagggggaagcgtgctgcgcgcggccgaacccgctccgcatgcgtcgtacggcggaattgtgagcgtcgagactgatttgctccagtggtgtttggaatcgggatcgattccgatcctctgtccgatcggagaaacggccgcccggcgctccgtcctgctggactcgctggaagtgaccgcctccctcgcaaaagcgcttagaccaaccaaaatcatcttcctcaacaacacgggcggactgagagactcgtctcataaggtgctctccaacgtgaacctcccggccgatctcgacctggtgtgtaacgccgaatgggtatccactaaggagcggcaacagatgcgcctgatcgtggacgtgttgtcgaggttgccgcatcattcgtccgccgtcatcactgcggcctccacgctgctgaccgaattgttctcaaacaagggtagcgggaccttgtttaagaatgccgaacgcatgctgcgggtgagatccctggataagctggatcaaggtagactggtggacctggtgaacgcctctttcggaaagaaactgcgcgatgattatctggccagtctccggccacggctccactcaatctacgtctcggagggttacaacgcagcggccatcctgactatggagcccgtcctgggcgggactccttacctggacaaatttgtggtatcatcctcccgccaggggcaggggtcgggccagatgctgtgggaatgcctgcggagagatctccaaaccctgttttggcgatcgagagtcaccaatccgattaacccttggtacttcaagcactctgacggatcattttccaacaaacagtggatctttttctggtttggactggccgacatcagagattcatacgagcttgtgaatcacgcaaagggacttccggacagcttccacaagccagcctccgaccctgggtca

SEQ ID NO: 245160 - DNA, 1602 bp, Artificial Sequence
  derived and/or modified sequence
atggccactgcccttatggcggtggtgttgcgtgcagccgccgtggctcctaggctacgaggccgcggcggaaccggcggtgcccggcgcctgtcttgcggggcacgtcgccgggccgccaggggaactagcccaggcaggcgcctgagcacagcgtggtcgcagccccaacctccgccagaggaatatgctggtgcagatgatgtgagccagtctcctgttgcagaggagcccagctgggttccaagcccccggcccccagtgcctcatgagagcccagaacctccctcaggccggtctctcgtgcagcgggacatacaagcatttctcaaccaatgtggagcctcccctggagaagcccggcactggctcacacagttccagacatgccatcactcagccgacaaacccttcgccgtaatagaagtagacgaggaagtgctgaagtgccaacaaggggtgtcaagcctggcgtttgcactggccttcctacagaggatggacatgaagcctttagtagttctgggcctgcctgctccaaccgccccttctggatgtcttagcttctgggaagcaaaggctcaactcgcaaagtcatgcaaggtcttggtggacgcacttcgccacaatgccgccgccgccgtgccattcttcggcggtgggagtgtcctccgagcagcagaaccagcaccccacgcttcatatggcggcattgtgtcagttgaaaccgacctcctgcagtggtgtctggagagtggaagcatccctatactgtgccccataggagaaaccgccgcccgccgctctgttctgctcgattctctggaggtgacagctagcctcgctaaggcccttcgccccactaagatcatttttttgaacaacactggtggccttcgcgatagctcccacaaagtattgagtaatgtcaacctccctgcagacctggacctcgtgtgtaacgccgagtgggtctctactaaggaacgccaacagatgcgactgattgtggacgtcctgtctcgacttccccatcactcatctgcggttatcacagccgccagtacacttctgacagagctgttcagcaacaaagggtcaggaaccctgtttaagaacgccgaacgaatgttaagggtcaggagcttggataaactggaccagggacgcctggtggatctcgtcaatgcctctttcgggaaaaagctgagagatgattacctggcatctcttaggcctcgattgcatagtatctacgtaagtgaaggatacaacgccgcggctatcctcaccatggaacccgtcttaggcggtacaccctatttagataaattcgtagtatcttcgtccagacaggggcagggcagcggccagatgctttgggaatgcctccgcagagatctgcagaccctcttttggcgttccagagtaacaaaccccatcaatccatggtattttaaacatagcgatgggagttttagcaataaacagtggatttttttctggtttggcctggcggacattcgcgactcctacgaattggtcaaccacgcgaaaggcctgcctgattctttccataaaccagcgtctgatcccgggagc

SEQ ID NO: 245161 - DNA, 1602 bp, Artificial Sequence
  derived and/or modified sequence
atggctactgcgctgatggcagtggtgctcagagccgcagccgtggcacccagactgagagggcgaggcggtactgggggggcgcggagactcagctgtggagctcgaaggcgcgcagcccggggtactagcccgggccggcgcctgagcaccgcatggagtcagccacagccccctccggaggaatacgccggagcagacgacgttagccagtcccctgtagctgaggaacctagctgggtgccctctccaaggccaccagttccacacgaaagccctgagcctccttccggtcgatccctggtgcagagagatatccaggcttttttgaatcagtgtggggcctccccgggcgaggctagacactggctgacacagtttcaaacatgccaccactcagctgataagcccttcgccgtgatcgaagtggatgaagaggtgctcaaatgtcagcagggagtgtcttctctcgcattcgccctcgccttcttgcagcgaatggacatgaagcctctggttgttctgggcttgcccgcgccgactgcaccttccggctgcctgtctttctgggaagctaaggcacagctggccaaatcctgcaaggtgcttgtcgatgccctgcggcacaacgctgccgctgctgtaccattcttcggaggcggcagcgtcttgagagccgccgagccggctcctcacgcttcatacggtggcatagtgagcgtggaaacggatttgctgcaatggtgcctcgaatcagggtcaatccctatcctctgccctattggcgagacggccgcacgccgatccgtcctcctggatagcctggaggtgacggcgtcactggctaaggcactccgccccaccaaaatcattttccttaacaatactggcggtctgagggacagttctcacaaggtcttgtccaacgtgaatttgccagccgaccttgacctggtttgcaacgcagaatgggtcagcactaaggaaaggcagcaaatgaggctgattgtggacgtccttagtcgactgccccatcatagctcagcagtgataacggcagctagtacactgctgacagagcttttttctaataaagggagcgggacactcttcaagaacgccgaaaggatgctgcgggtccgcagtctcgacaaactggaccagggcaggctggttgacttggtcaacgcgagtttcggcaagaaactgcgggatgattaccttgcctccttgcgcccccggctgcacagcatttacgtctctgagggatacaatgccgccgctattcttaccatggaacctgttttgggaggtaccccctacctcgataagttcgtggtaagctcttccagacagggccagggctcagggcaaatgctgtgggagtgcctccgcagggatctgcagacattgttttggcgaagccgggtgacaaatcccatcaacccctggtatttcaagcactctgacggaagcttctccaataaacagtggatttttttctggttcggcctggccgatattagggacagctacgagcttgtaaatcacgctaaagggctccctgactcttttcacaaacccgcttctgaccccggatct

SEQ ID NO: 245162 - DNA, 1602 bp, Artificial Sequence
  derived and/or modified sequence
atggcaacggcccttatggctgtcgttctgcgcgctgccgctgtcgcgccgcgtctgagagggcgcggtggaaccgggggagcgcggcggctctcttgcggcgcacggagaagggctgctagaggtacgtcacctggccgaagattaagcacagcctggtctcaacctcaaccgccaccagaggaatacgcaggcgctgatgatgtatctcaaagcccagttgcagaagaaccgagctgggttccgtcaccgcgtccgccggtccctcacgaaagcccggagccaccttcaggccgcagcttggtacaacgggatatccaagcgttcctcaaccaatgcggtgcatccccgggagaagcgagacattggttgacgcaatttcaaacctgccaccatagcgcggataagccgttcgcggtaattgaagtagatgaagaggtgctgaaatgccagcaaggtgtatcatcattggcgtttgcgcttgcgtttctacaacgcatggacatgaagccgctggtcgtgctaggtttgccggcaccgacggcgccgtcaggctgtctttcattttgggaagcaaaagcccagctagccaaaagctgcaaggtcctggtagatgccttacgtcataatgcagcagccgcggtcccgttctttggaggtggaagtgtccttcgcgctgcggaacctgctccgcacgcatcgtatggcggaatcgtctccgtagaaacagatttacttcagtggtgcctggagagcggtagcattccaattctatgtccgataggagaaactgccgcaagacgttctgttctgcttgactcactggaagtcacggcttcattagctaaagcacttcggccaacaaaaattatctttttaaacaacacagggggccttcgtgattccagccacaaagtcttgtcaaatgttaacctacctgccgacctagacctggtgtgcaatgccgaatgggtatctaccaaagagcgtcagcaaatgcgcctgattgttgatgtactctcacgcctgcctcaccattcatctgccgtaattacagcagcaagcacattacttacagaactatttagcaataagggttctggtacgctttttaaaaacgccgagcggatgctgagagtccgatctcttgataagttagatcaaggaagacttgttgacctagtcaatgcaagctttggaaaaaaactgcgggatgactatctcgcatcgttaagaccgcgcttgcatagcatttatgtctcggagggttataatgcagctgctatcctcaccatggaacctgtacttggaggcactccttatcttgacaagttcgtagtttctagctctagacaaggtcagggcagcggtcagatgttgtgggaatgtcttcgtcgtgacttacaaaccctgttctggcgtagccgtgtgacaaatccaattaatccgtggtactttaaacattctgatgggtctttttctaataaacagtggatttttttttggtttggacttgcagatatccgcgatagctacgagcttgtcaaccatgcgaaaggacttcctgattctttccataaacctgcttctgatccgggttct

SEQ ID NO: 245163 - DNA, 1602 bp, Artificial Sequence
  derived and/or modified sequence
atggctacagctttaatggccgttgtgctcagggctgccgccgtcgccccccggctgagggggaggggaggaaccggcggagcaagacgtctttcctgcggcgctaggagacgggccgccagggggacaagcccaggaaggcgcttatccaccgcatggagtcagcctcagcctccgcctgaggaatacgcaggcgccgatgacgtgagccagagtcccgtggctgaggagccaagctgggtgccgtccccacggcccccagtgccacacgagtctcctgagcccccttccggaaggtctctggtgcagagggacattcaggcatttctgaaccagtgcggagctagcccaggtgaggctaggcactggttgacccagtttcagacttgccaccatagcgcagacaaaccgttcgcagtgattgaagtcgacgaggaggtgctcaagtgtcagcaaggtgtgtctagtctggctttcgccctcgccttcctgcaaaggatggacatgaagcctctcgtagtcttgggactgcccgcgcccactgctccgagcggctgcctgtctttctgggaggcaaaagctcaactggcaaaaagctgcaaggtcttggtcgatgcactgcggcacaacgctgcagcagctgtgccttttttcggaggtggcagcgtgctgagagctgcagaaccagctccgcatgcaagctatggcggaatagttagcgtggagactgacctgttgcagtggtgcctggagagcggttctatcccaattttgtgtcctatcggagagacggctgctagaagatccgtgcttctcgactccctggaagttaccgcatctctggccaaggcgttacgccccacaaaaatcattttcctcaataacactggtggcctgagagattcatcacataaagtcctctctaatgtcaacttgccagcagatctcgatctggtgtgcaacgctgagtgggtcagtactaaggaaagacagcaaatgcgactgattgtggacgtcctgagccgattgccacaccatagtagtgcagtgataacagcagctagtactctgttgacagagctgttttctaataagggcagcggtacacttttcaagaacgctgaacgcatgctgcgcgtgcgcagcctggacaagctagaccaaggccggctggtggaccttgtcaacgcttctttcggaaaaaagctcagggatgattaccttgcctcattgcggcctagacttcacagcatctatgtgagtgagggatataatgccgcggcgatcctgactatggagcccgtcctgggtggaaccccatacctagataaatttgtggttagttccagcaggcaaggccagggctctggccagatgttgtgggaatgcttaaggagagatctgcagacactgttctggaggagccgcgtgaccaatccaattaacccctggtatttcaaacatagcgatgggagcttttctaacaagcaatggatcttcttttggttcggccttgcggatatcagggattcctacgagttagtcaaccacgcaaagggattgccggactcttttcacaagcctgccagcgacccaggcagc

SEQ ID NO: 245164 - DNA, 1602 bp, Artificial Sequence
  derived and/or modified sequence
atggccacagccctgatggccgttgtgcttagggctgctgccgtggcaccaaggcttcggggaagggggggaaccggcggcgccaggcggttgtcatgcggtgctcgaaggcgcgccgctcgtggtaccagccccggtaggaggctgagtactgcttggagtcagccgcaaccgccccccgaggaatatgccggagctgacgacgtcagtcaatcccctgttgcagaagaacctagctgggtcccttcaccaagaccaccagtgcctcatgagagcccagagcccccttcgggccgaagcctcgtgcaaagagacatccaggcatttcttaaccagtgcggtgctagtccaggggaggcccgacattggctgacccagtttcaaacatgccatcatagcgctgacaaaccatttgctgtcatcgaggttgacgaagaggtgcttaaatgtcaacaaggcgtgagctctctcgcttttgcacttgccttcctgcaaaggatggatatgaaaccattggtagtcttgggcctgcctgcaccaacggctccatcaggttgtctgtccttttgggaagcgaaagcacagctggccaagagctgcaaggtcctcgtagacgctctgaggcacaacgctgccgcggctgtgccttttttcgggggaggttctgtgctgagagccgctgaaccagcaccccacgcctcctatggagggatcgtctctgtggagactgatttgctccaatggtgcctggaatccggaagcattccaatactctgccccatcggagaaaccgcagcacgccgctcagtgttgttggactctctggaagttactgctagccttgcgaaagcactccgtcctacgaagattatctttcttaacaacacgggaggcctcagggattcaagccacaaggtgttgagcaacgttaacctccctgctgatctggacctcgtgtgcaatgcagagtgggtgagtactaaggagagacaacagatgagactgatcgtcgatgtgcttagccggctcccccatcacagttcagccgtgattaccgcggcctctacactgcttactgaactgttttccaacaagggatcagggacactgtttaaaaatgcagagcgcatgctgagagtccggtccctggataaactcgaccagggacggttggttgatctggtcaacgcaagcttcggaaaaaagctgagggatgattacctggcctcactgagaccacggctgcacagcatttacgtcagcgagggctataatgctgcagccatcctgactatggaaccagttttaggaggaactccttacctggacaagtttgtagtgagcagctctaggcagggacagggcagcgggcaaatgctgtgggaatgccttagacgggatctgcagaccctgttttggaggtctagagtgacgaatcccatcaatccatggtatttcaaacatagtgatggcagctttagcaacaaacaatggatctttttctggttcggccttgcagatatccgggattcttatgaactggtgaatcatgccaaggggcttcccgactcatttcacaaaccagctagcgaccctggctca

SEQ ID NO: 245165 - DNA, 1602 bp, Artificial Sequence
  derived and/or modified sequence
atggccactgcgcttatggcggtggtccttcgggcggccgccgttgcacctcgcctgcgaggacgtggaggaactggcggtgcgagaaggctgtcatgtggtgctcggagaagagcagccagaggaacttcgccaggtcggcggctttcgactgcatggtcacaacctcaacctccacccgaagaatatgctggggcagatgatgtgtcgcaatcgccagtcgccgaagaaccctcttgggtgccgtcgccaaggccaccggtgcctcatgagtcccctgagcctccttccggaagatcattggtccagcgtgatatccaagccttcttgaaccagtgtggtgcgagccctggagaagcccgccattggcttactcagttccagacctgtcatcattccgccgataagccatttgcggtgatagaagtggacgaagaggtcctgaagtgtcaacaaggcgtgagctcgttggcctttgcgctggcgttcctgcagcgcatggacatgaagccgctggtggtcttgggtctgcctgcccccactgcaccatcgggatgtctttcgttttgggaagcaaaggcgcagcttgcaaaatcgtgtaaggtcctggtcgatgctctccgccacaacgctgcagcggcagtgccttttttcgggggcggatcagtccttagagctgctgagcctgcaccgcacgcaagctacggaggaattgtgtccgtggagactgaccttctccagtggtgtcttgaatcggggagcattcctatcctttgtccaattggtgaaaccgcagctcgacggagcgtgttgcttgatagcctcgaagtgactgcttccctggccaaagcgctcagaccaactaagattatcttcctgaacaataccggcggtctgagagacagctcacacaaagtcctttcaaacgtgaatctgccggccgacctggaccttgtctgtaatgcagagtgggtgagcaccaaagaacgccagcagatgaggttgatcgtcgacgtgctctcgaggcttcctcatcattccagcgccgtgattacggcagcctccactcttctcactgagctgttctcgaataaaggttccggaacgctctttaagaatgcagaaaggatgcttagagtgagatcgctcgacaaacttgaccaaggtcgactcgtggatctggtgaacgcctcatttggtaaaaagctgcgagatgattaccttgcgtcgcttcggccccggctgcattcgatttatgtgagcgaagggtacaacgcagcagccatcctcaccatggagcctgtgctcggtggcactccatacctggacaagtttgtggtgtcatccagccgtcaggggcagggttccggacagatgctgtgggaatgcctgcgtagagatctgcaaactcttttctggaggtcgcgggtcaccaacccaatcaatccgtggtactttaagcatagcgatggaagtttctcgaataagcaatggatattcttttggtttggtcttgcggacatcagggattcctacgaacttgtgaaccatgccaagggactccctgattcctttcataagcctgcatcggatccaggatca

SEQ ID NO: 245166 - DNA, 1602 bp, Artificial Sequence
  derived and/or modified sequence
atggccactgcattgatggccgtggtactgcgcgccgccgctgtcgctccaaggcttagaggtcgggggggcacagggggagctagacgcctgtcatgcggagccagaagacgcgctgccagagggactagtcccggtagaaggctctctaccgcatggagccagccgcagccccctccagaagagtacgccggtgctgacgatgtctcccagtcaccagtggcagaggaaccaagctgggtcccatcccccaggccccccgttcctcacgaaagccccgaaccccctagtgggaggagtctcgtgcagcgcgatatacaagcctttcttaaccagtgtggggcttcccctggagaggcacggcactggctcacccagttccagacttgccatcactccgccgataagcccttcgccgtgatagaggtggatgaggaggtgttgaagtgtcagcaaggagtgagtagcctggcttttgcactggcttttctccaaaggatggacatgaaacctttggtggtgttgggcctccctgcccccaccgcaccatccggttgcttatccttctgggaggccaaggctcagctagccaagagttgtaaggtgctggtggacgctttacgccataatgcagccgcagcggtgccgtttttcgggggaggtagcgtgcttcgcgcagcagagcccgctcctcacgcatcttacggaggaatcgtgtctgtggaaaccgatcttctgcagtggtgtttggagagcggctccattccgattctctgtcctattggcgagacagctgctagacgcagcgtcctcctggactctctggaggtcactgcatctctcgctaaagcgctacgcccaaccaaaatcatcttcctaaataatacaggggggttacgcgatagttcacacaaagtgctgtctaacgtaaacttacccgccgacttagacctggtgtgtaatgcagagtgggtatcgacaaaggagcgtcagcagatgagactgattgtggacgtgctttccaggctgccacatcacagttccgcagtgatcactgccgcctctactctcctaacggagctcttttcgaataagggtagcggaactctgttcaagaatgctgaacgtatgctaagagttagaagtttggacaagctggatcaaggacggttggtggacttggtgaacgcctcatttggcaaaaaattgagagacgactacctcgcctccttgcggccacgcctgcattcgatttacgtgagtgagggttacaatgccgccgcaatcttaactatggaacctgtcctgggaggcactccctatctggataaatttgtggtgtcttcaagcaggcaaggccagggatccggacagatgctgtgggagtgcctgcgtcgggatctacagacacttttttggagatctcgagttacaaatcccataaacccatggtactttaaacatagtgatggtagctttagtaacaaacagtggatcttcttctggttcggcttagccgatatcagggacagctatgagctagttaatcacgctaagggccttcccgatagcttccataaaccggccagtgatcctggtagc

SEQ ID NO: 245167 - DNA, 1602 bp, Artificial Sequence
  derived and/or modified sequence
atggccacagcattgatggcagtggtgctccgagccgctgccgtagctccccgcctccgtggtcgaggcggtactggtggggctaggcggctcagttgcggagcacgacggagagctgccagaggaaccagcccaggacgccggctgtcaacagcttggtcgcagccccagcccccccctgaggagtatgccggggctgacgacgtgagtcagtccccagtcgctgaggagcctagttgggtcccgtccccaaggccccctgtaccccacgagtcccctgaacccccaagcggccgatctcttgttcaacgggacattcaggccttcctcaaccagtgcggcgcctctccaggagaggcccgccactggcttactcagttccaaacctgccatcactccgcggacaaacccttcgcggttatagaggtagacgaggaggttctgaagtgtcagcagggtgtcagctccctcgctttcgctctcgcctttctgcagcgcatggatatgaagcctcttgtggtgttaggcctccccgcccctaccgccccctcaggatgcctgtctttttgggaagccaaagcccagctggccaaaagttgtaaggttcttgtggatgcattgaggcataacgcggccgctgcggtacccttttttggtggcggctccgtgctgagggctgcagaaccagctcctcatgccagctacgggggaatcgtgtcagtcgaaaccgacctactccagtggtgtctcgaatccggcagtatacctattctctgtcctataggcgagactgcagctcgcagatctgtgctcctggattctttggaggtgaccgccagcctggccaaagctcttcggccgactaagataattttcctcaacaacacaggggggctgagggatagttctcacaaggtgctgagtaatgtaaatctgcctgccgacctcgatctggtgtgcaacgccgagtgggtgtccactaaggagagacaacagatgagactgatcgttgatgtcctgtctcgccttccccatcattcttcagctgtgattaccgcagcctccacgctcctaacggaattgttcagcaacaagggatctggcactctctttaaaaatgctgagcggatgctcagagttcgctcgctcgataaactggaccagggccgacttgtcgatctagtgaatgcgtcctttggcaaaaaactaagagatgactatcttgcgtccctgagaccgaggttacattctatttatgtctctgagggctataatgccgcagcaattctgaccatggagcccgttctcggaggtacgccgtatctggataagttcgtggtgagctctagtcggcaggggcagggctctgggcagatgttatgggaatgcctgaggcgtgacctgcagacactcttttggcggagcagggtgactaaccctatcaatccctggtattttaagcatagcgatgggagtttttccaataagcagtggatctttttttggttcggcttagccgatattagggacagttatgagctagtaaatcatgctaaggggctacctgactcctttcacaagccggccagtgacccagggtcc

SEQ ID NO: 245168 - DNA, 1602 bp, Artificial Sequence
  derived and/or modified sequence
atggccacggcgctgatggctgtggtgctgcgggccgcggcggtggcccctcggcttcgggggaggggtggcaccggaggcgcacgccggctgagttgcggggcaaggcggagagcagcccgtggcacttcaccaggaaggcgcctgtcgacggcatggtcgcaacctcagcctccccctgaagagtacgctggagcagatgatgtgtcccagtccccggtggccgaggagccatcatgggtgccctcccctagacctcccgtgccacacgagtcgcctgaaccaccctcggggagaagccttgtgcagcgagacattcaagcatttctgaatcagtgcggtgcctcccctggtgaagctcggcattggctgacccaatttcaaacctgccaccactctgcagacaaacctttcgcggtgatcgaagtcgatgaagaagtgctgaagtgccagcaaggagtttcgtcgctcgcatttgcactggcatttctgcaacggatggatatgaaaccactcgtggttctgggactccctgccccaactgccccgtcggggtgcctgtcgttttgggaggctaaagcgcaacttgcaaagtcgtgcaaggtccttgtggatgcactccgtcataatgcagcagcagcggtgcctttctttggaggaggttccgtgctgagagcggcagaaccagcaccccacgcatcgtacggaggtatagtctccgtggagactgacttgctgcaatggtgcctcgaatccggatcaattccgattctttgccccattggtgagactgcggcaaggagatccgtgctcctggattcactggaggtcaccgcatcgctcgctaaggcactcaggccaactaagatcattttcttgaacaacactgggggactcagagattcatcgcataaagtcctctccaacgtgaaccttccagcagatcttgacttggtgtgtaacgcagaatgggtttccaccaaggaaaggcagcagatgcggctgattgtggatgttctttcaagacttcctcaccattcatccgccgtgatcactgcagcaagcaccctgctcaccgagctctttagcaataaaggatccggcaccctgtttaagaacgccgagaggatgctgagagttaggtcgctcgacaagctggatcagggacggctcgtggacctggtgaatgcatccttcggtaagaagctcagagatgactatctggcttccttgcgaccacggttgcactccatctacgtgagcgaaggttacaatgctgcagcaatacttaccatggaaccagtgttgggtgggaccccttaccttgataagtttgtcgtgtcatcctctaggcagggccaaggatcaggccaaatgctctgggaatgtctgcgcagggatctgcaaaccctgttctggcgctccagagtgactaatcctatcaacccatggtactttaaacacagcgatggttcattttcaaacaagcagtggattttcttttggtttggccttgcagacattcgcgactcgtacgaattggtgaatcatgccaaaggtctgcccgactccttccataaacctgcgtccgaccccggtagc

SEQ ID NO: 245169 - DNA, 1602 bp, Artificial Sequence
  derived and/or modified sequence
atggccactgcattgatggcagtcgttctgagagcggctgcagtggccccaaggcttcgcggaaggggtggaaccgggggtgcacggagactttcgtgtggagccaggaggcgcgctgcacgaggaacttcaccaggtagacggttgtcaacggcatggagtcaaccccaacctcctcctgaggagtacgcaggggccgacgacgtcagccagtcccctgtggccgaagaaccatcatgggtgcctagccccaggccccccgtccctcatgaatcgcctgagccaccttcgggtagatcgctcgtccagagagacattcaggcctttcttaaccaatgtggcgcatccccaggtgaagcaagacattggcttacccagttccagacctgccaccactcagccgacaagccctttgccgtcatcgaggtggacgaagaagtgcttaaatgtcagcagggtgtgtcgtcccttgcattcgccctcgcatttcttcagcggatggatatgaagccgctcgtcgtgctgggactccctgcaccaaccgccccatcgggatgcctgtcgttctgggaggccaaagcacaactggcaaaatcctgtaaagtccttgtcgatgcacttcgccataatgccgcagcagcagtgcccttctttggtggcggatcagtgctccgggcggcagaaccggcccctcatgccagctacggaggtattgtctccgtggaaaccgatcttctgcagtggtgccttgaaagcggcagcattcccattctctgtccaattggcgaaactgcagcgcgccgctcggtgctgcttgattcgcttgaagtgaccgcatcgcttgccaaggcgctgcggcccaccaagatcatatttctgaacaacaccggtggacttagggattccagccataaagtgctctcgaatgtgaatttgcccgccgatctggatctcgtgtgcaacgccgaatgggtaagcaccaaggagagacaacaaatgcgtttgatcgtcgacgtgctgtcgaggttgccacatcattcttccgccgtgattacggcggcctccaccctcttgaccgagctgtttagcaacaagggatccgggaccctgtttaagaatgccgaacgcatgcttcgcgtgcgtagcctggacaagctggaccaaggtcggctggtggatctcgtcaatgcatcttttggcaagaaactgcgcgatgactaccttgcatcgctgcggccgaggctccattcaatctacgtctcggaaggatacaacgccgccgcaattcttaccatggaaccagtgcttggaggtaccccttacctggacaagtttgttgtcagctcgagccggcaaggtcaaggatccgggcagatgctgtgggaatgcctgagacgagatcttcagactctgttttggcgctcccgggtcaccaaccctataaacccatggtatttcaaacatagcgacggatcattctctaacaagcagtggatctttttctggtttgggctcgcagacattcgggattcttacgagcttgtcaatcacgccaagggccttcctgattccttccataagcctgcctcagatccaggttcg

SEQ ID NO: 245170 - DNA, 1602 bp, Artificial Sequence
  derived and/or modified sequence
atggccaccgccttgatggcggtggtccttcgagcagcagcggtggcacctaggctccgcggtcgcggaggtactggtggagcacggcgtctgtcatgtggcgctcgacggcgggccgcgcggggaacctcacccgggaggcggctctccactgcttggtcacaaccgcaaccacccccagaagaatacgcgggagccgatgatgtatctcagtcccctgtcgccgaggagccctcttgggtcccatcccctcgacctccggtgccccacgagtcgcctgaaccgccgtctggtaggtcgcttgtgcagagagacatacaggcattcctgaaccagtgcggcgcttcccctggtgaggcgagacattggctcacccagttccagacttgccaccactcagccgataagccgttcgctgtaatcgaggtcgatgaagaggtgctgaaatgtcagcaaggcgtctcgtcactcgccttcgctctggcgttcctccaacggatggatatgaaaccgctggtggtgcttggactgcccgcccctacggcgccgtccggatgtttgtcgttttgggaagcaaaagcccaactggcaaagtcgtgcaaggtgctggtcgatgctctcagacataacgctgcggcggccgtgccgttctttggcggcgggagcgttctgcgcgctgcggaacccgccccacacgcatcctacgggggaatcgtctcagtggagactgaccttctccaatggtgcctggagagtgggagcatcccaatcttgtgcccaatcggagagacggcggcgcggcggagcgtgctgctcgactcactggaggtcactgcttccctggccaaggccctccgcccgaccaaaatcatcttcctgaataacacggggggtcttagggattcctcccacaaagttctctcgaatgtcaatctgccggccgacctggatctcgtgtgcaacgctgaatgggtgtcgaccaaggaacgccagcaaatgcgcctcatcgtcgacgtgcttagcaggttgccgcaccattcgtccgcggtgattactgcggcctcgactctgttgactgaactgttttcgaacaagggaagcggaaccctgttcaagaacgcggaacgaatgctgcgggtccgcagcctggacaagctggaccagggacgtctcgtggacctggttaatgcttcgttcggcaagaagttgcgggacgattacctggcaagcctcagacctcgcctgcattcgatctacgtatctgaaggatacaatgccgccgcgatcctgaccatggaaccggtgctcggagggaccccgtacctcgacaagttcgtggtcagctcctcacgccagggccaagggagcggccagatgctgtgggagtgccttcgccgggacttgcagaccctcttctggagaagccgggtgaccaacccaattaacccgtggtactttaagcactcggacggttccttctcaaataagcagtggattttcttttggtttggtttggccgacatcagagatagctatgaactggtcaaccacgctaaaggcctcccggacagcttccataagccagcatcggatcctggatct

SEQ ID NO: 245171 - DNA, 1602 bp, Artificial Sequence
  derived and/or modified sequence
atggcaaccgcactcatggcagtggtccttagggcggcagcggttgcccctagacttagaggacgaggcggaactggaggagcaagaaggctttcgtgtggagcacggcgaagagccgcacgcggaacctcgccagggaggaggctttccactgcctggtcacagccacaaccaccccctgaggaatacgccggagccgacgacgtctcgcaatcgcctgtggcagaggaaccttcttgggtcccctcgccaaggccacccgtgcctcacgaatccccagagccaccttcagggcggtcactcgtgcagcgcgatatacaagccttcttgaaccaatgcggtgcttccccaggagaagcaagacattggcttacccagttccagacctgtcatcattcggcagataagccatttgccgtgattgaagtcgacgaggaagtgcttaagtgccagcagggggtcagctcactcgcatttgcactggcatttctgcaaagaatggatatgaagcctctggtcgtcctcggactccctgcaccgactgcgccctcggggtgtctctcattttgggaggcgaaggcgcaactggctaagtcctgtaaggtgctcgtggacgcgcttcggcacaacgctgccgcagccgtcccattcttcggtggtggaagcgtcttgagagcagccgaacctgcgccacatgcaagctacggcggtatcgtgtcggtggagactgacttgctgcagtggtgccttgaatcgggctccatccctattctctgccctattggtgagactgcagcaagaagatcggtgctcctggattccctggaggttaccgcatctctcgcaaaggccctcagaccaaccaagattatcttcctgaataacacggggggactgcgggactccagccacaaagtcttgtcgaatgtgaatctgcctgcggatctggatctcgtgtgtaacgccgagtgggtgtcgactaaggaacggcagcaaatgcggctgattgtggacgtgctgtctcgtctgcctcatcattccagcgctgtgattacggcggcatcgaccctgttgaccgaactgttttctaacaagggctcaggtaccctctttaagaacgcagagagaatgctcagagtccgctcgctggataaactggatcagggtcgactggtcgatcttgtgaatgcatcgttcgggaagaaactccgtgacgattacctcgcatccctccgacctagactgcactccatttacgtgtccgaggggtataacgccgcagcaattctgacgatggaaccggtgctgggcggtactccatacttggataagtttgtcgtttccagctcccgtcagggtcagggctcggggcaaatgctttgggaatgcctgcgacgggacctgcagactctgttctggagatcgcgtgtgaccaatcctatcaacccttggtacttcaagcatagcgacgggtcgttttcgaataaacaatggatctttttctggttcggtcttgctgacattcgcgattcgtacgagcttgtcaaccatgcaaagggactgcctgatagctttcataagcctgcatcggatccaggctcg

SEQ ID NO: 245172 - DNA, 1602 bp, Artificial Sequence
  derived and/or modified sequence
atggcaaccgccctgatggctgtcgtgctccgtgcggccgctgtggcacctagacttagaggaagaggcggaactggaggggcccgccgactctcgtgtggggctcggagaagagcagccagaggaacctcaccaggaaggagactgtccaccgcttggagccaaccccagccacctccagaggaatacgcaggcgcagacgatgtgtcccagtcgcccgtggcagaggaaccatcatgggtgccaagccctaggccgccagttccacatgagtctccagaacctccttctggacggtcgctcgtgcaaagggatatccaagcatttctgaatcaatgcggggcatccccgggagaagcaagacactggctcacgcagtttcaaacgtgccaccactccgcggacaagcctttcgcagtgatagaggttgatgaagaggttctgaagtgtcaacagggggtgtcctcgctggcattcgcactcgccttcctccaacgcatggatatgaagccgttggtcgtcctcggtttgcctgcgcctaccgccccgtcagggtgtctctcgttttgggaagcaaaggcccaactggcaaaatcatgcaaggttctggtggatgccctgaggcataacgcggcagcggccgtgccgttttttgggggagggtcagttctgcgggcggccgaaccagcccctcatgcgtcttacggtggtattgtgtccgtggaaactgatcttctgcagtggtgtctcgaatcgggaagcatccctattctttgtccgattggagaaaccgcagcccgaagatcagtgctgcttgactctctggaggtgactgcatcattggcgaaggcacttagaccaacgaaaatcatctttctgaacaataccgggggtctgcgggactccagccacaaagtgttgtccaatgtcaacctgcccgcagatctggatcttgtgtgcaatgctgaatgggtgagcactaaggagcgccagcagatgcgacttatcgtggatgtgttgagccggctgccacatcactcatcagcagtcatcaccgcagcatcgactctcctgaccgaactctttagcaacaagggctccggtaccctgttcaaaaacgcagaaaggatgctgcgcgtccgtagccttgacaaactggaccagggaagattggtggatcttgtgaatgcgtcatttgggaagaagctgcgtgatgattacctggcctcgctgcggccacggcttcactccatttacgtgtccgaaggttacaacgcagcagcaattctgactatggaacctgtccttggcggtaccccctacctggataagtttgtcgtgagcagctcaaggcagggtcaagggagcggtcaaatgctgtgggagtgtctgagacgcgaccttcaaactctgttttggagatcgcgagtgactaaccccattaacccttggtatttcaaacatagcgatggatcattttcgaacaagcaatggattttcttttggtttggacttgctgatataagagattcctacgagttggtgaatcatgcaaaggggctgccagactccttccataagccggcaagcgaccccggtagc

SEQ ID NO: 245173 - DNA, 1602 bp, Artificial Sequence
  derived and/or modified sequence
atggcaactgcccttatggcagttgtgctgagggccgctgcggtggccccgcgcctacgtggaaggggcgggactggtggagctaggagattgagctgcggcgcacgccggcgcgcagctcgtggtacctccccagggcggcgtctatccacagcatggtcacaaccccaacctccgcccgaggaatacgcaggtgcagacgacgtctcacagagtcccgtagccgaggagcccagctgggtacccagtcctagacccccagtgcctcatgagtctccagaacccccatccgggagatctctcgtacagcgggatattcaggcttttctcaaccagtgcggcgcaagtccgggagaggcacggcactggttgacgcaatttcagacgtgccaccatagcgctgataagccattcgcagtcatcgaggtagacgaggaagtcctgaaatgtcagcagggtgtttcctcactggccttcgcattagctttcctccagaggatggatatgaaacccctggttgttctcggcctgcctgccccgaccgcccctagcggatgtctgtcattctgggaagcgaaggcccagcttgcaaaatcatgtaaggtactagtcgatgccctccggcacaacgctgctgctgcagtgccctttttcggaggcggctctgtgctgagggctgcagagccagcccctcacgcgagttatggaggaatcgtatctgtcgagacagacctgttgcagtggtgtctggagagcggatcaatccctattctgtgccccataggggaaaccgcggcccggcggagtgtgctgctagacagcctggaggtgacagcttctctggctaaagctctgcggccaaccaagatcatattcctgaataacacgggcggcttgcgcgactcctcccacaaagtcctgagcaatgtcaacctccctgccgatctcgatttggtgtgcaacgctgaatgggtgagcacaaaggaaaggcagcaaatgagactcattgtagacgtgcttagcagacttccccaccatagttccgcagtgatcactgcagcctccaccttactaaccgaactattcagcaacaaaggttctggtaccctgttcaagaatgccgagaggatgctgcgcgtgcggtccctggataaactagaccagggcagattggtggatctcgtgaacgccagctttggaaagaagcttcgggatgactatctcgcaagcctgcgtccaaggctgcactcaatatacgtatccgagggctacaacgctgcagcgattctgactatggaacctgtactaggcggtaccccatatctggacaaattcgttgtgtccagtagtcggcaggggcagggcagcggacagatgctgtgggaatgcctcaggcgcgaccttcagactctgttttggcggagtagggtgactaatcccatcaatccttggtattttaagcactccgacggaagcttctctaataagcagtggatatttttttggttcggattagctgacatcagggacagctatgagctggtgaaccatgccaagggcctgcctgatagtttccacaaacctgcctccgacccaggctcg

SEQ ID NO: 245174 - DNA, 1602 bp, Artificial Sequence
  derived and/or modified sequence
atggctaccgcgttgatggcagtcgtgctgcgggccgcagccgtggcacccaggcttaggggacgaggtggcactggtggtgcaagacgactctcctgtggtgcccgccgacgagccgcaaggggaacgagccctggtagacgactgagcactgcatggagccagcctcagccacctccagaggaatacgccggcgcagatgatgtgagccagtcgcccgtcgcagaggagccatcctgggtgcctagccccaggccgcctgtgccacatgaatccccggagccaccaagcgggcgcagcctggtgcaacgcgatatccaagcatttctcaatcaatgcggtgcgtctccaggagaagcccggcattggctgactcaatttcagacgtgccatcactcagccgataagccttttgctgtgatagaagtcgatgaagaggtgctgaagtgccaacaaggggtgtcgtcactggcatttgcactggcatttctgcaaaggatggacatgaagcccctcgtggtccttggactgcctgcaccaacggcgccatccggatgcctgtccttctgggaagccaaagcacagttggcaaaatcatgtaaggtcctggtggatgcattgagacacaatgcggcagcggcggtcccttttttcggtggcggatcagtgctccgggcggcagaaccggcacctcatgcgtcctacggtgggattgtctccgttgagacggatctgctgcagtggtgtctcgaatcaggttcgataccgattctttgccccattggcgagacggcagcacgtcgatctgtccttctcgactcgctggaggttaccgctagcctggctaaggcccttcgaccaactaagataatcttcctcaacaacactgggggacttagggattcaagccacaaggtgctttccaacgttaacctgccggcagacctggatttggtctgtaacgcagaatgggtgtcaaccaaggaacggcaacagatgaggctgattgtggacgtgttgtccagactcccacatcattcgtcggccgtgattaccgcggcgtcgactcttctgaccgaactgttcagcaacaagggatctggtactcttttcaaaaacgcagaaagaatgcttcgtgtgcgaagcctcgataaacttgatcagggtagactcgtcgatctggtcaatgcatcctttggaaagaaacttagagacgactaccttgcgtcgctccgtcctaggcttcattcaatttacgtctcggagggctacaacgcagcagcaattctcaccatggaacccgtccttggaggtaccccttacctcgacaaattcgtggtgtcaagctcaaggcaaggacagggttcgggacagatgctctgggaatgccttcggagagatttgcagacgcttttttggcgatcacgggtgactaatcccattaatccatggtactttaagcattcggatggctccttttcaaataagcaatggatctttttctggttcggattggcggacatacgggactcgtacgaactggtgaaccacgcaaaggggcttccagatagcttccacaagcccgcctccgatcccggctcc

SEQ ID NO: 245175 - DNA, 1602 bp, Artificial Sequence
  derived and/or modified sequence
atggctaccgcactgatggccgttgtcttgcgtgcagccgcggtggcgccccgcctccgagggcggggaggaactggaggagcaagacggctgtcatgtggagctcgacgccgagcagcaagaggcacctcacctggcagacgactgtcaaccgcgtggtcccaaccccagccaccgcccgaagaatacgctggagcggatgatgtgtcgcagtccccagtcgcagaagaaccatcctgggttccttcacctagacctccagtgccacacgaatccccagagccaccctccggaaggagcctggtccaaagggatatccaggcctttcttaaccaatgtggggccagccccggagaggcacgccattggctcactcaatttcaaacctgccaccactccgcggataagccctttgcggtgatcgaagtcgatgaagaagtcctgaagtgtcaacagggcgtgagctcgctggcttttgctcttgcttttcttcagagaatggacatgaagccactggtcgtgttgggactccctgcaccaactgcgcccagcggctgcctttccttttgggaagcaaaggcacagcttgccaaatcgtgtaaggtgctggtcgatgccctgcggcataacgcagcagcagccgtgccattcttcggcggaggttcagtgctgagagcagcagagcctgcaccgcatgcatcttacggtggcatcgtctcggtggagactgatctgctgcagtggtgccttgaatcagggtcaattccaatcctctgtcccattggtgaaaccgctgcacgcagatcggtgctgctggacagcctcgaggtgacggcctcgctggccaaggcactgcgacccaccaaaatcatttttctgaataacaccggaggtttgcgggactcgtcgcataaagtgctctcaaacgtcaatcttccagcagaccttgatttggtgtgtaatgcagaatgggtgtccaccaaggaacgccaacaaatgcggctcattgtggatgtcctgtcccggttgccccatcattcctcagcagtcatcactgcagctagcactttgctcaccgagctgttttcaaacaagggatccggaacgctcttcaagaacgcagaaagaatgctgcgggtcagatccctggataaacttgaccaagggcggcttgttgacctggtgaacgcttcgttcggaaagaaacttcgggatgactacctcgcatcgcttcgcccaagactgcactccatttacgtgtcagaaggctacaatgcagccgcaattctgactatggagcctgtgcttggagggaccccgtaccttgacaaattcgtggtgtcgagctcacggcaaggtcagggatcaggacagatgctttgggagtgccttaggagagacttgcagacgctgttttggcgttcgcgggtcaccaatccaatcaatccttggtactttaagcactcagacggatccttttccaacaagcaatggatcttcttttggttcggtcttgcggatatacgcgactcatacgaacttgtgaaccatgcaaagggactgcctgatagctttcataaaccagcatccgatccggggagc

SEQ ID NO: 245176 - DNA, 1602 bp, Artificial Sequence
  derived and/or modified sequence
atggcaaccgctctgatggcagtggtgctcagggctgccgctgttgcaccccggctgcgggggagaggcggcacgggaggggctagacgcctctcttgcggcgcgcgccgaagagcggccagaggaacctctcctggtcggaggctcagtacagcgtggtcacagccccagccacctcctgaggagtacgcgggcgccgacgatgtgtctcagtcacccgtggccgaggagccttcctgggtgccctcaccgcgcccaccagtcccccacgagagtccagaacccccaagcggacgatctttagttcaaagggacatccaggccttcctgaaccaatgtggagcctctccaggcgaagcccggcactggttgacccagttccagacttgtcaccatagcgctgacaagccatttgctgtgattgaggtcgatgaggaggtgctgaagtgccagcagggagtgtcatccctggcctttgcccttgctttcctgcagcgaatggatatgaagccactagttgtgttaggccttcctgctcccaccgcacctagcggttgtctgtctttctgggaagctaaagctcaactggcgaagagctgcaaagtcctggtggacgctctcaggcataacgccgcggccgccgtcccattctttgggggcggctctgtgctgcgcgctgctgaacctgcgccccacgcttcttacggcggcatagtcagcgtggagactgatctattgcagtggtgtctcgaatccggttctatacccatcctttgtcccattggcgaaaccgctgcgcgcaggtctgtcttgctggactctttagaggtaacggcaagcttggcaaaggcattaagacccacaaagataatctttcttaacaataccggggggctcagggatagctcccataaagtgctgtccaatgtcaatctgcccgccgacctggatctggtctgcaatgctgagtgggtcagcactaaggagaggcagcagatgcggctgattgtggacgtgctgtcacgcctgcctcaccatagctccgccgttatcacggcagcaagtaccctgctgactgaactatttagtaacaagggatctggcactctgtttaaaaatgctgagagaatgctgcgcgtgaggagtctagataagttagaccagggacggctggttgacctcgtgaatgcatcctttggcaagaaattacgcgatgactaccttgcctccttgaggccccgcctgcacagtatttacgtcagcgagggctacaatgctgcagccattctcacaatggagccggtcctggggggaactccttacctagataaattcgttgtatcctcttctcgtcaggggcagggcagcggccaaatgttatgggaatgtctccgcagggacttgcagacgctgttttggaggtctcgggtcaccaacccaattaacccctggtacttcaagcacagtgacggtagcttttcgaacaagcagtggatatttttctggttcggactagcggacatccgggatagctatgaactcgtgaatcacgcaaaaggtctgcccgactctttccataaacccgcttctgacccagggtca

SEQ ID NO: 245177 - DNA, 1602 bp, Artificial Sequence
  derived and/or modified sequence
atggcaacagcactgatggcagtggtgttacgggccgcagctgttgccccacgccttagagggcgagggggaactgggggagctcggcgattatcttgtggggcccgacggagagcagcacgagggacttcacctgggcgacgcttatccacagcatggtctcagccacagccccccccagaagaatatgccggggctgatgatgtctcacagtcacccgtagcagaagaaccctcttgggtaccctctccaagacctcctgtcccacatgagagtcccgaaccaccttccggaagaagtctggtgcaacgagatatacaggcttttctcaaccagtgcggagcctcccccggagaagccaggcactggctaacacagtttcagacatgccaccactcagcggataaaccctttgccgtaattgaggtggatgaggaagtactcaaatgtcagcagggggttagtagtcttgccttcgctctggcctttttacaacggatggatatgaaaccacttgtggttcttgggctacctgccccaactgcaccctcagggtgtctcagtttttgggaagcaaaagcccagctggctaaaagttgcaaagtgctcgtggatgctctcagacacaacgccgctgcagctgtcccattttttgggggagggtccgtactgagagccgccgagccagctccccacgcctcttatggggggatagtgtccgtggaaactgatctactccagtggtgcctcgaatctgggtctattccaatcctatgcccaattggggaaacagccgcacgacgctcggtgttactggattctcttgaagtcacagcctctctggccaaagccctgagacctacgaaaataatatttctaaataatactggaggactgcgcgactcttcacacaaagttctatctaatgtcaaccttcctgctgatctagatctggtgtgtaatgctgaatgggtctccacaaaagaacgccagcagatgcggctgatagtggatgtactttcgagactgcctcatcattcttccgctgttattacagccgccagtacactcctaactgagttgttttccaacaagggatcagggacgctgtttaaaaacgcagaacggatgctgagagtgcggagtctcgacaaactcgatcagggaagattagtagatctcgtcaatgccagtttcgggaaaaagttgcgcgacgattatttagcatcgcttcgaccccgcctccactccatctatgtctcagaaggatataacgctgccgcaatacttacaatggaacctgtcctgggagggacaccatacttggataaatttgtggtgtcatcgtcacgacagggacagggatctggacagatgctttgggagtgtttacggagagatctccagacattattctggcggagtcgggtaactaaccctattaatccttggtattttaagcactccgatggatctttcagtaataaacagtggatattcttttggttcggactcgccgatatacgggattcctacgaacttgtgaaccatgcaaaagggctacccgattccttccataaaccagcatcagatccaggaagt

SEQ ID NO: 245178 - DNA, 1602 bp, Artificial Sequence
  derived and/or modified sequence
atggcaactgcacttatggcggtggtgcttcgagcagccgcggtggcaccccgtttgcgcggaagagggggaactggtggtgcccggcgattgtcctgtggagccagacggagggcagctcgcggtacttcgcctggcaggcggctcagcactgcatggtcacaaccacaacctccaccagaggagtatgccggggcagatgatgtctcacaatcgcctgtcgcagaggaacctagctgggtgccaagcccccggcctcccgtcccacatgaatctcctgagcctccttccggaagatccctggtgcagcgggatattcaagcgtttctgaaccaatgcggcgcatcgcccggagaagcaaggcactggctgacccagttccaaacctgtcatcatagcgcagataaaccgttcgcggtgatcgaagtggatgaagaagtgctgaagtgccaacaaggcgtgtcatccctggcctttgcccttgccttcttgcagcgcatggacatgaaaccacttgtcgtgctcggcctgcctgcaccaaccgccccatcaggatgcctgtcgttttgggaggcaaaggcgcaacttgcaaagtcatgtaaggtcctcgttgacgccctgcgtcataatgccgcagctgccgtcccttttttcgggggtgggtcagtcctgcgggccgcagagccagcacctcacgcgagctacggaggaatagtgagcgttgaaaccgacttgcttcaatggtgtcttgaatccggatccattccaatactttgccctataggcgaaaccgcagcacgacgaagcgttctgctcgatagcctggaggtgaccgcatccctcgctaaggccctgcggcccaccaagatcatattccttaacaacactggaggactgcgtgatagctcccataaggtgctgtcgaatgtgaacttgcctgccgaccttgaccttgtgtgtaacgccgaatgggtatccaccaaagaaagacagcaaatgcggctgatcgtggatgtgctctcacggctgcctcatcattccagcgcagtgattacggcggcttctactctgctgactgaactgttttccaacaaaggttccggcacgctgtttaagaatgcagaaaggatgctgcgagtccggtcgcttgataaactggatcaaggtcgcctcgtggatctggtcaacgcctcgtttggaaagaagctgagagacgactacctcgcatcgcttagaccccggcttcattcgatttacgtgagcgaggggtacaatgccgcggcaattctcaccatggagcccgtcctggggggcaccccttaccttgataagtttgtggtttcgagctccaggcaagggcagggttcgggtcaaatgctgtgggaatgcttgcgacgggacctgcagactctgttttggagatccagagtgacgaatcccatcaacccttggtacttcaagcacagcgacggttccttttcgaacaagcagtggattttcttttggtttggtcttgccgatatccgcgactcatatgaactggtgaaccatgcaaaagggctgccggattcatttcacaagccggcatcggatccaggaagc

SEQ ID NO: 245179 - DNA, 1602 bp, Artificial Sequence
  derived and/or modified sequence
atggctaccgctctaatggcagtggttttgcgcgcagccgccgtcgctcctcgtcttaggggtcgaggaggcacaggtggggcacgccggttgagttgtggcgcacgacgtagggccgctaggggaacttcaccagggcgtagactgtcaactgcgtggtcccagcctcagcctccgccagaggaatatgctggagctgacgatgtgtcccagtccccggtggctgaggaaccaagctgggtaccctcgcctagacctcccgtcccgcatgaaagccccgagccgccctctgggagatccttggtgcaaagagacatccaagcattcttgaatcagtgcggagcctcaccaggagaggctaggcactggttaacacaatttcagacctgtcaccactctgccgacaaaccattcgcggtgatcgaagtggatgaagaggttcttaagtgccagcagggggtgagcagtctggcgttcgcactcgcctttctgcagaggatggacatgaagccgctggtggtgctgggactgccagcgccaactgccccatccgggtgcctgtccttctgggaggccaaggcccagctggccaagagttgcaaagtgctggtggatgctctgcgacacaacgcggccgcagcggtgcccttctttgggggaggctctgtgctgcgggcagctgagcccgccccacacgcttcatacggagggattgtctccgttgagaccgatttgctgcaatggtgcttggaatccggtagtatccccattttatgccccatcggagaaactgccgctagacgatccgtccttttggacagcctcgaggtcaccgcctccttagccaaggctctgcgcccaactaagataatcttccttaacaacacgggtggcctgcgggactccagccacaaagtgcttagcaacgtgaacctgccggcagatttagatctggtctgtaatgcggagtgggttagtaccaaagagagacagcaaatgagactgatcgtggacgtgctgagtaggctgcctcatcactcctccgcagtgataaccgcagccagcaccttgctcacagaattgttttccaataagggaagcggcacattatttaagaacgcagaacgaatgctccgtgtgcgctctcttgataagctcgatcaggggagattagtagatctagtaaatgcctcatttgggaaaaaactcagggatgactatctcgcttctctccgacccaggctacactcgatttacgtgagcgaagggtataacgcggccgccatcttaaccatggagccagtgctcggtggcacgccatacttggataagttcgtggtcagcagtagcagacaggggcaaggaagtgggcagatgctatgggagtgtctgcgaagggatctgcagactctcttttggaggagccgggttactaatccgatcaacccttggtacttcaaacattctgatggcagctttagcaacaaacaatggattttcttctggttcggtcttgctgacatccgggatagttacgagctggtgaaccatgccaagggactccccgattctttccacaaacctgcaagtgacccaggtagc

SEQ ID NO: 245180 - DNA, 1602 bp, Artificial Sequence
  derived and/or modified sequence
atggccacagccctgatggcagttgtgctgcgggcagcagccgtcgctccgcgattaagggggcgtggcggcacggggggcgccaggcgcctgtcatgtggagctagacgacgtgcggcgcgcgggacatctcccggccgtcgccttagcacagcttggagtcagccccagcctcccccagaggagtacgccggcgccgacgatgtaagccaatctcctgttgcggaagaaccaagttgggttccctccccgaggcctccagtgcctcatgaaagcccagaaccgccctctggtcgttcactggtgcaacgggacattcaggcattcttgaaccagtgcggagcctccccgggggaagcccgacactggttaacccagttccaaacatgtcaccattcagccgataagccctttgcagtgattgaggtcgacgaagaggtcctcaagtgccagcagggggtttcatctctagccttcgcccttgcgttcctgcagagaatggacatgaaaccactggtcgtcctgggcttgcccgcccctacagctccctccggttgtctgagtttctgggaagccaaggcccagcttgccaagtcttgtaaggttcttgtcgatgctttgcggcacaacgctgcagctgcggttcccttcttcggcggcggatccgtgctccgggcggccgaacccgctcctcacgccagctacggagggatagtaagcgtcgagacagacttgttacagtggtgcttagagagcggaagcatcccaatcttatgccccattggagagaccgcagcgagacgcagcgtcctgcttgattctctggaggtaaccgcttcactggccaaagctttgagacccacaaaaataatctttctcaacaacaccggcggactgcgagatagcagccataaggtgctgtctaatgtcaatctaccggcggacctggacctggtttgcaacgcggagtgggtgtcaactaaagaaaggcagcagatgcgactaatcgtcgacgtgttaagccgattgccacatcactcatccgctgtcatcaccgccgcctcgacactcctgaccgagctgtttagcaataaggggtccgggaccctcttcaaaaacgctgagagaatgctcagagtgcggtccctagataagctggaccagggaaggctggtagacctggtcaacgccagcttcggaaaaaaactgagagatgactacctcgcttcccttcgacctcgtctgcactctatctacgtcagtgaaggatacaatgccgcagccattcttacaatggagcctgttctgggaggaactccgtacctcgataagttcgtggtgtcaagttcccggcaaggacagggcagcgggcagatgctgtgggagtgcctgaggagagatctgcagactctgttttggcggagcagggtgacaaatcccatcaatccctggtactttaaacacagcgatggctcctttagtaataaacagtggatctttttctggtttgggctggctgacatacgcgatagctacgagctggtgaatcacgcgaaggggctcccagattcttttcacaaacccgcttcagatccaggcagc

SEQ ID NO: 245181 - DNA, 1602 bp, Artificial Sequence
  derived and/or modified sequence
atggctactgctctgatggctgtggtcctgagagcggcagcagtggcgcctaggctcagaggaaggggtggaactggaggtgcccgccgactttcatgcggggcgagacgccgtgcggctagaggtacctcacctggaaggcgtcttagcaccgcgtggtcccagccacaaccgcccccagaagaatacgccggagccgatgacgtgtcgcaatccccggtggcagaggagccatcctgggtcccatcgcctcgaccacctgtccctcacgaatcccccgagcctccgtctggacgcagccttgtccaacgggatattcaagcattcctgaatcagtgcggtgcatcacctggcgaagcaagacactggctgactcagttccagacctgtcatcacagcgcagacaagccgtttgcagtgattgaggtcgatgaggaagtccttaagtgtcaacagggagtatcctcgctggcttttgcacttgcatttctgcaacgaatggatatgaaacctctcgtcgtgcttggacttccagcacctacggcgccatcaggatgcctgtccttttgggaggcaaaagctcaactggcgaagtcatgtaaagtgctggtggacgcattgcgacataatgccgcagctgctgtgccgttttttggaggcggatccgtgcttagagcagcagagccggcccctcacgcatcctatggtggtatcgtctcggtggaaaccgatctgctgcaatggtgcctggagtccggtagcattcctatcctgtgtcctattggcgaaaccgcggccagaagaagcgtccttctggactcccttgaagtcactgcaagccttgcaaaggctctgcgccccactaagatcatcttccttaacaataccggtgggctgcgtgattcatcacataaggtcttgagcaacgtgaaccttccagcagacctcgacctcgtctgtaatgcagaatgggtgtccaccaaggagcggcaacagatgcggcttattgtggatgtcctcagtagactgcctcatcatagctcagcagtgataactgcagcatcaacgctgctcactgaacttttttccaacaagggatcgggtaccctctttaagaatgctgaacgcatgctgagggtcagatcgcttgataaactggaccaggggcgcttggtggatctggtcaatgcatcgtttggtaagaaacttcgggatgactaccttgcctcgctcagacctcgcctccattccatctacgtgtccgagggatacaacgcagccgcaatattgaccatggaaccagtgctcggtggtacgccttacttggacaagtttgtggtttcctccagtcgtcaggggcagggatccggacaaatgctgtgggaatgtctgcgcagggaccttcagaccctgttttggagaagccgagtaaccaacccaattaacccctggtactttaagcactccgatggatccttttcaaataagcaatggattttcttctggttcggactcgcagacataagggattcgtatgagctggtgaaccatgctaaggggctgcctgattcttttcacaaacctgcctcggatccaggatcc

SEQ ID NO: 245182 - DNA, 1602 bp, Artificial Sequence
  derived and/or modified sequence
atggcaaccgcgctcatggccgtcgtcctccgcgcggccgccgtggctccaagactgcgaggcaggggaggaaccggaggagctcgcagactttcctgtggcgccagacggcgggccgcccgcggcacctcacccggacgccggctgtctacggcatggagccaacctcagcctccacctgaggagtacgctggagcggatgatgtgtcccagagcccggtggccgaggagccgtcctgggtgccctcgcctagaccgccggtgccacatgaatcaccagaacccccttcagggcgctcgctggtgcaacgcgacatccaagcattcttgaatcagtgtggtgcgtcgcctggagaggcgagacactggctcactcagttccaaacctgccaccattcggcggataaaccgttcgccgtgatcgaagttgatgaggaagtgctgaagtgccagcaaggggtgtcgtcactggcctttgccttggccttcctccagagaatggatatgaagcccctcgtggtgctcggactccccgcacctaccgctccgagcggatgcctgagcttctgggaagcgaaagcacaactggcgaagagctgcaaggtgcttgtcgacgcgctgagacacaatgcggccgccgccgtgcctttcttcggaggcggatcggtccttcgggccgcggagccggccccacacgcgtcctacggtggaatcgtgtccgtggagactgacctgctgcagtggtgcctggagtctggcagcattccaatcctttgccctatcggcgaaacggcggcacgccgctccgtgctgctggattcccttgaggtgacggcttcgctcgcgaaagctctgcgaccgaccaagatcatcttcctcaataacaccggaggactgcgggactcatcccacaaggtgctgtccaatgtgaaccttccggcagacctggacctggtgtgcaacgccgaatgggtgtccacgaaagagaggcaacagatgcgccttatcgtggacgtgctcagccgcttgcctcatcactcatcggcagtcatcactgcggcgtcaaccctcctcaccgaacttttctccaacaagggatcgggaacccttttcaagaacgcagaacgcatgctgcgcgtgcgctcgctggacaagctggatcagggacgactggtcgacctggttaacgcgtcattcggaaagaagctcagagacgactacctggcctcgctccgccctcgcctccactcaatctacgtgagcgagggatataacgccgctgccattctgactatggaaccggtcctcggaggcactccgtacctcgacaagttcgtcgtctcgtcctcccgccaaggacagggatcaggacagatgctgtgggagtgcctgcggcgcgacctccagaccctgttttggcgcagccgggtcacgaaccctatcaatccatggtactttaaacattcggacgggagcttctctaacaaacaatggatcttcttttggttcggactcgccgatatccgggattcatacgaactggtcaaccatgccaagggcctgccggacagctttcacaaaccggcctcagatccaggctca

SEQ ID NO: 245183 - DNA, 1602 bp, Artificial Sequence
  derived and/or modified sequence
atggccacggccctgatggccgtagtattgagagccgcagctgtggcccctagactgagaggccggggcgggacaggcggtgctaggaggttaagttgcggtgcacgaagacgcgcggctcgcggcacttctcctggcagaagactgagtaccgcatggtcccaacctcaacctccccccgaagagtacgctggggctgatgatgtgtcacagtcaccggtggccgaggagcctagctgggtgccgagcccgcggccacccgtgcctcatgagtctcctgagcctccctccggacgatcactcgtgcagcgcgacatccaggccttcctgaatcagtgcggggcatcacctggcgaggcccggcactggctgacacagtttcagacctgccaccacagcgcagacaagccgttcgccgtcatcgaagtggatgaagaggtgctgaaatgccagcagggcgtgtcttccttggcgttcgccctcgcctttctgcagcgcatggacatgaaacctctcgtggttctgggattgccagcccccactgccccctctggatgcttaagcttttgggaggcaaaagcccagctggctaagtcctgcaaggtgttggttgacgccctgcgccataacgctgcagccgcagtgccattcttcgggggcgggtcggtgctgcgggccgccgagccagccccccatgccagttatgggggcatagtgtcagtggaaacagacctccttcaatggtgtttggaatccggctcaatacctatcttgtgtccgatcggtgaaaccgctgcgcgccgaagtgttctgcttgattcactcgaggtgacagcaagtctcgcaaaagctctgcgacctacaaagatcattttcttaaacaatactggtggcctccgcgattcaagccataaggttttgagcaatgtaaatctgcccgctgatttagatctggtgtgcaatgctgagtgggtctccaccaaagagagacagcaaatgcgactaattgttgatgtcctctccaggctgccgcatcattccagcgctgtcattacagctgcttctactcttctgactgaactcttttcaaataagggctccgggactctattcaagaatgccgaaaggatgcttagggtccggagcctggataaacttgaccaggggcgactggtagacctggtaaatgcatctttcggcaagaaactccgcgatgattacctagcttccctccgtcctagactgcactccatttatgtgtcagagggatacaatgccgccgcaatcctgaccatggagcctgtgctgggcggaactccctacctggataagtttgtcgtaagctccagtaggcagggccagggctccggacagatgctgtgggaatgcctgaggagagatctgcagactctgttctggcggtctcgcgttacaaatcccatcaatccatggtactttaaacatagcgacggctctttttcgaataagcagtggatcttcttttggttcgggctcgcggatatccgtgacagctacgagctcgtgaatcatgccaaagggctaccagatagcttccacaagccagcgtccgaccccggatct

SEQ ID NO: 245184 - DNA, 1602 bp, Artificial Sequence
  derived and/or modified sequence
atggctaccgccctgatggccgtcgtcttgcgtgcagcagccgttgccccgcgcctgcgaggcagaggtggaactggcggcgctcgtagactgtcatgcggcgcacgacgcagagccgctagaggcacctcccccggacgacgcttatctacggcgtggagccaaccccagcccccgcccgaggaatacgctggggctgatgatgtatcccagtctcccgtcgccgaggagccgtcctgggtgccatctccaagaccaccagtacctcatgagtcacccgagccaccaagtgggcgatccctcgttcagcgggacatccaggcttttctgaatcagtgcggagcaagccctggcgaagcacggcactggttaactcagtttcaaacctgccatcatagtgctgataagcccttcgctgtgatcgaggtggacgaggaggttctgaaatgtcagcaaggggtctcctccctggcattcgccctggcctttcttcagcggatggatatgaaaccactcgtagtcttaggactgccagctcccacggccccatcaggttgtctctcattctgggaggctaaggctcagctcgcaaagtcatgcaaggtcctcgtggatgcgctgcggcacaatgcggctgctgcggtgccgttttttggtggaggttctgttctgagagctgctgagcctgcaccgcacgcctcttatggtggaattgtgtccgtggagacggacctcctgcagtggtgcctcgagtcaggaagtatccctattttgtgcccgatcggcgagactgcagccagaagatccgtgctgttggattccctcgaggtgactgcctccctggccaaggctctgcgcccaaccaagattattttcctgaataatactggcggactgagggatagctctcataaggtcctgagtaatgtgaatttaccagccgacctggatctcgtgtgcaacgccgagtgggtatccacaaaggagaggcagcaaatgcggctgatagtggacgttcttagccggcttccccaccatagtagcgcggttattactgctgcatcaacattactgaccgaactattcagtaacaagggttctggaaccttgttcaagaatgcagagcgaatgctcagggttagatccctggacaaactggaccagggtaggctcgttgacttggtcaatgcctccttcggaaagaagcttagggatgactacctggccagcttgaggcccagactgcacagcatttatgtctctgaaggctacaatgcagccgcgatactcactatggagccggttttaggaggaacaccttaccttgacaagttcgtggtgagcagctcccggcagggtcagggtagcggccaaatgctttgggaatgtctgaggagagatctccagaccctgttctggaggagccgggtcacgaaccctatcaatccatggtactttaaacacagcgatggaagcttttcaaataagcagtggatcttcttctggtttggcttggcagatattagggactcgtatgaactcgtgaaccatgcaaagggcctgcccgactctttccataaaccggcctctgatcccgggtcc

SEQ ID NO: 245185 - DNA, 1602 bp, Artificial Sequence
  derived and/or modified sequence
atggccactgccctcatggctgttgtactgagggcggcagcggtggccccccgcctgagggggagagggggcactggcggcgcgcggcgattaagctgcggagctcggcgacgagccgcgaggggcacttccccaggaaggcgactgtctacagcatggagccaaccgcaaccaccccctgaagagtatgccggtgcggatgatgtgtctcagtcaccagtggccgaggaacccagctgggttccgtcccctcgtcctcccgtgcctcacgaatcgcctgagcctccttccggccgcagtttggtgcagagggacatccaggccttcctaaatcagtgcggtgcgtcacctggcgaagcccggcattggctgacccaatttcagacctgtcaccatagcgcagacaagcctttcgcggtcatcgaggtggacgaggaggtgctcaaatgccaacagggtgtatcctccctggcctttgcacttgctttcctgcaaagaatggacatgaagcctctggtggtcctgggcctccccgcccccaccgcgccttccgggtgcctgtcattttgggaagctaaggcacagttggcaaaatcttgtaaagttctcgtcgacgccctgcgtcacaacgcagccgctgccgtgcccttcttcggcggaggctctgtcttacgcgcggcggagccagctccccacgcttcgtacggcggtattgtcagcgttgaaacggatctattacaatggtgcctggagtctgggagcataccgatcttgtgcccaatcggcgaaactgcagcaaggaggtctgtcctcctcgactctcttgaagtcaccgcaagcctggcgaaagctctgagaccaaccaaaataatctttctgaataacacaggcggactgagagattcaagtcataaagtactttccaacgtgaatttgccggctgatctcgacctggtctgtaacgccgagtgggtatccaccaaagagcgccaacagatgcgcctgattgtagacgtactgtcgaggctaccccatcacagctcagctgtaattaccgccgcttccaccttactcaccgagctcttttctaacaagggatcggggaccctttttaagaacgctgagagaatgttgcgggtacgtagcctggataaattggatcagggtcggctggtggatctggtcaatgccagtttcgggaaaaagcttagggatgattatctagcgagcctcagaccacgactgcatagcatctatgtgtctgagggatataacgctgccgcaattttaacaatggaaccagtgctaggcggtacaccgtacctggacaagtttgtggtaagcagtagccgccagggccaaggaagtggccagatgttgtgggagtgcctgcgaagagaccttcagaccctgttctggcgctcgcgggttactaacccaatcaacccctggtacttcaagcacagtgatgggtctttcagcaacaagcagtggatattcttctggtttggactggccgacattcgggactcatacgaattggtgaatcacgcgaaggggcttcccgattcctttcataagcctgcctcggacccaggatcc

SEQ ID NO: 245186 - DNA, 1602 bp, Artificial Sequence
  derived and/or modified sequence
atggcgactgcattgatggctgtggttctccgtgccgctgcagttgcgccacgtttgcgtggaagaggaggtaccgggggcgctcgtcggctgtcgtgcggagcccgtcgacgcgcggcacggggaacgtctcctggacgtcgcctcagtacagcatggtcgcaaccccaaccgccgccggaggaatatgcaggtgcagacgacgtgtctcaatctcctgttgcggaagaaccgagttgggttccaagtccccgtccacctgttccacacgaaagcccagaaccaccaagcggacgttcccttgtgcaacgagacatccaggcttttcttaatcaatgcggtgccagtccgggagaagctcgtcattggcttacacaatttcaaacttgccatcacagtgctgataaaccatttgccgtcattgaggtggatgaagaagttctcaaatgtcagcaaggagtgtcctcactcgcatttgcactggctttccttcaaagaatggatatgaaaccgttggttgtattgggacttccagcaccaacagcaccatctgggtgtctctccttttgggaagctaaggctcagttggcaaaatcgtgcaaggtcttggtagacgcgctgcgacacaatgcggctgcggcggtgccattttttggggggggatcggtgttgagggcagcggagccagcaccccacgcatcgtacggtggaattgtttctgtagagactgatttgctccagtggtgcctggagtcaggaagtatcccaatcctttgcccaataggtgagaccgcagccagaaggtcggttttgctggactctttggaggtaactgcctcactggcgaaagccttacgtccaactaaaattatcttcctgaataacactggtggattgagagattcctctcacaaggttctttccaacgtgaatttgccagcagacctagatttggtctgtaacgccgagtgggtttcgacaaaagaaagacaacaaatgaggcttattgtcgatgtcctatcgcgacttccgcaccactctagcgcagtcatcacggctgcatcgacacttcttacggaactcttttctaataaaggaagtgggactttgtttaagaatgcggagagaatgttgcgggtcagatcattggataaattggatcaaggaagactcgtcgatttggtcaatgcttcgttcggaaagaaacttagagatgattatcttgcatcgcttaggccgcggctccattcaatatacgtttcagaaggatataacgctgctgcaattttaacaatggagccagtcctcgggggaactccttacctcgataaattcgtagtgtcttcctcaagacaaggacagggatccggacagatgttgtgggagtgtttgcgtcgagacttacaaacactattctggagatctcgggttactaaccctataaatccgtggtattttaaacatagcgacggatcgttcagcaataaacaatggatttttttctggttcggacttgccgacattcgagactcttatgaactcgtgaaccatgctaaagggcttcctgattcgttccataaacctgcgtccgacccaggatca

SEQ ID NO: 245187 - DNA, 1602 bp, Artificial Sequence
  derived and/or modified sequence
atggcgaccgccctgatggccgtggtcctgcgcgcagcggcagtcgctcctcgcttgagaggcagaggaggaactggcggagcccggagactgtcgtgcggagcacggcgtagagccgcgcgcgggacctccccggggcgccgactttcgaccgcctggtcgcaaccccagccgccgccggaagagtacgcaggagccgacgacgtgtcacagtctcccgtcgctgaggagccctcttgggtgccttccccacgcccgccagtcccacacgaaagcccagaacccccgtcgggaagatcgctcgtgcagagagatatccaagcattcctgaatcagtgcggcgcctccccgggagaagctcgccactggctgactcaatttcagacttgccatcattccgcggacaaaccattcgctgtgatcgaggtcgacgaagaggtcctcaagtgccagcagggcgtgtcatcgcttgcgttcgcccttgcttttctgcagcggatggacatgaagcccctcgtggtgctgggactgccggcgccaactgcgccgagcgggtgcctttcattctgggaggcaaaggcccagctcgccaagtcgtgtaaggtgctcgtggacgccctcagacacaacgccgccgccgcggtcccattctttggaggaggctccgtcctgcgtgctgcagagccggcaccgcacgccagctacggaggcatcgtgtcggtggaaactgacctcctgcagtggtgcctggagtcaggaagcatccctatcctgtgccctatcggagagactgccgcccggcgctcggtgctgcttgattcgctcgaagtgaccgcgtcgctggcgaaagcgcttcggccgacgaagatcattttcctcaacaacaccggcggtctgagagattcgtcgcacaaagtcctcagcaatgtgaacctgccggctgacctggacctggtctgtaacgctgagtgggtgagcacgaaagagcgccagcagatgagacttatcgtggacgtgctgtcgcgtctgcctcaccattcgtccgctgtcatcactgcagccagcaccctgctcactgagctgttctccaacaagggatcagggactctgttcaagaacgctgagcgcatgctccgcgtgcggagcctcgacaagctggaccagggccggctcgtggatctggtgaacgccagctttggcaagaagctgcgcgacgattaccttgcttcgttgcgcccacgcctgcattcaatctacgtgagcgaagggtataacgcagccgcaatcctgacgatggaaccagtgctcgggggaaccccgtacttggacaaattcgtggtttcatcgtcccggcaggggcagggatcaggacaaatgctgtgggagtgcctgagaagggacctccagacgctgttttggcggagcagagtgactaaccctatcaatccgtggtacttcaagcattcagacggatcgttctccaataagcagtggatctttttctggtttggattggccgatatccgggactcctacgagctcgtcaaccacgcgaagggtttgccggattcatttcacaagcctgcatccgatccaggcagc

SEQ ID NO: 245188 - DNA, 1602 bp, Artificial Sequence
  derived and/or modified sequence
atggcgactgcacttatggcagtcgtgctgagagctgccgccgtggcgccccggctgcgagggcggggcggcaccggaggagcccgcagactgtcttgcggagcccgccggagggccgcacgcggcaccagcccgggacggcgcctgagcaccgcctggtcccagccgcaaccaccgccagaggagtacgctggcgcggacgatgtgagccaatccccagtggcagaagagccctcgtgggtgccgtcccctcggccgcctgtgcctcatgagtccccagaaccacccagcgggcgctccctggtgcagagagacatccaggcctttctgaaccagtgcggtgcttctccgggagaggcgagacactggctgactcaatttcagacgtgccaccactcagccgacaagccattcgcggtcatcgaagtggacgaggaggtcctgaaatgccagcagggggtgtcatcactcgccttcgccctggccttcctccagcggatggatatgaaaccgctggtcgttctgggcctccccgccccgaccgccccgtctggctgcctgtcgttctgggaagcaaaagcacagctggcgaaatcctgtaaagtgctggtggatgcgctgcggcataatgcggcggcagccgtgccatttttcgggggcggaagcgttcttcgagccgcggagccagcgcctcatgcctcatacggaggcatcgtgtcggtcgaaactgacttgctgcagtggtgcctggaatccggatcaatccctattctttgcccgatcggagaaactgcggccaggcgctcagttctgctggattccctcgaagtcactgcgtctcttgcaaaggcattgcggcctaccaaaatcattttcctcaataacacgggtgggcttcgcgatagcagccacaaggtgctttcgaatgtgaatcttccggcggacctcgatctggtatgcaacgcggaatgggtgtccaccaaggagcggcaacaaatgagactgatcgtcgatgtcttgagcaggcttccgcaccactcatcggccgttatcaccgcggcatcaactttgctcaccgaactgttcagcaataaagggtcaggcactttgttcaagaacgcggagaggatgctcagagtgagatccctggacaagctggatcaggggcgccttgtggacctcgtgaatgcctcattcgggaaaaagttgcgggatgattacttggcgtcgctgcgccctcgtctccactcgatttacgtgtcggaaggctacaatgcagcagcaatcctcaccatggaacctgtcctcggaggcaccccatacctggacaaattcgtggtgtcatccagcagacaaggacagggctcgggtcagatgctgtgggagtgtctcaggcgggacctgcagacgttgttctggcggtcgagagtgactaatcccatcaacccttggtactttaagcacagtgacggctcgttctcaaacaagcaatggatcttcttctggttcgggctcgcagacatccgggactcctacgaactggtgaaccatgccaagggcctcccagatagcttccacaagccagcatcagacccgggatca

SEQ ID NO: 245189 - DNA, 1602 bp, Artificial Sequence
  derived and/or modified sequence
atggctaccgccttgatggccgtcgtgctgcgggctgccgccgtggcccctagactgcgcggacgcggggggaccggtggagcgagacggctgtcctgcggagccagaaggcgggccgcgcgcggaacgtcaccgggccggcggctgtcaaccgcgtggtcacagcctcaaccaccgcctgaggaatacgcaggcgcggatgacgtctcccagtccccagtcgccgaggagccgtcctgggtgccgtccccaaggcccccggtgccacacgaatcacctgaaccgccgtcgggacgatccctggtgcagagagatattcaggcattcctgaaccagtgtggagccagtccaggtgaagctcgccactggctgactcagttccaaacttgccatcacagcgcggacaaaccgttcgctgtgatcgaggtggacgaagaggtgctgaagtgccagcagggagtgtcctccctcgcttttgccctggccttccttcagcgtatggatatgaagccactggttgttctggggttgccagcacctaccgcaccgagcgggtgcttgtcattttgggaagccaaggcgcagctggcaaagtcctgcaaggttctggttgacgcgctgcggcacaacgccgcagcagccgtgccgttttttggaggtggtagcgtccttagagcggccgagcccgcaccacatgcgtcctacgggggaattgtgtcggttgagacggaccttctccaatggtgtctggaatccggatcaatcccgattttgtgcccgatcggagaaaccgctgccagacggtcggttctgcttgatagcctcgaggtgacggcatccctggcgaaggcgctgcgccctactaagatcatctttctgaacaacaccggcggactgagggattcgtcgcataaggtcttgtccaatgtgaacctccccgctgaccttgacctggtgtgcaatgcggagtgggtcagtaccaaggaaagacagcaaatgagactgattgtggatgtgctgtcaagactgccgcatcactcctcggccgtgatcaccgctgcctccaccctcttgaccgagctgttctcgaacaagggaagcgggaccctcttcaaaaacgcagaacgcatgctcagagttagatccctggacaagctggaccaaggtagacttgtggacctcgtgaacgcttccttcggaaaaaagctccgcgatgattacctggcctcactccgcccgagactgcattccatttacgtgtccgagggctacaacgccgcggcgatcctgactatggagcctgtgctcggcgggactccttatcttgacaagttcgtcgtgtcgtcgagccggcagggtcaaggatcagggcagatgctgtgggaatgcctccggcgggaccttcagactttgttctggcgctctagggttactaatccgatcaatccctggtacttcaagcactcagacggcagctttagcaacaaacagtggatctttttctggttcggcctcgcggacatccgcgattcctacgagctggtcaaccacgccaagggattgcctgacagcttccataagccagcttccgatccaggctct

SEQ ID NO: 245190 - DNA, 1602 bp, Artificial Sequence
  derived and/or modified sequence
atggctactgcattgatggccgtggtgctgagggcagccgccgtggctccccgcctacgtggaagaggcggtaccggtggggcgagaaggctgtcctgtggagctaggcgacgggcagcccgcgggacaagcccgggcaggaggttgtccaccgcatggtcccagccacagcctcctccagaagaatacgccggggccgatgacgtctctcaatcccccgtggccgaagagcccagctgggtgcccagccccaggcctcccgtgcctcatgagtcaccagaaccgccctctggtcggagtcttgtgcaaagagatatacaggcatttctgaaccaatgtggtgcctcccctggggaggctaggcactggcttacacagttccagacatgccatcactccgccgacaaaccatttgccgtaatcgaagtcgacgaggaggtgctcaaatgtcaacagggggtgtcttctttagctttcgccctagctttcctccaacgtatggacatgaagcccttagtggtcttaggcctccctgccccaacggcacccagcgggtgcctgtccttctgggaggccaaagcacagctggccaaaagttgtaaggtcctggtcgatgctctacggcacaatgccgctgcagcagtgccgtttttcggggggggtagcgttttgagggcagccgagcccgccccacacgcgagctacggggggatcgtgtctgtcgagaccgatctcctacagtggtgtctggaatccggaagcatccctatactgtgcccaatcggtgaaacagccgcgcggcggagcgtgctgctggactcccttgaagtcaccgcaagcctggcgaaggcattgcggcccaccaagatcattttcctcaacaacacaggaggcctgcgcgacagctcccacaaagtattatctaatgtgaacttgccagctgaccttgatctcgtgtgtaatgcagagtgggtctctacaaaagagagacagcagatgagactgatcgttgatgtgctgagtcggttgccccaccatagttccgctgtgatcaccgctgcgtctacgctgctaacagagctgttttccaataaggggtccggcaccttgtttaaaaacgcggaacggatgctcagggtacgcagtcttgataaactagaccaaggaaggctcgttgatctcgtaaacgccagctttggaaagaagcttagagatgattacttggctagtttgcggccaaggttgcactcaatctatgtgagcgagggatataatgcggccgctatcctaaccatggaacctgtgctcggcggcactccctacttggacaaattcgtggtgtcaagctctaggcagggtcaagggtcggggcagatgttgtgggaatgtctaaggagagacctgcagacactgttttggcgcagtcgagtcactaatccgattaatccatggtattttaaacatagcgatggatcattttcgaataagcagtggatatttttctggttcggcttagctgatattagagacagctatgaactggtcaaccacgccaaagggcttccggattcattccacaagccagcctccgatccaggcagc

SEQ ID NO: 245191 - DNA, 1602 bp, Artificial Sequence
  derived and/or modified sequence
atggcaacagccctgatggcagtggtgttgcgggccgcggccgtggccccgcgcctgcgagggcgcggaggaaccggtggagcacgccgtttgagctgcggtgccaggcgacgcgcggcccgtgggacttcaccaggccgccgtctgagcacagcttggtctcagccgcagcctccgcctgaggagtacgctggtgcagacgacgtgtcgcaatcaccggtcgctgaagaacctagctgggtccctagcccacgcccgccagtcccacacgagagtcctgagcccccgtcgggtcgcagcctggtgcagcgcgatattcaggccttcctgaaccaatgtggtgcaagccctggcgaggctcgccactggctgactcagttccagacttgccaccacagcgccgacaagccgttcgcagtcatcgaagttgacgaggaggtgctgaaatgtcagcagggagtgtctagcctggcttttgcactggcgtttctacagcgtatggacatgaagccattggtggtcctgggtttgcctgcgccgaccgcacctagcggttgcctcagcttttgggaagcaaaggctcagctggcgaaaagctgcaaggtccttgttgacgctctgcggcacaacgccgcggccgcagtccctttcttcgggggtggctcagttctgcgcgcggcggaaccagcgccgcacgcgagctacggtggtatcgttagtgtagagactgatctgcttcaatggtgtctggaaagcggttccattccgattctgtgtccgatcggcgagaccgcggcacgcaggtcagtcttactggattctttagaggtgactgcgagcctggcgaaagcactgcgcccgactaaaatcattttcctgaataacaccggtggcctacgcgacagcagccataaggtcctgtccaatgttaacctgcctgccgacctggacctggtgtgtaacgccgagtgggttagtacgaaggagagacaacagatgcgcttgatcgtggacgttctctcccgcctgccacatcacagcagcgcagtgataacggccgccagcaccctgttgacggagctgttcagcaataaaggatccgggaccctcttcaaaaacgcggagcgcatgctgcgtgtacgttcattagacaaactggatcaaggtcgcttggtggatttggttaatgcctcctttgggaagaaactgcgcgatgactatctggccagccttcggccgcgactgcatagcatttacgtgtcagagggttataacgccgcagctatcctgaccatggagccagtcctgggcgggaccccgtatcttgacaaatttgtggtgagcagctctcgacagggccaaggctcaggccagatgctgtgggagtgcctcaggagagacttacaaaccctgttctggcgcagccgcgtaacaaacccaatcaatccgtggtattttaaacatagcgatggcagcttcagcaacaagcagtggatctttttctggttcggtctggccgatatccgtgactcctatgagctggtgaatcacgcgaagggtctgccagactccttccacaaacctgccagcgacccaggtagc

SEQ ID NO: 245192 - DNA, 1602 bp, Artificial Sequence
  derived and/or modified sequence
atggctacagccctgatggccgtggtgttaagagccgctgccgtggctcctaggttgcgtggacgagggggaacaggaggagcgaggaggctaagttgtggagcgcgcagaagagcggcccgaggaacgtcccccgggcgacgtctaagtactgcgtggtcacagccccagcccccgcccgaagaatatgcaggagctgatgatgtatcacagtcaccagtcgcagaagaaccctcatgggtgccctctcctagaccccctgtgccccacgaatcccccgaaccgccctcagggcgatccttggtgcagagagacatacaggcttttctgaatcagtgcggagcatcccccggggaagccaggcattggttaacacagttccagacttgtcaccactccgccgataaaccatttgccgtgattgaagtagatgaagaagtgcttaaatgtcaacagggagtttcttctcttgctttcgctctggcatttcttcagagaatggatatgaaacctctagtagtcctggggcttcctgcgcccacagccccctctggatgcctatctttttgggaagccaaagctcagctggcaaaatcctgtaaagttctcgtggatgctctacgccacaatgccgccgccgccgtgcctttcttcggggggggatctgttctgcgagccgctgaacccgcccctcatgcttcttacggaggaatcgtgtccgttgaaactgatctgctccagtggtgtctcgaatccgggtctattcctatcctctgtcctattggagagacagccgcccgccggtccgttctgcttgactctcttgaagtgacagcaagtttggccaaagccctccggcccacaaagataatcttcttaaacaatacaggagggttacgcgattcgtcgcataaagtgctgagtaatgtaaatcttcctgcagatctcgatctcgtgtgcaatgctgaatgggtctctacaaaagaaaggcagcagatgaggctaatagtggatgtgctcagtcgattgccccatcacagttctgcagtaatcacagccgcatcaacactcctcacagaactcttttccaataaaggatctgggacactattcaaaaatgctgaacgcatgcttcgcgtgcgttcactagataaactcgatcaggggaggctcgtagatttggtgaacgcctccttcggaaagaagttaagagacgattatctggcctccctcaggcctcggctgcattcaatatatgtatctgaaggatataacgccgctgctatcttgactatggaaccagttctcggggggacaccatatttggacaagtttgtggtgtcttcttcacgacaggggcaggggtccggacagatgctctgggaatgtctgaggcgcgatctccagactcttttttggcggtctagggtgactaaccccataaatccttggtacttcaaacattcagatggaagtttctcaaataaacagtggatcttcttctggtttgggctggcagatatacgcgactcttacgagctagtgaatcatgcgaaagggctccctgatagtttccacaaaccagcaagtgatccagggtcc

SEQ ID NO: 245193 - DNA, 1602 bp, Artificial Sequence
  derived and/or modified sequence
atggctactgcgctgatggccgtcgtgctgcgcgctgctgctgtggccccgcgactgcgcgggaggggaggcacgggaggagccagacggctgagctgtggtgcccggcgcagagcggcccgaggaacttcgccgggcagacgcctctcaaccgcctggagccagcctcagcccccgcctgaagagtacgcgggcgccgacgatgtgtcccaaagcccggtcgccgaagagccgagctgggtcccatcgcccagaccgcctgtcccacatgagtcgcctgagccaccctctggacgctcgctggtgcaacgggacatccaggctttcctgaatcagtgcggagcgtcgccgggagaggcccggcattggcttacgcagttccagacttgtcaccactcggctgacaaaccgtttgcagtcatcgaggtggatgaagaagtcctgaagtgtcagcaaggagtcagttccctggccttcgccctggcgttcttgcagaggatggacatgaagcccctcgtggtgctcggactgccggctcctactgccccgtccggatgcctctcattctgggaggcgaaagcgcagctcgctaagtcatgcaaggtgctcgtggatgccctgcgacataatgcggcggccgcagtgccattcttcggaggaggctccgtgctgagggctgccgagcctgccccccacgcctcgtacgggggaattgtgagcgtggagactgacttgctgcagtggtgcctggagtcagggtcgatcccaatcttgtgtccgattggagaaaccgcagcaagacgctccgtgctcctcgatagcctggaagtgactgcatccctggcgaaagcgcttcgccctactaagattatctttctcaataacactggaggactgcgcgattcctcgcacaaagtgctctcgaatgtcaacctgcccgccgacctggacctcgtctgcaatgcggaatgggtttccaccaaggaaagacagcaaatgaggctgatcgtcgatgtcttgtccagactgccgcaccattcatccgcagtgatcaccgccgcgtcaactctcctgacggagctcttctccaataagggatccggcaccctgtttaagaacgccgaacgcatgctccgcgtccgttcgctggacaagctcgaccagggtaggctcgtggatctggtcaacgcatccttcgggaaaaagctcagagacgactacctggcctccctgcgcccccggctgcactcaatctacgtgagcgaaggatacaatgccgcggcaatcctcaccatggaacctgtcctgggaggaaccccatacctggacaaattcgttgtctcgtcatcaagacaaggacagggaagcggtcagatgctgtgggaatgtctgagaagagacttgcagactctcttctggcgctcacgtgtgactaacccgatcaacccttggtacttcaagcactcggatggatccttttccaacaagcaatggatcttcttctggttcgggctggccgacatccgagactcctacgaattggtgaatcacgctaaaggtctgccggattctttccacaagccggcttccgacccaggctcc

SEQ ID NO: 245194 - DNA, 1602 bp, Artificial Sequence
  derived and/or modified sequence
atggcaactgctctcatggccgtggtgctccgcgcagcggctgtcgccccaaggctccgggggagggggggaactggaggagcaagacgccttagttgtggggcacgccgaagggcggcgaggggaacctctccagggcgaaggctcagtaccgcgtggtcgcagccacaacctcctcccgaggaatacgctggggctgacgatgtctcgcagtcaccagtcgcagaagagccctcttgggtaccgtctccccgcccccctgtgccccatgagagcccggagcccccctcaggccgatccttggtacagagggacatccaggcatttctgaatcagtgcggggccagcccaggtgaggctcggcactggcttacgcaattccagacctgccaccacagcgctgacaaaccattcgccgtcattgaagtggatgaggaagtgttgaaatgtcagcaaggagttagctctctggccttcgctttagccttcctccagcgcatggatatgaaacccctcgtggtgttggggttacctgccccgaccgccccgtcgggctgtctttcattctgggaagctaaggctcagctagccaagtcatgtaaagtgctggtagatgccctaagacataacgcagccgctgctgtgccgttttttgggggaggcagcgtgctcagagcggcagagcccgcaccacacgcctcttacggagggatcgtcagtgtggagacagaccttctgcagtggtgtctggagtccggctctatccccattctctgccccatcggtgagactgcggctcggaggtcagttttgctggattccttagaggttactgcttctcttgccaaggcacttagacctacaaagattatattccttaataacactggaggtctaagggactcttcgcacaaggttctttctaacgtgaacctgcctgctgacctggacctggtgtgcaacgccgagtgggtgagtacgaaggagcgtcaacaaatgcgccttatcgtcgatgtcctgagcaggctaccacatcacagttctgcggttatcaccgcagcttcaacactgctgactgagctgtttagcaataaaggcagcggaacattattcaagaatgctgagcgtatgctgcgcgtaaggtctttagataagctggaccagggaagactggtcgacttagtcaatgcatctttcggaaagaagctgcgagatgattacctcgcttctctgagaccccgactccactctatttacgtgagcgaggggtataacgccgcagccatcctaaccatggagcccgtattgggcgggactccctatctggacaagtttgtggttagttcttctcgtcaagggcaggggagtgggcagatgctatgggaatgcttgaggagagatctccaaacattattctggcgatctcgtgtgaccaacccgataaacccctggtacttcaagcattcggacggatcatttagcaataagcaatggattttcttttggtttggacttgctgatattcgagactcatacgagcttgtgaatcacgctaagggcttgccagactctttccataaacctgcgtcggacccagggagt

SEQ ID NO: 245195 - DNA, 1602 bp, Artificial Sequence
  derived and/or modified sequence
atggcgacggcgctgatggcggtggtccttagagcagccgctgtcgcaccaagactccgggggcggggaggaaccgggggcgcgcggaggctgtcatgtggagcccggcggagagcagccaggggcacctcaccagggcggcgcctgtccactgcctggtcacagccgcagccgccacctgaggaatacgcgggagccgatgatgtgtctcaatcaccagttgcagaggaaccgagctgggtgccaagccctcgcccaccagtcccgcatgaatcgccggagcccccatccggaagatcgctcgtgcagcgggatatccaggcttttctgaaccagtgcggagcgtctccgggagaagcccgacactggctgactcagttccagacctgccatcactcggcggataagccgttcgcggttattgaggtggatgaagaggtgctgaaatgccagcaaggcgtgtcgtcgctggccttcgcactcgcgtttttgcagcgcatggacatgaaaccattggtggttctgggactccccgccccgacggccccgtcgggctgcctctcgttttgggaggcaaaggcgcaactggccaagtcgtgcaaagtgctggtggacgccctgcggcataacgcagccgcagcagtcccgttctttggaggaggatcggtgctgagagccgccgagcccgctccacatgccagctacggaggaatcgtgagcgtggaaactgatttgctgcagtggtgcctggagtcaggatccataccgatcctgtgcccgatcggtgagactgccgcgaggcgatccgtgctgttggacagcctggaggtgaccgcgtcactcgcaaaggcacttcggcctaccaagattatcttcctgaataacaccggcggtctgcgcgattcgtcccacaaggtcctgagcaatgttaatctcccggccgacctggatctggtgtgcaatgccgaatgggtgtcgaccaaggaacggcagcagatgagactgatcgtggatgtgttgtcgcggctgccgcaccactcgtcagccgtgatcactgcagcttcgacgctcctgacggaactcttctcgaataagggctcggggacgctcttcaaaaacgcggaacgcatgcttcgggtgcggtccttggataagctggatcaaggcagactggtcgacctggtgaatgcctcctttggcaagaagctgcgggacgactaccttgcatcattgcgcccaaggctccacagcatttacgtctcagaaggatacaacgctgcggccattctgaccatggagcctgtgcttggcgggactccgtacctggacaagttcgtggtttcatcgtcgcgccaaggacaaggctccggccaaatgttgtgggagtgcctgcgccgggacctgcagaccctgttttggaggagcagagtcactaacccgatcaacccctggtactttaagcattccgacgggtcgttctccaacaagcagtggatctttttctggttcggacttgcggatattcgcgattcatacgagctcgtgaaccacgctaaggggctgcctgactcgttccacaagccggccagcgatccgggttcg

SEQ ID NO: 245196 - DNA, 1602 bp, Artificial Sequence
  derived and/or modified sequence
atggccaccgccctgatggccgttgtgctgcgcgcggccgccgtggctccccgcctgcgaggtcgtggtggcaccgggggtgcccgccggctgtcgtgtggtgcgcgtcgccgggccgctaggggcacaagtccgggccgtcgattgagtactgcgtggtcgcagcctcagccccccccagaagagtacgcaggcgccgacgacgtgtcccagtccccagtggccgaggagccgagttgggtgccgagcccccgcccgcccgtgccgcacgagtcccctgagccgccatcgggacgttcgctcgtgcagcgcgatattcaggcttttttgaaccagtgcggagcatcgccaggggaggcccgccactggctgacacagttccaaacatgtcatcattcggccgacaagcctttcgccgtgattgaggttgatgaggaggtgctgaagtgccagcagggtgtctcctccttggcattcgcgttggcttttctgcagcgaatggatatgaagccccttgtggtgttgggtctgccggcccccacggctccgtctggctgtctgtcgttttgggaagccaaggcccagttggcgaagtcatgcaaggtacttgtcgatgccctacgccataacgccgccgccgccgtcccatttttcggtggcggcagtgttttgcgggcggctgaacccgctccacatgcttcctacggcggaattgtctccgtggaaactgatctcttacagtggtgcttggagagtggcagtattcccatactctgccctattggtgagaccgctgccagacggagcgtgctgctcgacagtctcgaggtgacagcctcgctagccaaggccttgcggccgaccaaaataatttttctcaacaatacgggaggcctacgagactcaagtcacaaggtcctgtccaacgtgaatctgcccgcggatttagatctggtatgcaacgccgagtgggtgagtacaaaggagcgccagcagatgaggcttatagtggatgtgctgtcccggctgcctcatcattcgagtgcggtgattaccgctgcaagcaccctgctgaccgagctcttttccaacaagggctccggcaccctgtttaagaacgccgagcgcatgctccgcgtgcgcagtctggataagctggatcaaggccggttggttgacctcgtaaacgcctcatttggcaagaagctgagggatgactacctagcgagcctgcgcccccggctgcatagcatctatgtgagcgaaggctacaacgctgctgctattttgaccatggagccagttttaggcggcacaccatatctggacaagtttgtggtctccagttccagacagggccagggatccgggcagatgctctgggagtgcctccgccgtgatctccagactctcttctggcgatctcgggtcacaaaccctataaatccatggtatttcaaacactccgatggtagcttctccaacaagcaatggatctttttttggtttggtctggctgacattagggactcctatgaactggttaaccacgctaagggcctcccagattcttttcacaaaccagcttcggacccaggaagc

SEQ ID NO: 245197 - DNA, 1602 bp, Artificial Sequence
  derived and/or modified sequence
atggctacagctctcatggccgtggtcctgcgcgcggcagcagtggctcctaggcttcgcggacgaggcggaactggtggagcccgccgcttgagctgcggcgctcgcagacgggccgcccgcgggacatctcccgggcgacgcctgtccacagcgtggagtcagccgcaacctcctcccgaagaatacgccggcgccgacgatgtatcacagtctccagtggcggaggagccatcctgggtgcccagccctcgaccccctgtaccgcacgaatcccccgaacccccatcgggccgctcccttgtccagcgcgatatccaagcttttctaaatcagtgcggagccagcccgggggaggcgcggcactggttgacacaattccagacatgtcatcatagcgcagacaaacccttcgctgtgatcgaggtggatgaggaagtgctgaagtgccagcagggagtgtctagcttagctttcgctctggcgtttctacaaaggatggacatgaaaccattggtcgtgttgggattgccagcaccgaccgctcctagtggttgcctgtcattttgggaggcaaaggcacagctggccaaatcttgtaaagttctcgtagacgcccttagacataatgcagctgctgcggtccccttcttcggcggaggctccgtactgcgggccgccgagccagccccccatgcctcttatgggggtatcgtgtctgtggagaccgatctgttacagtggtgtttagagtccggctccatcccaattctgtgtcccatcggcgagacagccgctagaaggagcgttttattggacagtctggaagtgaccgcaagtctcgcaaaggccctgagacctacaaagatcattttcctcaataacactggagggctgcgggattcgtctcataaggtcctgagcaacgtgaacctgcctgcagatctggatctggtctgcaatgctgagtgggtcagtaccaaggagcggcaacagatgaggctcatcgtagacgtgctgagccgccttcctcaccactcttctgcggtgatcaccgcggcaagtacactcctgacagagctgttttctaacaagggcagcggaacactcttcaaaaatgccgaaagaatgctacgtgtgcggtcgttggacaaattggatcaggggcggctggtggatttggtgaacgcatccttcgggaagaaattgcgcgatgattacttggcttctctgagaccgcggctgcactccatatatgtgagtgaaggttataacgcagctgctatcttgactatggaaccggtgctcggcggaaccccatatttagacaaattcgtggtctccagctcacggcaggggcagggcagcggacagatgctctgggagtgtctgaggagggatctccagacattgttctggcggagtagagtgaccaaccccataaacccgtggtatttcaagcatagtgacggatctttcagtaacaagcagtggatctttttttggtttgggcttgccgatattagggattcctacgagctcgttaaccacgccaagggactccctgactcttttcacaagccagcatctgaccccggctcc

SEQ ID NO: 245198 - DNA, 1602 bp, Artificial Sequence
  derived and/or modified sequence
atggcaacggctcttatggcagtcgtactcagggcggccgccgtggcacctcggctgaggggtagaggaggtaccggcggtgccagacgccttagctgcggagcacggcgccgggcagcaagagggaccagccctggaaggcgcctttcaaccgcctggtcccaacctcagcccccacctgaagagtacgcgggagcagatgacgtgagccagtcgcctgtggcagaagagcctagctgggtccctagcccccggcccccggtcccccacgaaagccctgaacctccttcggggcggtcgcttgtgcaacgtgacatccaggcttttctgaatcaatgcggagcatcgccaggagaagccaggcactggctgactcaatttcaaacttgtcatcattcagctgataaaccattcgctgtcatagaagtggacgaggaagtgctcaagtgtcaacaaggagtgtcgagcctggcattcgccctcgccttcttgcaacggatggatatgaagccgctggtggtgctgggacttcctgcacctaccgcaccatcgggctgtctttccttctgggaggcgaaggcccaacttgcaaagtcttgcaaggtcctggtggatgccctcaggcataacgcggccgccgcagtgccctttttcggaggtggttcggtgctgcgtgcagcagaaccagcaccacacgcgtcctatggtggaatcgtatcggttgaaactgatctgctgcaatggtgccttgagtcggggtcgataccaattctctgcccaattggagaaactgccgcccggcggtccgtgctgctggactcgctcgaagtgactgccagcttggcaaaagcactgcgacccaccaagatcatttttctgaacaacaccggcggactccgtgattcatcgcataaggtcctttccaatgtcaacctgcccgcagatctcgatttggtctgtaacgcagagtgggtatcaaccaaggagcggcagcagatgcgccttattgtcgatgttttgtcgcgtctgccacatcacagctccgcggtcatcaccgcagcatcaacgctgctcactgagctcttttcgaataagggctccggcactctcttcaagaacgcggagcgaatgctgagagtgcgttctctcgacaaactggatcagggtcgactggtggatctggttaacgccagttttggtaaaaagctgagggacgattaccttgcaagtctgcgcccaaggcttcactcgatttacgtgagcgaaggatacaacgccgcagccatcctgacgatggaaccagtgctggggggaaccccataccttgataagttcgtcgtgtcctcgagcagacaagggcaagggtctggtcaaatgttgtgggaatgcttgcgaagggatctgcagacgctgttttggagaagcagagtgactaacccaatcaatccttggtacttcaagcattcagatggttcattttccaataagcaatggattttcttttggtttgggctcgccgacattagagattcgtacgaactggtcaaccacgcaaaaggtttgcccgacagctttcataagccggcatcggaccccggatcc

SEQ ID NO: 245199 - DNA, 1602 bp, Artificial Sequence
  derived and/or modified sequence
atggccactgccctgatggccgtggtgctgagggcagccgccgtggccccaagacttcgtggtcgcggtggaacgggtggcgcacggagactgtcatgtggagcacgtcggcgggctgcaagagggacttcgcctggacgccgcctgagcactgcctggagccagccccaacctccacctgaggagtacgcgggagcagatgacgtgtcgcagtccccagtagccgaagaaccttcttgggtgccatcgccaaggcctcctgtgccacacgagagcccggaacctccttcagggcgtagcctggtgcaaagagatattcaggcctttctgaaccaatgcggggcatcgcccggagaagcccgccattggttgactcaatttcaaacctgccaccattccgcagacaagccattcgcggtgatcgaagtggatgaagaggtccttaagtgtcaacagggtgtgtcgtcgcttgcctttgctcttgcgttcctccaacgtatggacatgaagcccctcgtggtgcttggtctgcctgcaccgaccgcaccttcaggatgtctttcattttgggaagcaaaagcacagcttgcgaagtcgtgcaaagtcctggtggatgccctgcggcacaacgcagcagctgcggtgcccttttttggtgggggaagcgtcctcagggcggccgaacccgcgcctcacgcctcatatggaggtattgtttccgtcgaaactgatctgctccagtggtgcctggaatcagggtccattccgattctgtgtccaatcggggaaactgcagcccgcagatccgtgctgcttgattcgcttgaagttaccgcctccctggccaaagcactccgccccaccaaaatcattttcctgaataacaccgggggcctccgtgattccagccacaaggtcctttccaacgtcaaccttcccgcggacctggatctcgtctgcaatgcagaatgggtgtccactaaggaaaggcagcaaatgcgcctgatagtggatgtgcttagcagacttccccatcattcctcggcagtcatcaccgcagcgagcacccttctgactgagctgttttcgaacaagggatcagggaccctcttcaagaatgcagaacggatgctccgggtgagatcactggacaagctggatcaaggtagattggtggatctggtgaatgcatcgttcgggaagaaactgcgggatgattacctggccagcctgcggccacgccttcactccatttacgtctctgaagggtacaatgcagcagccattcttaccatggagccagttctcggaggaaccccatacctcgataagtttgtggtgtcctcatcgagacagggtcaagggtctggccagatgctctgggaatgccttcgccgcgatctgcagactctgttctggcggtcgagagtgaccaaccccatcaatccctggtactttaaacattctgacggctcattttcgaataaacaatggatcttcttttggtttggccttgccgatattcgggactcctacgagcttgtgaatcatgccaagggactccctgattcattccataagccagcatcagacccaggcagc

SEQ ID NO: 245200 - DNA, 1602 bp, Artificial Sequence
  derived and/or modified sequence
atggctactgcactgatggcggtggtcctgcgggctgcggcagttgctccccgactgagaggaaggggcggcacagggggtgcgagacgcctgagttgcggggcccggaggagggccgcaagaggcacaagtcctggacgacgactaagcaccgcctggtctcagcctcaacctcctcctgaggagtatgcaggggctgacgatgtttcccaaagccccgtggctgaggagccaagttgggtgccgagcccacggccaccggttccccatgagtctcctgaaccaccctctggcagatcactggtgcaacgagatatccaggccttcctgaatcagtgtggagcttctcctggcgaagctcgccactggctgacacagtttcagacatgccaccattctgcagacaaaccattcgcagtaatcgaagtggacgaagaagtcctgaagtgccagcaaggagtgtcaagcttagcctttgcactcgcattcctgcagcggatggatatgaagccgcttgtcgtgctggggctgcccgctccaacggctccatccggttgcctgagtttttgggaggcaaaagctcaactggccaaatcctgtaaagttctggtcgacgccctgcgccataacgccgcggccgccgttccgttttttggtggcggctcagttttgagggcggcagagccagccccacacgcatcgtacgggggaatcgtatccgtggaaacagatctcctccaatggtgccttgagagcggctcaattcccatactatgtcctataggcgagacagccgcccgacgctccgtcctcctagactcacttgaggtgacagccagtctagcaaaggcactgaggccaaccaagatcattttcctcaacaacacagggggccttagggattccagccacaaggttttgagcaacgtcaacctccctgctgacttagaccttgtttgcaatgctgaatgggtgtccactaaggagcgccagcagatgcggctgatcgttgacgtgctttcccgcctgccacaccacagcagcgccgtgatcacggcagcctctacactgctgacagagctgttctctaacaagggaagcggcaccctatttaaaaacgcggaaaggatgttgagagtgcgatccctggacaaattggaccaggggcggctggtggaccttgttaatgcttccttcggcaaaaagctccgggacgactatctcgcttcgctccggccacgcctccacagtatttatgtatcagaaggctacaatgcggcagcgattctgaccatggagcctgtcctaggggggaccccgtacctggacaaattcgtggttagcagctccaggcagggccaaggctcagggcaaatgctgtgggagtgtctccgccgcgatcttcagacactgttttggcggagtagggtaaccaaccccataaatccgtggtattttaaacattctgatgggagcttcagtaacaagcagtggatttttttttggttcggactggctgacatcagggacagctatgagctggtcaaccacgcgaagggtctccctgattcatttcacaagcctgcgtcagatcctggcagc

SEQ ID NO: 245201 - DNA, 1602 bp, Artificial Sequence
  derived and/or modified sequence
atggcgaccgcgctgatggcggtggtgctcagggccgcggccgtcgcaccgagactgcgcggaagaggaggaaccggaggagcccggagacttagctgcggagctagacggcgcgccgccagaggaacctcgccgggacggcgcctgtcaactgcatggagccaaccccagccgccaccggaagaatacgctggagcagacgacgtttcgcagtcgccggtggcagaggaaccatcatgggtgccatccccccgcccaccggtgccgcacgaatcgcctgaaccgccgagcggcagatctctcgtgcaaagagacatccaggcgttccttaaccaatgcggagcttccccgggagaagcacggcactggctgactcagttccagacgtgccaccattctgcggacaaacctttcgccgtgatcgaagtcgacgaagaagttttgaagtgccagcaaggagtttcctcactggctttcgcactggccttcctgcaacggatggacatgaagcctcttgtggtgcttggactgccagcgccaaccgcaccttcgggatgtctgtccttttgggaggcaaaggcccaactggcgaagtcgtgtaaagtgctcgtggacgcccttcgccataacgcggccgctgcggtcccgttcttcggcgggggctcagtgttgcgggcagccgaaccggcaccgcacgcaagctacggcggaatcgtgtcggtcgaaaccgacctgctgcagtggtgcctcgagtcggggtccatcccaatcctgtgccccataggagagactgcggcccgccgctcagtcctcctcgattccctcgaggtgaccgccagcctggcgaaggcgctgcgcccgactaagatcatcttcctcaacaacaccggcggcctccgcgatagctcacataaagtgctgagcaatgtgaacctccctgccgatttggacctggtgtgtaacgcggaatgggtgtcaacgaaagaacggcagcagatgagactcatcgtcgatgtcctgtccagactcccccaccattcgtctgccgtgattactgcagcctcgaccttgctgactgaactgttctcaaacaagggctccggtactctgtttaagaacgcagaaagaatgctgagggtgagatcactggataagctggatcagggacgcctggtggacctggtgaatgcatcgttcggtaagaaacttagggatgactacctggcgagcctgcgaccgcggctccacagcatctacgtctcggagggatacaatgcggccgctatcctcactatggagccggtgctggggggcactccatatctggacaagttcgtcgtctcatcttctcgccaaggtcagggttcaggtcagatgctgtgggagtgcctgcgccgggatctccaaaccttgttctggcggagccgggtcaccaacccaatcaatccttggtacttcaaacattccgacggctcattttccaataagcagtggatcttcttctggtttggactggccgacattagagatagctacgagctggtcaaccacgccaagggactcccggacagcttccacaagccggcctccgatccggggtcg

SEQ ID NO: 245202 - DNA, 1602 bp, Artificial Sequence
  derived and/or modified sequence
atggcaacggctctgatggctgtcgtgcttagagcagcagccgtggcacctcgcctccgcggcagaggtggaaccgggggtgcacggcgcctcagctgtggggcacgtcggcgggcagcaaggggcacctcccctggacgtcggctttcgaccgcctggtcacaacctcagcctcctcctgaggaatacgcaggggctgatgatgtgtcgcaatcgcctgttgccgaagagccctcgtgggtgccttcacccagacctcccgtgccccatgaaagccccgaaccaccatcgggtcggagcttggtgcaacgagatatacaggcattccttaatcagtgtggggcctccccaggcgaggccaggcactggcttacgcaatttcaaacctgccatcattctgcggataagccatttgcagtgattgaggtggatgaagaggtgcttaaatgtcagcagggggtgtcctccctcgcatttgccctcgcatttcttcaacgcatggacatgaagccccttgtcgtcctcggtctgccggcgccaaccgcaccgtccggatgtctgtccttttgggaggccaaggcgcaacttgccaagtcctgtaaggtgctggtggacgcactgagacacaacgcagctgcggccgtgccctttttcggagggggaagcgtccttcgtgctgccgaacctgccccccatgccagctacggaggaatagtgagcgtggaaacggacctcctccaatggtgtctcgaatcgggatcgattccgattctttgtcctatcggggaaacggctgctaggcgctctgtgttgcttgattccctcgaagttactgcatcactcgctaaggcacttcgccctactaagattatctttcttaacaataccgggggactccgggattcatcgcataaagtgctgtcgaatgtgaacctcccagcagatctcgatttggtgtgcaatgcggaatgggtgtcgactaaagaaagacagcaaatgcggcttatcgtggacgtgctgtcacgacttccccatcatagcagcgcagtgattactgccgcctccacccttcttacggaactgttctccaataaaggttcaggtactcttttcaagaacgcagagaggatgctgagagtccgttctctggacaaacttgaccaaggacggttggtggatctggtgaacgcgtcatttggtaaaaagctcagagatgactaccttgcttcgctcagaccaagattgcattcgatatacgtgtccgaaggatacaatgcagccgcgattctgactatggagccggtgctcggaggtactccatacctcgacaagtttgtcgtgtcctcctcgcgacagggtcaaggatccggacaaatgctgtgggaatgccttagacgcgatcttcagaccttgttttggaggtcaagagtgaccaatcctatcaatccatggtactttaaacacagcgatggctcgttctcaaacaagcaatggatattcttttggttcggactggccgacatccgtgatagctacgagctggtgaatcatgctaaggggcttccagattcgttccacaagcctgcttccgaccccgggtct

SEQ ID NO: 245203 - DNA, 1602 bp, Artificial Sequence
  derived and/or modified sequence
atggcgacagcacttatggcggtggttctgcgggccgcggctgtcgccccacggcttcgtggtcgcggcggcaccggaggcgcccgacggctgtcttgcggggccaggagaagggctgctagaggcacctcccctggacggcgcctgagcaccgcgtggagtcagcctcagccgccccccgaagagtacgccggggccgacgacgtgtcccaaagtccagtcgctgaagaaccatcctgggttcccagtccacggcccccagtgcctcacgagtctcccgagcctccaagcgggcggtcgctcgtgcaaagagacattcaggcattcctgaatcaatgtggcgccagtcccggagaagcccgccactggcttacacagttccagacctgccatcattctgcggacaaaccctttgcagtgatcgaagtcgacgaggaggtcctgaaatgccagcaaggggtaagcagcctggcatttgccctggcgtttcttcagagaatggacatgaaaccactggtcgtcctcgggctgccggccccaacagcaccaagcggctgtctgtcattctgggaggccaaggctcagcttgcaaagagttgcaaggtactggtcgacgcactccgccacaatgccgccgcagccgtgccattctttggggggggatccgtgctcagggccgctgagcctgccccacacgcttcatacgggggaatcgtgtctgtggagacggaccttctccagtggtgcttagagtctgggtccattcccattctgtgtcctatcggagaaactgctgccagacgatctgttttgttggactccttggaggtgactgcatcattggccaaggccctaaggccgacgaagattatctttctgaataacaccggcggcctgagggacagttctcacaaagtgctttccaatgtgaacttgcccgctgatttggacttggtgtgtaacgctgaatgggtctctaccaaggagcgccagcagatgaggctcattgtggatgttctctcacggttgccccaccactcctcagcagtcatcaccgctgccagtactttgctgacggaattgtttagtaacaaaggatcgggcacactttttaaaaatgctgagaggatgctccgggttagatctcttgataaattggaccaggggaggctggtagacctcgtgaatgcctcctttggaaaaaagctaagagatgactacctggcctcattaagaccacgtctgcatagcatttacgtgagcgaggggtacaatgccgcagcaatcttgaccatggaacctgtgctggggggaacaccttatttagacaagtttgtggtaagcagttcaaggcagggccaaggttcaggtcagatgctgtgggaatgtctaaggcgagatctgcagaccttattctggcggagcagggtgaccaaccctataaatccatggtatttcaaacattcggacggatcttttagcaacaagcaatggatcttcttctggtttggattggctgacattcgcgatagttatgaactggtgaaccacgccaaggggctccctgactcttttcacaagcctgccagcgatcccggtagt

SEQ ID NO: 245204 - DNA, 1602 bp, Artificial Sequence
  derived and/or modified sequence
atggccacagctctgatggcagtggtactgagggccgcagctgtggctccccgcctgagaggcaggggaggcacaggtggtgctaggcgtcttagctgcggagcccgtcgccgtgcagcacgcggaacctcccctggacgcaggttgtctaccgcttggtctcagccccagcctcctcccgaagagtacgccggcgcagacgacgtatcccaatccccagtggcagaggaaccaagctgggtcccttctccccgtcccccagtcccccacgagtcaccagagccaccttccggtcgtagcttggtgcagcgtgacatccaagcattcctcaatcagtgtggagcctcacccggtgaagctcgccactggctgactcagtttcagacctgtcaccacagcgccgataaaccctttgctgtcattgaagttgatgaagaggtcctgaaatgccaacagggtgtgtccagcctggcattcgcactggcttttctgcaaaggatggacatgaaaccactggtcgtgttgggactccctgcccctacagcaccatctggctgcctcagtttctgggaagccaaggctcagctggccaagtcatgcaaggtactggtggatgctcttagacacaatgccgcagccgcagtgccattttttggaggtggttctgttctccgcgccgcagaacctgcccctcatgcatcctacggtggcatcgtttccgtcgaaaccgacctgctccagtggtgtctggagtctggtagcatcccaatattgtgtcccatcggcgagactgccgcacgcagaagcgtcttgctggacagcctggaggtcacagcttctctggctaaggctctgagacctactaaaatcatcttcctcaacaatacaggcggcctccgtgattctagtcacaaggttctgtctaatgtgaacctcccagccgacttggatcttgtttgtaacgctgagtgggtctccactaaggagcgccagcagatgagactgatcgtggacgttttgtcaaggttgccccaccactcttccgctgtgatcacagctgcaagcactcttctgaccgaactcttttctaataaaggctccggcacactgttcaaaaacgcagaaagaatgctgcgcgtgaggtctcttgataagctggatcagggtcgcctggtagatttggtaaacgctagctttggaaaaaaactgagggacgattaccttgcctcactgcgtccacgtctccactccatttacgtgagtgagggctacaatgctgctgcaattttgaccatggaacccgtgctcggaggtacaccttaccttgataagttcgtagtgagctcatctcgccagggacaaggatctggtcagatgctctgggaatgtttgcgcagagacttgcagactttgttctggagatccagagtaacaaaccccatcaatccctggtacttcaagcacagtgacggttccttttcaaacaagcagtggatattcttctggttcggactcgcagacataagagacagttatgagctcgttaaccacgcaaagggtctgcctgactcctttcacaagcctgcttccgatcctggctcc

SEQ ID NO: 245205 - DNA, 1602 bp, Artificial Sequence
  derived and/or modified sequence
atggccacagcactaatggccgttgtcctaagggcagctgctgttgcccctcgcttacgcggtaggggcgggacaggtggtgcccgaaggttgtcctgcggcgcgcgtcgccgtgctgcacggggaacctcccccggacgcaggttgtcaaccgcttggtcccaacctcagcctccccctgaagagtacgccggcgctgacgatgtctcgcagtctcccgtggctgaggaacccagctgggtgccgagcccaagacctcccgtgccccatgagagccccgaaccaccaagtggcaggagccttgttcagagggatattcaggcctttctcaaccaatgcggcgcctcgccaggtgaggcaagacactggctcacgcagttccaaacctgtcatcacagcgccgataagccgtttgccgtgatcgaagtcgatgaagaggtgctgaaatgtcagcagggagtgagctctctggcatttgctttagcgtttcttcagcgaatggatatgaaacccctcgttgttctgggactgccagccccaacagcaccttccggctgcctgtcattttgggaagctaaagcccaactggcgaagtcttgcaaagtattggtagatgctctgaggcataacgccgctgcagcagtcccttttttcggaggaggaagcgtgctgagggccgcggaaccggcgccacacgcaagctatggcggtatagtgagtgtcgagacagatctgttgcagtggtgcctggaaagcgggtccatcccaatcctgtgccccataggtgagaccgcagcgcgtagatctgtactgctggactctttagaagtcaccgcgtcactggccaaagctctcagacctaccaagataatattcttgaataatactggtggtctgagagatagcagtcacaaagtcctcagcaacgtaaacctcccggctgacctggaccttgtgtgtaatgccgaatgggtgtcaacaaaggaaaggcagcagatgaggctgattgttgatgtgttgagtagacttccgcatcacagctccgccgtgattacagctgccagtacacttctgaccgagctgttctctaacaaggggtctggcactctgttcaagaatgccgaaagaatgttgcgcgtgcgttccctcgacaaactggatcaagggagactggtagatctggtgaatgctagctttggaaagaaattacgggacgactacctggcaagtctccggcctaggttacactcgatttatgtttcggaggggtataacgccgccgccatcctgaccatggagccagtcctcggaggaacgccctaccttgataagtttgtggtgagcagctctcgacagggccagggctccggccagatgttgtgggagtgcctcaggcgggatctacagaccctcttttggagatcaagggttacgaatcctatcaatccttggtattttaaacacagtgacggatcctttagtaataaacaatggatctttttttggttcggactagccgacatccgagatagctacgaactcgttaatcacgccaaagggctgcccgacagctttcacaagcccgcctcggatcccgggtcc

SEQ ID NO: 245206 - DNA, 1602 bp, Artificial Sequence
  derived and/or modified sequence
atggccaccgcacttatggcggtcgtgttgcgagccgcagccgtcgcaccgagactccgaggccggggtggcaccggaggtgcgaggaggctcagctgtggagctagaagaagggctgccagaggcacctcgccgggtagacgcctctctaccgcttggtcgcagccacagccgccgcccgaggagtacgccggagcggacgatgtgtcacaatcgccagtggcagaagaaccttcgtgggtcccttccccaaggccgccggtgccgcatgaatcgcctgaaccacccagcggacggagcctggtccaacgggacatccaagcgtttctgaaccaatgcggggcctcaccaggagaggccagacattggttgacccagttccaaacttgccaccactcagccgacaagcctttcgcggtgattgaagtggatgaagaggtgttgaaatgccaacagggggtttccagcctcgcattcgctctggcctttctgcaaaggatggatatgaaaccacttgtggtgctcggactgccagctcccactgccccgtcagggtgtctgagcttttgggaagccaaggcacaactggctaaatcctgcaaggtcctcgttgacgctctgagacacaacgcggcagccgccgtccccttctttggaggaggttcagtgcttcgggcagcggaaccagccccgcacgcctcctacggtggaatagtgtcagtcgagactgacctgctgcagtggtgcctggaatccggatctatcccaatcctctgtccgattggggaaactgccgcacggcggtcagtccttctggactccttggaggtgactgcttctctggcaaaggcgctcagaccgactaagatcatttttctgaacaacacgggcggacttcgcgactcatcccacaaggtcctgagcaatgtgaatctccctgccgacctcgatctggtctgtaacgcggagtgggtgagcacgaaggaacggcaacaaatgagactgattgtggacgtgctgtccagactgcctcatcacagttcagccgtgatcaccgccgcgtccaccctgcttaccgagctcttctcgaacaagggtagcggcacgctgttcaagaatgccgaacggatgctgagggtgcgctccctggataagctggaccagggaaggctggtggatctggtaaatgcgtcgtttggaaagaagctcagagacgactacctggcgtcactgcggccacgcctgcactcgatctacgtgtcagaggggtacaatgctgcagccatccttaccatggagccggtcctgggcgggaccccctacctggacaaattcgtcgtgtctagctcccggcagggccaggggtcaggccagatgctctgggagtgtctgcggcgggatctccagactctgttctggagatcgcgggtgaccaatccgatcaacccgtggtactttaagcactccgatggatcgttctccaacaagcaatggattttcttttggttcggattggcggatatcagggacagctacgaactcgtgaatcacgctaagggactgccagactcgttccacaagccagcgtcggatccgggttcc

SEQ ID NO: 245207 - DNA, 1602 bp, Artificial Sequence
  derived and/or modified sequence
atggcgaccgccctgatggccgtggtgctgagggctgcagccgtcgcaccacggctgcggggacggggtggcacaggaggtgccagaaggctctcttgcggggccaggcgaagggccgccagaggcaccagcccgggtcgtcgtctgagtaccgcctggtcccagccgcagccgccacccgaagaatatgcaggggcggacgacgtgagccagagcccggtggccgaggagccctcctgggtcccttcacctcgccccccagtcccgcatgagagccctgagcctccttcgggaagatcactcgtgcagcgggacatacaggccttcttgaatcaatgtggggcatcgcctggtgaagcacgacactggctcacacagttccaaacctgtcaccatagcgctgataagcccttcgcggtgatcgaggtggacgaagaagtcctgaagtgccagcagggcgtgtcaagtctagcattcgctttagcttttttacagcggatggacatgaagccgctggtggtgctcggtctgcccgcaccaaccgccccctcggggtgcctcagcttctgggaagctaaggcacaactcgccaaatcttgtaaggtcctggtggatgccctgcgtcacaatgccgccgctgcggtgcctttcttcggcggcgggtccgtcttaagggccgctgagcctgctccacatgctagctatggtggcattgtttccgtcgagactgatcttctccagtggtgtttggagagcggctccattcccatactgtgccctattggtgagaccgctgcgcggcgctccgtgctcctcgactcattggaggtcactgccagtctagcaaaagccctgcggcccaccaaaatcattttcctgaacaataccggcggcttaagagatagctcgcacaaagtcttgtccaacgtcaacctgcctgcagacctggacctggtctgtaacgctgagtgggtttccacaaaggaacgccagcagatgcgcctgatcgtcgacgtactgagccggctgccacaccactcatctgctgtcatcaccgcagcttcgacgcttctaaccgagctcttctctaacaagggaagtggtacgctttttaaaaacgccgaaaggatgttgagagtgaggtcgctagataagctagatcagggacggttggtggatttagtcaacgcgtccttcggtaagaaacttcgcgatgactaccttgcttcgcttagacccaggctgcattcgatttacgtgagcgaaggctataatgcggccgctatcctgaccatggaacccgtcctgggtgggacaccctacctcgacaaattcgtcgtctcatctagccggcagggacagggaagcggacagatgctgtgggaatgcctgcggcgggacctccagacgttgttctggaggtcgcgggtcactaatccaattaatccctggtattttaaacattccgatggctcattcagtaataaacaatggattttcttttggttcggtctcgctgatatccgtgatagctatgagcttgtgaatcacgctaaggggctgccggattctttccacaaaccggctagcgaccctggctca

SEQ ID NO: 245208 - DNA, 1602 bp, Artificial Sequence
  derived and/or modified sequence
atggcgaccgcactgatggcggtcgtgctccgggctgctgccgtggccccgaggcttcggggccggggaggcactggaggagcgcgccgcctgagctgtggtgccaggcgccgcgcagcccgcggaacgtcgccaggccggcggctctcaactgcatggtcgcaaccgcagccaccaccagaagaatacgcgggagccgatgacgtgtcccagtccccggtcgccgaagaaccaagctgggtcccctcacccagacctccggtgccgcacgagagcccggagccgccatccggaagatctttggtccagagagacatccaagcgttccttaaccaatgcggagcatcccctggagaggcacgccactggttgactcagttccaaacctgccaccactccgcagacaaaccattcgccgttatcgaagtggacgaggaggtgctcaagtgccagcagggcgtgtcctcactcgccttcgccctggcttttctccagagaatggacatgaagccgctggtggtgctgggcttgcccgcccccactgcaccgtccggttgcctgtcgttttgggaagccaaagcacagctggcaaaatcctgcaaggtgcttgtggatgctctgcgccacaacgccgcggcagcagtgccgttttttgggggtggctccgtcctgcgcgcagccgaacctgcgccgcacgcctcttacgggggaatcgtgtccgtggaaaccgatctgttgcaatggtgcctggagtcggggagcatccctatcctgtgtcccatcggagagactgcagcgcgccgctcagtcctcctggactcgctcgaggtgaccgcctcgctggccaaggccctccggcccacgaagatcatattcctgaacaacactggaggactgcgcgactcatcgcacaaggtactcagcaatgtgaatctccccgcagacctggatctggtttgcaatgcggagtgggtgtcaactaaggagaggcaacaaatgcggctcatagtggacgttctgagccggttgccacaccattcgagcgccgtgatcaccgcagctagcaccctgcttactgaactgttttcgaacaaaggatcgggaaccttgttcaagaatgcggagcgcatgctccgcgtgagaagccttgataagttggaccagggacggctcgtggacctggtcaacgcctcgttcgggaagaagctgcgtgacgactaccttgcctcgttgcgcccaaggctccattcaatctacgtgtcggagggttacaacgccgcagcaatccttactatggaaccggtgctgggtggcaccccgtacctggacaaattcgtcgtgtcatcatcccgtcagggccaggggtccggacagatgctctgggagtgcctgcgccgggacctccagacgctgttctggcggtcccgcgtcactaatccaatcaacccatggtactttaagcattcggatggctcgtttagcaacaagcaatggatcttcttctggttcggcctggcggatatccgggatagctacgaactggtgaaccatgcaaagggcctgccagatagcttccataaaccggcgagcgaccctggatca

SEQ ID NO: 245209 - DNA, 1602 bp, Artificial Sequence
  derived and/or modified sequence
atggcaaccgctctgatggcggtggtgctgcgcgccgccgcagtggccccaaggctgcgcgggagaggcggaactggtggagcgcggagactttcctgtggtgcgaggcggcgggccgcccggggaacttcgccaggtcggcggctgtccactgcgtggagccaacctcagcctccgcctgaggagtacgcaggagctgacgacgtgtcccagagccctgtggcagaggagccgtcgtgggtcccatcccccagacccccggtcccacacgaaagcccggagcctccctcgggacgcagcctggtgcaaagggatatccaggcattccttaatcagtgcggcgctagcccgggagaagctcggcactggctgacccagttccagacttgtcatcattccgccgacaaaccgttcgccgtgattgaagtggacgaggaagtcctgaagtgccagcagggagtgtcaagcctggcgttcgccctggctttcctgcagcgcatggacatgaaaccgcttgtcgtcctcggcctgccagccccgaccgccccatcggggtgtctctcattctgggaagcaaaggcgcaactggccaaatcgtgcaaggtgctggtggacgctctgcgccacaatgcggccgcagcggtcccattctttggcggcggttctgtactgcgcgccgcggagccggccccccacgctagctatggaggaatcgtgagcgtggagactgacttgcttcagtggtgtctggaatccggcagcatcccgattctctgccctatcggagaaaccgcggctagacgcagcgtgctgctggactcgttggaagtgaccgcctcgttggctaaggcactccgcccgactaagatcatcttcctcaacaacactggaggactgcgcgattcatcacataaagtgttgtcaaatgtgaacctcccagcagacctggatctggtctgtaatgcagaatgggtttccaccaaggaacggcaacagatgcgcctcatcgtggacgtgctgtcccgccttccacatcactcctccgcagtgatcacggccgcgtccactctgcttactgagctcttctcgaacaagggatcaggtacgctgttcaaaaacgcagagcggatgttgcgagtgcggtcactggacaagctcgatcagggaagattggtcgacctcgtgaacgcctctttcgggaaaaagctgagagacgattacctcgcctccctgcggccgcggctgcattccatttacgtctccgaaggctacaatgccgccgcgatccttaccatggagcccgtgctcggaggaaccccctatctcgataaattcgtggtcagctcctcccggcaggggcagggatccggtcaaatgctctgggaatgccttcgccgggacctccagacgctgttttggcgcagcagagtgacgaaccccattaacccatggtacttcaaacattcagacggatcgttttcgaacaaacaatggatcttcttctggttcggactggccgacatacgcgattcgtacgagttggtgaaccacgctaagggactccctgattcgtttcacaagccggcctcagacccaggctcc

SEQ ID NO: 245210 - DNA, 1602 bp, Artificial Sequence
  derived and/or modified sequence
atggccactgcactgatggccgtggtgctgcgtgcagcagcagtggcgccaagactgaggggccgtgggggaactggtggagcccggagactttcgtgtggtgccagacgtcgagctgcgcgcggtacctctccagggcggcgcctgtcaactgcgtggtcgcaaccccagcctcctccggaagaatacgccggagcagatgatgtatcccaatccccggtggcagaggagccatcatgggtcccgtcaccgcgcccacctgtgccacatgaaagcccagagccaccatccggaagatcacttgtccaacgcgatattcaagcatttctgaaccagtgtggtgcatcccccggggaagcgagacattggcttactcaatttcaaacctgccatcatagcgctgataaaccttttgcagtcattgaagtggacgaagaggtgcttaagtgtcaacagggcgtgtcgagcctggcttttgcactggcatttctgcaacggatggacatgaaacctctggtggtgctgggactcccagcacctaccgccccaagcggctgcctctcattttgggaagccaaggcgcagcttgcaaagtcctgcaaagtgctggtggatgcattgcggcacaacgccgcagctgctgtcccgtttttcggcggggggtcggtcctgcgtgcagctgaacctgctcctcacgcatcgtacggtggaatcgtgtcagtggaaaccgacttgctgcagtggtgtttggagtccgggtcaatccccatcttgtgtcctatcggcgaaactgcagctaggagatccgtgcttctcgactcgctcgaagtgaccgcgtcactggcaaaggcacttagaccgactaaaatcatttttctcaataacactggagggctgagggatagctcccacaaggtcctgagcaatgtcaaccttcctgccgatcttgaccttgtatgcaacgctgaatgggtgagcaccaaggagagacaacaaatgcgcctgatcgtcgacgtgctgtcgaggcttccacatcattcgagcgctgtcattacggccgcctcgactctgctcactgaactgttttcaaataaggggagcggcaccctgtttaagaacgccgaaagaatgctgcgagttcgatcccttgataaacttgatcaaggacgcctggtcgatctggtcaacgcgtcgtttggaaagaaactcagagatgattacctggcatcgttgcgtccgcggctgcactcaatctatgtgtccgaggggtacaatgcagccgcaattttgaccatggaacccgtgcttggcggaacgccatacctggacaagttcgtggtgtcgtctagcagacaaggacaggggtcaggccagatgctttgggagtgtcttaggagagatcttcaaaccctgttttggaggtcgcgagtgaccaaccctatcaatccttggtacttcaagcattcagatggctcgttctcgaataagcagtggattttcttctggtttggtcttgccgacataagggatagctacgaacttgttaaccatgcaaagggcctgccggactcctttcacaaacctgctagcgaccccggctcg

SEQ ID NO: 245211 - DNA, 1602 bp, Artificial Sequence
  derived and/or modified sequence
atggcaacggctctgatggcggtcgtcctgcgcgctgcggcggtggcaccccgtctgaggggtagaggcggcacgggcggcgcccggcggctgtcgtgtggtgccaggcgacgggcggcaagggggacatctcccgggaggcggctgtcgaccgcctggagccagccgcagccacctccagaggaatacgccggtgctgacgacgtctcacaaagtcccgtggccgaagagccatcttgggttccttcccctcggcccccggttcctcatgaaagtccggagcccccttctggccgttccctggttcagagagacatacaagcattcctgaatcagtgcggcgcgagccctggggaggctcggcactggttaacccagtttcagacatgtcatcattccgcggataagccttttgcagtgatcgaagtggatgaggaggtgctgaaatgccagcagggcgtttcttcgttggccttcgcactcgcgtttctccaaagaatggacatgaaaccacttgtggtccttggactgccggcaccaactgccccaagcggttgccttagtttttgggaggccaaagcacagttggccaagtcatgtaaagtccttgtcgacgccttaagacacaatgcagctgccgctgttcccttctttggtgggggctccgttctccgcgccgcagaacctgcccctcatgcgagttatggaggaatcgtcagcgtggaaacagacctgcttcagtggtgtcttgaaagtgggtctattcctatactttgtccaataggggagactgctgccagaagatcagtgcttttggacagcctggaggtgactgcctctttggcgaaagcccttaggcctaccaagattatattcctgaacaatacgggtggccttcgggacagctcccacaaggtcctgtcaaatgtcaacctcccagccgatctcgatctggtatgcaacgcagagtgggtgagtacaaaggagaggcagcagatgaggctgatagtagacgttctcagccggttgccacaccattcatcagcggttatcacggcagcaagcactctgctgaccgagttattttctaacaaaggaagcgggacactgttcaaaaatgcagaaaggatgctgagggtgcggtctttggacaagttagatcaagggcggctggtggatttggtgaatgcttcatttgggaaaaagctgagggatgattacctggcaagtttgcgcccccgactacattccatatacgtgtctgaggggtataacgccgcggcaatactgacaatggaaccggtcctgggggggaccccctatctagacaaattcgtcgtcagttcttcaaggcaggggcagggatcaggccagatgctctgggagtgtctccggagggatctccaaactctcttttggcgatctagagttacgaatccaatcaatccatggtactttaagcattctgatggcagcttctcgaacaaacagtggatattcttttggtttggcttggcagacatccgggattcgtatgaacttgtgaatcacgctaagggactgcccgacagtttccataaaccggcctctgatcccgggtca

SEQ ID NO: 245212 - DNA, 1602 bp, Artificial Sequence
  derived and/or modified sequence
atggccactgctcttatggccgtggtcctccgggccgccgcagtggctccgcggcttaggggtagaggaggcaccggaggagcaaggaggctcagctgtggggcgcgccgaagggcagcacggggtacttcgcccgggagacggttgtcgactgcctggagccagccccaacctccacccgaggagtacgcaggagcagatgacgtgtctcaaagcccagttgcggaagaaccatcctgggtcccatcccctagacctcctgtcccacatgaaagccctgagccgccctccggacgatcccttgtgcaacgcgacattcaggcatttctgaaccaatgcggtgcatccccgggagaggcacggcattggcttactcaatttcaaacctgtcaccactcggcggataagccttttgcagtgattgaggtggacgaggaggtgcttaagtgccaacagggtgtctcatccctggcttttgcgctcgcattcctgcagcgtatggatatgaaaccattggtggtgttgggacttccagcccccacggcgccatccgggtgtctttccttttgggaagccaaggcgcagctggcgaaatcatgcaaggtgctggtggacgcactgcgccacaacgccgccgcagccgtgcccttttttggaggcggatcggtgctgcgcgcggcagaaccagctccacacgcctcgtacgggggaattgtgtcagtggagactgatctgcttcagtggtgtcttgaatccggatcgatcccaattctctgccctatcggggaaactgctgcaaggagatccgtccttcttgattcgcttgaagtgaccgcatccctcgcaaaggctctccgtcccactaagattatcttcctcaacaacaccggaggcctgagagactctagccataaggtgctgtcaaacgtgaatctccctgcagacctggaccttgtgtgtaatgcagaatgggtgtcaaccaaggaacgacaacagatgagacttattgtcgacgtgctctccaggctgccccatcattcctcggcagtgattactgcagcatcaactcttctcaccgagctcttctcaaataagggatctggcactctgtttaagaatgcagaacgcatgctgagagtcaggtcgcttgataaactggatcagggaagattggtggacctggtgaacgcttctttcggaaaaaagctgagggatgactacctggcatcattgaggccccgcctccatagcatctatgtctcagagggttacaacgcagcagctatactgaccatggagcctgtgctcggtggcactccatacctggataagttcgtggtgtccagcagccggcaaggtcaaggttcgggacaaatgctctgggaatgtttgcgccgagatctgcagacgttgttctggcgctcccgggtgacgaaccctattaacccttggtacttcaagcacagcgatggatcgttttcaaacaagcaatggatattcttctggtttggcctcgctgatatccgcgatagctacgagttggtgaaccatgcaaagggcctcccagactccttccataagccggctagcgatcccggaagt

SEQ ID NO: 245213 - DNA, 1602 bp, Artificial Sequence
  derived and/or modified sequence
atggctactgccctgatggccgtggtcttaagggcagcagccgtggcccctaggctacggggccgagggggcacaggaggcgcacgccggctaagttgcggcgcccgaagacgcgcagctagggggacttctcctggccggaggctatccacagcctggtcccagccacagccgccaccggaagaatacgccggagcggatgatgtgagccaaagtccagtggctgaagagccaagttgggtgcccagcccccgtccgcccgtgccccacgaaagccctgagcccccttctgggcgatctctggtgcagcgagacatccaagcttttctgaaccagtgcggggcatctcccggagaggcacggcactggctcacacagttccagacttgccatcactccgccgacaagccatttgctgttatagaggtggacgaggaggtcctaaaatgtcagcaaggagtgtcttctctcgcatttgcgttagcattcctgcagaggatggatatgaagcccctcgtcgtactgggactgcccgcacccactgccccctctgggtgtctctctttttgggaagcgaaggcccaattggcaaagagctgcaaggttcttgtggacgccttgcggcacaatgccgccgctgccgtcccgttcttcggcggaggaagtgtgctgcgtgccgcagaacccgccccccacgcctcatatgggggtatagtgtcagtggagactgatctcttgcagtggtgtctagaatctggttcaatcccaatcttatgcccgattggggagactgctgccagaaggtcagtactgctagacagcctggaggtgactgcctctctcgcgaaggcgctgaggccgaccaaaatcatcttcctaaacaataccgggggccttcgcgacagttctcacaaagttctctccaacgtaaacttgccggccgatttagatctcgtgtgcaacgctgaatgggtgtcaaccaaagagcgccagcaaatgcgcctgattgtcgatgtactctcaagactgccccatcactcatctgctgtaattaccgcggcgtctactctgctgacggagcttttctctaataaaggctcaggcacactatttaagaacgccgagcgaatgctcagggttcgaagcctggacaagttggatcaaggtcgtcttgtggatttagtgaacgcttccttcggcaagaagttgcgggacgactatcttgcctcacttagaccccggctgcattccatttatgtatctgaagggtacaacgccgctgcaatcctgactatggaacccgtgctgggaggcacaccttacctagataagttcgtggtgtcaagtagccggcagggccaagggtctggccagatgctgtgggaatgcctgcggcgcgatctgcagacgttgttttggcgctcccgtgtgacaaaccctataaacccctggtacttcaagcatagtgacggctcctttagtaacaagcagtggatattcttttggtttggccttgccgatattagggactcttacgagctggtgaatcacgctaaagggttaccagattctttccataagcctgcctccgatcccgggtct

SEQ ID NO: 245214 - DNA, 1602 bp, Artificial Sequence
  derived and/or modified sequence
atggccactgccctcatggcggtggtgctgcgtgcggcggcagtcgcccctcgcttgcggggaagaggaggaactgggggcgctaggagactgtcgtgcggggcacggcgccgggcagctcgaggtacttcgccaggaaggagactctccaccgcctggtcccagcctcagcccccgccggaagagtacgctggagccgacgacgtttcacaatcacctgttgcagaggagccatcgtgggttccatcgccgcgcccgccggtgccccatgaatcgccggaaccgccaagcggacgctccctcgtgcaacgcgacattcaggcgttccttaaccaatgcggagcctccccgggtgaagcacggcattggctcactcaattccagacttgtcaccactcggcggataagccattcgcagtgatcgaggtggacgaggaggtgctgaagtgccagcaaggcgtgtcgtccctggccttcgcgctggcattcctgcaacgcatggatatgaagccactcgtcgtgcttggactgccggctccaacggcgccttcgggctgtttgtcgttctgggaggctaaggcacagcttgccaagtcttgcaaagtgctcgtggatgccttgagacacaacgctgccgcagctgtgcctttcttcggcggcggaagcgtgctgagagctgccgaaccggcaccgcacgcttcgtacggtggaatcgtgtccgtggaaaccgacctgctgcaatggtgcctcgagagcggaagcatcccgatcctctgcccgatcggtgaaaccgcggcgcgtcgctcagtgttgcttgacagcctcgaagttaccgcctctttggcgaaggcgctgaggccgaccaaaatcatttttctgaacaacaccgggggactccgcgactctagccataaggtcttgtccaatgtgaatctccccgccgatctggacctggtgtgcaacgcggaatgggtcagcaccaaggaacgacagcagatgcggctgattgtggacgtgctttcgcgcttgcctcaccactccagcgcagtgattactgctgcctccactctccttaccgaacttttctcaaataaggggtcggggacgctgtttaagaacgcggagcgcatgctccgtgtgaggtcacttgataagctggatcagggcagattggtggatctggtcaacgcgtcgttcggaaagaaactgcgggatgactacttggcgagcctgcgcccccggctccattctatctacgtttcagaaggatacaatgccgccgccatcctgactatggaaccagtcctgggcggcacgccttacctcgacaaatttgtggtttcctcatcccgacaaggccagggctccggacagatgctttgggagtgtctgcggcgggacctccagaccctgttctggcgcagcagggtcacgaaccctatcaacccgtggtactttaaacactccgatggatcattctcgaataagcagtggatcttcttttggtttggactcgctgacatccgagactcatatgagctcgtcaatcatgccaaagggctgcccgactcattccacaagcccgcttccgacccaggttca

SEQ ID NO: 245215 - DNA, 1602 bp, Artificial Sequence
  derived and/or modified sequence
atggcgactgctctcatggcagtcgtcctgagagccgccgctgtggcaccacgactgagagggcgaggtggcacagggggagctagaaggctgtcttgtggtgccaggcgtagggccgccaggggcacaagccctgggagacggctgtccaccgcatggagtcagccccaaccccctccagaagaatacgccggcgccgatgatgtcagccaaagtcccgtggctgaggaacccagctgggtcccgtctccaaggcctccagttccccatgaatctcccgaaccaccatccggaagaagtcttgtgcagcgtgacattcaggcgtttctcaaccaatgcggagctagcccgggtgaggcaaggcactggctgacacagtttcagacctgtcaccatagcgctgataaacccttcgccgttatcgaggttgacgaagaagtgttaaagtgtcagcaaggtgtctcgtcacttgccttcgccctagcatttctacaacggatggacatgaagccgctcgtggtcttgggactgcccgccccaacagcccctagcggttgtctttctttttgggaggcgaaggcccagctggctaagtcttgtaaagtgcttgtcgatgcattgcgccataatgctgccgccgctgtccccttcttcggaggaggcagcgtcctacgtgccgcggagcctgcgccacacgcatcctacggagggatcgtctcagtcgaaaccgatctgctgcagtggtgtttagaatcgggatcaatacctatcctgtgtccaatcggagaaaccgccgcgaggcgctccgtacttctggattccctggaggtgacagcttctctcgccaaagctctgagaccaacaaagatcattttcctaaacaatacagggggactgagggattcaagccataaagtgctgtccaatgtgaatttgcctgccgacttggacttggtgtgtaacgcagaatgggtcagtacaaaggagaggcagcagatgagactgatcgtcgatgtcttatctagattgccccaccactcctcggctgtgatcacagcagcttccaccctgctaacagaactgttctccaataaaggctcaggcaccctgtttaaaaacgctgaaaggatgctgcgagttcgtagcctggataagctcgatcagggtcgattagtagacttggttaacgcgagctttgggaaaaaattgcgagatgattatctagcttctctgaggccacggttgcacagcatctacgtgtctgagggatataatgctgctgctatcctgacaatggagccagttctgggcggtaccccttacctcgacaagtttgtggtttctagttcgagacagggtcagggttctgggcagatgctatgggaatgccttagacgcgacttgcagacgctcttctggaggagcagagtcaccaaccctattaacccctggtattttaaacactctgacggaagcttttcgaacaagcagtggatcttcttctggtttggcttggccgacatacgggactcgtacgagttggtgaaccacgccaaaggccttcctgattcctttcacaagcccgcttctgatcccggctca

SEQ ID NO: 245216 - DNA, 1602 bp, Artificial Sequence
  derived and/or modified sequence
atggctacggccctgatggccgtggtgttgcgcgcggccgccgttgcaccaagactgcgcggccggggcggcacgggaggtgcgcggcgcctgtcgtgtggcgcccggcgcagggcagctcgcggaacctccccgggtcgcagactgtcaaccgcatggagccagccgcagcctcctccggaagaatacgccggagccgacgacgtgagccagagcccggtggccgaagaaccaagctgggtgccttccccacggccgcctgtgccgcacgaatcaccagagcctccctcaggacggtccctggtgcagcgcgatatccaggcgttcctcaatcagtgcggagcgagcccgggagaggcgcgccattggctcactcagttccagacctgccaccattcggcagacaagccgttcgccgttatcgaggtggatgaagaagtgctgaaatgccaacaaggcgtctcctcgctcgcgttcgccctggcgtttctgcaaagaatggatatgaagccgctggtcgtcctgggacttcccgcaccaactgccccgtccggatgcctgtccttctgggaggcaaaggcacaactcgcgaagagctgcaaggtcctggtcgacgctctcagacacaatgccgccgccgcagtcccgttttttggcggagggtcggtcctgcgagcggctgagccagcccctcacgcctcatacgggggaattgtgtcggtcgaaactgacctgctccagtggtgcctggagagcgggtccatcccaatcctgtgtccgatcggcgaaaccgccgcccgtagaagcgttctgctggattcactcgaagtgactgcctcattggctaaggcgctgcgcccaactaagatcatcttcctgaacaacaccggaggcctgcgcgattcgtcacacaaagtgttgtcgaatgtgaatctgcccgcggacctcgacctggtgtgcaacgcagagtgggtgtcaactaaagaaaggcaacaaatgaggctgatcgtggacgtcctttcgcggctcccacaccacagctcagctgtcatcactgcggccagtacgttgctcaccgagctcttttccaataagggtagcggtaccctgtttaagaacgctgagcgaatgctccgcgtgcgctcgttggacaagctggatcaaggacggctcgtcgaccttgtgaacgcgtcgttcggtaaaaagctccgggacgattacttggcctcgctgcggccgagacttcattccatctacgtgtcggaggggtacaacgctgcagccattctgactatggaacccgtgctcggaggaaccccgtatttggacaaattcgtcgtgtctagctcccgccagggacagggatccgggcagatgctgtgggaatgtctccggcgggatcttcaaaccctgttctggagatcgagagtgaccaatcccattaacccgtggtacttcaagcattccgacggatctttctcgaacaagcagtggatctttttctggttcgggcttgctgacatcagggattcctacgagctggtgaaccacgcaaagggactcccggattccttccataaacctgcttcggacccaggcagc

SEQ ID NO: 245217 - DNA, 1602 bp, Artificial Sequence
  derived and/or modified sequence
atggctactgctctaatggcggtagtgctgagggctgctgctgttgcaccgcgactgcggggacgaggcggaaccggcggcgcaaggagattgagttgtggagcccgaaggcgcgccgcgcgtgggaccagccccggccggcggctgtcaacagcttggtcccagccgcaaccacctccggaagagtacgctggagctgatgatgtcagccagtctcccgttgccgaagagccttcttgggttccgagtcctcgcccacccgtgcctcatgagtcccccgaacccccttctggaagaagtttggtacagcgcgacatccaagccttcctaaaccaatgtggggccagtccaggcgaggctcgacattggctcacccagttccagacgtgtcaccactctgccgataagccctttgccgttatcgaggttgacgaggaagtcctcaagtgccagcagggtgtgagcagtctggctttcgccttggccttcttgcagcggatggacatgaagcccctcgtggtgctgggattgcccgcccccacggcaccaagcgggtgcctgagtttttgggaggccaaggcccagctggctaaatcgtgtaaggtactcgtggacgcactacggcacaacgctgcagccgcagtgccattcttcgggggcgggtctgtgttgcgggctgctgagccagcaccacacgcaagctacggaggaattgtctctgtggagactgacctgctgcagtggtgcctagaatctggaagcatcccaatcttgtgcccaattggagaaaccgccgctcgacggtctgtgctcttagactctctggaggttacagcaagcttggctaaggcgctgcgacctaccaagatcatcttcctcaacaacactggcggcttgcgggactctagtcacaaagtgctgtcaaacgtgaatttgcccgcagacctcgacttggtctgcaatgccgaatgggtgagtacaaaagagagacaacagatgcggctgatagtggatgtgctgagccgattgccccaccactcttcagccgttatcaccgccgcctctactcttcttacggaactcttttctaataaaggcagcggcaccctcttcaagaatgctgagagaatgctcagagtgaggagtctggataagctagaccagggaaggttagtagacttggttaacgcttcgttcgggaaaaagctgagagatgattacctggccagcctcaggccccgactgcatagcatttatgtttccgaaggctacaatgcagctgcgatactgacaatggaaccagtgcttggagggacaccctatctggacaagttcgttgtcagtagctcacgacagggacagggctccggtcagatgctgtgggagtgcctacggagagacctccagaccctgttctggcgctccagggttacgaaccctatcaacccttggtacttcaaacacagcgatggtagttttagtaacaagcagtggatctttttctggtttggcctcgcagacattagggactcttacgagctcgtgaatcatgctaaaggtcttcccgattccttccacaagccagcctccgatcccggtagt

SEQ ID NO: 245218 - DNA, 1602 bp, Artificial Sequence
  derived and/or modified sequence
atggcgactgctttaatggctgtggtcctgagggcagctgccgttgcacctaggttgagaggaagaggtggcactggaggtgcaagaaggctcagctgtggagcgagaagacgtgctgcgaggggtacttctccaggccggaggttgtctaccgcgtggtcacagcctcagccccctccagaggaatacgcaggggctgatgacgtctcacagagccccgtggccgaagaaccctcatgggtgcccagtcctcggccccccgttccacacgagagtcccgagccgccatcaggacggtcgctagttcagcgcgacatccaggctttcctgaatcagtgcggcgcatcccctggggaagccaggcactggctgactcaattccagacatgtcaccatagtgcagacaagccattcgccgtcatcgaggttgatgaggaagtgttgaagtgtcagcagggagtcagctcactggctttcgcccttgccttcttgcagcgcatggacatgaaaccactggttgtcttgggcctgcccgctccgactgcccccagtggatgcctttccttttgggaggcaaaggcacagctggctaaatcctgcaaggtcctcgtggacgccttgaggcacaatgccgcagccgccgtgcccttcttcggcggaggctccgtgctaagagccgccgagccagcccctcatgctagttatggcggtatagtgtccgtcgaaacagatctgttacagtggtgtttagagtccggtagtattcctatactttgcccaatcggcgaaaccgccgctaggagatcggtcttacttgactccctggaagttactgcctccttggccaaagcccttaggcccaccaagataatcttcctgaacaatacgggaggcttaagggatagcagccataaagtgctgtcaaacgtgaacctgcccgctgacctggacctagtgtgcaatgcagaatgggtaagcacaaaagagaggcaacagatgcgccttattgtggatgtactttctcggcttccacaccattccagtgccgtcattaccgcggcctctacccttctgacagagttgttctctaataagggaagcggtaccctcttcaaaaatgcagagcggatgttaagagttagaagtctggacaaattggaccaaggccgactggtcgatctagtcaacgcttcatttgggaaaaaactccgagacgattatcttgcatccctgcgacctagactacactcgatttacgtgtcagaaggatataatgcagccgcaattctgacgatggagccagtgctcgggggtaccccctacctggacaagtttgtcgtctcttcctcccgccagggccaaggcagtggccagatgctctgggagtgtctcagaagggatcttcaaaccttattttggcgaagcagggtgactaaccctatcaacccatggtatttcaaacacagcgatgggtccttctccaacaaacaatggatcttcttttggttcggactggctgacattagagactcatacgaactggtgaaccatgctaagggccttcctgatagcttccacaagcctgcaagtgatccaggctca

SEQ ID NO: 245219 - DNA, 1602 bp, Artificial Sequence
  derived and/or modified sequence
atggcgacagcattgatggcagtggttctgcgcgctgctgccgttgctccaaggctgcgtggaagaggcggtacgggcggtgcgcggaggctttcttgcggagcccggcgaagagcggcacggggcacctcgccagggcgacgactcagtaccgcatggagtcagcctcagccccctcccgaagaatacgccggagcagacgatgtttcgcagtcacccgtggctgaagaaccatcatgggtgccgagtccccgtcccccagttccacacgagtctccagagccaccaagcggtcggagcctggtacaaagggacattcaggccttcttgaatcaatgcggcgcttctccaggagaggcacgacactggctcacccagtttcaaacgtgtcaccattccgcggataagccgttcgcagtcatcgaggtggacgaggaagttctgaaatgtcagcagggggtgagtagtctagcttttgctttggctttcttgcaaaggatggatatgaaacctctggtggtgctcggcctgcccgcacctacagcaccttcagggtgtctatctttttgggaagctaaggctcagctggccaagagttgcaaagtgctggtggatgcactacggcacaacgccgccgccgccgtgccattcttcgggggtgggagcgtcctccgtgctgcggaacccgcgccccatgcatcctatggcggcattgtttcagtcgagaccgatctgctgcaatggtgtctcgagtcaggtagcatccccattctgtgtccgatcggagaaaccgccgctaggcggagcgtcctgctcgacagcctcgaggtaaccgcttcacttgcaaaggctcttcggcctacgaaaatcatcttcctgaacaacactggaggtctccgcgactcttctcataaggttttgagcaacgtgaatctccccgctgacctggacttggtttgtaacgccgagtgggtcagcaccaaggagcgccaacaaatgagactcattgtcgacgtcctgagtcggctcccgcaccacagctccgccgtgataaccgctgcgtctaccttgttgacagagctttttagcaataagggctctggcacactgtttaaaaatgccgaacggatgttgcgcgtgagatctctggataagttggatcaaggaagactggtcgatcttgtaaacgcatcattcggcaaaaaactgagagatgattacctcgcctcactgaggccaaggcttcacagcatctatgtctccgaaggttataacgccgccgcaatcctgactatggaacccgttctcggtggaacaccatatctggacaaattcgtggtgagttcatctaggcagggccaggggtccggccagatgctgtgggagtgcctgaggcgcgatttacagacccttttttggaggagcagagtcactaatcctatcaacccatggtactttaagcactctgatggatccttttccaacaagcagtggatctttttctggttcggtctggctgacatccgagattcttatgagttagtcaaccacgctaaaggcctaccagactccttccataaacccgcatccgatccgggctct

SEQ ID NO: 245220 - DNA, 1602 bp, Artificial Sequence
  derived and/or modified sequence
atggcaacagccctgatggcagtcgtactgagggctgctgctgttgcaccccggctcaggggccggggcggaactgggggtgcgagacgcctgtcctgcggcgcacggagacgcgcggctcgcggtactagccccggacggagactaagtactgcttggagccagccacaacccccacccgaggagtatgccggtgccgatgacgtctcccagagccctgtggctgaggaacctagttgggtcccctcaccccgacccccagtgccgcacgagagcccagagccaccttcaggacggtctctggtgcagcgcgatatccaggcttttcttaaccagtgcggggcatcgccaggcgaggctcgccactggctcacgcagttccagacctgtcatcattctgcagataagccatttgctgtgatagaggtagacgaggaagtgctcaagtgtcagcagggcgtgtcaagtctggcattcgctctggcattcctgcaacgcatggacatgaagccactcgtggttctggggctgccagctcctacagcaccttctggctgtctttccttctgggaagctaaagctcagcttgcgaaatcatgtaaagtcctggtggatgctttgaggcataacgctgctgctgccgtgccttttttcggggggggtagtgtactgcgggcagccgaacccgctcctcacgcctcttacggaggaatagtttcagtggaaactgatctgctccaatggtgcttggaaagcggatcgatccctattctgtgccctatcggagagacagcggcaagaagatccgtgttgctcgactcgctggaagtcacagccagcctggcaaaggcacttcggcccaccaagatcatcttcctgaacaacaccggcggactgagggattcatcacacaaagtgctctctaacgtcaatcttcccgctgatctggacctggtatgcaacgccgagtgggtatcaaccaaggagcgtcaacagatgagactgatcgtcgatgtactgagtcgccttccccaccatagctccgcagtgataacagctgcttcgaccttactgaccgagctgtttagcaacaagggatctggcactctgtttaaaaacgcagaaaggatgttgagagtcagatcactcgataagctcgatcaaggacggttagtcgacctagtgaatgcttcattcggaaagaagttgagggacgactacctggctagtttgagacccagactgcattccatctacgtcagcgagggctataacgccgccgcaatcctcaccatggagcccgtcctcggtggcaccccttacctcgataaattcgtggtatcatcttctaggcagggccaaggaagcggccagatgctttgggaatgtctgaggcgtgatcttcaaacgctcttctggagaagccgcgttacaaatccaatcaacccttggtactttaaacactcggatggaagctttagtaataagcaatggatctttttttggtttggtctcgctgacatcagggattcatacgagcttgtcaaccacgcgaagggccttcccgactcattccacaaaccagcctctgaccccggctct

SEQ ID NO: 245221 - DNA, 1602 bp, Artificial Sequence
  derived and/or modified sequence
atggcgacggcgctaatggcggttgtactacgagcggcggcggtagcgccgcgtttacgtggtcgaggtggtacgggtggtgcgcgtcgtttatcgtgtggtgcgcgtcgtcgagcggcgcgaggtacgtcgccgggtcgtcgactatcgacggcgtggtcgcaaccgcaaccgccgccggaagaatatgcgggtgcggatgatgtttcgcaatcgccggttgcggaagaaccgtcgtgggttccgtcgccgcgtccgccggtaccgcatgaatcgccggaaccgccgtcgggtcgttcgctagttcaacgtgatatacaagcgtttctaaatcaatgtggtgcgtcgccgggtgaagcgcgtcattggttaacgcaatttcaaacgtgtcatcattcggcggataaaccgtttgcggtaatagaagtagatgaagaagtactaaaatgtcaacaaggtgtatcgtcgctagcgtttgcgctagcgtttctacaacgaatggatatgaaaccgttagtagtattaggtctaccggcgccgacggcgccgtcgggttgtttatcgttttgggaagcgaaagcgcaattagcgaaatcgtgtaaagtattagttgatgcgttacgacataatgcggcggcggcggtaccgttttttggtggtggttcggttttacgtgcggcggaaccggcgccgcatgcgtcgtatggtggtatagtatcggtagaaacggatctactacaatggtgtttagaatcgggttcgataccgatattatgtccgataggtgaaacggcggcgcgtcgatcggtattattagattcgttagaagtaacggcgtcgctagcgaaagcgctacgaccgacgaaaataatatttttaaataatacgggtggtttacgtgattcgtcgcataaagtattatcgaatgttaatttaccggcggatttagatttagtatgtaatgcggaatgggtatcgacgaaagaacgtcaacaaatgcgactaatagtagatgtattatcgcgtttaccgcatcattcgtcggcggttataacggcggcgtcgacgctattaacggaattattttcgaataaaggttcgggtacgttatttaaaaatgcggaacgaatgctacgtgttcgttcgttagataaattagatcaaggtcgtttagtagatctagttaatgcgtcgtttggtaaaaaactacgtgatgattatttagcgtcgttacgtccgcgtttacattcgatatatgtatcggaaggttataatgcggcggcgatattaacgatggaaccggttctaggtggtacgccgtatttagataaatttgtagtttcgtcgtcgcgtcaaggtcaaggttcgggtcaaatgctatgggaatgtctacgtcgtgatttacaaacgctattttggcgttcgcgtgttacgaatccgataaatccgtggtattttaaacattcggatggttcgttttcgaataaacaatggatatttttttggtttggtctagcggatatacgagattcgtatgaattagtaaatcatgcgaaaggtctaccggattcgtttcataaaccggcgtcggatccgggttcg

SEQ ID NO: 245222 - DNA, 1602 bp, Artificial Sequence
  derived and/or modified sequence
atggcaaccgccctgatggccgttgtcctcagggccgccgctgtggcacctaggcttaggggccgcgggggaactgggggcgcccgccggttgagctgcggggcgagacgaagggcggctaggggtacaagtcctggtcgccgattaagcaccgcatggtcacaaccccagcccccccccgaagagtacgccggtgccgacgatgtgtctcaaagtcctgtggccgaagaaccctcctgggttccttctcctcggccccctgtgcctcacgaatccccagagcctccgtctgggaggagtcttgttcagcgagacatccaggcttttctgaatcagtgcggggcctccccgggggaggctaggcattggcttacgcaattccagacttgtcaccattccgccgataaaccattcgcagtgatcgaggtagacgaggaggtcctgaagtgtcagcagggggtttcttccctggccttcgcgttggcattcctccagcggatggacatgaaacctctcgtcgtcttagggctcccagcccccactgcgccttcgggctgtcttagtttctgggaggcaaaagcacagctcgccaaatcatgcaaggttctcgtcgatgcactgcgccacaatgccgcggctgctgtccccttttttggaggagggagcgtcctgagggctgctgagccggccccccacgcaagttatggaggtattgttagtgtcgagaccgatctcctccagtggtgccttgaatccggctccattcctatactctgtccaatcggagagactgcggcacgcagatctgtgctccttgattctctagaggtgacagcttctctggcaaaagcacttagaccaactaagatcattttcctcaacaatacaggagggctccgagatagctcacataaggtcctgagcaacgtcaacctccccgcagatcttgacctggtatgtaacgctgaatgggtatcaaccaaagagagacagcagatgcgtttgatcgtggatgtgctatccaggctgcctcatcacagcagtgccgtgattaccgctgcatccaccctactcaccgaactcttttcaaacaagggttccggaaccctgttcaagaacgctgaaaggatgttacgtgtgagatcccttgataagctcgatcaggggagactcgttgatttggtgaatgctagctttggaaagaagctaagagatgattacctcgcgtcactcaggcctcggttacattctatttacgtgtcggaaggttacaatgctgccgctatactgaccatggaaccagtgctggggggaacaccgtatttggacaaatttgtggtgagttcaagtcggcagggacaaggctccggccagatgttatgggagtgcctcaggagagatctgcagacgttgttctggcggtctagagtgactaatcctattaatccgtggtactttaagcactctgacgggtcctttagcaataagcagtggatcttcttctggtttggactagccgacatccgcgacagctacgaattggtaaaccacgccaaagggttgcccgactcctttcataaaccagcctccgacccaggctcg

SEQ ID NO: 245223 - DNA, 1602 bp, Artificial Sequence
  derived and/or modified sequence
atggccacagcactgatggccgtggttttgagggccgcagctgtggcgcctagactacgcgggcgggggggcacaggcggggcaagacggttgtcctgcggagcacggcgccgcgcagcacgcggcacttcgccaggccggcggctttctacagcatggtcacagcctcaacctccgccagaagaatatgctggtgccgacgatgtgagccagtcacctgtggccgaggaaccaagttgggtgccatcgcccagaccccctgtgcctcacgaatctccagaaccaccctcgggccggagtttagttcagcgcgacattcaagcattcctgaaccagtgtggcgcatctccaggagaggcaagacactggctgacccagtttcagacctgccaccactccgctgataagccttttgcagtgatagaagttgacgaagaagttctgaaatgccagcaaggggtgtcttcacttgctttcgcactcgcttttcttcaaagaatggatatgaaaccactggtcgtgttaggactgccagcaccaaccgcaccatcgggttgtctctcattctgggaggctaaggcacagctggccaagtcttgtaaggtcctcgtcgacgcactgcggcacaatgccgcagctgcagttccctttttcggtggagggtcagtgcttcgcgccgccgagccagccccacacgcttcctacggcggaatagtgtctgtggaaactgacctgctccagtggtgtttggagagtggctccataccaatactgtgtccaatcggagagactgccgcacgcagaagcgtcctgctcgacagcctggaggtcaccgccagtctggctaaagcactcaggcccactaaaatcatcttcttgaataacacgggcggcctcagagatagcagtcataaggtgctgtcaaacgtcaatctgcccgccgacctggatctggtttgtaacgcggagtgggtttctaccaaagaacggcagcagatgcgactgatagtcgatgtgctgtcgagactgccccaccatagcagcgcagtaataacagccgccagtacccttctcacagaactgttctcaaacaaggggtcaggcaccctgtttaaaaacgcagaacggatgctgagagtgagatctctggataaattggaccagggccggttggtggatcttgtcaacgcaagcttcggaaagaaactacgggatgattacctcgcgagtctgcggccccggcttcattccatctatgtctctgaggggtataatgccgctgcaatactgaccatggaaccagtgctcggaggcacaccttacctcgataagtttgtggtctcctcctcacgacaaggacagggttccggacagatgttgtgggagtgcctgcgcagggatcttcagacccttttctggcgatccagggtgactaatcccataaacccatggtacttcaaacactccgatggatctttttccaacaagcaatggatattcttctggttcggattggcagatatacgcgatagctatgaacttgtgaatcatgctaagggattacctgattcttttcacaagccagccagcgacccaggctca

SEQ ID NO: 245224 - DNA, 1602 bp, Artificial Sequence
  derived and/or modified sequence
atggccacagccttgatggctgttgtactgcgggccgcagcggtggccccacggctgaggggtagaggaggtaccggaggggctcgccgtctgagttgtggagcacgcaggagggccgctagaggcacaagccctggaagacggctgagcacagcttggagtcagcctcagcccccgccagaggaatacgccggcgcagatgacgtctcccagagcccggtggctgaggaaccctcttgggtcccaagcccccggcctccggtgccacatgagtcccctgaaccgcctagtggccgtagcctagtacagcgggatatccaggcgttcctgaaccagtgtggcgcgtctcctggcgaagcacgacactggttgacacagttccaaacatgtcaccattcagcagacaagcccttcgcagttatcgaagtcgacgaagaagtgttgaagtgtcagcagggcgtgtctagcctggcatttgccctggcttttcttcagaggatggacatgaaaccgctcgtggtgcttggccttccagctcccactgccccctcaggatgcctgagcttctgggaggctaaggcccagctggcaaagagctgtaaagtcctggtggatgctctcagacacaatgcagccgctgctgtgcctttttttggtggtggatctgtgctgagggcagctgagcctgccccccacgcctcttacggaggaatcgtgagcgtcgagacggatcttctgcagtggtgtctcgaatcaggctccatccccatcttatgccccattggagagaccgctgctcgacggtcagtcttgctcgactcccttgaggttaccgcctcactggcaaaggccctgcgccctacgaaaataatctttctgaataacaccggcggactccgcgatagttcacataaggtactttccaatgtgaacttgcctgctgacttggacttagtgtgcaacgcggagtgggttagcacaaaggagcgtcagcagatgcggctcatcgtcgacgtgctttcacgcttgcctcatcactccagcgccgtcattaccgctgccagcaccttgctaaccgagctttttagtaacaaagggtccggaaccctgttcaagaatgccgaacggatgctgagggtgcggtccttggataagcttgatcaaggccgcttggtggatttggtcaatgcgtcatttgggaaaaagctgagggacgactatctggcgtctcttaggcctcgtctgcatagcatctacgtgtcggagggttacaacgcggccgcgatcctgaccatggagccagttttgggagggactccttacctagacaaatttgtggtctctagttcacgacagggccagggctctgggcaaatgttgtgggaatgtctgaggcgggacctgcaaactctgttctggaggagcagagtgacaaatcctatcaatccttggtacttcaagcactctgacggcagctttagcaataaacagtggatttttttctggttcggactggcagacatacgagactcttatgaacttgtgaatcacgccaaaggcctgcccgattctttccataaaccagcctccgacccaggaagt

SEQ ID NO: 245225 - DNA, 1602 bp, Artificial Sequence
  derived and/or modified sequence
atggctacagccctgatggccgtcgtgcttcgagccgccgccgtggcgcctaggctgcgcggtcggggggggaccggaggggcacggcggttatcctgtggcgcccggagacgggccgcaagaggcaccagtcccggcagaaggttgtccactgcatggtcacagcctcagcctcctcccgaagaatatgcgggagcggatgacgtctcccagagccccgtagctgaagagcctagctgggtaccctccccccgccctcccgtgccccatgagtcccccgagccccctagcggacggtctttagtgcagagggatattcaggcgttcctgaatcagtgcggcgccagtcctggtgaggctagacattggctgacccagttccaaacatgtcatcactcggccgacaaacctttcgcagtgatcgaggtggatgaagaggtcctgaaatgtcagcagggcgttagcagcctggccttcgctctggcgttcttgcaaaggatggatatgaagccattggtagtgctcggtctcccagcaccaacagctccctcaggctgtctgtccttctgggaggcgaaagctcaactcgcgaaatcttgcaaagtacttgtcgacgcccttaggcacaacgcagctgctgcggtcccctttttcggtggcggaagcgtgctgcgtgccgccgaacctgccccacacgctagctacggtgggatcgtttccgtcgaaaccgatttgttgcagtggtgcttggaaagtgggtctattccaatactttgccctataggtgagacagcagcacgcaggagcgtgctgctagactctctggaggtcaccgcgagtctggccaaagctctgagacccactaaaataatcttccttaataatactgggggcctgagagacagctctcataaggtcctgtcgaatgtcaacctgccagccgatttggatctggtgtgtaatgccgaatgggtgtccaccaaggagcggcagcagatgcgcctaattgtggacgttctctcacgactcccacaccatagttccgccgtaatcaccgcagcctccacactgttgacggagttattttcaaataagggaagcggcaccctttttaaaaatgcggagcggatgctcagagtgcgatcattagacaaactcgaccagggtcgtcttgtggatcttgtgaatgcgagctttgggaagaagctccgggacgattacctggcatcattgcgcccccggctgcatagcatttacgtgtccgagggctacaacgcagctgccattctcacaatggagccagtgctaggaggaacgccctatctggacaaatttgtcgtttcatcttcaagacagggacaagggtccgggcagatgctctgggagtgtctgagacgcgatttgcagacgcttttctggcgaagccgggtcacaaaccccattaacccatggtactttaaacatagtgacggcagtttttccaacaagcaatggattttcttttggtttggattggcggacatcagggactcttatgagctggtcaaccatgccaaggggttgccagatagcttccacaagccagcttctgatcccggctca

SEQ ID NO: 245226 - DNA, 1602 bp, Artificial Sequence
  derived and/or modified sequence
atggccactgcactgatggctgtagtcctgcgagccgccgccgtggcacctcggctgcgcggaagagggggcaccggtggtgcccggagactaagctgcggtgcccggcggcgagctgcgaggggcacatccccagggcgccgactcagcaccgcctggagtcaacctcagccccctccagaggaatacgccggtgccgacgatgtatcccagtcaccggtggctgaagaaccatcgtgggttccctcacctagaccccccgtcccccatgagagtcccgagccgccctctggtcgctccctcgtccaacgcgatattcaggcgtttcttaatcagtgcggcgcttccccaggagaggctagacattggctgacacagtttcagacatgccatcattctgctgataagccatttgccgttatagaagtagatgaagaagtcctcaagtgtcaacaaggcgtgagctcattagcattcgctttagctttcctccagcggatggacatgaaacccctggttgttctggggctccctgcccctaccgctccctctggctgtctgtccttttgggaggctaaagcccagctagccaagtcatgcaaagtcctggtggacgctctcaggcacaatgctgcggcagccgttcccttttttggaggcggctcagttctgcgcgccgctgaaccggctccccacgccagctatggcggcatcgtctctgtggagacggacctgctccagtggtgtctggagtcaggatccatcccaatcttgtgccctattggcgaaacggcagctagacggagcgtcctgttggattcactcgaagttaccgcaagtttggccaaggcactgaggccaacaaaaattatattccttaataataccggaggacttcgcgactcctcacacaaagttctctccaacgtaaatcttccagccgacctggatctcgtctgcaatgcggagtgggtctcgaccaaagagcggcagcaaatgcgccttattgtggatgtcctttctcggctgccacaccactcaagtgcagtcatcaccgccgcaagcacactgctgacagaactcttctccaataaaggcagtgggactctgttcaagaacgcagaaaggatgctccgtgtccggagtctagataagctagaccagggaagactggtagatctggttaacgcttcttttggtaagaagttacgtgacgattatctggcttctctgcgacctcggctgcattcgatctacgtgtccgagggatacaatgcagcagcgattctgaccatggaacctgtgctcggcggcacaccatatctcgacaaattcgtggtctcttccagtagacagggacagggctcgggccaaatgttgtgggaatgcttacggagggatctccagacactcttttggcgcagtcgggtcacaaaccctattaatccatggtatttcaagcactccgatggaagcttcagcaataagcagtggatttttttttggtttggcctggcggatattcgcgatagttatgagctggtgaaccatgccaaaggcttgcccgactcctttcataaacccgcctcagaccctggttct

SEQ ID NO: 245227 - DNA, 1602 bp, Artificial Sequence
  derived and/or modified sequence
atggctacagctcttatggccgtcgtgctgagggccgccgccgtagcacctaggttgcgcggaagaggcggaacaggcggtgcgaggaggctttcctgcggagcaagaaggagggccgcgagaggcacatcccctggccggcgattaagcaccgcgtggtcccagccccaaccaccacctgaagagtacgcgggggcggacgatgtcagtcagtcgcccgttgccgaagagccgtcgtgggtgccgtctccccggccaccagtaccgcatgagtcccccgaacctccaagtggacggagcttggtgcaaagggatatccaagctttcctgaatcagtgtggtgccagccccggggaagctagacactggctgacccagttccagacatgccaccattctgctgacaagccgtttgctgtgatcgaggtggacgaagaagtgctgaagtgccagcaaggggtatcctccctggcatttgccctggcctttttgcaacggatggacatgaaaccactcgtcgtgctgggccttcccgctccaactgccccttcaggctgcctgagtttctgggaggccaaagcacaattggctaaatcatgtaaagtcctggtggatgcattacgccataatgcggccgccgccgtgcctttctttggtggcggctccgtccttcgagctgctgagcctgctccgcatgcctcatatggcgggattgttagtgtcgaaacggatttactccagtggtgcctggagtccggctctattccaatcctgtgtccaatcggagagacagccgctcgcagatcagtcttactggatagcctcgaggtgactgcgtcactggccaaggccctgaggcccacgaaaatcattttcctgaacaacacgggcgggctgcgcgacagctcccacaaagtactgagtaacgtgaatctcccagcagacctcgacctggtgtgcaacgctgagtgggtctcgacaaaggagaggcagcagatgcgtctgattgtcgacgttctatcccgcctgccgcatcacagcagcgcggtgattaccgcggcatccaccctcttgaccgagctcttctcaaacaaggggtcgggaacgcttttcaagaacgcagagcgcatgcttagggtgagaagtctggacaagctcgatcagggtcgccttgtagacctagtcaacgcatcattcggcaagaagctgagagatgactacttggccagtctcaggcctaggctacattccatctacgtgagtgagggctacaacgcagcagctatcctgactatggagccagtcctgggtggaacaccctatctggataaatttgtagtgtcttccagtaggcagggtcagggctctggccagatgctctgggaatgcttgagaagggacttacagacactgttctggaggagccgagttaccaatcctatcaatccgtggtattttaagcatagtgatggaagcttcagtaataagcagtggatcttcttttggttcgggctggccgatataagggactcctatgagctggtgaaccatgctaagggcctcccagattcgtttcataagcccgcctcagatccggggtca

SEQ ID NO: 245228 - DNA, 1602 bp, Artificial Sequence
  derived and/or modified sequence
atggcaaccgccttgatggctgttgtcctacgcgccgctgctgtggcccctcgtttgagaggacgcggcggaactggcggagccaggcgattgagctgcggggcccggcgacgggccgccaggggcacgtcaccaggccgaagactgagtactgcatggagccagccccagccaccaccagaggaatacgcaggcgctgacgacgtgtctcagagccctgtggcagaggagcccagctgggtcccgtctccacgtccaccggtgccccacgagtcaccagagccccccagcggacgcagcctggtacagcgcgacattcaggctttcctaaaccagtgtggcgcttcccccggggaggccagacattggcttacccagttccagacttgccaccatagcgccgataagccattcgcagtgattgaggtcgacgaggaagtgctaaaatgccagcagggggtgtcatcactagctttcgcactggcttttctgcagcgcatggacatgaagcctcttgtcgtgctgggactacccgcccctaccgctccgagtggctgcctgagtttttgggaagctaaggcgcagctagcgaagagctgtaaggtactagtggacgctctgagacataacgcagcagccgcagtccctttcttcggcgggggatccgtgctccgcgccgcagaacctgcaccccacgcttcctatggaggtatcgttagtgttgaaacagatctgctgcagtggtgcctcgaatctggatccattcctatcctgtgcccaatcggcgagaccgccgcccggagatccgtgcttctggactcattagaggtgacggctagtctggccaaagcactcagacctactaaaattatttttttgaacaacacgggggggttaagggattcctcacacaaggtgttatccaatgtaaacctaccagccgatctggatctcgtgtgcaacgcagaatgggtgtcgacgaaagagcggcagcagatgcggctgatcgttgatgtgctgagcagactcccccaccattcgagcgctgttattacagctgcatccacgctgctgacagagcttttctccaacaagggcagcggtactttatttaaaaatgcagagcgcatgttacgagtgagatccctggacaagctggaccaggggaggctggtcgacctggtgaatgcctccttcgggaagaagttgcgagatgactatctggcatccttgcgtcctaggctgcactcaatatacgtctctgagggttacaatgccgcggccattctcaccatggaacctgtgttgggcggtacaccttacctcgataagttcgtcgtatcctcttcaaggcagggccagggctccggacagatgctgtgggaatgcctccggcgtgacctccagaccctgttctggcggtcaagagtgaccaaccccatcaatccttggtatttcaaacattcagacggatctttcagcaacaagcaatggatatttttttggttcggactagcagatattagagactcatacgagttagtgaatcatgctaagggccttccagactcgttccataaacctgccagtgaccccggctcc

SEQ ID NO: 245229 - DNA, 1602 bp, Artificial Sequence
  derived and/or modified sequence
atggcgacagcgctcatggctgtcgttctcagggccgctgctgtggccccaaggctgaggggccgtggcgggacaggcggggcgcggagactgtcctgcggggcccgccgtcgcgccgcaaggggcacgtcccctggccgcagactttcaacggcttggagccagccacaacctcccccagaggaatatgctggagctgatgacgtgtctcaatctccagtggctgaggaacccagttgggtccccagccccagaccacctgttcctcacgaaagccccgaacccccgtccggaaggagcttggttcagcgcgatatccaggcctttttaaaccagtgcggcgcgtcgccaggcgaggcacgccattggctcacacaattccagacttgtcatcactctgcggataagccctttgctgtgatcgaggttgatgaggaagtgctcaagtgccaacagggtgtctcctcattggcttttgccttagctttcctgcaaagaatggacatgaagccattagtggttttggggctcccagccccaaccgcgccatcagggtgtctgagtttctgggaagctaaagcccagttggcaaaatcctgcaaggtgcttgtagacgccctccggcataatgcagctgctgccgttccttttttcggagggggcagcgttttgcgggccgccgaacccgcgccccacgcctcatacggagggattgtgtcggtcgaaactgatctgctgcagtggtgcctcgagtctggcagcatccccattctgtgtccaatcggcgagaccgcagcccgccggagcgtgcttctggatagcttagaagttacggcaagcctagcaaaagcactcaggcccaccaagataatttttttgaacaatactggtggccttagagactcaagtcacaaggttcttagcaatgtgaatctgccggctgacttggatctcgtatgcaacgccgaatgggttagcacgaaggagcgacagcagatgcgactgattgtggacgtgctctcccggctgcctcatcatagttctgccgtaatcaccgcagcttctacccttctcaccgaactgttttccaacaaaggatctggtaccctgttcaagaacgctgagcgtatgttgcgagtgcggagcctggacaagctcgaccaaggacgactcgtcgacctcgtaaacgcaagttttggtaaaaaactgcgagacgactatttggcatctttacgccctcggctccacagtatttacgtatccgagggatacaatgcggctgctatcctgactatggagcccgtgttgggcgggacgccttatttggacaagtttgttgttagcagctcccggcaggggcagggttccggacagatgctttgggagtgtcttagaagagatctccagacgcttttttggaggtccagagttaccaatcccatcaatccctggtattttaaacatagtgatgggtctttctctaataagcagtggatttttttttggttcggcctggccgatatccgcgactcttatgagttagtgaaccatgcaaaggggctgcctgattcttttcacaagcccgcaagcgatcctggctct

SEQ ID NO: 245230 - DNA, 1602 bp, Artificial Sequence
  derived and/or modified sequence
atggctactgcactgatggcggtggtgttgagagcagcggctgtcgcaccgcgcctccgcggacgcggcggcactgggggcgcccggcgcctgtcctgcggggcccggcgtcgagctgctcgcggaacctcccccggtcgccgcctgtctaccgcctggtctcaaccacagcccccccccgaggaatatgccggagccgacgatgtcagtcagtctccagtagcggaggagccttcctgggtgccttctccacgaccccccgtaccacatgaaagtcccgaaccaccaagtgggcgtagcctggtccagcgcgatatccaggcattcttgaatcaatgcggcgcttcaccaggggaagcgaggcactggctcacccagttccagacttgtcatcacagcgcagataaaccatttgctgtgatcgaggtcgacgaagaggtacttaagtgccagcagggcgtttcttcacttgcattcgctttagcatttttgcaaaggatggatatgaagcctctggttgttctggggttgccagcccccacagcccccagcggatgcctctctttctgggaggcaaaagctcagcttgccaagagctgcaaagttctcgttgacgccctccggcataacgcagcggccgccgtcccgttctttggaggcggtagcgtcctacgggctgccgagcccgcaccacatgccagttatggaggaattgtctccgtggaaactgaccttctacagtggtgcttggagagcggttctatcccaattctttgtccaatcggggagacagcagcaagaagatccgtgctacttgattctctagaagtaacagcctcccttgccaaagctcttcgcccaaccaaaataatatttctgaataacacaggcggacttcgtgattcaagccataaagttctgtcaaacgtgaacctgccggcagatctagatctggtgtgtaacgccgagtgggtcagcacgaaagagagacagcaaatgagacttatagtggatgtcttatcaaggctcccccatcacagctcagcagtcattaccgcagcgagtacgctattgacagagctctttagcaataagggttctggtaccctgtttaagaacgccgaacggatgttgcgtgttagatccctcgacaaactggaccagggacggctcgtagacctggtgaacgctagttttggaaagaagttgagggatgattacctagcctccctgcggccccggctacacagcatctacgtgagcgagggctacaacgcggctgccattcttaccatggagcctgtactggggggtacaccctacctggacaagttcgtggtctcctcaagcagacagggccaagggagcggtcagatgttgtgggagtgcctgcgaagggatctgcagactctgttttggaggagcagggtgacaaaccctatcaacccgtggtatttcaagcacagcgatgggtctttctcaaataagcagtggatctttttctggtttggcttagcggacattcgtgactcctatgagctggtgaaccacgcgaagggccttcccgactccttccataaaccagccagtgaccccgggtct

SEQ ID NO: 245231 - DNA, 1602 bp, Artificial Sequence
  derived and/or modified sequence
atggccactgcgctgatggccgtcgtcttgagagccgccgccgtagctccaagactgcggggccgtgggggcaccggaggagccagacggctgtcctgtggagcacggcgacgcgcagctagaggtacctcccctggccgtcgcctaagcacggcctggtcacagccgcagcccccgccagaagaatacgcgggcgccgacgacgtctctcagtctccggtcgcggaagagccctcctgggttccatctcctcgcccgccggtgccccatgagagcccggaaccgccatctggtcgcagcctggttcagcgtgacatccaagcatttctgaaccagtgcggcgctagtcccggcgaggcccgccattggctaacgcagttccagacgtgccaccacagcgcggacaagcctttcgccgtcatcgaggtggatgaggaggtcctgaagtgccaacaaggagttagctcgctcgctttcgccttggcttttctgcagcgtatggacatgaagcccctggttgtccttgggcttcctgccccgaccgccccgagcggttgcttgtcgttctgggaagctaaggctcagctcgccaagagctgcaaggtcctggtcgacgccctgcgacacaacgcagctgctgccgtccccttttttggaggcggatctgttcttcgcgcggccgaaccggctccccacgcttcgtacggcggtatcgtatcagttgagaccgacttgctgcagtggtgcctcgagtccggctccatcccgatactgtgcccgatcggtgagacagccgcccgtcggtccgtccttcttgactccctcgaagtcactgcgagcttggccaaggctctgcgccccaccaagatcatcttcctgaacaacacgggtggcctgcgtgattcctctcacaaagtgctttccaatgttaacctgccggcggatctggacctcgtgtgcaacgcggaatgggtttccaccaaggagcgtcaacaaatgcgtctgattgtcgacgttctctcacgactgccacatcactcatccgcggtcattacggctgcttcgacgctgctgaccgaactcttctccaacaaaggttccggcactttgttcaagaacgccgaacgcatgctgcgggtcagatcgctcgacaaactggatcagggcaggttggtggatcttgtcaacgcttccttcggcaagaaactgcgggatgactacctcgcttccttgcgtcctcggctgcacagtatctacgtgtcggaaggatataacgcggccgcgatcctcaccatggagcccgttcttggcggtactccctatttggataaattcgtcgtctcttcttcaagacagggccagggcagcgggcagatgctgtgggagtgccttagacgtgaccttcagactttattctggcgctcccgtgtcaccaacccgatcaacccctggtacttcaagcatagtgatggctcgttcagcaacaaacagtggatcttcttctggttcggtctggcggatattcgcgatagttacgagttggtgaaccacgcgaaaggcctgcctgattcgttccacaagccggcctctgatcctggctct

SEQ ID NO: 245232 - DNA, 1602 bp, Artificial Sequence
  derived and/or modified sequence
atggcaacagccctcatggctgtggttttacgggctgctgccgtagcgccccggttgaggggccgcgggggtaccgggggtgctaggcggctgtcctgtggcgccagacgccgggctgcgcggggcacctcgcctgggcgtcggctgagtaccgcctggtctcagcctcagccccccccagaggaatatgccggcgccgacgatgtgagtcaatctcctgttgctgaggaaccctcatgggtcccatcacctcgcccaccagtcccgcacgagagccctgaacctccatctgggcgttcccttgtgcagagagacattcaggcattccttaaccagtgtggcgcctcccctggcgaagcccgtcactggctgactcagttccagacatgtcaccacagtgcagataaacccttcgccgtaatcgaggtcgacgaggaagtacttaagtgccagcaaggagtctcctccctggcgtttgcactggcctttcttcagaggatggacatgaaacccctggtcgtcctcgggcttcctgcgcctacagccccgtccgggtgcctgtctttttgggaggccaaggcccagctcgccaagagctgcaaggtgcttgtggacgccttgcgtcataatgccgccgctgccgtccccttttttggtggcgggtccgtcttgcgggccgctgagcctgctccgcatgccagttacggcggcattgtgtccgttgagacagatcttctacaatggtgtctggaatctggatcaatccctattctgtgtcccattggggagaccgcggcgagaaggtctgtgttactggactctctggaagtgacggccagtctcgcaaaggctttgcgacccaccaagataatctttctgaataatactggggggctgagggactcaagccacaaagtgctcagcaacgtcaacctccctgccgacctggatttggtgtgcaatgccgaatgggtgtctactaaggaacgtcagcagatgcgcctgattgtggatgtgctgagccgcctgcctcatcactccagtgccgtgattaccgctgctagtacactccttacagaactcttttcaaataaaggcagcggtacactctttaagaacgccgaacgaatgctccgcgtccgtagcctggacaagcttgatcaggggaggcttgttgatttggtgaatgccagctttggcaagaaattgagagatgactacttggcatccctccggccgagactacacagcatttatgtcagcgaggggtacaacgccgcggctattctcacaatggagccagtcctgggcggaaccccatacttggacaagttcgtggtatcaagcagtaggcagggtcagggcagcggacagatgttatgggagtgcttgagaagggatctgcaaactctcttttggcgttctagggtcactaacccgatcaacccgtggtattttaagcactccgacggctcttttagcaataagcagtggattttcttctggtttggacttgcagacattcgcgacagctacgaattagtcaaccatgcaaaaggcctacctgacagtttccacaagcctgcctctgatcctggctca

SEQ ID NO: 245233 - DNA, 1602 bp, Artificial Sequence
  derived and/or modified sequence
atggccacagcgctgatggctgttgttctgcgcgccgcagccgtcgcacctaggttgcgggggcgggggggaactggaggggccagaaggctttcttgtggggcccggcggagagcggctagggggacatcccctggacggcggctctctactgcttggtcccagccgcagccaccccctgaagaatatgctggggcagatgatgtttcacagagtcctgtggccgaagaacccagttgggtcccatctccccggccccctgtgccacacgaatcacctgaaccccccagtgggcggtcactcgttcagcgggatatacaggcattcttaaaccagtgtggagcgtctcccggagaagcgcgccattggctgacacagtttcaaacttgccaccactccgctgataaacccttcgctgtcattgaggttgatgaagaagtactcaaatgtcagcagggggtttcttctttagctttcgctttagcctttctacagcggatggatatgaagccccttgttgtcttggggctcccagcgcctacagctccttcgggatgtctctctttctgggaagccaaagcacaactagccaaatcctgtaaagtgctcgtagacgccctcaggcataacgcagccgccgccgtgccctttttcggaggagggtccgtacttagggccgccgaacctgcgccccacgcgtcctatgggggaatagtttcagtggaaacagacctcctccagtggtgtctcgagtctgggagtatccccatcctctgccccatcggagaaacagctgcccggagaagtgtcctcctcgactcacttgaagtaacagcctcactcgcaaaagccctgcggccaactaaaattatcttcttaaataacacaggggggctccgggactccagtcacaaggtcctatctaacgtgaatcttccagctgatctggatctcgtctgcaacgcagaatgggtgagtactaaggaacgccagcaaatgagactcatagtggatgtgctgagtcgacttccccatcactcctctgcagtgatcacagcagcttccacactcctcacagaactcttctccaataaagggtcaggaacactcttcaaaaacgccgaacggatgttacgcgtcaggtcactcgataaattagatcagggaagactggtagatcttgtgaacgctagtttcggaaaaaaactcagagatgattatctggccagtttgaggcctaggctgcactctatatatgtgtctgaagggtacaacgccgcagcaattcttactatggaacccgtgttaggaggaactccctatctagataagtttgttgtctcttcttcacggcagggacaggggtccggacagatgctgtgggaatgccttagaagggatctacagactctcttttggaggtcccgcgtgactaaccctataaatccttggtacttcaaacatagtgatgggtctttctccaacaagcagtggatattcttttggttcgggcttgcggatatccgagactcctacgagttggtgaatcacgccaagggactccctgattccttccacaagcccgcctccgatcccgggtcc

SEQ ID NO: 245234 - DNA, 1602 bp, Artificial Sequence
  derived and/or modified sequence
atggctactgcgctgatggcagtggtcctgagggccgctgcagtggctccacgtctgagaggcagagggggcactggaggcgcccgtagactgtcttgtggcgcccggcgtcgcgccgctagaggtacaagcccaggacgccgccttagcacggcttggtctcaaccacaaccaccacctgaggagtacgctggagctgatgacgtgtcacagtcccccgtcgctgaggaaccatcttgggttccaagccctagacccccagttcctcatgaaagccccgagccacccagcgggagatcactcgtccagcgcgatattcaagcctttctcaaccaatgtggcgcctctcccggagaagctagacattggctcactcagtttcagacatgtcaccacagtgctgacaagccgttcgcagtgattgaagtggacgaagaagtactcaagtgtcagcagggggtgagcagcctggcatttgctcttgcctttctccaaaggatggatatgaaacctctggtggttctggggttaccagcacctaccgcaccttcaggctgcctcagcttttgggaagccaaggcacagctggctaagagctgtaaagtgctggtggatgctctcaggcacaatgccgcagctgctgtgccattcttcggcggcggaagcgtcctcagagccgccgaacctgctcctcacgccagctatggcggcatagtctctgtggaaaccgatctgctccagtggtgcttggagagcggatctatccccatcttgtgcccaatcggcgaaacagcagctagaagatctgttcttcttgatagcctggaagtcaccgcttcactcgctaaagccctcaggccaacaaaaatcatcttcctgaacaacacaggtggcctgagggactcatctcataaggtcctgtccaacgtgaacctgcctgctgatcttgacctggtgtgtaacgcagaatgggtgtccactaaagaacgtcagcagatgaggctgatagtggacgtgttgtcacgcctcccgcaccatagctcggcggtaattaccgcggcttctaccctgctgaccgagctgttcagcaacaaggggagcggaaccctgttcaagaatgcagaaagaatgctaagggtgaggagcctggacaagcttgaccaagggcgtttagttgacctggtgaacgctagtttcggcaaaaagctgagagatgactatttggctagccttcggcctcgcttgcactcaatatatgtatccgagggatacaatgccgccgctatcctgaccatggaacccgtgctcggcggaactccatacttggacaaattcgtcgttagtagctccaggcaaggccaagggagcggacagatgttgtgggagtgtctccgcagggatctgcaaactctgttttggagaagtagggttacaaaccccattaacccttggtacttcaaacacagcgacgggagcttcagcaacaaacaatggatcttcttctggtttggattagctgatattagagacagctacgaactagtaaatcacgcaaagggattacccgattcttttcataagccagctagcgatccaggcagt

SEQ ID NO: 245235 - DNA, 1602 bp, Artificial Sequence
  derived and/or modified sequence
atggctacggctctcatggcagtggtgctgagggcagccgctgttgccccccggcttcggggccgaggtgggacaggaggggcgcggaggctgagctgcggcgctcgtaggcgagcagcgagaggtacttcccctggaagaagactctctaccgcatggtcacagccacagccgcccccagaggaatatgctggggcagatgacgtgtctcagtcgccagtcgccgaagagcctagttgggtgccaagtcctcgcccacctgtccctcacgagtctccagagccacccagcggcaggtcacttgttcagcgcgatatccaggctttcctgaaccagtgtggggcatctcctggtgaggctcgtcactggttgactcagtttcagacttgtcaccactcagcagataaacccttcgctgttatcgaggtagacgaggaggtgctgaaatgccagcagggcgtgtcttcattggcctttgccttggcattcttgcagcgcatggatatgaaaccactggtagtgttgggcctgcctgctccgactgccccgagcggctgcttaagtttctgggaagcgaaagctcaattggccaagtcctgcaaagtgttggttgacgctcttcggcacaatgcagctgcggctgtcccgttttttgggggaggcagcgttctgagagccgccgagccagcacctcatgctagttatggcggtatcgtctctgtggagactgacctgttgcagtggtgtctggagtcgggcagcatcccaattctgtgccctataggcgagacagcggctcgccgctcggtgctcttggatagcctcgaagtgaccgcctccttagccaaagccttgaggcccacgaagataatcttcctgaataacactggtggcctcagggattcgtctcacaaggtgctctcaaatgtaaacctgccagcagacctggacctggtgtgtaatgcagaatgggtaagcaccaaagagcgccagcagatgcggttaattgtggacgtgctgagccgccttccccaccattcgagcgccgtgataactgccgctagcacattgcttaccgaactgttcagcaacaaaggctcagggaccttattcaagaacgcagagcggatgcttcgcgttagatccctggacaagctggaccagggaagactcgttgacctcgtgaacgcctcatttgggaaaaagctccgcgacgactatctggcttccttgcggccgagactgcactctatttacgtgagtgagggatacaatgcggctgctatcctgactatggagcccgtgcttggcggaacaccttacttagacaaatttgtggtatcaagttcccggcaggggcagggctccggccagatgctctgggagtgtctgaggagagatttgcagacgctcttctggagatcgagggtgactaatccgatcaacccctggtactttaagcacagcgacggtagcttctccaacaaacagtggatttttttttggtttggactcgccgacatacgcgactcatacgagcttgtgaaccatgccaagggcttgcccgattccttccacaaaccagcctcggaccctgggtca

SEQ ID NO: 245236 - DNA, 1602 bp, Artificial Sequence
  derived and/or modified sequence
atggcaactgctctcatggccgtggtactccgggccgccgcagtggccccgcgcctgcgaggcaggggaggcacaggcggcgctaggcgtttgtcgtgtggggcccggagacgcgccgccaggggcacctcaccgggtcgaagactcagcacagcctggtcccagccacagccaccccccgaggagtatgcgggcgctgacgacgtgagtcaatccccagtcgctgaagaaccgtcctgggtcccatcgcctcgcccaccagtgcctcacgagtccccagaacctccgagtggtcggtccctcgtccaaagggacattcaggcgttcctgaaccagtgtggagcttcgccaggcgaagcccggcattggctgacgcagttccagacctgtcatcacagcgcagacaaaccatttgccgtcatcgaggtcgacgaggaggtgctaaagtgtcagcagggtgtttcctccctggcatttgctctggccttcctgcagagaatggacatgaaacccctcgttgtactggggctgcctgcccccacggcaccaagtggctgtctgagcttttgggaggcaaaggcgcagctggctaaatcctgcaaggttttagttgatgccctgaggcataacgctgccgctgcagtacccttttttggcggaggctcagtgctgagagccgccgagccagccccccatgccagctatggaggtatcgtgagcgtggaaaccgacttactccagtggtgtctggagagtggttcaatccctatactttgtccgatcggggagactgccgctcgtcgtagcgttctgctggatagtctcgaagtgacagcctccctggctaaagctctgcggcccacgaagataattttccttaacaatacgggtggcctgcgcgatagttcccataaggtgctgtcaaacgtgaacctcccagccgatctcgacctggtttgtaacgccgagtgggtgtcaactaaagagcgacaacagatgcgactgatcgtggatgttctgtctaggctgccgcaccatagtagtgccgtgattaccgccgccagcaccctgctgacagagctgtttagcaacaaggggagtggcaccctgtttaaaaacgcggaacgcatgctgcgggtgagatccctggacaaattggatcagggacgcctggtggacctggtaaacgcttcattcggtaaaaaactcagggatgactatctcgcctccctccggccccgcctgcactccatctacgtctccgaggggtacaatgcagccgctatactcaccatggaaccggtcctagggggtacaccgtacttggataagttcgtggtttcatccagcagacaagggcaaggctctggacagatgttgtgggagtgcctgaggcgggatctgcagacactgttctggagatcccgagtgaccaatcctatcaacccctggtactttaagcattcagatggttctttcagcaataaacagtggatctttttttggttcggactggcggacatacgggacagttatgagctggtgaaccatgccaagggtctgcctgatagtttccacaagcctgccagcgatcctggcagc

SEQ ID NO: 245237 - DNA, 1602 bp, Artificial Sequence
  derived and/or modified sequence
atggcgactgctctaatggcagtggtgctacgggctgctgccgtggccccccgtctccgaggacggggaggaaccggcggcgccagacgtctctcgtgcggcgccagacgccgtgccgcgcgtggcacaagccccgggcgccgactgagcaccgcctggtctcaaccgcagccgcctccagaagaatatgcgggggcagatgatgtctcgcagtcgccagtcgccgaggagccctcatgggtcccgagcccgcgtccccctgtaccccatgagagcccagaacctccgtcgggtcgttccctggtgcagcgggacatacaagccttccttaatcagtgcggtgcctccccaggcgaggctcgccactggctcacgcaatttcagacttgccatcattctgccgacaaaccatttgccgtaattgaagtggatgaggaggtgttaaaatgccagcaaggcgtaagcagtctcgcgttcgccctcgccttcctgcaacgcatggacatgaagccactggtggtgctcggactaccagcacccaccgcgccctccggctgcctttccttttgggaggccaaagcacagttagccaagtcgtgcaaagtgttggtggatgcattaagacacaatgccgccgccgcggtgcccttcttcggcggcggttcggtgctgagagcagccgaacccgctccacacgcctcttatggaggtatcgtctctgtcgagactgatttgctgcagtggtgcctcgagagcggttcaatacccatcctgtgcccgatcggggagaccgcagcacgccgttcagtccttctagattccctggaggttaccgctagccttgctaaagcattgcgccccacgaaaataattttcttgaacaatacaggaggattgcgggacagttcgcataaggttttgagtaatgtcaacttgccggccgacctggatctcgtatgtaatgcggagtgggtgagcaccaaggagcgacagcagatgcgtctgatagtcgacgtgctgagccgactgccacaccattccagcgctgtcatcaccgcggcctccactttactgaccgagctattcagcaacaagggaagcggtaccctctttaagaatgcagagcgtatgcttcgagttcggtcgctggacaaactcgatcagggacggctggttgacttggtgaatgcttcgttcggcaaaaaactccgcgatgactacctggcgagcctgcggccccgcctccattcgatctatgtgtcggaaggctacaatgcagcggctatcctgactatggaacccgtcttgggtggaacgccctacctggataagtttgtggtgagtagcagcagacagggacaaggaagtggccagatgctgtgggagtgtttgcgccgggatttacaaaccctgttctggcgcagccgggtgaccaaccccattaatccctggtacttcaagcattcagatgggtctttcagtaacaagcagtggatttttttctggtttggccttgcggatatccgagattcctacgaactagtgaaccacgccaagggactgccagattcatttcacaagccagcatcggacccaggctct

SEQ ID NO: 245238 - DNA, 1602 bp, Artificial Sequence
  derived and/or modified sequence
atggctaccgcattgatggccgtagtgctccgtgctgccgctgtggctcccagacttagaggtcgcggcggcacaggcggagcacgtcgtctttcttgcggcgctcgccgccgtgctgcaaggggcacaagtcctggtcgcaggctgtcaacagcctggtctcaacctcagcctcctcccgaagagtacgccggagccgatgatgtttcccagagccccgtggctgaagagccctcttgggtccccagcccacgtccccccgtgcctcacgagtcccctgaacctccttctggtagatcattggtgcagcgtgacatccaggccttcttgaaccagtgtggcgcttccccaggtgaggcaagacactggcttacacaattccaaacttgccaccactctgctgataagcctttcgctgttatcgaagtggacgaagaagtccttaagtgtcaacagggagtctcttctctcgccttcgcccttgcattcctgcagagaatggacatgaaaccactcgtcgtcctgggcttgcccgccccaactgctccttccggttgtttgtccttctgggaagctaaagctcagctcgctaagtcctgcaaggttctcgtggatgccctgcgccacaacgccgccgcagcagttcccttttttggcggcggttccgttttgagagccgctgagccagcacctcacgcttcttacggaggaattgtttctgtcgagacagatctgctgcaatggtgcctcgagtcaggctctatccccatcctgtgccctatcggagaaactgccgcccgtcgttccgtgcttctggactcactcgaggtgacagcatctttggctaaagccctgaggcctacaaagatcatcttccttaataatacaggcggccttcgcgatagctcccacaaggttctctcaaatgtgaatctgccagctgacctggacctggtctgtaatgccgagtgggtgagtactaaagaaagacagcaaatgcgcttgatcgtggatgtactgtctaggctccctcaccacagttccgctgtcatcactgccgcatctaccctgctgaccgaactgttctctaataagggcagcggcactctctttaagaacgcagagcgtatgttgcgcgttagaagcctggacaagttggatcaaggtcgtctggtagacctggtgaacgctagttttggcaaaaagctgcgtgacgattacctggccagcctccgcccccgtcttcattctatctatgtcagtgagggatataacgctgccgccatcctgactatggagcccgtcttgggaggcaccccttatctggacaaattcgtggttagtagcagtcgccagggacagggcagcggacagatgctgtgggaatgtctgcgcagggacctgcaaacacttttctggcgttcccgtgtgactaacccaatcaacccctggtatttcaagcatagcgatggttctttttctaacaaacagtggatcttcttctggtttggattggccgacatcagagattcctacgaactggtcaaccacgctaaaggtcttcctgactccttccacaagcccgccagcgatcccggaagc

SEQ ID NO: 245239 - DNA, 1602 bp, Artificial Sequence
  derived and/or modified sequence
atggccacagcactcatggcggtcgtcctgcgggcagctgcagtggctccccgcttgagaggaagaggaggcactggtggcgcccggcggctgtcttgtggagcacggagaagagctgcacgagggacttctcccggcaggagactctctactgcatggagccagccccaacctcctcccgaagaatatgcgggagcggacgatgtgagccagtctcctgtcgcagaagaacctagttgggtacctagccccagacctcccgtgccccacgagtcccccgagccgccttctgggcggtcactggtgcaaagagacatccaggcattcctgaaccagtgcggcgcatcaccaggcgaagcacgacactggctgacccagttccagacctgtcatcacagtgctgacaagccttttgccgtgatcgaggtagacgaagaagtgctcaaatgccagcagggcgtgagcagcctggcgtttgcccttgcgttcctgcaacgcatggatatgaagcctcttgtcgtgctcggactgcccgcgccgaccgcccccagcgggtgcctgtccttttgggaggctaaagcccaacttgctaagtcctgcaaagttctggtggatgcactccgtcacaacgccgcggctgcagttccattttttggggggggatcagtactgcgcgcagctgagcccgccccccatgcgagctacggcggaatagtgtccgtggagaccgacctgctgcagtggtgccttgagagtgggagcatcccaatactgtgccccattggagagaccgctgcccggcgttccgttcttcttgacagcctggaggtcacggcttcactggccaaggctctgcgtcccacaaagatcatctttctgaacaacactggtggcctgcgggattcttctcacaaagtgctgagcaacgttaacctgcctgcagacctggatctggtttgcaacgccgagtgggtgagcaccaaggaaagacagcaaatgaggctgatcgttgatgttttgagcagactgccacaccattcgagcgcggtgatcactgccgcgtcaacactgttaacggaactattctccaataaggggtctggcaccctgtttaaaaatgctgaacggatgttgagggttcgttccctggacaaactggaccagggtcggctggtggatctggtaaatgcatccttcggcaaaaaactgagggatgattatctggcatccctacggcctaggctgcactctatctatgtttcagagggttacaatgctgcagccattctgaccatggaacctgtattaggaggaaccccgtatctcgacaaatttgtagtttcatcatctcgccagggccaaggatcaggccagatgctgtgggagtgtctgagacgcgacctgcaaaccctgttttggagaagccgcgtgactaatccaataaacccttggtatttcaagcatagcgacggcagcttctcaaataaacagtggatttttttttggtttgggctggctgacattagagattcctacgagcttgtgaatcatgccaaaggccttcccgattccttccacaagcctgctagtgacccgggaagc

SEQ ID NO: 245240 - DNA, 1602 bp, Artificial Sequence
  derived and/or modified sequence
atggcaaccgctctgatggctgtggtcctgagagccgcggcagtggcaccacgacttcgaggacgtggaggcaccggaggcgcgcgtagactgtcttgtggggccaggaggcgtgccgcccgaggcacaagtcctgggaggaggcttagcactgcttggtcacaaccacagcctccacccgaggagtacgcaggcgccgacgacgtttcacaatcaccggtggcggaggaaccctcatgggtgccgagcccgcgcccccctgtgcctcatgaatcccctgagccccccagtgggaggtcattggtccagcgtgatatccaggcattccttaatcaatgcggcgcttcgcctggtgaggccaggcattggctcactcaattccaaacctgccatcattcggctgacaaacccttcgccgtgattgaggtcgatgaggaagtgcttaaatgtcagcagggagtttccagcctggctttcgccctggcattcttgcagcgcatggacatgaaacccctggtcgtcctcgggcttcctgcacctacagctccctctggatgtctctccttctgggaggcaaaagctcaactcgccaagtcttgcaaggtcctggttgacgcactgcggcacaatgccgctgcagctgtaccattttttggaggtggatctgtcctcagggcagctgagccggctccacacgcttcctatgggggaatcgtctctgttgagactgacctcctccagtggtgcctggagagtggaagcattcccatcttgtgtcccataggggaaactgccgcgagacgtagcgtgctcctcgattccttggaggtgaccgcttcactggcaaaagccctgcgtcctaccaaaataatattcctaaataataccgggggtctccgcgatagttcacataaggtcttatcgaatgtgaaccttccagccgatctggacctggtttgcaatgcggaatgggtgtccactaaggaaaggcaacagatgaggctgatagtggacgttctgtcaaggttaccacaccattcaagcgctgttatcacggcagcttcaacccttctcactgaactcttctccaacaagggctccggcacattattcaagaatgccgaacgaatgctccgggtccgatcactagacaagctggatcagggtaggctagtcgaccttgtgaatgcgtccttcggaaagaaacttagggatgactatctggccagcctgcgaccgcgtcttcattcgatctacgtcagcgaaggttacaatgccgcagcgatcctgaccatggaacccgtgctcggcggtacaccttatcttgacaagttcgtggtcagctctagtagacagggtcaggggagtggccagatgctgtgggaatgtctgagaagggatctgcagaccctgttctggagaagtagagtgaccaatcccatcaacccgtggtatttcaagcacagtgatggctcatttagcaacaaacagtggatatttttctggtttggactcgccgatattagggactcctatgaattagtgaaccatgcaaagggactgcccgactctttccacaagcccgcctcagaccctgggtcc

SEQ ID NO: 245241 - DNA, 1602 bp, Artificial Sequence
  derived and/or modified sequence
atggcgaccgctctgatggctgtggtcctccgtgccgcggccgttgcgccacggttgagaggaagaggtggcactggtggagcacggcggctgtcgtgtggggctcggagacgggccgccaggggaacgtcccctggtcgccggttgtcgaccgcgtggagtcagccgcagccgccccctgaagagtatgccggggctgacgatgtgtcccagtcgccggtcgcggaagaaccatcctgggttccgtcgcctagacctccggtgccacacgaatcgccagagccgccctctggaaggtccctcgtgcaacgcgatatccaagccttcctgaaccagtgcggcgcctccccaggagaggccaggcactggctgacccagttccagacttgtcaccatagcgccgataaaccatttgccgtgattgaagtggacgaggaggtgctgaaatgccagcagggagtctcttcactggcgtttgctctggcattcctgcaacgcatggatatgaagccgctggtggtcctgggcttgccagcaccaaccgccccgagcggatgcctgtccttctgggaagcgaaggcacaacttgccaagtcgtgcaaggtcctcgtggatgccttgaggcataacgccgccgctgcggtcccgttcttcggaggaggaagcgtcttgagagcggcagagccagcaccgcatgcgtcatacggtggcatcgtgtcagtggagactgacctgcttcagtggtgcctcgagtcgggatcaatcccgatcctctgcccgatcggagagacggccgctcgccggtcagtgctgctcgactcgctggaagtgacggcaagcctggctaaggccctgcgaccaaccaaaatcattttccttaataacaccggggggctccgggattcctcacataaggtcctgtccaatgttaaccttcctgcggatctggatcttgtctgtaacgccgaatgggtgagcactaaggaacgccaacagatgcgcctcatcgtggatgtgctgtctcgcctcccgcaccactcaagcgcagtaatcactgccgcctcgaccctgcttaccgaactgttttcgaacaaaggctccggaaccctctttaagaatgcagaacgcatgcttcgggtgagatccctggacaagttggaccaaggacgcctcgtcgacttggtgaacgctagcttcggaaagaagctcagagacgactacctggcctcactgcgcccgcgcctccactcgatctacgtgtccgagggctacaatgccgcagcaattctcactatggagccggtgctgggaggcactccgtacctggacaaattcgtggtgtcaagctcgcggcagggacaagggagcgggcagatgctgtgggaatgcctccggcgcgacctccagaccctgttctggcgatccagagtgactaatcccatcaacccctggtacttcaagcactcggacggaagtttctcgaacaagcaatggatctttttctggtttggcctcgctgacatccgcgattcctacgaactggtcaatcatgcgaaaggtctgcctgacagcttccacaagcctgcgtccgaccccggcagc

SEQ ID NO: 245242 - DNA, 1602 bp, Artificial Sequence
  derived and/or modified sequence
atggccacagcactgatggccgtagtgctgcgcgctgccgcagtggcacctcgcctgcggggaaggggaggaacaggaggcgcaaggcgactgagctgcggggcccggcgaagggctgcacgcgggaccagcccagggcgccggctgagcaccgcgtggagccagccccagcccccccctgaagaatatgccggcgcggacgatgtttcacagtcccccgtggctgaggaacccagctgggttccatcccccagaccgcccgtcccacacgagagtccagaaccacctagtgggaggtctcttgtgcaaagggacatccaggcgttccttaatcagtgtggcgccagccccggcgaggcacgccactggctcacccaattccagacctgtcatcacagtgctgacaagccttttgcagtgatcgaggtggatgaggaagtgctcaaatgccagcagggagtcagcagtttggcctttgcgcttgcttttcttcaacgcatggacatgaagccactggtggtgctggggctgcccgcacccaccgctccctcaggctgcctgagcttttgggaggctaaggcacagctggcaaagtcttgcaaagttctggtagacgctcttagacataacgccgcagcagccgttccattcttcggaggggggtctgtcctgagggctgctgagcctgccccgcacgcttcctacggtggaatcgtatctgtggagaccgatctgctccagtggtgcctcgagagcggatccattccaattttatgtccaatcggggagacagccgccaggcgcagcgtgttactggactcactcgaggtcacggcctcgcttgccaaggctctgaggccaactaagattatcttcctgaataataccgggggcttaagggactcttcgcacaaagtcttatccaacgtaaacctacctgctgacttagaccttgtttgcaacgcggagtgggtttctacaaaggaacgccagcaaatgcgactaatcgtggacgtcttgagtcggttgccccaccactcatccgcggtgatcactgctgcctccactctgctgactgaattattcagtaacaaaggcagcggcactctcttcaagaatgctgagcggatgttgcgggttcgctctctcgacaagttggatcaggggcggctggtggatttggtgaacgcttcatttggaaagaaactgagagatgattacttagcctcattgagacctcggttgcatagcatctacgtcagtgagggttataacgccgctgcgatactcaccatggagccggtgcttggcggcaccccttacctggacaaattcgtggtgtcttccagccggcagggccaggggagcggccaaatgctctgggaatgtctgagacgggacttgcagacactgttttggcgcagtcgggtgacaaacccaatcaatccgtggtatttcaagcacagcgatggctccttttccaataaacaatggattttcttctggttcggccttgccgatatacgcgattcttacgaactggtcaatcacgctaagggactccctgattcattccacaagcccgctagcgaccctgggagt

SEQ ID NO: 245243 - DNA, 1602 bp, Artificial Sequence
  derived and/or modified sequence
atggccacggccttgatggccgtggtactgagagctgccgcggtagctcctcgcttgagaggaaggggcggaaccgggggagcaagacggcttagctgcggggcccgaaggcgagctgctagaggtacctcccctggacggcggctgagcactgcttggtcacagccccagccgccacccgaagagtacgccggcgccgatgatgtctcacagtcccccgtggcggaggaaccctcttgggtaccctccccacgtcccccagttccccatgagtcacccgaaccgccatctgggaggagcttagtccagcgagatatccaggccttcttaaatcagtgtggggcctccccaggcgaagccaggcactggctgactcagttccaaacttgccaccactctgctgataaaccattcgccgtgatagaggtcgacgaggaggtgctcaagtgccaacagggcgtgtcctcactggcattcgcactagcattcctgcagaggatggacatgaagcctctggtggttcttggcctccctgccccaacagccccttccgggtgtctgagcttctgggaagccaaagcccagctggccaaatcatgtaaggtcctcgtggacgccttgcggcataatgctgccgccgcggtgcccttctttggaggcggctctgtgctgagagcagcagagcccgctcctcacgctagctatggaggaatcgtcagcgtggaaactgacctgctgcaatggtgcctagagtctggaagcatccctattctgtgccccatcggcgagacagcagctagaaggtctgtgctgctggactccctggaggtcacggcctccctcgcaaaagcgctcaggcctacgaagatcattttcctgaataatactggcggtcttagagattcctcacacaaagtgctgtccaacgtgaacctgcccgcggatctggatctggtgtgtaacgccgaatgggtgtcgactaaggaaagacagcagatgagactgatcgtggatgttctgtctagacttccccaccatagtagcgccgtgatcactgcagcttccacactgttaactgagctgttctccaacaaggggtccggaaccctgttcaagaacgcggagcggatgctgagagtgagatctctggataagctggaccagggccggctggtagatctcgtgaatgcgtcattcggaaaaaaactgcgggacgactacctcgccagcctgaggcctagattacattccatctacgtatcggaaggatacaatgccgccgctattttaaccatggagcctgtgctgggcggaactccctacttggacaaattcgttgtcagctcttcccggcaggggcagggaagtggacagatgctctgggagtgtctgagacgcgatttgcagacactgttttggaggtcgcgcgttacaaatccaatcaacccatggtacttcaaacactcggacgggagcttcagcaataagcagtggatttttttttggttcggcttagcggacatccgggactcatacgagctcgtgaaccatgctaagggactccccgactcttttcataagcctgcaagcgaccccggctcc

SEQ ID NO: 245244 - DNA, 1602 bp, Artificial Sequence
  derived and/or modified sequence
atggccaccgcgctcatggccgtcgtgctcagagccgctgccgttgctccaagactgaggggccggggaggcacaggcggtgcccggagactaagctgcggggcgcggcggcgcgccgctagaggaacttcaccagggcggcggctcagcaccgcatggtcccagccacagcctccaccagaagaatatgccggtgccgacgatgtgtcgcagtcccccgtggcagaggagcctagctgggtgcccagccctcgcccccccgtgccacatgagagccctgagcctccaagcggacggtccttggtacagcgagatatccaggcctttcttaaccaatgcggagcaagccctggagaggccagacattggctcactcaattccagacgtgccatcacagtgccgacaaaccgttcgcggtcatcgaggtcgatgaggaggtcttgaaatgccagcagggtgtgagcagtctcgccttcgcactagcttttctccaacgcatggacatgaagccactggtggttctgggactccctgcccctacagccccctctggttgtctgtcattctgggaagccaaggcgcaactggccaagagctgtaaggtccttgtagacgccttacgtcacaacgccgctgctgcggttccattcttcggtgggggtagtgtgctgcgggcggcggaacccgcgcctcatgcttcttatggcggcatcgtcagcgtggagaccgaccttctgcagtggtgtctcgagtccggatctatccctattctgtgtcccatcggcgaaactgctgcccgtcgctccgtgcttttagatagcctggaggtgaccgcaagcctcgctaaagcgctgcgccctaccaagattatctttttgaataatacgggagggctgcgggattcttcgcacaaagtcctcagcaatgtgaatctccctgcggatctggatctggtgtgcaatgctgagtgggtgtcaactaaggagaggcagcagatgcgcctgattgtagacgtcttgtcgagactgccccaccatagctctgccgtgatcactgccgcaagtacattgctgacagagctatttagtaataagggtagcggcacccttttcaagaacgcagagcgcatgctcagagttcgcagcctggacaagctggaccagggccgcctggttgacctcgtgaatgcttcttttggaaagaagctaagagacgactacctcgctagcctgaggcccaggctgcactcaatatacgtgagtgagggatacaatgccgctgcgattcttaccatggagcctgtgcttggaggtactccatacctggataagttcgttgtgtccagctcgagacagggacagggcagcggacagatgctgtgggagtgtttgcggagggatctgcagaccctgttctggaggtccagagttaccaacccaatcaatccatggtacttcaagcactccgacggttctttcagcaacaagcagtggatttttttctggtttggcctggctgacatcagagattcctatgagctggttaatcacgccaaggggctgcctgatagcttccataaacctgcctcggacccagggtca

SEQ ID NO: 245245 - DNA, 1602 bp, Artificial Sequence
  derived and/or modified sequence
atggcaacagcactgatggcagttgtgttacgagcggcggctgtcgcaccaagactccggggcaggggtgggactggcggggctaggcgtctgagctgcggagcacggcggcgcgcagccagaggaacctcccccgggcgtaggttgtccacagcttggtcacagccccagccgcccccggaggaatacgctggggccgacgatgtctctcagtctccagtcgcggaggaacctagctgggtcccatcacccaggccccccgtgccacacgaatcacccgaacccccctctggccggagcctggtacagcgcgatatacaggcgttcttaaatcagtgcggggccagtccaggcgaggcccgtcattggcttacccagttccaaacgtgtcatcattcagccgataaacccttcgcagtgattgaagttgatgaggaagtccttaagtgccagcagggcgtcagttccctagcttttgccctcgcatttttgcaaagaatggacatgaagccactggtggtcctgggcttgcccgcacctacggcaccgtccggctgtctgtcattctgggaagcgaaggcgcagctggcaaaatcttgcaaagtacttgtggacgctctgcggcacaacgcagctgcggcggtgccttttttcgggggcggctccgtcctccgcgctgcagagccggctccccatgcaagttacgggggaattgtgagcgttgaaaccgatctcctccagtggtgcttggagtctggatctatccctattctgtgccctatcggcgaaaccgctgccagaagaagcgtgttgctcgactctttggaagtgaccgcatccctggcgaaggctctaagacccaccaagatcatcttcctcaacaacaccggtggactgagggattccagccacaaagtgttgagcaatgttaacctacccgcggacttggacctggtgtgtaacgcagaatgggtttctaccaaggagcgccaacagatgaggctcattgttgacgtactgtctcgactgcctcatcactcttccgctgttatcaccgcggccagtaccctactcacagagctgttctctaacaagggctctggcaccctgtttaaaaacgccgagaggatgttacgcgtgcgttcactagacaagctggatcagggcagactcgtggacctggtcaacgcatcctttgggaagaagctgagggacgactatctcgcctctttaaggcctcggctgcactctatctatgtgagcgaaggatacaatgcagccgctatcttgacaatggaaccagtactgggtggcacaccctacctcgacaagttcgtggtctcctcttctcggcagggccagggatctggccagatgctatgggaatgcctgcggcgggatctgcagactctattctggcgctctagagtgaccaaccccattaatccctggtactttaagcacagtgacgggtcctttagtaacaaacagtggattttcttctggttcggcctggcggatatcagagatagctacgagctcgtgaaccatgctaagggactgcccgactctttccacaaaccagccagtgatccaggttct

SEQ ID NO: 245246 - DNA, 1602 bp, Artificial Sequence
  derived and/or modified sequence
atggccacagcactaatggccgtcgtcctcagggctgcagcagttgcacccagattgaggggaagaggggggactggaggtgctagacgcctttcgtgcggagctcgccgaagggctgctcggggaacatcgccaggccgacggttgagcactgcatggtcgcagcctcagccgccccctgaggagtacgccggagctgacgatgtgtcccagagtcccgtggctgaagagccatcatgggtgccttcgccccgaccacccgtcccgcacgagagcccagaacccccgtctgggagatcactcgtgcagagggacatccaagcctttttaaaccagtgtggcgcctctccgggagaggctcgccactggctgacccaattccagacctgccatcactcagccgacaagccttttgccgttatcgaagttgacgaggaggtgttgaaatgccaacagggggttagtagcttggctttcgctctcgcattcctccagcggatggacatgaagccactggtagtgttaggcttgccggcccctaccgccccgagtggctgtctgtccttttgggaggccaaagcccagttagcaaagtcttgcaaagtgctagtggatgcgctgcggcataacgcagctgcagccgttccctttttcggaggcggtagtgtgctacgcgcggctgaaccagcaccgcacgcatcttacggtggaatagtgagcgtggagactgatctgctccagtggtgcctggaatccgggtcgattccaatcttgtgccccattggagagacagccgcccgcaggtccgtgctactcgacagcctagaggttacagctagcctcgccaaagccctgcgaccaactaaaattatcttcctaaataatactggaggcctccgcgactcctctcacaaagtcctttccaacgtcaatctacctgctgacctggatcttgtgtgtaatgccgaatgggtgtctacaaaggagagacaacagatgaggctcatcgtggacgtgctgtcacgccttcctcaccactccagtgctgttattaccgctgccagtacactgctgaccgaattgtttagcaacaagggctcagggacactgttcaagaacgcggagaggatgctgcgcgtgaggagtctggataaactcgatcaaggtagactcgtggacctcgtaaatgcctcctttggtaagaagctacgggacgattatttggcatctctgaggccgagattacactcgatttacgtaagcgagggctataatgccgcggcgatcctgactatggaaccggtcttaggagggactccctacctcgacaagttcgtggtgagctcttcccgccaggggcaaggctcgggacaaatgctctgggaatgcctcagacgagatcttcagacgctattttggaggtcccgcgttactaaccctataaacccctggtactttaagcactctgacggctccttttccaacaaacagtggatctttttctggttcgggttggcggacatccgggacagctacgagctagtgaatcacgcaaagggactgcccgatagcttccataaaccagcttctgatcctgggagt

SEQ ID NO: 245247 - DNA, 1602 bp, Artificial Sequence
  derived and/or modified sequence
atggccactgcactaatggccgtggtgctgagagctgccgcggtggccccaaggctgagaggcaggggcggcacaggcggcgctaggcggctgtcttgcggtgccagaaggcgcgcagctcgtggtaccagtcctggacgaagattaagcaccgcctggtctcagcctcagcctcccccggaggagtacgccggggcggacgacgtgtcccagtcccctgtggcagaggaacccagttgggtccccagtcctagaccgcctgtgcctcacgaatctcccgagccacctagtggaagatccttagtacagcgggatatacaggccttcttaaaccaatgtggcgcctcaccaggggaggccaggcactggctcacccagttccagacgtgtcaccactctgccgacaagccattcgctgtcatcgaggttgatgaagaggtgcttaaatgtcaacaaggagtgtcaagtctggcctttgctctggcattcctccaacgcatggacatgaaacccctcgtggtgcttgggctacctgcccctaccgcgcccagcggctgccttagcttctgggaggctaaggcccagcttgccaagtcctgcaaggttcttgtggacgctttgcgacataatgctgccgccgctgtgcctttttttggcggtggttctgtgctaagggccgcagagccggcgcctcacgcatcatacggcggtattgtgtctgttgagaccgacttattacagtggtgtttggagtccgggagcatacctattctctgtcccattggggagaccgcggcacggcgctccgtgctcctggattctcttgaagtgacagcgtcactcgctaaagccctgcgtccaaccaaaattatctttctcaataacaccggaggactgagggacagttctcacaaggtgctgagtaatgtcaacttgcctgcggatctggatcttgtctgtaacgcagagtgggtatcaaccaaggagcgtcagcaaatgagacttatcgtcgatgtcctaagtcgattaccacatcattcctcagccgtgatcacagcagctagcaccctgcttactgaactgttttctaacaagggcagcgggactttgtttaaaaacgcggagcgcatgctcagggtgcgttccctggacaagctcgatcaaggacgcctcgttgacctcgtcaacgcctcattcggcaaaaagctgagagacgactacctggccagccttcgccctcgtcttcactcaatctacgtgtcagagggctacaacgcggctgctatcttgacaatggagccagtcctgggggggacaccatatctcgacaaatttgtagttagcagctcaagacagggtcagggcagtggacagatgttatgggaatgcctccggcgggatctgcaaaccctcttctggaggagccgggtgacaaatccgatcaacccttggtacttcaagcattctgacggaagcttctccaacaagcagtggattttcttctggttcggcctggccgatatccgggatagctacgaactcgtgaatcatgccaaggggttacctgattcattccataaacccgctagtgaccctgggtca

SEQ ID NO: 245248 - DNA, 1602 bp, Artificial Sequence
  derived and/or modified sequence
atggccactgccctcatggcagtcgtcttgcgggcggccgccgtcgccccaaggcttcgaggccggggtgggaccgggggcgccagaaggctgtcttgtggggccaggagaagagcagctcggggtacctctcccggtagaaggctgtctaccgcttggagtcagccacaacccccaccagaggaatacgccggcgcggacgatgtatcacagagtccggtagcggaggaaccctcttgggtgccatctcctcgaccccccgttccccacgaaagtcccgagcctccctccggccggtctctggttcagcgagatattcaagcctttttaaaccagtgtggcgcctctccgggagaagcaaggcactggctcacccagtttcagacgtgtcatcacagtgctgataaaccattcgcagtcattgaagtcgacgaggaggtgctgaaatgtcagcagggagtgtccagcctagcatttgctctcgccttcctacaaagaatggacatgaaaccattagtggtacttggccttcctgcccctaccgccccgagtgggtgtctgtcgttctgggaagccaaagcccagctggcaaagagttgcaaagtacttgtcgatgccctgaggcacaatgcggcggcggctgtgcccttctttggagggggaagcgtcctgcgtgctgcggagcctgctccccacgccagttatgggggaatcgtttctgtcgagacagatctcttgcagtggtgtctcgagtccggttctatcccaattttgtgcccgatcggcgagacagccgctagacggtcagtcctgctagactctttggaggttacagccagcctcgcgaaagctctcagaccaaccaaaattattttcctcaataacaccggggggctccgggactcctcacacaaagtgctgagcaacgtgaacttgcctgcagatcttgacctcgtgtgtaatgcagaatgggtgtcaaccaaggagaggcaacagatgcggctgattgtagatgttttatccagactgcctcaccattcttcagcagtgattacagccgcctcaactctactgactgagctgttttctaacaaaggcagcgggacactgtttaagaatgcagagcgcatgctgcgtgtgaggtctctggataagctggaccaggggcgcctcgttgatctcgtcaacgcaagctttgggaagaaactgcgagatgattatctcgcgtctctgcgaccgagactccactcgatatacgttagcgagggatataatgccgcagctatcctcactatggagccagtgttaggaggcactccgtatcttgacaaattcgtggtgtcttcatctcgacagggacaaggcagtggtcaaatgctgtgggagtgcctcagaagggatctacagacattgttctggagatctcgagtaactaaccctataaacccctggtacttcaagcacagcgatgggtcattttcgaacaagcagtggatatttttctggtttggcttggcagacattcgcgacagctacgagctggtgaatcacgctaagggcctccccgacagcttccataagcctgcttctgacccaggctca

SEQ ID NO: 245249 - DNA, 1602 bp, Artificial Sequence
  derived and/or modified sequence
atggcaacggcgctgatggctgttgtactgcgcgcggcagcggttgcccctagattgcgaggccgtggcggaacgggtggggccagacgcctcagctgcggagccagaaggcgagctgcgcgtggaaccagcccaggtcgccgtctgtcaaccgcatggagccagccacaacctccgcctgaagagtatgccggtgcggatgacgtgagccagtcccctgttgccgaggaaccaagctgggtaccttccccgaggcctccggtccctcatgagtccccagagcctccaagtggcaggagtctggttcagcgcgatatacaagcttttctgaatcagtgtggagcttccccaggcgaagcccgtcactggttgacccaattccagacgtgtcatcattcagcggataaaccttttgccgtcatcgaagtggacgaggaggtcttgaaatgccagcaaggtgtgagcagcctcgccttcgcgctagctttcctgcagcgcatggacatgaaaccattggtcgttctgggcctgcctgctccaacagccccatctggttgcctgtccttctgggaagcaaaagctcagttagcaaaatcatgtaaggttttggtggacgccctgcgtcacaatgctgcggctgcagtcccattctttggcggtggttcagttctgcgtgcagctgaaccggcgccgcatgcgtcgtatggtggcatcgtcagtgtggaaaccgacttgctgcaatggtgccttgaatccggaagcatcccgatcctgtgtcccatcggcgaaaccgcggctcggcgcagcgtactgttggatagcctggaggttacggcaagccttgcaaaggcactgcgaccgaccaagattatttttctgaacaatacgggtggtctgcgtgactcctctcataaagtgctgagcaacgtaaacctgcctgctgaccttgatctggtgtgtaacgctgaatgggtctccaccaaggaacgccagcagatgagattgatcgttgatgtgctgtcccgactgcctcaccatagcagcgcggtaatcactgctgcttccacgctgctgactgaactgttcagcaataagggttccgggaccctgtttaagaacgcagaacgcatgctgcgggtacggagcctggataaactggatcagggtcgcttggttgacctggtgaacgcctcgttcgggaaaaagctgcgagacgactatctcgctagtcttcgccctcggctccacagtatttacgtgagcgagggttataacgcagcggccatactcaccatggaaccggtgctgggtggtaccccatacctggacaagtttgttgttagttcgtcccgtcaaggccagggcagcggccagatgctgtgggagtgcctgcgccgtgacctccaaaccctcttctggcgctctcgagtcacgaacccaataaatccttggtacttcaagcactcagacggatccttttcgaataagcagtggattttcttctggttcggcctggcggatataagagactcttacgaattagttaaccatgccaagggtctgccggattcgttccacaagcctgccagcgatccaggtagc

SEQ ID NO: 245250 - DNA, 1602 bp, Artificial Sequence
  derived and/or modified sequence
atggctaccgcgctaatggctgtagtgctgagagccgcggctgttgccccacgcttgaggggccgcggggggaccggaggagcccggcgactgtcttgcggcgcccgaaggcgggccgcgcgaggaacttccccagggcggcgcctctcaacggcctggagccaaccccaaccacctccagaagaatacgcaggcgcggacgatgtgagccagagtccggtagccgaggagccctcatgggtgccttcccctcgtcccccggtgccacacgaatcacctgaaccaccaagtgggagaagcctggttcagagggacatccaggcattccttaaccagtgtggggcttctcctggagaagctcgacactggctgacccagttccagacgtgccaccattcagcagataagccattcgcagtgatcgaagttgatgaggaagtgctgaagtgccagcagggcgtttccagcctcgcatttgccctagcttttttacaacgtatggacatgaaacctctagtggtactaggccttcccgcccccacggccccgtcaggatgcctaagtttctgggaagcaaaggctcagctggcgaagtcttgcaaggtgctggtggatgcccttcgccacaatgccgcagctgcagttccgttctttggtggaggctccgtgctacgggctgctgagccggccccacacgcgtcttacggggggatcgtaagtgtggagacagacctcctacagtggtgcttggaatctggaagcattccgatactgtgcccgataggggagacagccgcacgcaggagcgtgcttttggattccctcgaagttacagccagcttggccaaggccctaaggcctacaaagataatatttctgaataatactggcgggctgcgcgacagctcgcataaggtactatctaatgtgaacctgccggcggatctggacttggtgtgcaatgccgaatgggtatcgaccaaagagagacagcagatgcgattgatcgtagatgttctgagcaggcttccacaccatagttctgcggtgatcacggccgcctcaaccttattgaccgaactcttctcaaataagggcagtggtacattattcaaaaatgccgaaaggatgctgcgcgtgagaagtcttgacaaattggaccaagggcgcctggtggacttggtaaatgcctcatttgggaagaagctgagagatgactacctggcctctttacggccaagactgcactctatctacgtcagtgaagggtataacgcggccgctatcttgactatggagcctgtgctaggaggcaccccctatctggacaagttcgtggtgagcagctcacgccagggccagggaagcggacagatgctgtgggagtgtctccgccgcgatctgcagactctgttctggcgaagcagagtgactaaccctataaatccatggtattttaaacacagcgatggtagtttctcaaacaaacagtggattttcttttggtttggcctggcagatattcgggattcttatgaactggtcaaccacgccaaagggttgccggattcatttcacaaacctgccagtgaccccgggagt

SEQ ID NO: 245251 - DNA, 1602 bp, Artificial Sequence
  derived and/or modified sequence
atggcaactgcattaatggcagtagtactccgagctgcagctgttgctccaaggttaagaggaagaggaggaacaggaggtgctagaagattaagttgtggagctagacgtagagctgcaagaggaactagtcctggtagaagattatctacagcttggtcacaacctcaaccaccacctgaagaatatgctggtgctgatgatgtaagtcagtcacctgttgcagaagagccatcatgggttccaagtcctagacctccagttccacacgaatctccagaaccacctagtggtagatcattggttcaaagagatattcaagcatttcttaatcaatgtggagcatccccaggagaagcaagacattggttaactcaatttcaaacttgtcatcattcagcagataaaccattcgctgtaattgaagttgatgaagaagttttaaagtgtcaacaaggagttagtagtctagcttttgcacttgcatttttgcaaagaatggatatgaaaccacttgtggtattaggattaccagctccaacagcaccaagcgggtgtctctcattttgggaagctaaagctcaattagcaaaatcttgtaaagtcttagttgatgcattaagacataatgctgctgctgctgttccatttttcggaggaggatcagtgcttagagctgctgaacctgctccacatgcttcatatggaggtatagtatcagtagaaacagaccttttacaatggtgtttggaatcaggatctattccaatactttgtcctattggagaaacagctgctagacgatcagtattattagattcattagaagttacagcatctttagctaaagcattaagaccaacaaaaattatttttctcaataatacaggaggattaagagatagttcacataaagtacttagtaatgttaatcttccagctgatcttgatttggtatgtaatgcagaatgggtttcaacaaaagaacgacaacaaatgagattaatagtagatgttctttcacgtcttccacatcattcatcagctgttattacagcagcatcaacacttttaactgaattattttcaaataaaggaagtggaacactttttaaaaatgccgaaagaatgcttagagttagatcacttgataaattagatcaaggtagacttgttgatttagttaacgcatcatttggaaagaaacttagagacgactatttagcttctctaagaccaagattacattccatatatgtatcagaaggatataacgcagcagctattttaacaatggagccagttcttggtggtactccatatttagataaatttgttgtttcttcatcaagacaaggacaaggatcaggacaaatgttatgggagtgtctaagaagagatttacaaacattattttggagatcaagagtaactaatcctataaacccatggtatttcaaacattcagatggatctttttcaaataagcaatggatttttttttggtttggtcttgctgatattagagattcttatgaattagttaatcatgctaaaggtttgccagattctttccataaaccagcttcagatcctggatca

SEQ ID NO: 245252 - DNA, 1602 bp, Artificial Sequence
  derived and/or modified sequence
atggccactgcactgatggcggttgtcctccgggccgcagcagttgcccctagacttcgcgggaggggagggacggggggtgcccgccgcctgtcctgtggcgcccggcgacgcgcagcgagaggcacgagcccagggcgccggctctcaactgcctggtcgcaaccccaacccccacctgaggagtatgctggggctgatgatgtgagccagagcccagttgccgaagagccgtcatgggtcccatctccccggcctcctgtgccccacgagtctcctgagccacctagcggccgttccctggtgcagagggacatacaggcctttctcaatcaatgcggagcatccccgggtgaagctcggcattggcttacccagttccagacttgtcatcattccgccgataagccattcgccgtgatcgaggtggacgaggaggtcctgaagtgtcagcagggcgtgagctctcttgcatttgcactggccttcctgcagcggatggatatgaagcctctggtggtgctcggcttaccagccccaacggctccttcagggtgcctgtctttctgggaggccaaggcacagctggccaagtcttgtaaagtgctggtggacgcgttaagacacaatgccgctgctgcagtgcccttctttgggggtggaagtgtgttacgtgctgctgaaccagctcctcacgcctcttatggaggcattgtgtccgtggagaccgacctgctccagtggtgtctagaaagcggaagtatccccatcctctgtccgataggagagactgctgcacggcgatccgtactgttagacagcctggaagtgacagcttctctggctaaggcactacgcccaacaaaaattatcttcctgaataatactggcggtctgagagacagctcacataaggtcttgtcaaatgtgaacctgccagccgaccttgacctggtatgtaatgccgagtgggtgtccacaaaagaaaggcagcaaatgcggctgattgtcgacgtgctatctagactcccccaccacagctcggctgtgatcaccgctgcgtccacattactgacggaactttttagcaataagggttcagggactctttttaaaaatgccgaacgaatgctgcgcgtcagatcccttgacaagctggaccaaggccgcttagttgacctggtcaacgcgtcatttgggaagaaactgcgcgacgactacctggcctcacttcgtcccagactccactcaatctatgtgtccgaaggatacaacgctgctgccatcctgacaatggagcctgtcctaggtggcactccatacttggacaaattcgttgtctctagcagtcggcagggccagggatccggacagatgctctgggaatgtctcagacgggatttacagacacttttttggcgaagcagagtgacaaatcccatcaacccttggtattttaagcactctgatgggagtttttcaaataaacagtggattttcttctggttcgggttggccgacatcagagatagttacgagctggtcaatcacgccaaaggcctgcctgactcgtttcacaaacctgctagcgatcctggatcc

SEQ ID NO: 245253 - DNA, 1602 bp, Artificial Sequence
  derived and/or modified sequence
atggcaactgcccttatggcagtagttctgagggctgccgcagttgctccaaggctgcgcggccgcggcggtactggcggtgctcgccgcctgagttgtggtgcccgcaggagagctgcacgcggcacctcccctggccgcaggttgtcaacggcatggtctcagccacagccaccccccgaagagtacgcgggagctgatgatgtgtcacagtcacccgtcgccgaagagccctcctgggtcccgagtccccgcccaccagtcccacacgaaagccctgagcctccatctggaagaagtttggtccagagggatattcaggccttccttaatcagtgtggtgcctctccgggcgaggcgaggcactggctgactcagtttcagacttgtcaccattctgctgacaagccgttcgcagttatcgaagttgatgaggaggtcctcaagtgccagcagggcgtctcatcactcgccttcgcacttgcgttccttcaaaggatggacatgaagccacttgttgttctcggtctccccgcacccacagccccttccggctgccttagtttctgggaggctaaggcgcaattggctaaaagctgtaaagtcctcgttgacgctctgaggcacaatgccgccgctgcagttccttttttcggaggaggttccgtgctcagagccgctgaaccagccccccatgcaagctatggaggaattgtcagtgtggagacggatcttctgcaatggtgcctggagtctggcagtattcccatcctgtgcccgattggagaaacggcagctcgccgctccgttttgctggactccctggaagtgactgcatcattggccaaagctcttcgcccgactaagataatcttcttgaacaacaccggaggtctgagggactcatcacacaaggtcctctccaacgtcaatcttccagccgatctggacctcgtttgcaatgcggaatgggtctctactaaggaacgccagcaaatgaggttgatcgttgacgtgctgagtcgcttgcctcatcattccagtgccgtcatcacagcggcctccactctgctcactgagctcttcagcaacaagggcagtggcaccctgtttaagaacgcagagcgcatgctcagggtaaggtcacttgataaactggatcaaggtcgcctggtggacttggtcaacgctagtttcggaaagaagctccgcgatgactatctggcctccctgagaccacgcttgcactctatctatgtctcagaaggatacaacgctgcagctatcctgactatggagcccgtgctgggcggaaccccttacctggacaagtttgttgtttcctcttctcgccagggccagggcagcggccaaatgctctgggaatgccttaggagggacctccagacacttttctggaggtcaagagttaccaacccgataaacccgtggtacttcaaacactctgacggatcattcagcaacaagcaatggatcttcttctggtttggcctggctgatatcagagatagttacgagttggtcaatcacgcaaaaggtctccccgactccttccacaagcctgcaagtgacccgggaagc

SEQ ID NO: 245254 - DNA, 1602 bp, Artificial Sequence
  derived and/or modified sequence
atggccaccgccctcatggcggtggtccttagggccgccgccgtcgcaccccggcttaggggccgggggggaacaggcggggcccgacgccttagctgtggggctagacggcgcgctgctcggggcacatcccctggacggaggctgtctacagcctggagccaaccccagccccctccagaagagtacgctggcgctgacgacgtctcccagagcccagtggccgaagaaccaagctgggtgccctctccaaggcccccagtaccgcacgagtctcctgagccacccagtgggcgatccctggtgcagagggacattcaggctttcctcaaccagtgtggagcatctcctggagaggctagacactggctgacccagtttcagacctgtcaccacagtgccgacaagcccttcgccgtgatcgaagtggacgaagaagtactgaagtgtcagcagggcgtgtcttctctggccttcgccctggcattcctgcagcgcatggatatgaagcctcttgtcgtgcttgggcttcctgccccaaccgcaccaagcgggtgcctgagtttttgggaagctaaggctcagctggctaaatcctgtaaagtcctggtggacgccctcagacataatgcagccgcagctgtcccatttttcggcggaggcagcgtgctgcgggctgcggagccggcaccacacgcgagttacggaggtatcgtctccgtggagaccgacctcctgcagtggtgtctcgaatcaggctccattccgattctgtgccctattggtgaaaccgctgcaaggcgatctgtgctgctggattccctggaggtgacagctagcctggccaaagctctgagaccaactaagatcatattcctgaataatactggcggattgagagactcatcccataaggtgctgtctaatgtgaatctgcccgcggatctcgatctcgtgtgtaacgcagagtgggtttctacaaaggagaggcaacaaatgagacttattgtggatgtcctctcaaggctgcctcatcacagcagtgccgtcattactgcggcctctacactcctgacggagctcttcagcaataaggggagtgggaccctcttcaagaatgctgagagaatgcttcgggtccggtccctcgacaaacttgaccaggggcgcctggtggatctggtgaacgctagctttggtaaaaaactgagagatgattacctcgcatccttgcggccgcgcctgcactcaatatatgtctctgaagggtacaatgcagccgccatccttaccatggaaccagtgctcggcggcacaccttacctggacaagtttgtggtcagcagttcccgacagggtcaaggcagcgggcaaatgctttgggagtgcctccggcgagatctgcaaaccctgttctggcggtcacgagtgactaatccaattaatccatggtactttaagcatagcgacggatccttctccaataagcagtggatcttcttctggttcggcctggcagatatccgagactcttatgagctggtaaaccatgctaaaggcctgccagattccttccataaacccgcttcagatcctggatca

SEQ ID NO: 245255 - DNA, 1602 bp, Artificial Sequence
  derived and/or modified sequence
atggcaaccgcattaatggctgtcgtccttagagctgcagcggttgcccccagactgcgcggacgtggcggtacaggcggagctcggcgtctatcatgcggtgcccgcagacgagctgcacgaggaacatcaccaggacgacggctcagcaccgcttggtctcaaccacaacctccgcctgaagaatacgctggtgcagatgacgtgtcacaatcgcctgtggcagaagagccatcatgggtcccttcaccgcggccaccagttccacatgagtcacctgaaccaccgtccggtcgctcccttgtccaacgtgacatacaggcatttctcaaccaatgcggagcttcaccgggagaggccagacattggttgacgcagttccaaacgtgtcatcatagtgcagataaacctttcgcagttatagaagttgacgaagaggtcctaaaatgtcaacagggtgtgtcaagccttgcattcgccttagcattccttcaaagaatggatatgaagcctcttgtcgttcttggattgccagctccaacagcaccgagtggttgtctttcattttgggaagcaaaagcgcaattggcgaagtcatgtaaagttcttgtcgatgcgttgcgacataatgcagccgccgccgtaccattctttggaggaggaagtgtcttacgtgcagcagaaccagcacctcacgcatcctatggaggcatcgtatcagttgagacagatctgctgcaatggtgtttagaatctggatcaattcctatcctttgtccaataggagagactgctgctcgtagaagcgttttgttggattcacttgaagtcactgcttctcttgctaaggctttacgaccgactaaaatcatttttcttaataatacgggaggactgcgagactcctctcacaaagtgctttcgaatgtaaacttgcccgcagatttagatttggtgtgcaatgcggaatgggtttcaacgaaggagcgccaacaaatgcgtttaatcgttgacgtcttgtctcgcttaccacatcatagctctgcggtcataacagctgctagcacactcctgacagagctgttttcaaacaaaggctctggaactctattcaaaaatgctgaacggatgcttcgagttcgatctttggataagctggaccaaggaagactcgttgatctggttaacgcttctttcggcaaaaaactacgtgatgattatctagcatcactacgtccaagattgcactcgatctacgtgtcggaaggatataatgctgccgccatactgacaatggaaccagtgcttggcggaacaccttatctggacaaatttgtcgtctcctcttcccgtcaaggacaaggttctgggcagatgttgtgggagtgcctgagaagagaccttcaaacgctcttttggcgttcgcgtgtgaccaatccaatcaacccatggtactttaaacactctgacggatctttttcgaataaacaatggatcttcttctggttcggtcttgcagatattcgagactcttacgagttggttaaccatgctaaagggttgccagattccttccataaaccagcttctgacccgggctca

SEQ ID NO: 245256 - DNA, 1602 bp, Artificial Sequence
  derived and/or modified sequence
atggccactgctctgatggccgtggtattaagagctgccgcagtggcccctagactcagaggacgagggggcaccggtggcgcaagaaggttatcctgcggggccaggcgcagggctgctaggggcactagcccaggacgtagactctccactgcttggtcccagccacagccacccccagaggaatacgccggggccgacgatgtctctcagagtcccgtggctgaagaaccatcctgggttccttctcccagacctcccgttcctcacgaaagtcctgagccaccatctggcagatccctggtccagagggatattcaagcctttcttaaccagtgcggcgcttcccccggtgaggctcgccactggctaacacagttccagacctgtcatcattccgctgataagccttttgcagtcatagaggttgacgaggaagtattgaagtgtcaacagggcgtaagctctctggccttcgctcttgccttcctgcagaggatggatatgaaaccactggtggttctggggctgcctgcccccactgctcccagcggttgtctgtcattctgggaagccaaggctcaactggctaagtcctgcaaggttctggtcgacgcactgagacacaatgcagccgctgctgtcccttttttcggcggaggcagcgtcctgagagctgctgagcctgctccccatgcttcatacggaggaatagtaagtgtggagaccgatctccttcagtggtgcctggaatcaggaagcatccctattttatgccctatcggcgaaaccgcagcccgcagatccgttctgctagatagcctggaagtcacagcaagcctggctaaagcattgcggccaaccaaaatcatctttctaaataacacaggtggcctgcgcgactccagtcacaaggtcctctccaacgtaaacctgcccgcagatctcgacctggtttgtaacgcagaatgggtttccactaaggaaagacagcagatgcggctgatagtggatgtgttgagtcgactgccccatcattcttccgctgtcataacagcagccagcactcttctcacagagctgtttagcaacaagggttccgggactctgttcaagaatgccgagagaatgctgagggtgcgctctctagacaaactggatcaggggagactagtggacctggtgaatgcttcctttggcaagaagctacgggacgactatctggctagcctacgaccccgcctgcactcaatttatgtgtccgaaggatataatgccgccgccattctaaccatggaaccagtcctgggaggaaccccatatctggacaagttcgtggttagtagttctcgtcaggggcaggggagtgggcagatgctgtgggaatgcttgcgacgtgacctccagaccctcttttggcgctcaagggtgaccaaccccatcaacccctggtactttaaacacagcgatggcagtttttctaataagcagtggatcttcttctggttcgggctggcagacatccgggacagttatgagctggtcaaccacgccaagggcctgcctgattccttccataagcctgcctctgatcccggaagt

SEQ ID NO: 245257 - DNA, 1602 bp, Artificial Sequence
  derived and/or modified sequence
atggccacggcactgatggcagtggtgttgagagcggccgcagtggcgcccagactgagggggcgtgggggaacgggcggcgcccgccggctctcctgcggcgccaggcggagggcagcaagaggtacttcccctgggagaagactgagcacagcctggtcccaacctcagccgccccccgaggagtacgctggggctgatgatgtctcccagtcccctgttgcggaggagccaagctgggtgcctagtccacggccccctgtgcctcacgagagccctgaacccccttctggcagaagccttgtgcagagagatatccaggcgtttctcaaccagtgcggggcctcccccggagaggcaagacactggctgacccagtttcagacatgccatcacagcgccgataaaccatttgctgtcatagaggtggacgaagaagtgctcaagtgtcagcagggtgtgtcatctttagcttttgcactggcgtttctgcaacggatggacatgaagccattggttgtgctcggactacctgcccccaccgccccaagtggctgcctatcgttttgggaggcaaaagcgcagcttgctaagtcatgcaaagtgctggtggatgccctgcgccataacgctgcggctgctgttcccttttttgggggagggtcagtgctccgtgcagcggaacccgcccctcacgcttcgtacggtgggatcgttagcgtcgagactgacctccttcagtggtgtcttgaatccggctccatccccatactttgcccgattggtgagacagcagcccgtcggtcagtcctcctcgactcgctggaagtaaccgcctccctcgccaaagcgcttaggcctactaagatcatcttcctgaataatactggagggctccgagacagctcccacaaggtgctgtctaatgttaacctccctgccgacctcgacctggtctgcaatgccgagtgggtcagtaccaaagagaggcagcagatgcgattaatcgtggacgtgctcagccggcttcctcatcacagtagcgctgtgatcaccgccgcttctactctgctcaccgaattgtttagcaacaagggctcaggaacactgttcaagaatgctgagcgcatgctgagagttcggagtcttgataagttagaccaggggcgcttggtcgatctggttaacgcgtcctttggaaaaaagctgcgggacgattatctcgcatccttgcggccccggttgcacagcatctacgtgagtgaggggtataacgcggctgctatcctgactatggaacctgtgctaggaggaaccccataccttgacaaatttgtcgtgtcttcctcaagacagggacagggttcaggccaaatgctttgggagtgcctccgacgggatctccaaaccctcttttggcgcagccgcgttacaaatcccatcaatccttggtattttaagcattcggacggctctttctccaataagcagtggatcttcttttggttcgggctggcggacataagggattcatacgaactcgtcaatcacgcaaaaggtctgcctgattctttccataagccagcctccgatccaggtagt

SEQ ID NO: 245258 - DNA, 1602 bp, Artificial Sequence
  derived and/or modified sequence
atggccacagcactaatggctgtcgtcttgcgagcagcagccgtggcccctaggttaagaggacgggggggaactggaggagcccgcaggttgtcctgcggggccagacggcgggctgctaggggaacttcccccgggaggcgactgtcaacagcttggagtcagcctcagccacctccagaggagtatgctggggcggatgatgtttcgcagtctcccgtggctgaggaaccctcatgggtgccctcaccgaggccccccgtgcctcacgaatctcctgagcctccctctgggaggtctctggtgcagagggatatccaggcctttttaaatcagtgtggggcctccccaggggaagctcgacattggttaactcagttccagacttgccaccattctgcagataaaccatttgcagtaattgaagtcgatgaagaggtccttaaatgtcagcaaggagtatctagtcttgcatttgcattggcatttctgcagaggatggatatgaagccactcgtggtgttgggactgccagcccctacagccccatccggatgtctctccttttgggaagcaaaagcccagttagcaaagagttgtaaggtgctggttgatgctttgaggcataacgcagcggctgctgtgccattctttgggggaggatccgttcttagggcggctgaaccagctccacacgcatcttatggaggaatcgtttcagtcgaaactgatctcctgcagtggtgcctagaatctggaagtatccctatcctatgtcctatcggggaaacagctgcaagacggagtgtcttgcttgattccctcgaagtcactgcctcacttgccaaagcactaaggccaacaaaaattatcttccttaataacactggaggactccgggatagttctcacaaggtactgtccaacgtgaatttgccggctgatttggacttggtgtgcaatgctgaatgggtttctacaaaagagcgccagcagatgcggcttattgtagatgtcctctctcgactcccacaccatagttcagccgtgatcacggctgcatctactcttcttactgaactcttttctaacaaaggaagtgggacattattcaaaaacgccgaaaggatgttacgggtgcggtcgctcgataaattggatcagggaaggctagtggatcttgtcaatgcaagttttgggaaaaaactgcgggatgattatctggcctctctcaggccacggctacactctatatatgtgtctgaaggatacaacgccgctgctatactgacaatggaacccgtgctgggagggacgccctatttagataaatttgtggtctcctcttctcgccaggggcaggggtccgggcagatgctctgggaatgtcttcggcgggatctacagactcttttttggagaagtcgggtcacgaatcctattaatccttggtatttcaaacattccgacggatccttttctaataagcaatggatatttttttggttcgggctggcagacatacgggattcatatgaactagtcaaccacgctaagggactccctgactcatttcataaacctgccagtgatcccggatcc

SEQ ID NO: 245259 - DNA, 1602 bp, Artificial Sequence
  derived and/or modified sequence
atggccacagcattgatggccgttgtgctgagggcggcggctgtagctccaaggctgaggggacgggggggcactggtggcgcaagacggctctcatgtggagccagacgcagggctgcccggggtacttctccaggcaggcggctctcaaccgcctggtcccagccccagcctccgcctgaagagtatgctggcgcagatgacgtaagccaatcacctgttgcggaagaaccaagctgggtgccatctccaagaccacctgtgccccacgaaagcccggaaccgccgagtggtcggtccttggtgcagcgcgacatccaggcatttctgaatcagtgcggagcctctcctggcgaagctaggcactggctgactcagttccaaacttgtcaccatagcgccgacaaacccttcgccgtgatcgaagttgacgaggaggtgctgaaatgccagcaaggagtgagctccctcgccttcgcactggcttttctccaacgaatggatatgaagcccctcgttgtcctcggacttccggcacctacagctccgagcggatgtttgagcttttgggaggcgaaggcccaactggccaagtcctgcaaggtgttggtagacgcactcaggcacaatgccgcggccgccgtgccgttctttggaggtgggagcgtgcttcgggccgccgaaccggctccacatgcctcatacggtggcatcgtcagcgtagagacagacctgctgcagtggtgtctggagtctggaagcatccctatcctctgtccaattggagagacagccgcacgccgctctgttcttttggatagccttgaagtgacggccagtctcgcgaaagctctgaggcccacaaaaatcatctttcttaataacaccggcggtctgagggactctagtcataaagtactgtccaacgtgaatctgccagcggacctcgacctggtatgtaacgcagaatgggtcagcacaaaggagcggcagcagatgcggctgatcgtcgacgtgttgtcccggctgccacatcatagctctgccgtgataaccgcagcatccacgctgctcactgagctgttctccaataagggatccgggacgcttttcaaaaacgccgagagaatgcttcgcgttaggtccctcgacaagctggatcaaggacgactcgtggatctcgtgaacgcctctttcggcaagaagctgcgggatgattacctggccagcctcaggccgaggttgcatagtatctatgtgtcagagggctataacgctgctgcaatactcactatggaacctgtcctcggtgggaccccatacctcgacaagtttgtagtctccagctctcggcaggggcagggatccggtcagatgctgtgggagtgtctgaggcgcgacctgcagaccttgttctggcggtcccgggtgacaaacccaattaacccctggtactttaaacattccgacggttcattcagtaataaacaatggatcttcttctggttcggcctggcagacatacgggatagctacgagttggtgaatcacgcgaagggattgccagacagcttccacaaaccagctagtgacccaggatca

SEQ ID NO: 245260 - DNA, 1602 bp, Artificial Sequence
  derived and/or modified sequence
atggcgaccgcccttatggccgtcgtgctccgcgccgcggctgtggctcctaggctgcgcggccgcggcgggactgggggcgccaggcgcctctcctgtggggccagacgcagagctgcaagaggcactagccccggaaggcgcctcagtacggcttggtcccagcctcaacccccgcccgaggaatacgcgggtgcagacgacgtgtcccagagcccagtggctgaggagccttcttgggtgcctagcccgcgaccccccgttccgcacgagtctcctgaacccccttccggtcggagccttgtccagagagacatacaagctttcctgaaccaatgcggggccagccctggagaggctcggcattggctgactcaattccagacttgccaccatagcgccgacaaaccgttcgctgtcattgaagtcgacgaagaggtgctgaagtgtcagcagggagtaagctccttggcctttgctcttgccttccttcagcgcatggatatgaagccactggtcgtactgggactgcctgctccaactgctccatccgggtgcctgtctttctgggaagcaaaggcccagcttgcgaaatcatgcaaggttttggtcgatgccctgcggcataatgccgctgccgccgtacctttcttcggaggcggatcagtcctgagagccgcggaaccggctccgcacgcctcctacggtggtatagtgagtgtcgagacggacctcttgcagtggtgcctggagtccggcagtatacccatactctgcccaatcggcgagacggcagcccggcgcagcgtgctgttggattctctcgaggtgacagccagtctggccaaagctctcaggccaacaaagattatctttcttaataacaccggcgggctgagagattcatcacataaagtgttgagcaacgtgaacctgcccgcggatctggatctggtctgcaatgcagagtgggtgagtaccaaagagagacagcagatgagactcatcgtggatgtgctctctcgcctcccacatcatagcagtgccgtgataactgctgcatctacattgctcacagagcttttcagtaataaaggcagtgggacgctgttcaaaaacgcagagcgaatgcttcgagtccggtccctggacaagctggaccaaggaagactcgtcgacctggttaatgcctccttcggtaaaaagctcagggatgactatctggcctctctgaggcctaggctgcattccatctatgtgagcgagggttataacgccgccgctatactcaccatggaacccgtgctgggagggacaccatatttggataagtttgttgtatcctctagtcgccagggccaggggagcggacagatgctgtgggaatgcctgagaagagacctccagacattgttttggcggagccgagtaaccaatcctattaatccctggtacttcaagcactccgatggatcattctctaataagcagtggatatttttttggttcggcctggccgacattagggatagttatgaactggtcaaccacgcaaaggggctgccagactccttccataagccagcatctgatcctggaagt

SEQ ID NO: 245261 - DNA, 1602 bp, Artificial Sequence
  derived and/or modified sequence
atggctaccgcccttatggccgtcgtgctaagggctgccgcagtggctcccaggctccgaggtagggggggcaccggaggtgctcgtagattgtcatgcggtgctaggcggcgtgctgcaagaggtacctctcccggacgcagattaagtacagcttggtctcaaccacagccccctcccgaggagtatgcaggtgcggacgatgtttctcaatcccctgtagcagaggagccttcttgggtgccatcgcctagaccaccggttccccatgagtcgccagaaccaccttcaggtcgaagtttggtgcaacgcgatatacaggcattccttaaccaatgcggtgcatccccgggtgaagcaaggcattggttaacacaatttcaaacctgtcatcactcagcagataaacctttcgcggttattgaggtggatgaagaggtcttgaaatgccaacaaggtgttagctctctagcattcgcccttgcctttcttcaaagaatggatatgaaacctcttgttgtcttaggacttcctgctcccactgctccttcgggttgccttagtttctgggaggctaaggcccaattggcgaagtcttgtaaagtcctagttgacgctttgcgacataatgcagctgctgcagtgcccttttttggaggtggttctgttctccgtgccgctgagccagctccccatgcgagctatggtggaattgttagtgtggaaactgatctcctccagtggtgtctcgaatcaggttcgattccaatactttgccccattggagaaacggcagcccgacgtagcgtgcttcttgattctctggaagtaacggccagccttgccaaagccctgcggcctaccaagatcatctttctgaacaatacgggtggattaagagattctagccataaggtcctgagcaacgttaatcttccagctgatctcgacttagtttgcaatgctgagtgggtttcaacaaaggagcgacagcagatgagactaattgttgatgtgttgagcaggctaccacatcactcatcagctgttattactgctgcttctaccctgctaaccgagttgttctccaataagggatcaggaacattgtttaagaacgcagaaaggatgttgagagtgcgctcacttgacaaattagaccaaggacggcttgtcgatcttgtgaacgcttcctttgggaagaaactaagagatgactacttggcttctcttcgtcctcggctgcatagcatctatgtttctgagggatacaacgcagcagccattctcacaatggaaccagttcttggagggactccatatctggataagttcgtagtcagtagttcaaggcagggacagggatctggacaaatgttgtgggagtgtctgaggcgagatctccaaactctattttggcggtcccgtgttactaatccaattaacccttggtattttaaacacagtgatggttcctttagtaacaagcagtggattttcttttggtttggattagctgatatcagagactcttatgaactcgttaatcatgccaagggacttccagattcattccacaaacctgcttcagatcctggctcc

SEQ ID NO: 245262 - DNA, 1602 bp, Artificial Sequence
  derived and/or modified sequence
atggcgacagcactgatggcggtcgtattgagggccgctgctgtggcccctcgtctgcgaggacgtggcggcacgggcggagccaggcggttgagttgcggcgcgcgccgtagagctgcacgtgggacaagtcccggcagaaggctgtctactgcgtggtcccaacctcagcctcctccagaggaatatgcaggtgcggacgatgtttcacaaagccctgtggctgaagaaccttcatgggtaccttccccacggccgccggtgccgcacgagagtcctgaacctcctagcgggcgaagcctggttcaaagggatattcaggcgtttcttaatcagtgtggggcatcgcctggcgaagccagacattggcttacacaatttcagacatgtcatcattccgcagacaaaccctttgcagtgattgaagtcgatgaggaagtgttaaagtgtcagcagggagtgtctagccttgccttcgcattggcgttccttcaaagaatggacatgaagccgctcgtagtgttgggtttgccggcaccgacagccccgagcggatgtctgtctttctgggaagcaaaagcccaattagcgaaatcgtgtaaagttttggtagatgctttacgccacaacgcagccgctgccgttccgtttttcggaggtggatcagttttgagagcagctgaaccggcgccccatgcttcatatggggggatcgtttctgttgagactgacttgctccagtggtgcttggagtctggatcaattcctatcctgtgcccgattggtgaaacggcggcccgtcggagcgtgctgctggactcactggaagtaacagcttctctggctaaagcgcttcgccctactaagattatatttctaaataacacgggtggtttacgggattccagccataaggttctaagcaacgttaacctgcctgcggacctcgacctggtgtgcaacgccgaatgggtctcaacaaaggaacgccagcagatgcgcctgatcgttgacgtactgtcacgactgccgcaccacagtagtgcagttataacggcggcctctacgctgctgacagaactcttcagtaataaaggcagcgggactcttttcaagaacgccgaaagaatgttaagagtgagatccctggataaacttgatcaaggccggttggttgatttggtgaacgcatcttttggcaaaaaactgagagatgattatctggcctcccttagaccgaggctgcatagtatttatgtgagtgaaggatataatgccgcggcaattcttacgatggaacctgtgcttgggggtactccttatttagacaaatttgtcgtgtctagctctagacagggccaaggctctgggcaaatgttgtgggagtgtttaagaagggacctgcagacactgttctggcgaagtagagtgacgaacccgattaacccatggtattttaagcattcagatggcagtttttcgaacaaacaatggatttttttctggttcggactcgccgatattcgcgatagctatgagctagtaaaccatgcgaaaggcctaccagatagctttcataaacctgcgagtgacccggggtca

SEQ ID NO: 245263 - DNA, 1602 bp, Artificial Sequence
  derived and/or modified sequence
atggccacagccctgatggccgtcgtcctgagagctgcagcggtcgcaccccgtttgcggggacggggaggcaccggtggggcaaggagacttagttgcggtgctaggcgcagagcagcacgcggcaccagtccaggaaggcggctgagtaccgcctggtcccagccacaaccaccgcccgaggaatatgctggtgcagatgacgtctcccagagtccagtggcagaggagcccagctgggtaccctcacctcgcccccctgttccccacgagagtcccgagccgccaagcggtcggagcttggtacagagagacatacaggcatttctgaatcaatgcggtgcctcccctggcgaggcccggcattggctaacccagttccagacatgccaccacagcgcagacaagccattcgccgtcatcgaggtcgacgaggaagtcctgaaatgtcagcagggcgtcagcagcttggcctttgccctggcctttctgcagcgcatggatatgaagcctctggtggtgctggggctgccggcacctactgctccatccggatgtttgagcttttgggaagcaaaggctcagttagcaaagtcatgtaaggtgcttgttgatgccctacgccacaatgccgccgctgctgtccccttttttggggggggatctgtgcttagagccgctgaacccgcaccccatgctagttacggcggcattgtcagtgtggaaaccgacctactgcagtggtgtctcgagtccggtagtatcccaatattgtgcccgattggagaaacagcagcccgtcgctcagtcctgctggattctttggaagttacagcgtctctcgccaaagcgcttaggcccactaagatcatattcctaaataataccggcggccttcgggattcctcccataaggttctgtccaacgttaatttgcccgccgacctggacttggtatgcaacgcagagtgggtgagcaccaaggagagacaacagatgcggctcattgtagatgtactgagccgtctgccccaccactcttcagcagttataacagcagcgtccactctgctgacagagcttttttccaataaaggtagcggtaccctgttcaaaaatgccgaacgcatgctaagggtgaggtcgctggacaaactggatcagggccggttagtggatttggtcaatgcttcttttggaaagaagctgcgggacgactacctcgcctctctgagacctagattgcacagtatctatgtatcggaaggatacaatgcagcagccatcctgactatggaaccagtgctgggtggtacaccctaccttgataagttcgttgtctcttcttcccgacaaggtcagggatcaggacagatgctgtgggaatgtctacggcgcgatcttcagaccttattctggaggagccgggtgaccaatcctattaatccatggtacttcaagcactctgacggctctttctccaataaacaatggatctttttttggtttggcctggcggatattcgggactcttatgagctagtcaaccatgccaagggtctaccagacagcttccacaagcccgcctccgaccctggttcc

SEQ ID NO: 245264 - DNA, 1602 bp, Artificial Sequence
  derived and/or modified sequence
atggccactgcgttgatggcggtggtgctgcgggccgctgctgtagcaccacgcttgagaggccgcgggggaacaggcggcgccaggcggctttcctgcggagcccgaaggagagccgctcgagggacatccccagggagaagactgagcactgcatggtcgcagccacagcctcccccggaggagtatgcaggggccgacgacgtctctcagtccccggtggccgaagaaccttcatgggtgccaagccccagaccaccggtaccccacgagtctcctgaaccccctagcgggagaagtctggtgcaacgggacattcaggcattcttgaatcagtgtggcgccagtccaggtgaggccaggcactggctcactcagtttcagacatgccatcactcagcggacaagccatttgctgttatcgaagttgatgaggaggtcctgaaatgccagcagggcgtgtcctctttggcgtttgccctcgcgtttctgcagagaatggacatgaaacccctcgtcgttctgggccttccggcacccaccgcccccagtggatgcctgagcttctgggaggccaaggcgcaacttgcaaagtcctgtaaagtgcttgtagacgcactgcgccataatgcagcagccgcagtgccctttttcggcgggggaagcgtgctgcgagcagctgagcctgccccacatgcctcttatggcgggatcgtgagcgtcgaaactgaccttctgcagtggtgtctcgaaagcgggagtattcctattctctgcccaatcggcgagactgcggcccggcgaagcgtgctcctggattcactagaggttacagcttccttagccaaggcacttcggcccaccaagattatcttcttaaacaatacagggggcctgagggactcaagccacaaggtgctttcaaacgttaacctccccgccgatctggatctggtatgtaacgcggaatgggtgagtactaaagaacgccagcagatgcggttgattgtagacgtgctgagcagactcccccaccactcatcagccgtgataaccgccgcaagcaccctcctcacagagctcttttctaacaaaggatctgggactttgtttaaaaacgctgaaagaatgctacgagtgcgaagtctcgataagctagaccaggggcggttagttgacttagtcaatgcatctttcggcaaaaagttacgcgacgactatctggcgtcactgaggccacgcttgcattctatctacgtgtccgagggctacaacgctgctgcaatcctgacaatggagcccgtgttgggcggaaccccttatctcgataaatttgtggtgagtagcagcaggcaagggcaaggaagtggtcagatgctgtgggagtgtctcagaagggatcttcagaccttattctggagaagtagagtgacaaatccaattaacccgtggtactttaagcactccgatggttcgttttctaacaagcaatggatctttttttggtttggcctcgcagacattcgagacagctacgagcttgtgaatcacgcaaaaggtctccctgattccttccataaaccggcctctgaccccggtagc

SEQ ID NO: 245265 - DNA, 1602 bp, Artificial Sequence
  derived and/or modified sequence
atggccaccgcacttatggccgttgtactgcgggccgccgctgtggctccgcggcttcggggccgtggggggactgggggcgcgcgtcgacttagctgtggcgcacgtcgcagggcggcccgcggcacatctcccggtcgtcgtttgtccacagcctggtcacaaccccagccgccccccgaggagtatgctggagcagacgatgtatcgcagagcccagtggctgaagaaccttcatgggtgccttccccccggcctcccgtgccacacgaatccccagaacctccaagtggccggtcactcgtacaacgggatattcaagcatttctcaatcaatgcggggctagccccggtgaggccaggcattggttgactcagttccagacgtgtcaccactctgccgacaaaccgtttgctgtgatcgaggttgacgaggaggtgcttaaatgccaacaaggtgtgtcatcgctggccttcgctctggccttcctgcagcgtatggatatgaagcccttggttgtcttgggcctccccgctccaactgctccgtctggttgcctttcgttttgggaggctaaggctcaacttgccaaatcatgcaaagttcttgtggatgcccttcggcataacgccgctgcggctgtaccattttttggaggcgggtccgttctccgtgcagcagaaccagcgccacatgcttcttatggaggtatcgtgagcgtggagacggatcttttgcagtggtgtctggagagtggctcgattccaatcctgtgccctattggagagacggcagcgaggcgcagcgtcctcctagactcactggaggtgacagcgagcctagcgaaggcgttgcgccctacaaaaatcattttcttaaacaacacaggcgggctccgcgattcaagtcataaggtgctgtcaaacgtgaatctgcccgctgatctggacctcgtttgcaatgccgaatgggtctctactaaagaacgtcagcaaatgcgccttattgtcgatgtcttatctcgtctacctcaccactcatcggctgttataaccgcggcctccacccttttaaccgagttattcagtaacaagggttctgggaccctgttcaagaacgcggagagaatgttgcgtgtacgcagtcttgacaagttggaccaggggcgtcttgtggatctcgttaatgcctctttcggtaagaaactccgggacgattatctcgcttccctacgaccgcggctacatagcatatacgtgtctgagggttacaacgctgccgcgatattaacaatggagcccgtcctgggaggaaccccctatttggacaaatttgttgttagtagttcccgacaaggacagggatctggccaaatgctgtgggaatgccttcgtagggacctacaaacactcttctggcgttcacgagttaccaatcctatcaacccttggtatttcaagcatagcgatggatccttctcgaacaagcagtggattttcttttggtttggcctggcagatatccgagatagttatgagctcgtgaatcacgcaaagggcctgccggattctttccacaagcctgcaagcgaccccgggagt

SEQ ID NO: 245266 - DNA, 1602 bp, Artificial Sequence
  derived and/or modified sequence
atggccaccgccttgatggctgtggtgctccgggccgccgcggtggcacctcgcctcagggggagaggcggcaccggcggtgcccgtcgactgtcctgcggggccagacggcgggctgcccgcgggaccagccctggcagacgtctcagtactgcttggtcccagcctcaaccgcccccggaggaatacgccggcgccgacgacgtgtcgcaaagtcctgtcgcagaagagcctagctgggttccatcaccaaggcccccggtgccccatgaatcacctgagcctccctcaggccgctccctcgtgcagcgcgacattcaagccttcttgaatcagtgcggcgcaagccccggtgaagcccgccactggctgactcagttccagacttgtcaccactcagcagacaaaccttttgctgtgatcgaggtggacgaagaggttctgaaatgtcagcagggcgtgagttctctggcatttgcccttgccttcctacaacggatggatatgaagccattagtcgtgctgggactacctgctcccacagcaccatctggctgcctaagtttctgggaagcaaaagcgcagcttgcaaagtcatgcaaagttttggtggacgccctgagacataatgccgctgcagcagtgccattcttcgggggcgggtctgtgttgcgagccgctgagcctgcgccccacgccagctatggcggtatcgtgagcgtggagaccgacctgcttcagtggtgtttagagtccgggtctattcctattttatgccctatcggcgagacggcagctcgccgaagcgtattattggattctctcgaggttacggcgagcctagcaaaagcactgaggccaaccaaaatcattttcttgaacaacaccgggggactgcgcgatagcagccacaaagtcctctccaacgtcaacctgccagccgacctcgatctcgtctgtaatgctgagtgggtatctacaaaagagcgccaacagatgcggttgatcgtggacgttttatccagactcccccaccacagcagcgccgtaatcacagcggcttctactctcttgactgagctgttctcaaataagggatctggaacattgttcaagaatgccgagcgaatgctgcgggtgaggtccctggataaactcgaccagggaaggcttgtcgacttggtgaacgcatcattcggcaaaaaactaagagatgactatcttgccagcctgaggcctcgcttgcactctatctacgtgtcagaaggatataatgctgccgcaatactcacaatggagcccgtactcggaggtacgccctacctggataagttcgtagtatcttcttcgagacagggacagggaagcgggcagatgctctgggaatgtctgagaagggatctgcagaccctgttctggcgatcccgcgtgacaaatcctattaacccttggtacttcaagcacagcgacgggtcgttctctaataagcagtggatttttttttggttcggcttagcagacataagagactcttacgagctcgtgaaccatgcaaaaggactccctgacagcttccacaagccagcctccgaccctggatca

SEQ ID NO: 245267 - DNA, 1602 bp, Artificial Sequence
  derived and/or modified sequence
atggccactgcgctcatggccgttgttctgagggccgccgctgtagcacctcgtctgagaggcaggggcggcactgggggggcacggagactatcctgcggggcaaggcgtcgggcagcccgcggcacctcacccggacgccggctcagcaccgcctggtctcagccgcagcccccacctgaggagtacgcaggtgccgatgatgtgtcgcaaagcccagtggcagaagagccaagctgggtgccctcaccaaggccccccgtccctcacgaaagcccagagccaccttcgggacgatcgctggtgcagcgagatattcaagcatttctgaatcagtgtggtgcaagcccaggagaggcgaggcattggttgactcagttccagacctgccatcactcagccgataaaccctttgccgtgattgaagtagatgaggaggtcctaaaatgccagcagggtgtgagcagtctcgcatttgccctggcattcctgcagagaatggatatgaaaccactggttgtgcttggtctgccggctcccaccgccccttcgggttgtctaagcttctgggaggccaaagctcaactggctaaatcctgtaaagtcctggtggacgccctcagacacaacgctgcagctgccgtccctttctttggcggaggaagtgtcttacgtgctgctgaacccgccccccacgcatcctacggcggcattgtctcagtggaaacagatctcttacagtggtgcttggaatcaggcagtatccccattctttgtcctataggtgaaacggcagctcggagaagcgttctgctagattctctggaagtgactgccagtctggctaaggctctccgcccaacgaagataatcttcctgaataatactggggggctcagggacagtagtcacaaagtgctctcaaatgttaacctgcctgctgacctggaccttgtgtgcaatgcggaatgggtaagtaccaaggagaggcagcagatgcgcctgatcgttgatgttctgagccggctgccgcaccatagttccgccgtcattacagccgcaagcacactgttgactgaactatttagcaacaaggggtccggaaccttgttcaagaatgctgagcgcatgctgcgcgtgaggagtctggataagctggatcaagggcgcctggttgatttggtaaacgcatcgtttggcaaaaagctaagagacgattatttggcctcactgaggcctagactgcactcgatttacgtgagtgaaggttacaatgctgctgccatcctgactatggaacccgtcctggggggcaccccttacctagataagttcgtcgtaagttcgtctaggcagggtcagggcagtgggcagatgctgtgggaatgcctccgacgtgacctgcagacccttttctggaggagtagagtcacgaatcctattaacccttggtattttaaacacagcgatggctctttctctaacaaacagtggatattcttctggtttggcctcgctgatatacgagatagctacgaactggtcaaccacgccaagggcctgcctgatagttttcacaaaccggctagtgatcctggttcc

SEQ ID NO: 245268 - DNA, 1605 bp, Artificial Sequence
  derived and/or modified sequence
atggccaccgccctgatggccgtggtgctgagagccgccgccgtggcccccagactgagaggcagaggcggcaccggcggcgccagaagactgagctgcggcgccagaagaagagccgccagaggcaccagccccggcagaagactgagcaccgcctggagccagccccagcccccccccgaggagtacgccggcgccgacgacgtgagccagagccccgtggccgaggagcccagctgggtgcccagccccagaccccccgtgccccacgagagccccgagccccccagcggcagaagcctggtgcagagagacatccaggccttcctgaaccagtgcggcgccagccccggcgaggccagacactggctgacccagttccagacctgccaccacagcgccgacaagcccttcgccgtgatcgaggtggacgaggaggtgctgaagtgccagcagggcgtgagcagcctggccttcgccctggccttcctgcagagaatggacatgaagcccctggtggtgctgggcctgcccgcccccaccgcccccagcggctgcctgagcttctgggaggccaaggcccagctggccaagagctgcaaggtgctggtggacgccctgagacacaacgccgccgccgccgtgcccttcttcggcggcggcagcgtgctgagagccgccgagcccgccccccacgccagctacggcggcatcgtgagcgtggagaccgacctgctgcagtggtgcctggagagcggcagcatccccatcctgtgccccatcggcgagaccgccgccagaagaagcgtgctgctggacagcctggaggtgaccgccagcctggccaaggccctgagacccaccaagatcatcttcctgaacaacaccggcggcctgagagacagcagccacaaggtgctgagcaacgtgaacctgcccgccgacctggacctggtgtgcaacgccgagtgggtgagcaccaaggagagacagcagatgagactgatcgtggacgtgctgagcagactgccccaccacagcagcgccgtgatcaccgccgccagcaccctgctgaccgagctgttcagcaacaagggcagcggcaccctgttcaagaacgccgagagaatgctgagagtgagaagcctggacaagctggaccagggcagactggtggacctggtgaacgccagcttcggcaagaagctgagagacgactacctggccagcctgagacccagactgcacagcatctacgtgagcgagggctacaacgccgccgccatcctgaccatggagcccgtgctgggcggcaccccctacctggacaagttcgtggtgagcagcagcagacagggccagggcagcggccagatgctgtgggagtgcctgagaagagacctgcagaccctgttctggagaagcagagtgaccaaccccatcaacccctggtacttcaagcacagcgacggcagcttcagcaacaagcagtggatcttcttctggttcggcctggccgacatcagagacagctacgagctggtgaaccacgccaagggcctgcccgacagcttccacaagcccgccagcgaccccggcagctag

SEQ ID NO: 245269 - DNA, 1748 bp, Artificial Sequence
  derived and/or modified sequence
gggaaataagagagaaaagaagagtaagaagaaatataagagccaccatggcgacggcgcttatggccgtcgtccttcgagcggcagcggtggcgcccagactcaggggtagaggagggacgggaggagctagacggctgtcgtgtggagccagacggcgagcggcgagaggaacgtcacccggacgccgcctttcgacggcgtggtcccagcctcagccgcctccagaggaatatgctggggccgatgacgtatcccagagcccggtagccgaggagccgtcgtgggtccccagcccgaggcctccggtgccccacgagtcaccggaaccacccagcggtcgctcgctcgtccaacgggatattcaggcgtttctgaaccagtgcggagcatcgccgggagaagcgaggcactggctgacccagttccaaacctgtcatcactccgctgacaaaccctttgcagtcattgaagtagacgaggaagtgctcaagtgccagcaaggggtgtcgtccttggcgttcgcgctcgcgttccttcagaggatggacatgaaaccccttgtggtgcttggcctccctgcccctactgccccttcgggatgtctgtccttttgggaagcgaaagcgcaactggccaaatcgtgtaaggtcttggtcgacgcattgagacataatgccgcagcagccgtgccgttctttggaggcggttccgtccttagagctgcggagccagcgccccacgcctcgtatggcggaattgtctccgtggagacagatttgcttcagtggtgcctcgagtcaggtagcatccccattctttgccccatcggagaaactgcagcaaggcgcagcgtgttgcttgacagcctcgaggtaacagcctccctcgcaaaagctttgaggcccaccaagatcatctttcttaacaacacgggaggattgcgagattcgagccataaggtactttcaaatgtgaatttgccggcagatctggacctcgtatgcaatgccgagtgggtgtccacaaaggaacgccagcagatgaggctgattgtggatgtgctttcgagactcccgcaccactcatcagcggtaatcactgcagcgagcactctgctgacggagctgttcagcaataagggctcagggacgctcttcaagaacgcggaaagaatgcttcgggtccggagcctggacaaattggatcaggggcgacttgtcgatctcgtcaacgcgtcatttgggaaaaagctgcgggacgactatctggcgtcgttgcgaccacgcctccactcgatctacgtgtcggagggttacaacgcagccgcaatcttgacaatggaaccagtcttgggagggacaccgtacctcgataagttcgtggtgtcgtcgtcacggcagggccagggtagcggtcaaatgctctgggagtgtctgaggcgggacttgcagaccctcttttggcgctcccgcgtgacaaatcccatcaatccttggtactttaagcattcggatgggtcgttctcgaacaaacagtggattttcttttggttcggacttgcggacatccgagactcatacgagttggtaaaccatgcgaaggggttgcccgattcgttccacaagcccgcatcagaccccgggtcatgataagctgccttctgcggggcttgccttctggccatgcccttcttctctcccttgcacctgtacctcttggtctttgaataaagcctgagtaggaag

SEQ ID NO: 245270 - DNA, 1605 bp, Artificial Sequence
  derived and/or modified sequence
atggctactgcccttatggcagtggtgctgcgcgcagcagctgttgcaccaagactgcggggtagaggcgggactggtggagcacgtagactctcatgcggcgcccggagaagagcggcgagaggtacctctccaggacggcgtttaagtacggcctggtctcagcctcagcctcctccagaagaatacgccggggccgacgatgtctcccaatctccagtggcagaggaaccctcatgggttccatcaccaaggccaccagtgcctcacgagtcgccagaaccaccaagtggcagatccctcgtccagagagacatccaagcttttctcaaccagtgtggggcctcccccggggaggcccgacactggttaacccagtttcagacttgtcaccattctgccgacaagcctttcgctgtcatcgaggtcgacgaggaggttctgaagtgtcagcagggggtgagtagcttggcttttgctctcgcatttctgcagcgcatggatatgaaaccactggtagtcttgggcctgcctgcgccaaccgccccgtcggggtgcctttcattctgggaagcaaaggcccagctggccaagagctgcaaagttctggtggacgcactgagacacaacgccgcagccgctgtgccgttttttggagggggttccgttctccgggcggcagagcctgcgccacatgcaagttatggagggatcgtctcagtggaaacggatcttctccagtggtgtctcgagtcaggatcgattccgattctgtgtccaattggggagacagccgcgcggcgctcagtgctcctagactctctggaggttacagcctcattagccaaagccctccggcctacgaagatcatcttccttaacaacacaggaggcctgcgggattcaagccacaaggtactgtctaacgtaaacctgcctgctgatcttgatcttgtgtgtaatgcagagtgggtgagtactaaagagcgtcagcaaatgcgcctaatagtggacgtccttagtagactcccacatcactcttcagccgtcatcacagccgcatctactctcctgacggaactgttttcaaacaaagggagtgggacactgtttaaaaacgctgaacggatgctgcgtgtccgcagcctggataaactcgaccaaggcaggcttgttgacctggtgaatgcgtccttcggaaaaaagttgcgagatgattatttggccagccttcgaccccgcctgcactccatctacgtcagcgagggttacaatgcagctgccattctgactatggagcctgtcttaggcggtaccccctacttggacaagtttgtggtgtcatcttcccggcaggggcaggggtccggccagatgctgtgggagtgcctacgcagggacttgcagaccttgttttggaggtccagagtgaccaatcctattaacccgtggtacttcaaacacagcgatggcagcttttctaataaacagtggatcttcttttggtttggtctcgccgatatccgggactcttacgagctggtgaaccacgccaaagggctccctgactctttccataaaccagccagcgaccccggctcttag

SEQ ID NO: 245271 - DNA, 1605 bp, Artificial Sequence
  derived and/or modified sequence
atggccacagccctgatggctgtggtgctgcgggctgctgctgtggccccccggctgcggggccggggcggcactggaggagcccggcggctgagctgtggggccaggagaagagctgcccggggcaccagccctggaagaaggctgagcacagcctggagccagccccagcccccacctgaggagtatgctggagcagatgatgtgtcccagagccctgtggccgaggagcccagctgggtgcccagcccccggccccctgtgccccatgagagccctgagcccccatctggccgcagcctggtgcagagggacatccaggccttcctgaaccagtgtggggccagccctggagaggcccggcactggctgacccagttccagacctgccaccacagcgctgacaagccctttgctgtgattgaggtggatgaggaggtgctgaagtgccagcagggcgtgagcagcctggcctttgccctggccttcctgcagaggatggacatgaagcccctggtggtgctgggcctgcctgcccccacagcccccagcggctgcctgtccttctgggaggccaaggcccagctggccaagagctgcaaggtgctggtggatgccctgcggcacaatgctgctgctgctgtgcccttcttcggcggcggctctgtgctgcgggctgctgagcccgccccccacgccagctatggaggcatcgtgtctgtggagacagacctgctgcagtggtgcctggagagcggcagcatccccatcctgtgccccatcggggagacagctgccaggagatctgtgctgctggacagcctggaggtgacagccagcctggccaaggccctgcggcccaccaagatcatcttcctgaacaacacaggaggcctgcgggacagcagccacaaggtgctgagcaatgtgaacctgcctgctgacctggacctggtgtgcaatgctgagtgggtgtccaccaaggagcggcagcagatgaggctcatcgtggatgtgctgagccggctgccccaccacagcagcgctgtgatcacagctgccagcaccctgctgacagagctgttcagcaacaagggcagcggcaccctcttcaagaatgctgagaggatgctgcgggtgcgcagcctggacaagctggaccagggccgcctggtggacctggtgaatgccagctttgggaagaagctgagagatgactacctggccagcctgcggccccggctgcacagcatctacgtgtctgagggctacaatgctgctgccatcctgaccatggagcctgtgctgggcggcaccccctacctggacaagtttgtggtgagcagcagccggcagggccagggcagcggccagatgctgtgggagtgcctgcggcgggacctgcagaccctcttctggaggagccgggtgaccaaccccatcaacccctggtacttcaagcacagtgatggcagcttcagcaacaagcagtggatcttcttctggtttggcctggccgacatccgggacagctatgagctggtgaaccacgccaagggcctgcctgacagcttccacaagccagccagtgaccccggcagctag

SEQ ID NO: 245272 - DNA, 1605 bp, Artificial Sequence
  derived and/or modified sequence
atggccaccgccctgatggccgtggtgctgcgggccgccgccgtggcaccaagactgaggggccgcggcggaacagggggagcacgcagactgtcttgtggagctagaagacgggcagcacgcggaacctcccccgggaggaggctatcgaccgcttggtcccaaccacagccaccccctgaagagtacgccggagcggacgatgtgtcccagtctccagtggccgaggagccttcctgggtcccatccccacgaccacctgtacctcacgagagtccagagcccccttccggaaggtccctggtgcagcgcgacatccaggcttttctcaaccagtgtggcgcctccccaggggaagccagacactggctcacgcagttccaaacatgtcatcacagtgcggataaacccttcgccgttattgaagtggacgaagaagtcttaaagtgccaacaaggcgtatcaagtctggcttttgctttggccttcctgcaaagaatggacatgaagccactggtcgtcctggggctccccgctccgacagcaccgtcagggtgtctgtcattctgggaagccaaagcacagctggctaaatcatgtaaagtcctcgtggacgcacttagacacaacgcagccgctgccgtaccgttcttcggtggcggttcagtacttcgggctgcagaaccagcaccacacgcctcctacggaggtatcgtgtctgtggaaacagacctgcttcagtggtgcttagagtcaggctcaattccaatcctctgtcccatcggagaaacagccgctcgcagatcggtgttgctagattcgctggaggtgaccgcttcattagcgaaggccctcaggcctacaaagatcatcttcctgaacaatacaggtgggttgcgtgattctagtcataaagttctctctaacgttaaccttcctgcagatctggatctggtgtgcaacgctgaatgggttagcacgaaagagcggcagcaaatgaggttgattgtggacgtgctttcccgcctccctcaccatagcagtgccgttattactgccgccagtacactcctgaccgagctgtttagcaataaaggtagtggcacgctattcaagaacgcagaaagaatgctccgagtaagatcccttgacaaacttgaccagggccgcctggttgacctggtgaacgcttcattcggcaagaaactgagagatgactacctggcttctctgcggcctcggttacattctatctacgtatccgaaggctacaatgctgcagccattctgactatggaaccagtgctcgggggaaccccataccttgataagtttgtcgtcagcagctcaagacagggacagggatctgggcagatgctgtgggaatgccttcgtcgtgacttgcagaccctcttttggcgctcacgggtgactaatcccattaacccttggtacttcaagcattcagatggcagtttctctaataagcagtggatttttttctggtttgggctagctgacatcagggattcctacgaacttgtcaatcacgcaaagggtttacctgactcattccacaagccagcctctgatcctgggagctag

SEQ ID NO: 245273 - DNA, 1605 bp, Artificial Sequence
  derived and/or modified sequence
atggccacagcactcatggccgtcgtactccgcgctgctgccgtggctccccgactaaggggacgcggaggcaccggcggagccaggagattgtcatgcggagccaggcgcagagccgcaagaggtacttctcctggccgaaggctttctactgcgtggtcacagccccagccaccgccagaagagtacgcgggagctgatgacgttagtcaatcccctgtagctgaagaaccttcctgggtgccctcaccaaggccgccagtgccacatgagagcccagagcccccaagtggccgtagcttagtgcaacgagatatacaggccttcctgaatcagtgtggagcttcgcccggagaagccagacactggttgacccaattccagacttgccaccatagtgccgacaagccgttcgcagtcatcgaggtcgatgaggaggtcctgaaatgtcagcagggagtgtcttcgttggcgtttgccttagcctttttacagcgaatggacatgaaaccgctggtcgtactcggcctaccagccccaacagcacccagcggctgcttgtcattctgggaagcgaaagcccagctggctaagtcctgtaaagtcctggtggatgcccttaggcacaacgccgcagcagcagtgcctttcttcggcggtgggtccgtcttgcgggcagctgaaccagcgcctcacgcatcctacggcggtatcgtcagcgtggaaactgatctgttgcaatggtgcctggagtccggcagcattcctatcctctgtccgatcggtgagacagctgccagaaggtccgtcctgctcgactcactagaggtgacggcatctctcgctaaagcactgcgacctacaaagattatcttccttaacaatacaggaggtctccgtgacagctcccataaagttctttcaaacgtgaacttgcccgcagacctggatcttgtgtgtaatgctgaatgggtgtctactaaggaacgccagcagatgagactaatcgtggacgtactatcaaggctgccccaccattcgtccgccgtcatcacagctgcctccacactgctgactgagctttttagcaataagggcagcggaaccttattcaagaatgccgaacgtatgttaagggtcaggtctctggataagctggaccaagggcgtctagtggaccttgtgaacgccagctttgggaagaaactgcgggatgactaccttgctagtctcaggccgagactccactccatctacgtcagcgagggatacaacgccgcagccattctgacaatggagccagttctggggggaacgccctacctggataagttcgtggtcagctctagccgccaaggccagggctccggtcaaatgctatgggagtgtcttaggcgggatctccagaccctgttttggcggagcagggtgactaaccccattaacccttggtacttcaaacattccgatggatcctttagcaataagcagtggattttcttttggttcggacttgcagatatacgtgactcctacgagctcgtgaatcatgcaaaagggttgcctgactcctttcacaagcctgctagtgaccccggtagctag

SEQ ID NO: 245274 - DNA, 2069 bp, Artificial Sequence
  derived and/or modified sequence
atggcgacggcgctgatggctgtggttctgcgggcagctgctgtagccccgaggctgagaggccggggaggcactgggggcgcccgaaggctgagctgtggcgcgcggcggcgggcggcgaggggcaccagcccggggcgccggctcagcaccgcctggtcgcagccccagcccccgcccgaggagtacgcgggcgcggacgacgtctcccagtcgcccgtcgccgaggagccgtcgtgggtgccgagtcccaggcccccggtgccccacgagtccccagagcctccttcgggccgctcgctggtgcagcgggacatccaggccttcctgaaccagtgcggggccagccctggggaggcgcgccactggctcacgcagttccagacctgccatcactccgcggacaagcccttcgccgtcatcgaggtggacgaggaggtgctcaagtgccagcagggcgtatccagtctggcctttgccctggccttcttgcagcgcatggacatgaagccgctggtggtcctggggctgccggcccctacggctccctcgggctgtctttccttctgggaggccaaggcgcagctggccaagagctgcaaggtgctggtagacgcgcttcgacacaacgccgccgctgctgtgccattttttggcggcgggtctgtgctacgcgctgccgagccggctccccatgccagctacggcggcatcgtctcggtggagacagacctgctgcagtggtgcctggagtcgggcagcatccccatcctgtgccccatcggggagacggccgcgcgccgctccgtgcttctcgactccctggaggtgaccgcgtcgctggccaaggcgctgcggcccaccaaaatcatcttcctcaataacacaggcggcctgcgcgacagcagtcataaggtcctgagtaacgtgaacctgcccgccgacctggacctggtgtgcaacgccgagtgggtgagcacaaaagaacggcagcagatgcggctcatcgtggacgtgctcagccgcctgccccaccactcctcggccgtcatcaccgccgctagcacgctgctcactgagctctttagcaacaaggggtccgggaccctgttcaagaacgccgagcgaatgctacgggtgcgcagcctggacaagctggaccagggccgtctagtggacctggtcaacgccagcttcggcaagaagctcagggacgactacctggcctcgctgcgcccgcggctgcactccatctacgtctccgaggggtacaacgccgccgccattctgaccatggagcccgtcctggggggcaccccgtacctggacaaatttgtggtgagctccagccgccagggccaaggctccggccagatgctgtgggagtgcctgcggcgggaccttcagacacttttctggcgctcccgggtcaccaaccccatcaatccctggtacttcaaacacagtgatggcagcttctccaacaagcagtggatcttcttctggtttggcctggctgatatccgggactcctatgagttggtcaaccacgccaagggactgccagactcctttcacaagccagcttctgacccaggcagctgaccctcaccatggacactacaggccctggaatggccagggtggaccaaaagccatgccagctgggcatgaccccaggcagccagccacaggctgaagggggcttgttggctgagtgatctgcagaggagaaagcagccccagctctgcccagaggaggcgctgaagtgggacaagcacaggaaagaaggggaccagtctaggaccccaactcgactcactctaaagctacaaccaaatggccttcgattttcaacctggggattaggggaggggagggtgccttccagggctctactcaggactaaccctaagggtgagctagtttctgtgcctctgtgctatgttttgaggctcccttacccaaaataatacccctgcctgcgtgatattctaccattcattttaattcctttgggtcttgcagtttttcaggaggccttgattaaaatgcaaatacttgtctg

SEQ ID NO: 245275 - DNA, 1388 bp, Artificial Sequence
  derived and/or modified sequence
catggcgacggcgctgatggctgtggttctgcgggcagctgctgtagccccacgagtccccagagcctccttcgggccgctcgctggtgcagcgggacatccaggccttcctgaaccagtgcggggccagccctggggaggcgcgccactggctcacgcagttccagacctgccatcactccgcggacaagcccttcgccgtcatcgaggtggacgaggaggtgctcaagtgccagcagggcgtatccagtctggcctttgccctggccttcttgcagcgcatggacatgaagccgctggtggtcctggggctgccggcccctacggctccctcgggctgtctttccttctgggaggccaaggcgcagctggccaagagctgcaaggtgctggtagacgcgcttcgacacaacgccgccgctgctgtgccattttttggcggcgggtctgtgctacgcgctgccgagccggctccccatgccagctacggcggcatcgtctcggtggagacagacctgctgcagtggtgcctggagtcgggcagcatccccatcctgtgccccatcggggagacggccgcgcgccgctccgtgcttctcgactccctggaggtgaccgcgtcgctggccaaggcgctgcggcccaccaaaatcatcttcctcaataacacaggcggcctgcgcgacagcagtcataaggtcctgagtaacgtgaacctgcccgccgacctggacctggtgtgcaacgccgagtgggtgagcacaaaagaacggcagcagatgcggctcatcgtggacgtgctcagccgcctgccccaccactcctcggccgtcatcaccgccgctagcacgctgctcactgagctctttagcaacaaggggtccgggaccctgttcaagaacgccgagcgaatgctacgggtgcgcagcctggacaagctggaccagggccgtctagtggacctggtcaacgccagcttcggcaagaagctcagggacgactacctggcctcgctgcgcccgcggctgcactccatctacgtctccgaggggtacaacgccgccgccattctgaccatggagcccgtcctggggggcaccccgtacctggacaaatttgtggtgagctccagccgccagggccaaggctccggccagatgctgtgggagtgcctgcggcgggaccttcagacacttttctggcgctcccgggtcaccaaccccatcaatccctggtacttcaaacacagtgatggcagcttctccaacaagcagtggatcttcttctggtttggcctggctgatatccgggactcctatgagttggtcaaccacgccaagggactgccagactcctttcacaagccagcttctgacccaggcagctga

SEQ ID NO: 245276 - RNA, 1748 nt, Artificial Sequence
  derived and/or modified sequence
gggaaauaagagagaaaagaagaguaagaagaaauauaagagccaccauggcgacggcgcuuauggccgucguccuucgagcggcagcgguggcgcccagacucagggguagaggagggacgggaggagcuagacggcugucguguggagccagacggcgagcggcgagaggaacgucacccggacgccgccuuucgacggcguggucccagccucagccgccuccagaggaauaugcuggggccgaugacguaucccagagcccgguagccgaggagccgucguggguccccagcccgaggccuccggugccccacgagucaccggaaccacccagcggucgcucgcucguccaacgggauauucaggcguuucugaaccagugcggagcaucgccgggagaagcgaggcacuggcugacccaguuccaaaccugucaucacuccgcugacaaacccuuugcagucauugaaguagacgaggaagugcucaagugccagcaaggggugucguccuuggcguucgcgcucgcguuccuucagaggauggacaugaaaccccuuguggugcuuggccucccugccccuacugccccuucgggaugucuguccuuuugggaagcgaaagcgcaacuggccaaaucguguaaggucuuggucgacgcauugagacauaaugccgcagcagccgugccguucuuuggaggcgguuccguccuuagagcugcggagccagcgccccacgccucguauggcggaauugucuccguggagacagauuugcuucaguggugccucgagucagguagcauccccauucuuugccccaucggagaaacugcagcaaggcgcagcguguugcuugacagccucgagguaacagccucccucgcaaaagcuuugaggcccaccaagaucaucuuucuuaacaacacgggaggauugcgagauucgagccauaagguacuuucaaaugugaauuugccggcagaucuggaccucguaugcaaugccgaguggguguccacaaaggaacgccagcagaugaggcugauuguggaugugcuuucgagacucccgcaccacucaucagcgguaaucacugcagcgagcacucugcugacggagcuguucagcaauaagggcucagggacgcucuucaagaacgcggaaagaaugcuucggguccggagccuggacaaauuggaucaggggcgacuugucgaucucgucaacgcgucauuugggaaaaagcugcgggacgacuaucuggcgucguugcgaccacgccuccacucgaucuacgugucggaggguuacaacgcagccgcaaucuugacaauggaaccagucuugggagggacaccguaccucgauaaguucguggugucgucgucacggcagggccaggguagcggucaaaugcucugggagugucugaggcgggacuugcagacccucuuuuggcgcucccgcgugacaaaucccaucaauccuugguacuuuaagcauucggaugggucguucucgaacaaacaguggauuuucuuuugguucggacuugcggacauccgagacucauacgaguugguaaaccaugcgaagggguugcccgauucguuccacaagcccgcaucagaccccgggucaugauaagcugccuucugcggggcuugccuucuggccaugcccuucuucucucccuugcaccuguaccucuuggucuuugaauaaagccugaguaggaag

SEQ ID NO: 245277 - protein, 257 aa, Artificial Sequence
  derived and/or modified sequence
MDAEYSGNEFPRSEGERDQHQRPGKERKSGEAGWGTGELGQDGRLLSSTLSLSSNRSLGQRQNSPLPFQWRITHSFRWMAQVLASELSLVAFILLLVVAFSKKWLDLSRSLFYQRWPVDVSNRIHTSAHVMSMGLLHFYKSRSCSDLENGKVTFIFSTLMLFPINIWIFELERNVSIPIGWSYFIGWLVLILYFTCAILCYFNHKSFWSLILSHPSGAVSCSSSFGSVEESPRAQTITDTPITQEGVLDPEQKDTHV

SEQ ID NO: 245278 - DNA, 774 bp, Artificial Sequence
  derived and/or modified sequence
atggacgcggaatattccggcaatgaatttcccaggagcgagggggagcgagatcaacaccagcgccctggaaaagaacgaaagtctggagaagccggatggggtacaggcgagcttggtcaggacggtcgcttattatcaagcaccctgtcgctgagttctaatcggtcactcggccagcgtcaaaattcacctctgccgtttcagtggcgcattacccactcttttcggtggatggctcaggtgcttgctagcgaactttctctggtcgccttcattctcctgctggtggttgcgtttagcaagaaatggttggatctctcccggtcgctgttctaccagcgctggcctgtcgatgtttccaaccgcattcacacctcagctcatgttatgtctatggggctcttacatttctacaaatctcgctcctgcagtgatctcgagaacggcaaagtaacttttatcttttccacgttgatgctgttccccattaacatctggatcttcgaactggagcgcaacgtgtctatccctataggatggagctattttattggctggttagtcctcattctctatttcacctgcgctatcctgtgctattttaaccacaaaagcttttggagtctgattctctcccatccttccggagccgttagctgtagttcctcttttggcagcgttgaggagtctccacgcgcgcaaacgattaccgataccccaatcacccaggagggcgtgctggacccagaacagaaggacacgcacgtgtag

SEQ ID NO: 245279 - DNA, 774 bp, Artificial Sequence
  derived and/or modified sequence
atggatgctgagtacagcggaaatgagttccccaggtctgagggggagcgggaccagcaccagaggcctgggaaggagaggaagtctggagaggccggctggggcaccggggagctgggccaggacggccgcctgctgagcagcaccctgagcctgagcagcaacagaagcctgggccagaggcagaacagccccctgcccttccagtggaggatcacccacagcttccgctggatggcccaggtgctggccagcgagctgagcctggtggccttcatcctgctgctggtggtggccttcagcaagaagtggctggacctgagccgcagcctcttctaccagcgctggcctgtggatgtgagcaaccgcatccacaccagcgcccacgtgatgtccatgggcctgctgcacttctacaagagccgcagctgcagcgacctggagaatggcaaggtgaccttcatcttcagcaccctgatgctgttccccatcaacatctggatctttgagctggagagaaatgtgtccatccccatcggctggagctacttcatcggctggctggtgctgatcctgtacttcacctgtgccatcctgtgctacttcaaccacaagagcttctggagcctcatcctgagccaccccagcggggctgtgtcctgcagcagcagctttggatctgtggaggagagcccccgggcccagaccatcacagacacccccatcacccaggagggcgtgctggaccctgagcagaaggacacccacgtgtag

SEQ ID NO: 245280 - DNA, 774 bp, Artificial Sequence
  derived and/or modified sequence
atggacgccgagtacagcggcaacgagttcccccggagcgagggcgagcgcgaccagcatcaacggcccggaaaggagagaaagagcggcgaggccggctggggaaccggcgagttggggcaggatggacgccttctctcttctacactgtcactctctagcaatcggtcactgggtcagcgacagaattcccctctgccctttcagtggcgcatcacccatagctttcggtggatggctcaggtgctggctagcgagctttcattagtggctttcattctgctgctggtcgttgcgttctcaaaaaagtggttagacctctccagatctctgttctatcagaggtggcctgtcgacgtatcaaatcgcattcatacgtcagcccacgtgatgtcaatgggccttttgcacttctacaagtcccgctcatgcagcgatttggaaaatggcaaggtcaccttcatattctcaaccctgatgctgtttccgataaacatctggatatttgagttggaaagaaatgtgtcaattccaatcgggtggagctacttcatcggatggctggtcctgattctgtactttacttgcgctattttatgttacttcaaccataaatctttctggagcctcatcctgagccacccttccggggccgtctcctgtagttcctccttcggcagtgtcgaggaatctcctcgagctcagactatcacagacacacccatcactcaggagggcgttctggatccagaacagaaggacactcacgtttag

SEQ ID NO: 245281 - DNA, 1156 bp, Artificial Sequence
  derived and/or modified sequence
ctgaatgggttggggccttctcttggatcaagagtctcttatttgatcgaggtctgttattagacttcctcattctttctcagacctcaggctgcatggtggcagctgatgaaaatatccaaaagatgagaagagacaattgagtctggtgagggaaaggggagacagagggtgaagtggtgctcaagatggatgcagagtactctgggaatgagttccccaggtcagaaggagaaagagaccaacatcagagacctggaaaggaaaggaagagtggggaggcaggatggggcacaggtgagctgggacaagatgggagactgctgtcctccaccctctccctcagtagtaacaggtccttgggccagcgccagaactctccgctgccctttcaatggagaatcacacacagcttccgctggatggcccaggtgttggcctctgagctcagcctggttgcctttatcctactattggtcgtggccttctccaagaaatggctggacctctctaggagcctcttctaccagcgctggcccgtggatgtcagcaacagaatccacacatcagcccacgttatgtccatggggctcctgcacttttacaaatccaggagctgttctgacttagagaatgggaaagtcaccttcatcttctccaccctcatgctattccccattaacatctggatcttcgagttggaaaggaatgtatccatccccataggctggagctatttcattggttggctggtgcttatcctatacttcacctgcgcgatcctttgctacttcaaccataaaagtttctggagtctgattctgagccaccccagtggtgccgtgtcctgcagcagcagtttcggctcagtagaagaatctccaagggcacagacgatcacagacacccccatcacccaggagggagtcctggatcctgagcagaaggatacacatgtgtaatcttttctgaactcctggcaccaagttctgtccattcatctgaccccatctcctcatcctcccccagcccttgaataggttggtcctcatcattgcaaggaatgagaaagggaggattttgcactcctctgctttctccctgccttgattgagcttgagtgatgtggaataaattgtccgtctcttctttctca

SEQ ID NO: 245282 - DNA, 774 bp, Artificial Sequence
  derived and/or modified sequence
atggacgccgaatacagtggcaacgagtttccaaggtctgagggagagcgagaccagcatcagcgccctggcaaggaaaggaaatccggcgaagcaggatggggaacaggggagctaggacaggacggcaggctgttgagcagtacgctgtccctgagttccaaccggtctctgggtcagaggcagaatagccccttaccctttcagtggcgcattacacacagttttaggtggatggctcaggtcctggcgtcagagctgtctttagtggcattcatcctgttactagtcgtagctttcagcaaaaaatggctggacctgagccgatccctcttttaccagaggtggcctgtggacgtgagtaataggatccacacctccgcacacgtgatgtctatgggtttgctgcatttttataaaagccgaagttgttctgacttggagaacggcaaagtgacatttatttttagcactctgatgctgtttcccatcaatatttggatctttgagcttgaaagaaacgtgagtataccgattggctggagctacttcatcggatggctcgtcttgatcctgtattttacttgcgccatcctctgttatttcaatcacaagtcgttttggagccttatcctgtctcatccttccggcgctgtaagctgctcttcatcctttgggtctgtcgaggagagtccacgagcccagacaatcaccgacacacctattacgcaggaaggtgtgctggaccccgagcagaaggacactcacgtctag

SEQ ID NO: 245283 - DNA, 774 bp, Artificial Sequence
  derived and/or modified sequence
atggacgccgagtacagcggcaacgagttccccagaagcgagggcgagagagaccagcaccagagacccggcaaggagagaaagagcggcgaggccggctggggcaccggcgagctgggccaggacggcagactgctgagcagcaccctgagcctgagcagcaacagaagcctgggccagagacagaacagccccctgcccttccagtggagaatcacccacagcttcagatggatggcccaggtgctggccagcgagctgagcctggtggccttcatcctgctgctggtggtggccttcagcaagaagtggctggacctgagcagaagcctgttctaccagagatggcccgtggacgtgagcaacagaatccacaccagcgcccacgtgatgagcatgggcctgctgcacttctacaagagcagaagctgcagcgacctggagaacggcaaggtgaccttcatcttcagcaccctgatgctgttccccatcaacatctggatcttcgagctggagagaaacgtgagcatccccatcggctggagctacttcatcggctggctggtgctgatcctgtacttcacctgcgccatcctgtgctacttcaaccacaagagcttctggagcctgatcctgagccaccccagcggcgccgtgagctgcagcagcagcttcggcagcgtggaggagagccccagagcccagaccatcaccgacacccccatcacccaggagggcgtgctggaccccgagcagaaggacacccacgtgtag

SEQ ID NO: 245284 - protein, 1458 aa, Artificial Sequence
  derived and/or modified sequence
MGLRPGIFLLELLLLLGQGTPQIHTSPRKSTLEGQLWPETLKNSPFPCNPNKLGVNMPSKSVHSLKPSDIKFVAAIGNLEIPPDPGTGDLEKQDWTERPQQVCMGVMTVLSDIIRYFSPSVPMPVCHTGKRVIPHDGAEDLWIQAQELVRNMKENLQLDFQFDWKLINVFFSNASQCYLCPSAQQNGLAAGGVDELMGVLDYLQQEVPRAFVNLVDLSEVAEVSRQYHGTWLSPAPEPCNCSEETTRLAKVVMQWSYQEAWNSLLASSRYSEQESFTVVFQPFFYETTPSLHSEDPRLQDSTTLAWHLWNRMMEPAGEKDEPLSVKHGRPMKCPSQESPYLFSYRNSNYLTRLQKPQDKLEVREGAEIRCPDKDPSDTVPTSVHRLKPADINVIGALGDSLTAGNGAGSTPGNVLDVLTQYRGLSWSVGGDENIGTVTTLANILREFNPSLKGFSVGTGKETSPNAFLNQAVAGGRAEDLPVQARRLVDLMKNDTRIHFQEDWKIITLFIGGNDLCDFCNDLVHYSPQNFTDNIGKALDILHAEVPRAFVNLVTVLEIVNLRELYQEKKVYCPRMILRSLCPCVLKFDDNSTELATLIEFNKKFQEKTHQLIESGRYDTREDFTVVVQPFFENVDMPKTSEGLPDNSFFAPDCFHFSSKSHSRAASALWNNMLEPVGQKTTRHKFENKINITCPNQVQPFLRTYKNSMQGHGTWLPCRDRAPSALHPTSVHALRPADIQVVAALGDSLTAGNGIGSKPDDLPDVTTQYRGLSYSAGGDGSLENVTTLPNILREFNRNLTGYAVGTGDANDTNAFLNQAVPGAKAEDLMSQVQTLMQKMKDDHRVNFHEDWKVITVLIGGSDLCDYCTDSNLYSAANFVHHLRNALDVLHREVPRVLVNLVDFLNPTIMRQVFLGNPDKCPVQQASVLCNCVLTLRENSQELARLEAFSRAYRSSMRELVGSGRYDTQEDFSVVLQPFFQNIQLPVLADGLPDTSFFAPDCIHPNQKFHSQLARALWTNMLEPLGSKTETLDLRAEMPITCPTQNEPFLRTPRNSNYTYPIKPAIENWGSDFLCTEWKASNSVPTSVHQLRPADIKVVAALGDSLTTAVGARPNNSSDLPTSWRGLSWSIGGDGNLETHTTLPNILKKFNPYLLGFSTSTWEGTAGLNVAAEGARARDMPAQAWDLVERMKNSPDINLEKDWKLVTLFIGVNDLCHYCENPEAHLATEYVQHIQQALDILSEELPRAFVNVVEVMELASLYQGQGGKCAMLAAQNNCTCLRHSQSSLEKQELKKVNWNLQHGISSFSYWHQYTQREDFAVVVQPFFQNTLTPLNERGDTDLTFFSEDCFHFSDRGHAEMAIALWNNMLEPVGRKTTSNNFTHSRAKLKCPSPESPYLYTLRNSRLLPDQAEEAPEVLYWAVPVAAGVGLVVGIIGTVVWRCRRGGRREDPPMSLRTVAL

SEQ ID NO: 245285 - DNA, 4377 bp, Artificial Sequence
  derived and/or modified sequence
atgggtcttcgccctggcattttcctgctggaactcctattacttctggggcagggcacaccccagatacatacctctccgcggaagagtactctggagggacagctctggccagaaacccttaagaactctccctttccctgcaatccaaataaacttggggtgaatatgccaagtaagagcgtgcatagtctcaagccatccgatatcaaatttgttgccgccattggaaatctggaaatcccccctgatcctggaaccggtgacctggagaagcaggactggactgagagacctcagcaggtgtgcatgggtgtcatgaccgtcctgagcgacattatccgctatttctcaccatctgtgccaatgccagtgtgtcacacgggcaagcgagtcatcccacacgatggggctgaagatttgtggattcaggctcaagagttggtacggaatatgaaggagaacctccagctcgactttcagtttgactggaaactaataaacgtgtttttctctaatgctagccagtgctatctttgcccaagcgcacagcaaaacgggttagccgcagggggtgttgatgaattaatgggcgttctggactacctccaacaggaggtgccgagggctttcgtgaatcttgttgacttaagcgaagttgctgaggtcagtaggcagtaccacggaacatggctgagtcccgctcccgaaccctgcaattgttcagaagagacaacaagactcgcgaaggtcgtaatgcagtggtcctaccaggaagcatggaattccctcctggcatcttcgagatactcggaacaggagtcgtttaccgttgtttttcagcccttcttctatgagactactccatctctgcacagcgaagatccccgacttcaggatagcacaaccctggcctggcatttgtggaatcggatgatggaacccgctggggagaaggatgagccactctccgtgaagcacggaaggcccatgaaatgcccaagccaagagtccccttacctcttctcatacagaaattccaactatctgaccagactgcagaagccgcaggacaagctggaggtaagggagggagccgagattcggtgccctgataaggacccttccgatacagtgcccacatctgttcatcgtctgaagccagccgatattaacgtgataggcgcgttgggagacagcctgaccgccggaaacggtgcagggagtaccccaggaaatgtgcttgatgtgttaacacagtatcggggcctgagctggagcgtaggcggagatgagaacatcggaaccgtgacaaccctggcaaatatcctgagggaattcaatccctccctgaagggattctccgtggggacaggaaaagaaacatcaccgaatgccttcctaaatcaagcagtggctggagggagagccgaggatctccctgtgcaggctagaagactcgtcgacctgatgaagaatgatacacggatccatttccaagaggattggaagatcattactctgtttatagggggaaatgacctgtgtgacttctgtaacgaccttgtgcactatagtccccagaacttcacagataatatagggaaagcgctcgacattcttcacgccgaggtgccgcgggctttcgtcaacttggttaccgttctcgaaattgtcaaccttagagaactgtaccaggagaagaaggtctattgtccaagaatgatcctgcgcagcctgtgtccttgcgtgctgaaattcgatgacaactctactgaactggctacgttgatcgagttcaataagaaatttcaggagaaaacacaccagctcatcgaaagtggccggtatgacaccagagaggactttaccgtggtcgtgcagccgttttttgaaaatgtcgatatgcctaagacgagcgaaggactgcctgataattcttttttcgccccagattgttttcatttctcttccaagtcacactcccgggctgcttctgccctgtggaataacatgctggagccggtgggccagaaaactacacgccacaagttcgagaacaaaattaacataacctgccctaatcaggtgcaaccctttctgagaacgtataagaactccatgcaggggcacggaacatggctcccttgtagggacagggctcctagcgctctgcacccaacttccgtgcacgccctgcggccagccgatatccaagtcgttgctgctttgggtgactccctgacggctggaaacggtatcggaagcaagcccgacgacttacccgatgtaaccactcagtaccgcgggctttcctatagtgcagggggagatgggtccctcgagaacgtaactacactccccaacattcttcgggagttcaatcgtaaccttaccggttatgccgtggggaccggagatgcgaacgacaccaatgcatttctgaatcaggctgtgcccggtgctaaggctgaggacctcatgtctcaggtacagaccctgatgcagaaaatgaaggacgaccaccgagttaacttccatgaggattggaaggtaataaccgttctgattgggggttctgacctgtgcgattactgtacagactccaacttgtactcggccgctaattttgtacaccatctgcgcaatgccctggatgttctgcatagagaggtgccgcgtgtgttggtgaatctggtggacttcctgaaccctaccatcatgagacaggtctttctcgggaaccccgataagtgtcctgtgcaacaagcttccgtgctctgcaactgcgttcttactttgagggaaaatagccaggaactggcccgactcgaggccttttcccgagcctacaggagttccatgcgcgaactggttggttccggaagatacgatacccaagaggacttctctgtggtcctacaacctttctttcagaacatacagctcccagtgctggctgacggactgcctgacacttcatttttcgcgccagactgcatacacccaaaccagaagtttcattctcagctggctcgcgccctgtggaccaatatgctcgagcccttagggagtaagacggagacgcttgatctcagggctgagatgcccatcacctgcccaacccaaaatgagcctttcctgagaaccccacgtaacagcaactatacgtaccccattaagcccgcaatagagaactgggggtcggactttctatgtacagaatggaaagcatcaaactccgtccctaccagcgtgcatcagcttcggcctgccgatatcaaggtggtggcggcgctcggcgatagcctgaccaccgccgtcggcgcaaggcccaacaacagttccgacctcccgacgtcgtggcgtggcttgagctggagcattgggggagatggtaatttagaaactcacactactctgccaaacatactgaaaaagtttaacccctacttgctgggtttttccacatcgacttgggaaggcacagcggggttaaacgttgctgctgagggcgcaagagccagagatatgccagcccaggcgtgggatctggtggagaggatgaaaaacagtcctgacattaacctcgagaaagactggaagctggtgaccctgttcatcggagtcaacgacttatgtcactactgtgagaacccagaagcccatctggcaaccgagtatgtgcaacatatccaacaggcactggacatccttagtgaggagctgcccagagctttcgtaaatgtggttgaagtcatggaactagcttcattgtatcagggtcagggcggcaaatgtgccatgctggctgcccagaacaattgtacgtgtcttagacattcacaatcctcactcgagaagcaggaactgaagaaggtgaattggaacctgcagcacggaatctcctctttcagttactggcaccagtatacacagagggaggactttgccgtggtggtgcagccattcttccagaataccctaacgcctctgaacgaacggggagatactgacttgaccttttttagtgaggattgcttccacttctcggaccgcgggcatgccgaaatggcaattgccctgtggaataatatgctcgaaccagtcggacgcaaaaccactagcaataatttcacgcactcacgagccaaactgaagtgtccgtcacctgagtccccttacctctacaccctgcgaaatagtcgcctgctgccggaccaggccgaggaggccccggaagtcctgtactgggcagtgccagtcgcagccggagtggggttggttgtgggaatcattggtactgttgtgtggcgatgtcgccgtggcggtaggcgagaagatccgcctatgtcgctgagaaccgtggccctctag

SEQ ID NO: 245286 - DNA, 4377 bp, Artificial Sequence
  derived and/or modified sequence
atgggcctgcggcccggcatcttcctgctggagctgctgctgctgctgggccagggcaccccccagatccacaccagccccaggaagagcaccctggagggccagctgtggccagagaccctgaagaacagccccttcccctgcaaccccaacaagctgggcgtgaacatgcccagcaagtctgtgcacagcctgaagcccagcgacatcaagtttgtggccgccatcggcaacctggagatccccccagaccccggcactggagacctggagaagcaggactggacagagcggccccagcaggtgtgcatgggcgtgatgacagtgctgagtgacatcatccgctacttcagccccagcgtgcccatgcctgtgtgccacacaggcaagagggtcatcccccatgatggagctgaggacctgtggatccaggcccaggagctggtgaggaacatgaaggagaacctgcagctggacttccagtttgactggaagctgatcaacgtgttcttcagcaatgccagccagtgctacctgtgccccagcgcccagcagaatggcctggccgccggcggcgtggatgagctgatgggcgtgctggactacctgcagcaggaggtgccccgggcctttgtgaacctggtggacctgtctgaggtggccgaggtgtcccggcagtaccacggcacctggctgagccctgcccctgagccctgcaactgcagcgaggagaccacccggctggccaaggtggtgatgcagtggagctaccaggaggcctggaacagcctgctggccagcagccgctacagcgagcaggagagcttcaccgtggtgttccagcccttcttctatgagaccacccccagcctgcacagcgaggacccccggctgcaggacagcaccaccctggcctggcacctgtggaacaggatgatggagcctgctggggagaaggatgagcccctgtctgtgaagcacggccggcccatgaagtgccccagccaggagagcccctacctgttctcctacagaaacagcaactacctgacccggctgcagaagccccaggacaagctggaggtgcgggagggcgctgagatccgctgcccagacaaggaccccagcgacacagtgcccacctctgtgcaccggctgaagccagctgacatcaacgtcatcggggccctgggggacagcctgacagctggaaatggagctggcagcaccccaggaaatgtgctggatgtgctgacccagtaccggggcctgtcctggagcgtgggcggagatgagaacatcggcaccgtgaccaccctggccaacatcctgcgggagttcaaccccagcctgaagggcttctctgtgggcaccgggaaggagaccagccccaatgccttcctgaaccaggccgtggccggcggccgggcagaggacctgcctgtgcaggcccggcggctggtggacctgatgaagaatgacacccgcatccacttccaggaggactggaagatcatcaccctcttcatcggcggcaatgacctgtgtgacttctgcaatgacctggtgcactacagcccccagaacttcacagacaacatcggcaaggccctggacatcctgcatgctgaggtgccccgggcctttgtgaacctggtgacagtgctggagatcgtgaacctgcgggagctgtaccaggagaagaaggtgtactgccccaggatgatcctgcggagcctgtgcccctgtgtgctgaagtttgatgacaacagcacagagctggccaccctcatcgagttcaacaagaagttccaggagaagacccaccagctgattgagagcggccgctatgacacccgggaggacttcaccgtggtggtgcagcccttctttgaaaatgtggacatgcccaagaccagcgagggcctgcctgacaacagcttctttgccccagactgcttccacttcagcagcaagagccacagccgggccgccagcgccctgtggaacaacatgctggagcctgtgggccagaagaccaccaggcacaagtttgagaacaagatcaacatcacctgccccaaccaggtgcagcccttcctgcggacctacaagaacagcatgcagggccacggcacctggctgccctgccgggaccgggcccccagcgccctgcaccccacctctgtgcacgccctgcggcctgctgacatccaggtggtggccgccctgggggacagcctgacagctggaaatggcatcggcagcaagccagatgacctgcctgatgtgaccacccagtaccggggcctgagctacagcgctggaggagatggcagcctggagaatgtgaccaccctgcccaacatcctgcgggagttcaacagaaacctgaccggctatgctgtgggcactggagatgccaatgacaccaatgccttcctgaaccaggccgtgcctggggccaaggccgaggacctgatgagccaggtgcagaccctgatgcagaagatgaaggatgaccaccgggtgaacttccacgaggactggaaggtgatcaccgtgctgattggaggcagtgacctgtgtgactactgcacagacagcaacctgtacagcgctgccaactttgtgcaccacctgagaaatgccctggatgtgctgcaccgggaggtgccccgggtgctggtgaacctggtggacttcctgaaccccaccatcatgaggcaggtgttcctgggcaacccagacaagtgccctgtgcagcaggcctctgtgctgtgcaactgtgtgctgaccctgcgggagaacagccaggagctggcccggctggaggccttcagccgggcctaccgcagctccatgagggagctggtgggcagcggccgctatgacacccaggaggacttctctgtggtgctgcagcccttcttccagaacatccagctgcctgtgctggctgatggcctgcctgacaccagcttctttgccccagactgcatccaccccaaccagaagttccacagccagctggcccgggccctgtggaccaacatgctggagcccctgggcagcaagacagagaccctggacctgcgggcagagatgcccatcacctgccccacccagaatgagcccttcctgcggacccccaggaacagcaactacacctaccccatcaagccagccatcgagaactggggcagtgacttcctgtgcacagagtggaaggccagcaacagcgtgcccacctctgtgcaccagctgcggcctgctgacatcaaggtggtggccgccctgggggacagcctgaccacagctgtgggcgcccggcccaacaacagcagtgacctgcccacctcctggaggggcctgtcctggagcattggaggagatggcaacctggagacccacaccaccctgcccaacatcctgaagaagttcaacccctacctgctgggcttcagcaccagcacctgggagggcacagctggcctgaatgtggccgctgagggcgcccgggcccgggacatgcctgcccaggcctgggacctggtggagaggatgaagaacagcccagacatcaacctggagaaggactggaagctggtgaccctcttcatcggcgtgaatgacctgtgccactactgtgagaaccctgaggcccacctggccacagaatatgtgcagcacatccagcaggccctggacatcctgtctgaggagctgccccgggcctttgtgaatgtggtggaggtgatggagctggccagcctgtaccagggccagggcggcaaatgtgccatgctggccgcccagaacaactgcacctgcctgcggcacagccagagcagcctggagaagcaggagctgaagaaggtgaactggaacctgcagcacggcatcagcagcttctcctactggcaccagtacacccagagagaagattttgctgtggtggtgcagcccttcttccagaacaccctgacccccctgaatgaaagaggagacacagacctgaccttcttcagcgaggactgcttccacttcagtgaccggggccacgccgagatggccatcgccctgtggaacaacatgctggagcctgtgggcaggaagaccaccagcaacaacttcacccacagccgggccaagctgaagtgccccagccctgagagcccctacctgtacaccctgaggaacagccggctgctgcctgaccaggccgaggaggcccctgaggtgctgtactgggccgtgcctgtggccgccggcgtgggcctggtggtgggcatcattggaacagtggtgtggcgctgcagaagaggaggaagaagagaagatcctcccatgagcctgaggacagtggccctgtag

SEQ ID NO: 245287 - DNA, 4377 bp, Artificial Sequence
  derived and/or modified sequence
atgggcctgcggcccggcatcttcctgctggagctgctgctgctgctgggacaggggaccccccagatccacaccagccctaggaaaagcaccctggagggacagttgtggcctgaaactctgaaaaactcaccatttccctgcaacccaaataaacttggcgtgaacatgcccagtaaaagcgtacacagcctgaaaccctccgatatcaaatttgtagccgccattggaaatctcgaaatccctcccgaccctggtactggcgacctggaaaagcaggattggactgaacggcctcagcaggtctgtatgggagttatgaccgtgctgtccgacatcatccgctacttttctcctagtgttcccatgccagtttgtcacactgggaagagagtcattcctcacgacggggcagaggatttgtggattcaggcacaggaactggtgcgcaatatgaaggagaacttacagcttgactttcaattcgattggaaacttatcaatgtgtttttcagtaacgcatcgcagtgttatctgtgcccgagcgcccagcaaaacggactggccgcaggaggtgtagacgagctcatgggggtgttggattacctgcagcaggaggtccccagagcgttcgttaaccttgtggatttgtccgaggtcgccgaggtttcccgtcagtatcatgggacttggctgtcgcccgctcctgagccatgcaattgcagcgaggagacaacgcgcttagctaaggtggtgatgcagtggtcttaccaggaagcgtggaatagtctccttgctagcagccggtattccgagcaggaatcctttactgtggtgtttcagccctttttctatgaaaccacacctagcctccattctgaggacccgagattacaggatagcaccaccttagcctggcacctgtggaacaggatgatggaaccagcgggggaaaaagacgagcccctgtctgtcaagcacggcagaccgatgaaatgtccttcacaggagtctccttacctcttcagctatagaaacagcaattatctgacccgtttgcaaaagccacaagataaactggaggttagggaaggtgccgagattagatgtccggacaaagatccgagcgatacagtgcctaccagtgtccacaggctgaaaccagcagatatcaatgtgataggggcactgggtgatagcctaaccgccgggaatggcgctggatctaccccagggaatgtcctggatgtgctgacacaatacagaggacttagttggagcgtgggtggcgatgaaaatatcggcaccgtgaccacactcgctaacatcttgcgcgaatttaaccccagcctgaaggggttctctgtggggaccgggaaggaaacatcccccaatgcctttctaaaccaggctgttgctggcggacgggctgaagacctacctgttcaggctaggaggctggtagatcttatgaagaatgacacacgcatacacttccaggaggattggaagatcattacattgttcattggcggaaacgacctgtgcgacttctgtaatgacctggtgcactatagtccgcagaatttcacggataacataggaaaagccttagacatcttgcacgcggaggttccacgggcatttgtgaacctggtcactgtgctagagatcgtgaacctccgggaactttaccaggaaaagaaggtttactgccccaggatgatacttaggtctctgtgtccatgcgtcttaaagttcgacgacaattcaactgagcttgccacactcattgaattcaacaagaaattccaggaaaagacacaccagctgatcgaatccggaagatatgatacacgagaagactttacggtggtcgttcagccctttttcgaaaacgtggatatgcccaagacatcagaaggactgcctgataattcattttttgctccagactgcttccacttcagcagtaaatcccactcacgtgcagccagtgccctgtggaacaacatgctagagccagtcggccagaaaacaacccgtcacaagttcgagaacaaaatcaacatcacatgccccaatcaggtgcagccattcctgaggacttataaaaacagcatgcaggggcacgggacctggcttccctgccgcgatcgggcccctagcgctctgcaccctacgagtgtgcacgccttgcgccctgccgatattcaggtggtggcggccctgggggactccttgacagccggcaatggcatcgggtccaaacccgacgacctgcccgacgtgaccacacaatacaggggcctgagttacagcgccggtggggatgggtctctcgaaaacgtgaccacactgccgaatatcttacgtgaatttaataggaatttgaccggctacgcagtcggcactggggatgccaacgacactaatgcgttcttgaatcaggccgtgccaggggctaaggcagaagatctgatgtcccaagtccagaccttaatgcaaaaaatgaaggatgaccatcgcgttaattttcacgaggactggaaagtgatcacagttttgataggggggtccgacttgtgcgactactgtacagactcgaatctgtactctgcagccaactttgtccaccacctgagaaacgctttagacgtccttcatcgtgaggttccccgggtactcgttaatctcgtcgattttctcaatcctacaatcatgcggcaggtttttctggggaatcccgacaagtgccctgtgcaacaggcaagtgttttgtgcaactgtgttcttactctccgggagaactcacaggagcttgctcggctcgaggccttcagccgcgcctatcggtctagcatgagagagttggtaggcagcggcagatacgatacacaggaggatttcagtgtcgtgctgcagccgttcttccagaacatccagctacccgtgctggctgacggtctccctgacacatcctttttcgcgcccgactgtattcatcctaaccaaaagtttcattctcagcttgctcgcgccctgtggaccaatatgcttgaacctctcggtagcaaaaccgagaccctcgacctacgcgccgaaatgccaattacctgtccgacccagaacgaaccgtttctgagaaccccgagaaacagtaactatacttaccctattaagcccgcaatcgagaattggggaagtgacttcctatgtacagaatggaaagccagcaactccgtgcccacgtctgtgcaccagttacggccagcagacatcaaagttgtggccgctttaggggactccttaaccactgctgttggcgcccgaccgaacaacagttcagaccttccaactagctggcgcggtctctcctggtccatcggtggagatggaaatctggaaacccacacaactctgccaaatatcctgaagaaatttaacccctaccttttgggattctccacctccacttgggagggcaccgctggcttgaacgttgccgctgaaggggcacgagcccgcgacatgcctgcacaggcttgggatttggttgagaggatgaaaaactcacctgacatcaatttagagaaagattggaaattggttacactgttcatcggagtcaatgatttgtgtcattattgtgaaaacccagaggcacacttagctacagagtacgtgcagcatattcagcaggcactggatatcctgtccgaagagctgccacgtgcctttgtcaatgtggtggaggtaatggaactggccagcttgtatcagggacaggggggcaagtgcgctatgttggctgctcaaaataattgtacctgtctgagacacagccagtcgtcactcgagaaacaggagttaaagaaggtaaactggaatctccagcacgggatatcctccttttcctactggcaccaatatactcagcgtgaggattttgcagtagttgtacagcctttttttcagaatacattaacacctttgaacgaacgcggggatacggacctcactttttttagcgaggactgcttccatttctccgacagagggcacgccgagatggcaatcgccttgtggaataatatgctagagccggtgggtagaaagactactagcaataattttacccactcccgggctaagctcaaatgcccatctccggagagcccctatctgtatacgctaagaaacagcagactgctgcccgaccaggcagaggaagcccccgaggtgctctactgggcggtgcctgtcgctgcaggtgttggacttgtcgttggtataataggaacagtggtttggagatgcagaaggggtgggcggcgggaggacccacctatgtcacttcggacagtcgccctatag

SEQ ID NO: 245288 - DNA, 5107 bp, Artificial Sequence
  derived and/or modified sequence
ggagcagctcttccagaggcccgagtcacctggagcattctggcatggggctgcggccaggcattttcctcctggagctgctgctgcttctggggcaagggacccctcagatccatacctctcctagaaagagtacattggaagggcagctatggccagagaccctgaagaattctccattcccatgcaacccaaataaattaggagtgaatatgccttctaaatcagttcactctctgaagccttctgatattaaatttgtggcagccattggcaatctggaaattcctccagacccagggacgggcgatctggagaagcaagactggactgaaaggccacagcaggtgtgcatgggagtgatgacagtcctttcagacatcatcagatatttcagtccttctgttccaatgcctgtgtgccacactggaaagagagtcataccccacgatggtgctgaagacttgtggattcaggctcaagaactggtgagaaacatgaaagagaacctgcaacttgactttcaatttgactggaagctcatcaatgtgttcttcagtaatgcaagccagtgttacctgtgcccctctgctcaacagaatgggcttgcggcgggcggcgtggatgagctgatgggggtgctggactacctgcagcaggaggtccccagagcatttgtaaacctggtggacctctctgaggttgcagaggtctctcgtcagtatcacggcacttggctcagccctgcaccagagccctgtaattgctcagaggagaccacccggctggccaaggtggtgatgcagtggtcttatcaggaagcctggaacagcctcctggcctccagcaggtacagtgagcaggagtccttcaccgtggttttccagcctttcttctatgagaccaccccatctctacactcggaggacccccgactccaggattctaccacgctggcctggcatctctggaataggatgatggagccagcaggagagaaagatgagccattgagtgtaaaacacgggaggccaatgaagtgtccctctcaggagagcccctatctgttcagctacagaaacagcaactacctgaccagactgcagaaaccccaagacaagcttgaggtaagagaaggagcggaaatcagatgtcctgacaaagacccctccgatacggttcccacctcagttcataggctgaagccggctgacatcaacgtaattggagccctgggtgactctctcacggcaggcaatggggccgggtccacacctgggaacgtcttggacgtcttgactcagtaccgaggcctgtcctggagcgtcggcggagatgagaacatcggcaccgttaccaccctggcgaacatcctccgggaattcaacccttccctgaagggcttctctgttggcactgggaaagaaaccagtcctaatgccttcttaaaccaggctgtggcaggaggccgagctgaggatctacctgtccaggccaggaggctggtggacctgatgaagaatgacacgaggatacactttcaggaagactggaagataataaccctgtttataggcggcaatgacctctgtgatttctgcaatgatctggtccactattctccccagaacttcacagacaacattggaaaggccctggacatcctccatgctgaggttcctcgggcatttgtgaacctggtgacggtgcttgagatcgtcaacctgagggagctgtaccaggagaaaaaagtctactgcccaaggatgatcctcaggtctctgtgtccctgtgtcctgaagtttgatgataactcaacagaacttgctaccctcatcgaattcaacaagaagtttcaggagaagacccaccaactgattgagagtgggcgatatgacacaagggaagattttactgtggttgtgcagccgttctttgaaaacgtggacatgccaaagacctcggaaggattgcctgacaactctttcttcgctcctgactgtttccacttcagcagcaagtctcactcccgagcagccagtgctctctggaacaatatgctggagcctgttggccagaagacgactcgtcataagtttgaaaacaagatcaatatcacatgtccgaaccaggtccagccgtttctgaggacctacaagaacagcatgcagggtcatgggacctggctgccatgcagggacagagccccttctgccttgcaccctacctcagtgcatgccctgagacctgcagacatccaagttgtggctgctctgggggattctctgaccgctggcaatggaattggctccaaaccagacgacctccccgatgtcaccacacagtatcggggactgtcatacagtgcaggaggggacggctccctggagaatgtgaccaccttacctaatatccttcgggagtttaacagaaacctcacaggctacgccgtgggcacgggtgatgccaatgacacgaatgcattcctcaatcaagctgttcccggagcaaaggctgaggatcttatgagccaagtccaaactctgatgcagaagatgaaagatgatcatagagtaaatttccatgaagactggaaggtcatcacagtgctgatcggaggcagcgatttatgtgactactgcacagattcgaatctgtattctgcagccaactttgttcaccatctccgcaatgccttggacgtcctgcatagagaggtgcccagagtcctggtcaacctcgtggacttcctgaaccccactatcatgcggcaggtgttcctgggaaacccagacaagtgcccagtgcagcaggccagcgttttgtgtaactgcgttctgaccctgcgggagaactcccaagagctagccaggctggaggccttcagccgagcctaccggagcagcatgcgcgagctggtggggtcaggccgctatgacacgcaggaggacttctctgtggtgctgcagcccttcttccagaacatccagctccctgtcctggcggatgggctcccagatacgtccttctttgccccagactgcatccacccaaatcagaaattccactcccagctggccagagccctttggaccaatatgcttgaaccacttggaagcaaaacagagaccctggacctgagagcagagatgcccatcacctgtcccactcagaatgagcccttcctgagaacccctcggaatagtaactacacgtaccccatcaagccagccattgagaactggggcagtgacttcctgtgtacagagtggaaggcttccaatagtgttccaacctctgtccaccagctccgaccagcagacatcaaagtggtggccgccctgggtgactctctgactacagcagtgggagctcgaccaaacaactccagtgacctacccacatcttggaggggactctcttggagcattggaggggatgggaacttggagactcacaccacactgcccaacattctgaagaagttcaacccttacctccttggcttctctaccagcacctgggaggggacagcaggactaaatgtggcagcggaaggggccagagctagggacatgccagcccaggcctgggacctggtagagcgaatgaaaaacagccccgacatcaacctggagaaagactggaagctggtcacactcttcattggggtcaacgacttgtgtcattactgtgagaatccggaggcccacttggccacggaatatgttcagcacatccaacaggccctggacatcctctctgaggagctcccaagggctttcgtcaacgtggtggaggtcatggagctggctagcctgtaccagggccaaggcgggaaatgtgccatgctggcagctcagaacaactgcacttgcctcagacactcgcaaagctccctggagaagcaagaactgaagaaagtgaactggaacctccagcatggcatctccagtttctcctactggcaccaatacacacagcgtgaggactttgcggttgtggtgcagcctttcttccaaaacacactcaccccactgaacgagagaggggacactgacctcaccttcttctccgaggactgttttcacttctcagaccgcgggcatgccgagatggccatcgcactctggaacaacatgctggaaccagtgggccgcaagactacctccaacaacttcacccacagccgagccaaactcaagtgcccctctcctgagagcccttacctctacaccctgcggaacagccgattgctcccagaccaggctgaagaagcccccgaggtgctctactgggctgtcccagtggcagcgggagtcggccttgtggtgggcatcatcgggacagtggtctggaggtgcaggagaggtggccggagggaagatcctccaatgagcctgcgcactgtggccctctaggcccgggggtgggtcctcaccctaaactccctatagccactctcttcaccgccctctgccccagccactcccggccaccaggacatgcttcaatgcctggtgccataggaagcccaggggacagtcacaacttcttggggcctgggcttcttccaggcctatgctcctggaatggatacatttaaataaagtccaaagctattttattcctgggtttgcctgcgtgaagcactcaccttccatctcttgtgcagcccaggtgtgggagctgccactttttgtggcctgcctccagcagggctgcccaagccacgaccaaccagagcccaaactgcctgccaccacgagcatatcctcaagtcaccaaacccactatttcaaaggcagaaaaaatgctggtcaccaggtggtggctggaattttggagctggctggttgccattcagtccaatccaacacatacctattaagcaactgttttgtatccaggacaatgcgaagcactgaggtgcctcctaggctgtgcatgtcgcagcctggcagagaggtcaaactccttcaataaccaagaagccacgtgatgatgtgtaactactagggcatcagtaggtaaatgtgtctgattgttttaaagaatagaaagggttcttcggggaaagtttcttgggggagagcaaccttcacat

SEQ ID NO: 245289 - DNA, 4377 bp, Artificial Sequence
  derived and/or modified sequence
atgggtttaagacctggaatcttcctcctcgaattactgctactacttggacagggcacaccacaaattcacacctcccctcgcaaaagtacactggagggacagctttggcccgaaacacttaagaattctcccttcccttgcaatccgaacaagctaggcgtgaacatgccatctaagtcagtacatagtctcaagccgtccgatatcaaatttgtcgccgctattggaaatctggaaattccgccagacccaggcaccggtgacctggaaaagcaggactggaccgaacgaccacagcaggtctgcatgggggtgatgacagtactttctgacattatccgttactttagcccgtcggtgccgatgcccgtatgtcacacaggaaaacgcgtgattccccacgatggcgcagaagatctttggatccaagcacaagaactggtgagaaatatgaaggagaacctccaactcgattttcagttcgactggaaacttattaatgtcttcttctctaatgcatcccaatgctacctctgcccatccgcacagcaaaacggcctcgccgctggcggtgtcgacgaactgatgggagtgcttgattatttgcagcaggaagttcccagggccttcgtgaacctggtggatctcagcgaggtggcggaggtgtcacgccagtatcatggtacgtggctgtcaccagcaccggaaccttgcaactgttctgaagaaacaactcgtctggcaaaggtggtgatgcagtggagctaccaggaagcctggaacagccttctagcgtcgagcagatattcagagcaggaaagctttactgttgtgtttcaacctttcttctacgaaaccacccccagtctccacagcgaagacccaagactgcaggattcaaccactctggcgtggcatctgtggaacaggatgatggaacccgctggtgagaaggacgaacctctctcggttaagcacggtaggccgatgaaatgcccttcccaggagtccccctacctgttctcctaccgcaactccaactacttgacccgcttgcaaaagccacaggataaacttgaggttcgggagggcgcagagatccgatgtccggacaaagaccctagcgacacggtgcccaccagtgttcacagactgaagcctgctgacattaacgtgattggcgctctcggggattcattgaccgcaggtaacggggctgggtccaccccaggcaatgtgctggatgtactgacacagtatcggggactgtcctggagcgtggggggagacgagaacatcggcacagtaactaccctggccaacatactgcgcgaatttaatccgtccttgaagggctttagcgttggtaccggtaaggaaacttccccaaatgcatttctcaatcaagcggtggcgggtggaagagccgaggacctgccagtccaggccaggcgcctggttgatctgatgaagaatgacacgagaattcactttcaagaagattggaagattatcacactctttatcggcggaaacgatctctgtgatttttgcaacgatctggtgcactactcaccacagaactttaccgataatatcggtaaggcccttgacattctgcatgccgaggtgcccagagccttcgtcaatctggtgaccgtgctggagatcgtcaatcttcgcgaactgtaccaggaaaagaaagtgtattgtcctagaatgatcctcagatccctgtgtccttgcgtcctgaagttcgacgacaactccactgagttggcgacgttgatcgaatttaacaaaaagtttcaggaaaagactcatcagttgattgaaagtggaaggtatgatacccgtgaggactttacggttgtggttcaacccttttttgagaacgtagacatgcctaagacaagtgaaggactgccggataatagtttttttgccccagactgttttcactttagctccaagtctcattcacgagctgcatcagctctgtggaacaatatgctcgaaccagtgggacagaaaacaacgcgacataaattcgagaacaaaattaacatcacatgcccaaatcaagttcagccattcctgagaacatataagaactcaatgcaggggcatggcacatggctgccttgcagagatcgggctccatccgcgttgcatcctaccagtgtgcacgccctccggccagctgacatccaagtggtggccgcacttggggatagcctgacagctggcaacggcattggatctaaacccgacgacctgcccgacgtcaccacacagtacagaggtctttcctactcagcaggtggggacggttccctggagaatgtcaccactctgccgaatatcctgcgcgagtttaaccggaacttaacaggctatgctgtcgggacaggggatgccaatgacactaacgcttttctaaatcaagctgtgccaggcgcaaaggccgaggacctaatgtcacaggtacagacactcatgcagaagatgaaggatgatcacagagtgaattttcacgaggactggaaagtcataaccgttctaatcggcggttccgacctgtgcgactattgtactgattccaacctgtacagcgctgccaattttgtccaccacctgcggaacgctctcgacgtactccatcgcgaggtgcccagggttctcgttaatttggtggactttcttaatcctacgataatgagacaagttttcctgggtaatccagacaagtgccctgtccagcaggcttctgtgctgtgcaattgtgtactcacgctgcgggagaattcgcaagagctagctagactggaagctttctcacgcgcatacagatccagcatgagggagctggttggtagcggcaggtacgacacgcaggaggacttcagtgtcgtgctgcagccgtttttccagaacattcagctccctgtactggccgacggtttgccggacacctccttctttgcccctgattgcatccatccaaatcagaagttccactcccagctggctagggccctctggaccaacatgctagagccgctggggagcaaaacagaaacactggaccttagggctgagatgcccataacttgcccaacacagaacgaaccttttttgcggacacctagaaattcaaactatacatacccaatcaagcccgcaattgaaaattggggcagtgatttcctttgtacggagtggaaagcttctaatagcgtccccacttccgtgcaccagcttcgacctgccgacatcaaagttgtcgccgctcttggcgattccttgactactgccgtaggggcaaggccaaacaactctagtgatctaccgacgagttggcggggactttcatggtcgatcggtggggatggcaatcttgagacccataccaccctccctaacattctgaaaaagtttaacccataccttttgggtttctccacatccacctgggaaggcaccgccggtctgaacgtggcagccgagggcgctagagccagagatatgccagcccaagcttgggatctcgtagaaaggatgaaaaacagccctgacattaatcttgagaaagattggaagttggtgacccttttcattggcgtgaatgatctgtgccactattgcgaaaacccagaagctcacctagccaccgaatacgtgcagcacatacagcaggctctcgacatacttagcgaggagctgccaagggcattcgtcaacgtcgtcgaagtgatggagctggcaagcttgtaccaagggcaagggggtaagtgtgcgatgctagccgcacagaacaattgcacctgtttgagacactctcagtcaagtctggagaaacaggaattgaagaaggtcaactggaatttacaacacggcattagctcattttcttattggcatcagtacacccaacgggaagactttgccgtggtcgtgcagcctttcttccagaacacactaacccccctgaacgaacgaggcgataccgatctcaccttcttctccgaggactgttttcacttcagcgatagaggccatgccgaaatggccattgccctctggaacaacatgttggaacctgtcgggagaaaaaccaccagcaacaatttcacccactcacgggcaaagctgaagtgcccatcacccgagagcccatacctgtatactctgcggaactctaggttgctacccgaccaggcagaagaagcccctgaagttctgtactgggccgtccctgttgctgcaggtgtggggctggtcgtagggattatcggcacagtggtttggagatgtcgcagaggcggaaggagggaagaccccccaatgagcttgagaaccgtggccctttag

SEQ ID NO: 245290 - DNA, 4377 bp, Artificial Sequence
  derived and/or modified sequence
atgggcctgagacccggcatcttcctgctggagctgctgctgctgctgggccagggcaccccccagatccacaccagccccagaaagagcaccctggagggccagctgtggcccgagaccctgaagaacagccccttcccctgcaaccccaacaagctgggcgtgaacatgcccagcaagagcgtgcacagcctgaagcccagcgacatcaagttcgtggccgccatcggcaacctggagatcccccccgaccccggcaccggcgacctggagaagcaggactggaccgagagaccccagcaggtgtgcatgggcgtgatgaccgtgctgagcgacatcatcagatacttcagccccagcgtgcccatgcccgtgtgccacaccggcaagagagtgatcccccacgacggcgccgaggacctgtggatccaggcccaggagctggtgagaaacatgaaggagaacctgcagctggacttccagttcgactggaagctgatcaacgtgttcttcagcaacgccagccagtgctacctgtgccccagcgcccagcagaacggcctggccgccggcggcgtggacgagctgatgggcgtgctggactacctgcagcaggaggtgcccagagccttcgtgaacctggtggacctgagcgaggtggccgaggtgagcagacagtaccacggcacctggctgagccccgcccccgagccctgcaactgcagcgaggagaccaccagactggccaaggtggtgatgcagtggagctaccaggaggcctggaacagcctgctggccagcagcagatacagcgagcaggagagcttcaccgtggtgttccagcccttcttctacgagaccacccccagcctgcacagcgaggaccccagactgcaggacagcaccaccctggcctggcacctgtggaacagaatgatggagcccgccggcgagaaggacgagcccctgagcgtgaagcacggcagacccatgaagtgccccagccaggagagcccctacctgttcagctacagaaacagcaactacctgaccagactgcagaagccccaggacaagctggaggtgagagagggcgccgagatcagatgccccgacaaggaccccagcgacaccgtgcccaccagcgtgcacagactgaagcccgccgacatcaacgtgatcggcgccctgggcgacagcctgaccgccggcaacggcgccggcagcacccccggcaacgtgctggacgtgctgacccagtacagaggcctgagctggagcgtgggcggcgacgagaacatcggcaccgtgaccaccctggccaacatcctgagagagttcaaccccagcctgaagggcttcagcgtgggcaccggcaaggagaccagccccaacgccttcctgaaccaggccgtggccggcggcagagccgaggacctgcccgtgcaggccagaagactggtggacctgatgaagaacgacaccagaatccacttccaggaggactggaagatcatcaccctgttcatcggcggcaacgacctgtgcgacttctgcaacgacctggtgcactacagcccccagaacttcaccgacaacatcggcaaggccctggacatcctgcacgccgaggtgcccagagccttcgtgaacctggtgaccgtgctggagatcgtgaacctgagagagctgtaccaggagaagaaggtgtactgccccagaatgatcctgagaagcctgtgcccctgcgtgctgaagttcgacgacaacagcaccgagctggccaccctgatcgagttcaacaagaagttccaggagaagacccaccagctgatcgagagcggcagatacgacaccagagaggacttcaccgtggtggtgcagcccttcttcgagaacgtggacatgcccaagaccagcgagggcctgcccgacaacagcttcttcgcccccgactgcttccacttcagcagcaagagccacagcagagccgccagcgccctgtggaacaacatgctggagcccgtgggccagaagaccaccagacacaagttcgagaacaagatcaacatcacctgccccaaccaggtgcagcccttcctgagaacctacaagaacagcatgcagggccacggcacctggctgccctgcagagacagagcccccagcgccctgcaccccaccagcgtgcacgccctgagacccgccgacatccaggtggtggccgccctgggcgacagcctgaccgccggcaacggcatcggcagcaagcccgacgacctgcccgacgtgaccacccagtacagaggcctgagctacagcgccggcggcgacggcagcctggagaacgtgaccaccctgcccaacatcctgagagagttcaacagaaacctgaccggctacgccgtgggcaccggcgacgccaacgacaccaacgccttcctgaaccaggccgtgcccggcgccaaggccgaggacctgatgagccaggtgcagaccctgatgcagaagatgaaggacgaccacagagtgaacttccacgaggactggaaggtgatcaccgtgctgatcggcggcagcgacctgtgcgactactgcaccgacagcaacctgtacagcgccgccaacttcgtgcaccacctgagaaacgccctggacgtgctgcacagagaggtgcccagagtgctggtgaacctggtggacttcctgaaccccaccatcatgagacaggtgttcctgggcaaccccgacaagtgccccgtgcagcaggccagcgtgctgtgcaactgcgtgctgaccctgagagagaacagccaggagctggccagactggaggccttcagcagagcctacagaagcagcatgagagagctggtgggcagcggcagatacgacacccaggaggacttcagcgtggtgctgcagcccttcttccagaacatccagctgcccgtgctggccgacggcctgcccgacaccagcttcttcgcccccgactgcatccaccccaaccagaagttccacagccagctggccagagccctgtggaccaacatgctggagcccctgggcagcaagaccgagaccctggacctgagagccgagatgcccatcacctgccccacccagaacgagcccttcctgagaacccccagaaacagcaactacacctaccccatcaagcccgccatcgagaactggggcagcgacttcctgtgcaccgagtggaaggccagcaacagcgtgcccaccagcgtgcaccagctgagacccgccgacatcaaggtggtggccgccctgggcgacagcctgaccaccgccgtgggcgccagacccaacaacagcagcgacctgcccaccagctggagaggcctgagctggagcatcggcggcgacggcaacctggagacccacaccaccctgcccaacatcctgaagaagttcaacccctacctgctgggcttcagcaccagcacctgggagggcaccgccggcctgaacgtggccgccgagggcgccagagccagagacatgcccgcccaggcctgggacctggtggagagaatgaagaacagccccgacatcaacctggagaaggactggaagctggtgaccctgttcatcggcgtgaacgacctgtgccactactgcgagaaccccgaggcccacctggccaccgagtacgtgcagcacatccagcaggccctggacatcctgagcgaggagctgcccagagccttcgtgaacgtggtggaggtgatggagctggccagcctgtaccagggccagggcggcaagtgcgccatgctggccgcccagaacaactgcacctgcctgagacacagccagagcagcctggagaagcaggagctgaagaaggtgaactggaacctgcagcacggcatcagcagcttcagctactggcaccagtacacccagagagaggacttcgccgtggtggtgcagcccttcttccagaacaccctgacccccctgaacgagagaggcgacaccgacctgaccttcttcagcgaggactgcttccacttcagcgacagaggccacgccgagatggccatcgccctgtggaacaacatgctggagcccgtgggcagaaagaccaccagcaacaacttcacccacagcagagccaagctgaagtgccccagccccgagagcccctacctgtacaccctgagaaacagcagactgctgcccgaccaggccgaggaggcccccgaggtgctgtactgggccgtgcccgtggccgccggcgtgggcctggtggtgggcatcatcggcaccgtggtgtggagatgcagaagaggcggcagaagagaggacccccccatgagcctgagaaccgtggccctgtag

SEQ ID NO: 245291 - DNA, 1959 bp, Artificial Sequence
  derived and/or modified sequence
atgaccagcgccagccccgaggaccagaacgcccccgtgggctgccccaagggcgccagaagaagaagacccatcagcgtgatcggcggcgtgagcctgtacggcaccaaccagaccgaggagctggacaacctgctgacccagcccgccagcagaccccccatgcccgcccaccaggtgcccccctacaaggccgtgagcgccagattcagacccttcaccttcagccagagcacccccatcggcctggacagagtgggcagaagaagacagatgagagccagcaacgtgagcagcgacggcggcaccgagcccagcgccctggtggacgacaacggcagcgaggaggacttcagctacgaggacctgtgccaggccagccccagatacctgcagcccggcggcgagcagctggccatcaacgagctgatcagcgacggcaacgtggtgtgcgccgaggccctgtgggaccacgtgaccatggacgaccaggagctgggcttcaaggccggcgacgtgatccaggtgctggaggccagcaacaaggactggtggtggggcagaagcgaggacaaggaggcctggttccccgccagcttcgtgagactgagagtgaaccaggaggagctgagcgagaacagcagcagcacccccagcgaggagcaggacgaggaggccagccagagcagacacagacactgcgagaacaagcagcagatgagaaccaacgtgatcagagagatcatggacaccgagagagtgtacatcaagcacctgagagacatctgcgagggctacatcagacagtgcagaaagcacaccggcatgttcaccgtggcccagctggccaccatcttcggcaacatcgaggacatctacaagttccagagaaagttcctgaaggacctggagaagcagtacaacaaggaggagccccacctgagcgagatcggcagctgcttcctgcagaaccaggagggcttcgccatctacagcgagtactgcaacaaccaccccggcgcctgcctggagctggccaacctgatgaagcagggcaagtacagacacttcttcgaggcctgcagactgctgcagcagatgatcgacatcgccatcgacggcttcctgctgacccccgtgcagaagatctgcaagtaccccctgcagctggccgagctgctgaagtacaccacccaggagcacggcgactacagcaacatcaaggccgcctacgaggccatgaagaacgtggcctgcctgatcaacgagagaaagagaaagctggagagcatcgacaagatcgccagatggcaggtgagcatcgtgggctgggagggcctggacatcctggacagaagcagcgagctgatccacagcggcgagctgaccaagatcaccaagcagggcaagagccagcagagaaccttcttcctgttcgaccaccagctggtgagctgcaagaaggacctgctgagaagagacatgctgtactacaagggcagactggacatggacgagatggagctggtggacctgggcgacggcagagacaaggactgcaacctgagcgtgaagaacgccttcaagctggtgagcagaaccaccgacgaggtgtacctgttctgcgccaagaagcaggaggacaaggccagatggctgcaggcctgcgccgacgagagaagaagagtgcaggaggacaaggagatgggcatggagatcagcgagaaccagaagaagctggccatgctgaacgcccagaaggccggccacggcaagagcaagggctacaacagatgccccgtggcccccccccaccagggcctgcaccccatccaccagagacacatcaccatgcccaccagcgtgccccagcagcaggtgttcggcctggccgagcccaagagaaagagcagcctgttctggcacaccttcaacagactgacccccttcagaaagtag

SEQ ID NO: 245292 - DNA, 1851 bp, Artificial Sequence
  derived and/or modified sequence
atgcccgcccaccaggtgcccccctacaaggccgtgagcgccagattcagacccttcaccttcagccagagcacccccatcggcctggacagagtgggcagaagaagacagatgagagccagcaacgtgagcagcgacggcggcaccgagcccagcgccctggtggacgacaacggcagcgaggaggacttcagctacgaggacctgtgccaggccagccccagatacctgcagcccggcggcgagcagctggccatcaacgagctgatcagcgacggcaacgtggtgtgcgccgaggccctgtgggaccacgtgaccatggacgaccaggagctgggcttcaaggccggcgacgtgatccaggtgctggaggccagcaacaaggactggtggtggggcagaagcgaggacaaggaggcctggttccccgccagcttcgtgagactgagagtgaaccaggaggagctgagcgagaacagcagcagcacccccagcgaggagcaggacgaggaggccagccagagcagacacagacactgcgagaacaagcagcagatgagaaccaacgtgatcagagagatcatggacaccgagagagtgtacatcaagcacctgagagacatctgcgagggctacatcagacagtgcagaaagcacaccggcatgttcaccgtggcccagctggccaccatcttcggcaacatcgaggacatctacaagttccagagaaagttcctgaaggacctggagaagcagtacaacaaggaggagccccacctgagcgagatcggcagctgcttcctgcagaaccaggagggcttcgccatctacagcgagtactgcaacaaccaccccggcgcctgcctggagctggccaacctgatgaagcagggcaagtacagacacttcttcgaggcctgcagactgctgcagcagatgatcgacatcgccatcgacggcttcctgctgacccccgtgcagaagatctgcaagtaccccctgcagctggccgagctgctgaagtacaccacccaggagcacggcgactacagcaacatcaaggccgcctacgaggccatgaagaacgtggcctgcctgatcaacgagagaaagagaaagctggagagcatcgacaagatcgccagatggcaggtgagcatcgtgggctgggagggcctggacatcctggacagaagcagcgagctgatccacagcggcgagctgaccaagatcaccaagcagggcaagagccagcagagaaccttcttcctgttcgaccaccagctggtgagctgcaagaaggacctgctgagaagagacatgctgtactacaagggcagactggacatggacgagatggagctggtggacctgggcgacggcagagacaaggactgcaacctgagcgtgaagaacgccttcaagctggtgagcagaaccaccgacgaggtgtacctgttctgcgccaagaagcaggaggacaaggccagatggctgcaggcctgcgccgacgagagaagaagagtgcaggaggacaaggagatgggcatggagatcagcgagaaccagaagaagctggccatgctgaacgcccagaaggccggccacggcaagagcaaggtgagactgcagcaggtgccctgcggccccaccgcccccggccccgccccccacccccccgccccccaccactacgcccacaagagaccccccgccgccggcctgtggcccggcggcacccaggaggaggtgctggccctgctggcccacctgcagcaggcccaccccctgcccgagatgaagaccggcggctgcgccagcatggagctgggcgtgaagagaagaaactag

SEQ ID NO: 245293 - DNA, 1959 bp, Artificial Sequence
  derived and/or modified sequence
atgacttcagcctctccagaggaccagaacgcgccagtggggtgccccaaaggggcccggcgcaggcggcctatcagcgtaatcgggggcgtgagtctctacggtacaaatcagactgaagaactggacaatctgcttacccagccagcatctcgtccccccatgcctgctcaccaggtcccaccctacaaagccgttagcgctaggttccggccgttcactttctctcagagcacccctatagggctagaccgagtgggacgtcggcggcagatgcgtgcaagcaacgtgtcctcagatggtggcaccgaacctagcgctcttgtagatgacaacggctcagaggaagacttctcttatgaagacctgtgtcaggccagccctcgctatctgcagcccggtggggagcagctagctattaacgagctgatatctgacggcaacgtggtgtgcgccgaagccctctgggaccatgttacgatggacgaccaggagctcggatttaaggccggcgatgtcatccaggtactggaggctagtaacaaagattggtggtggggaagaagcgaggataaagaggcctggtttcccgcctcattcgtcaggcttagggtaaaccaggaggaactgagcgagaacagtagctccacccccagcgaagagcaggatgaagaggcgtcacaaagcagacacagacactgcgagaacaagcaacagatgaggacgaacgttattagggagatcatggacacagagcgggtgtatatcaagcacttgcgggatatctgcgaaggatatatccgccaatgtcggaaacataccggaatgttcacagtggcccagcttgcgacaatttttggtaacattgaggacatctacaagtttcagcggaagttcttgaaggatttggagaaacagtacaacaaggaagaaccccatctctctgagatcgggtcctgcttcctgcagaatcaggaaggattcgcaatatacagtgaatactgcaacaatcacccaggagcatgcctggaacttgcaaatttgatgaagcaggggaagtatcgccacttctttgaggcctgccgcctcttgcagcagatgatcgatatcgcaatcgacggcttcctgctgacacccgtgcaaaaaatatgtaagtaccccctccaattggcagagctcctcaagtacacgacacaggagcacggtgactactcgaacattaaagctgcgtatgaggcaatgaaaaacgtagcttgcttgataaatgagaggaaacggaaacttgagtctatcgacaagatcgctcgctggcaagtgagtattgtgggttgggagggcctggacatcttagaccgcagtagtgagctgattcactccggagagctgacaaagatcactaaacaggggaaatctcaacaaaggaccttctttttgttcgatcaccagctggtgtcttgtaagaaagacctgctccggagggatatgttgtactacaaggggagactggacatggatgaaatggagctcgtagatctgggcgacggacgggataaggactgtaacctttctgttaagaacgccttcaagctggtctcacgcacgacagatgaggtatatttgttctgcgcaaagaaacaggaggacaaggctcgttggttgcaggcatgcgctgacgagaggaggcgcgtgcaggaggataaagagatggggatggaaattagcgagaaccaaaaaaagttagccatgttgaacgcgcagaaagccggacatggaaagtccaagggctacaaccgctgccccgtcgcacctccccatcaaggacttcacccaatccaccaacgacacataaccatgccaacttctgtgccccagcagcaggtattcggactcgcggaacctaaaagaaagagctccttgttctggcacacctttaatagacttacaccctttaggaagtag

SEQ ID NO: 245294 - DNA, 1851 bp, Artificial Sequence
  derived and/or modified sequence
atgcctgctcatcaggtcccaccctataaagccgtgagcgcccggtttagaccctttacgttcagtcagagcacccccataggtctggatagggtgggaaggcgtcgccagatgagggcctctaatgtctcatcagatgggggaactgaaccttctgcacttgtggacgataacggatccgaggaggacttcagctacgaagacctgtgccaagcgagtccccgctatctgcaacccggaggagagcaactggcgattaacgagcttatatctgatggcaacgtcgtctgcgcagaggcgttgtgggaccacgtgaccatggatgatcaggaattagggttcaaggccggggatgtcatccaggtgctggaggcctccaataaggactggtggtgggggcggtctgaggacaaggaagcatggtttccagcaagctttgtccgcttgcgggtgaaccaggaggagctgagcgagaatagttcaagcaccccctccgaagagcaggatgaggaagccagtcagtcccgtcaccgtcactgtgagaataagcaacaaatgaggactaacgtcatacgggagattatggacacagaaagggtttatattaagcacctgagggatatttgtgaaggatacattcggcaatgcagaaaacacacaggaatgtttacagtagctcagcttgcgaccatattcggcaatatcgaggatatctataagtttcaacgcaagttcctcaaagacttggagaaacagtacaacaaggaagaaccgcacctctcggagatcggcagttgcttccttcagaatcaggagggtttcgccatctattcagaatattgcaataaccatcctggcgcttgtctcgaactggccaacctaatgaagcagggcaaatacagacatttctttgaggcttgccgcctactacagcagatgattgacattgcaatagacgggtttctactgactcccgtgcagaagatctgtaaatatcccctccagctagcagagttgttgaagtacactacacaggagcatggtgactattcaaatattaaggcggcctacgaggccatgaagaatgtcgcgtgtctcatcaatgagaggaagcggaagctggaatctattgacaagattgcccggtggcaggtgtctatcgtggggtgggaagggctcgacatactggatcggtcctccgaactaatccattcaggtgagttgactaagatcacaaagcaggggaagtctcagcagcgcactttcttcctgtttgatcatcagctcgtctcctgtaaaaaggacctgttgcgtcgcgatatgctgtattataagggtagactggatatggacgagatggagttggttgacctcggggatggcagagacaaagactgtaatctgagcgtgaaaaatgccttcaagctcgtgagtaggaccaccgacgaagtctatctcttttgtgccaagaagcaagaagacaaggccaggtggctccaagcctgcgcagatgagagaaggcgcgtccaagaagacaaagaaatgggaatggaaattagcgagaatcagaagaaacttgccatgttgaacgcacagaaggccggtcatggtaaatcaaaggtgaggttacagcaagttccatgtgggcccacagccccgggccccgccccccatccgcccgccccgcatcactacgctcacaagcgcccccctgccgccgggctatggccaggcggcacccaggaagaagtgcttgccctactcgcgcatttgcaacaggcccacccactgccagagatgaagaccggcgggtgtgccagcatggaactcggggtcaagaggcggaactag

SEQ ID NO: 245295 - DNA, 1959 bp, Artificial Sequence
  derived and/or modified sequence
atgaccagcgccagccctgaggaccagaatgcccctgtgggctgccccaagggggccaggagaagaagacccatcagcgtcatcggcggcgtgtccctgtatggcaccaaccagacagaggagctggacaacctgctgacccagcctgccagcaggcctcccatgcctgcccaccaggtgcccccctacaaggctgtgtctgcccgcttccggcccttcaccttcagccagagcacccccatcggcctggacagagtgggcagaagacggcagatgagggccagcaatgtgtccagtgatggcggcacagagcccagcgccctggtggatgacaatggcagcgaggaggacttctcctatgaggacctgtgccaggccagcccccgctacctgcagcctggaggagagcagctggccatcaatgaactcatcagtgatggaaatgtggtgtgtgccgaggccctgtgggaccacgtgaccatggatgaccaggagctgggcttcaaggctggagatgtgatccaggtgctggaggccagcaacaaggactggtggtggggccgctctgaggacaaggaggcctggttccctgccagctttgtgcggctgcgggtgaaccaggaggagctgtctgagaacagcagcagcaccccatctgaggagcaggatgaggaggccagccagagccgccaccgccactgtgagaacaagcagcagatgaggaccaacgtcatccgggagatcatggacacagagcgggtgtacatcaagcacctgcgggacatctgtgagggctacatccggcagtgcaggaagcacacaggcatgttcaccgtggcccagctggccaccatcttcggcaacatcgaggacatctacaagttccagaggaagttcctgaaggacctggagaagcagtacaacaaggaggagccccacctgtctgaaattggcagctgcttcctgcagaaccaggagggctttgccatctacagcgagtactgcaacaaccaccctggggcctgcctggagctggccaacctgatgaagcagggcaagtaccgccacttctttgaggcctgccgcctgctgcagcagatgattgacatcgccattgatggcttcctgctgacccctgtgcagaagatctgcaagtaccccctgcagctggccgagctgctgaagtacaccacccaggagcacggggactacagcaacatcaaggccgcctatgaggccatgaagaatgtggcctgcctgatcaatgaaaggaagaggaagctggagagcattgacaagatcgcccgctggcaggtgtccatcgtgggctgggagggcctggacatcctggacaggagcagcgagctgatccacagcggggagctgaccaagatcaccaagcagggcaagagccagcagaggaccttcttcctgtttgaccaccagctggtgtcctgcaagaaggacctgctgcggcgggacatgctgtactacaagggccgcctggacatggatgagatggagctggtggacctgggagatggccgggacaaggactgcaacctgtctgtgaagaatgccttcaagctggtgtccaggaccacagatgaggtgtacctgttctgtgccaagaagcaggaggacaaggcccgctggctgcaggcctgtgctgatgagaggagaagagtgcaggaggacaaggagatgggcatggagatcagcgagaaccagaagaagctggccatgctgaatgcccagaaggccggccacggcaagagcaagggctacaaccgctgccctgtggccccaccccaccagggcctgcaccccatccaccagaggcacatcaccatgcccacctctgtgccccagcagcaggtgtttggcctggccgagcccaagaggaagagcagcctcttctggcacaccttcaaccggctgacccccttcaggaagtag

SEQ ID NO: 245296 - DNA, 1851 bp, Artificial Sequence
  derived and/or modified sequence
atgcctgcccaccaggtgcccccctacaaggctgtgtctgcccgcttccggcccttcaccttcagccagagcacccccatcggcctggacagagtgggcagaagacggcagatgagggccagcaatgtgtccagtgatggcggcacagagcccagcgccctggtggatgacaatggcagcgaggaggacttctcctatgaggacctgtgccaggccagcccccgctacctgcagcctggaggagagcagctggccatcaatgaactcatcagtgatggaaatgtggtgtgtgccgaggccctgtgggaccacgtgaccatggatgaccaggagctgggcttcaaggctggagatgtgatccaggtgctggaggccagcaacaaggactggtggtggggccgctctgaggacaaggaggcctggttccctgccagctttgtgcggctgcgggtgaaccaggaggagctgtctgagaacagcagcagcaccccatctgaggagcaggatgaggaggccagccagagccgccaccgccactgtgagaacaagcagcagatgaggaccaacgtcatccgggagatcatggacacagagcgggtgtacatcaagcacctgcgggacatctgtgagggctacatccggcagtgcaggaagcacacaggcatgttcaccgtggcccagctggccaccatcttcggcaacatcgaggacatctacaagttccagaggaagttcctgaaggacctggagaagcagtacaacaaggaggagccccacctgtctgaaattggcagctgcttcctgcagaaccaggagggctttgccatctacagcgagtactgcaacaaccaccctggggcctgcctggagctggccaacctgatgaagcagggcaagtaccgccacttctttgaggcctgccgcctgctgcagcagatgattgacatcgccattgatggcttcctgctgacccctgtgcagaagatctgcaagtaccccctgcagctggccgagctgctgaagtacaccacccaggagcacggggactacagcaacatcaaggccgcctatgaggccatgaagaatgtggcctgcctgatcaatgaaaggaagaggaagctggagagcattgacaagatcgcccgctggcaggtgtccatcgtgggctgggagggcctggacatcctggacaggagcagcgagctgatccacagcggggagctgaccaagatcaccaagcagggcaagagccagcagaggaccttcttcctgtttgaccaccagctggtgtcctgcaagaaggacctgctgcggcgggacatgctgtactacaagggccgcctggacatggatgagatggagctggtggacctgggagatggccgggacaaggactgcaacctgtctgtgaagaatgccttcaagctggtgtccaggaccacagatgaggtgtacctgttctgtgccaagaagcaggaggacaaggcccgctggctgcaggcctgtgctgatgagaggagaagagtgcaggaggacaaggagatgggcatggagatcagcgagaaccagaagaagctggccatgctgaatgcccagaaggccggccacggcaagagcaaggtgcggctgcagcaggtgccctgtggccccacagcccctggccctgccccccaccccccagccccccaccactacgcccacaagaggcccccagctgctggcctgtggccaggcggcacccaggaggaggtgctggccctgctggcccacctgcagcaggcccaccccctgcctgagatgaagacaggaggctgtgcctccatggagctgggcgtgaagagaagaaattag

SEQ ID NO: 245297 - DNA, 1959 bp, Artificial Sequence
  derived and/or modified sequence
atgaccagcgccagccccgaggaccagaacgcccccgtgggctgccctaaaggcgctaggcgtcggcgtccaatcagtgtaattgggggcgtatctctgtatggaacgaatcagaccgaagaactggataacctcctcacccagccggctagccggcctcctatgcccgcccaccaggtccccccctacaaagctgtgtcggcccggttcagaccgtttacattttcccagtccacacccatcggcctcgacagggtgggacgcagacgccagatgagagcaagtaacgtgagctccgacggtggaactgaaccctctgctttagtggatgacaatggttcggaggaggatttctcttacgaagatttgtgccaggccagcccgcggtacctccagcccgggggtgaacaattagcaatcaacgagctgatctcggacgggaatgtggtctgcgcagaggcactttgggaccacgtgacaatggacgatcaggagctggggttcaaggctggagatgtgatccaggtcttagaagccagcaataaagactggtggtggggacgcagcgaggacaaggaggcctggttccccgccagttttgttcggctgagggtaaaccaggaggagctgtctgaaaactcctcaagcacaccatccgaagagcaggacgaggaggccagccagtctcgtcatcggcattgtgaaaacaaacagcagatgcggaccaatgtgatccgggagataatggacactgagcgtgtttacattaagcacctgcgcgacatttgtgagggatacatcaggcagtgtaggaaacatacaggcatgtttactgtcgcccagctggctactattttcggaaacatcgaggatatatacaaattccagcggaagtttctaaaggacctcgaaaagcaatataacaaagaagaaccacatttgagcgaaatcgggtcatgctttttgcagaaccaggagggcttcgcaatttattctgagtactgcaataatcacccgggggcctgcctggagctggctaatctgatgaagcagggcaaatataggcacttcttcgaggcctgccgccttctccagcagatgattgacatcgctattgatggttttttactcacaccagtacaaaaaatttgcaaatacccactgcaacttgccgagcttctgaagtacaccacacaggagcacggagactattccaacattaaggccgcctacgaggctatgaaaaatgtcgcttgtctgatcaacgagcgcaaacgcaagctggagagtattgacaaaattgccaggtggcaggtgtctatcgttgggtgggagggactcgacattctggatagatccagcgaacttatacacagcggcgaattgactaagataaccaagcaaggcaaatcgcaacagcgcactttttttctatttgaccaccaactggtctcttgcaagaaagacctccttcggcgcgacatgctttattacaaaggtcgattggacatggacgagatggagctggtcgaccttggcgacggccgggataaggattgcaacctgtcggttaaaaacgcgttcaaactggtgtctcggaccaccgatgaggtgtacttgttttgcgcgaaaaaacaggaggacaaagctcgatggctgcaagcttgtgcagacgagagaagacgtgtgcaggaagacaaagaaatgggaatggaaatttcggaaaatcaaaaaaaactggctatgctgaatgcccagaaggctggccatggcaaatcaaaaggttacaatcgatgccccgttgccccaccccaccaggggttgcatcccatccatcagagacatatcactatgccaaccagtgtaccgcagcaacaggtgtttggtctggcagagccgaaacgcaagtcttctttgttctggcatacgtttaaccggctaaccccgtttcggaagtag

SEQ ID NO: 245298 - DNA, 1851 bp, Artificial Sequence
  derived and/or modified sequence
atgcccgcccaccaggtgcccccctacaaggccgtgagcgcccggttcaggccattcacctttagccagagcacaccgatcggcctggatcgcgtcggaaggcggaggcaaatgagggcaagcaacgtgtcatcagatggaggcaccgagcccagtgccttagttgacgacaatggctcggaggaggatttcagctatgaagacctatgtcaggccagtcctaggtacttgcaacctggcggggaacagctcgcaataaacgagttaatctccgacggcaacgtggtgtgcgcagaggcgctctgggatcacgtgaccatggatgatcaggaactgggtttcaaggctggagatgttatccaggtgcttgaagctagcaacaaggactggtggtgggggaggtctgaggacaaggaagcctggttccctgctagtttcgtgaggcttcgggttaatcaggaagaacttagcgaaaactcttcctccactccgtccgaggaacaggacgaggaagctagccagtcccgtcaccgccactgcgagaataagcagcagatgcgcaccaacgtgatcagggaaatcatggataccgagcgtgtctacataaaacacctgcgagatatttgtgaaggatatataaggcagtgtcgaaagcatactggaatgttcacagttgcccagctggccactattttcggcaacatcgaagatatttataaattccaacggaaatttctgaaagacctggagaaacagtacaacaaggaagagccacacctgagcgagataggatcttgctttctacagaatcaggaagggtttgcgatttacagcgaatattgcaataaccacccgggggcctgtctcgagttagccaacttaatgaaacaggggaaataccgccacttctttgaagcatgcaggctccttcagcaaatgatagatatagccatcgatgggtttctgctcaccccagtgcagaaaatctgcaagtatcccctgcagcttgccgaactgttgaagtacacgacacaagaacacggcgattactctaacattaaagccgcctacgaagcaatgaaaaacgtggcgtgcttgatcaatgaaagaaaaagaaaactggaaagcattgacaagatcgcccggtggcaggtgtcgattgtggggtgggaaggactagacatccttgacaggagctctgagctaatccactctggagaactgacgaaaatcacgaagcaggggaagtcacagcagcggaccttttttctgtttgatcatcagctcgtctcctgcaagaaggatctcctccgtcgcgacatgctctattacaaaggtaggttagatatggacgaaatggagctggtggatcttggggatgggcgagataaagattgcaatcttagtgtgaaaaacgcctttaagctggtttctagaacgacagacgaggtctacctattctgcgctaaaaaacaggaggataaggcccgctggcttcaggcatgcgcagatgagcgccgacgagtgcaggaagataaggagatgggtatggagattagcgagaatcagaaaaagctggcaatgctgaatgcgcagaaggctggacacggcaaaagtaaagtacgactgcagcaggttccctgcggcccaacagctcccgggcctgccccccaccccccagcccctcatcattacgcgcacaaacggccccctgccgctggtctgtggcctggaggaacccaggaagaggtcttggcactgctggcccacctgcaacaggcccatccactgccagaaatgaaaactggaggttgcgccagtatggaactgggcgtcaaaaggaggaactag

SEQ ID NO: 245299 - DNA, 1959 bp, Artificial Sequence
  derived and/or modified sequence
atgacttcagcatcacccgaagaccagaatgcacccgtaggttgtcccaaaggggctcgcagaaggagacctatctctgtgatcgggggtgtgtcactgtacggcacaaaccagactgaggaactcgataacctgctcacccaacctgcgagccgtccacccatgccagcccaccaggtaccaccctacaaggcggtgtcagccaggttcagaccctttaccttttcgcagtcgacccccatcggactagaccgagtggggagaaggaggcagatgcgggcttccaacgttagctctgatggagggacagagcctagtgccctcgtcgatgacaacggcagcgaggaggacttctcctatgaggacttgtgtcaagcttcccctagatacttgcagcctggcggagagcagctggccatcaacgagctgatctccgacggcaacgtcgtatgcgcagaggccttgtgggaccatgtgacaatggacgatcaagagctgggatttaaagcaggggacgttatacaggtcctggaggcttccaacaaagactggtggtgggggagatctgaggataaagaagcttggtttcccgcttccttcgtgcggctcagagtgaaccaggaggagctaagcgagaattcatcaagcaccccgtctgaggaacaggacgaggaggccagccagtctcggcaccgacactgcgaaaataagcagcaaatgagaactaatgtcatcagagagatcatggatacggagcgagtctatataaagcacttaagagacatttgtgaaggctacatccggcagtgtcgcaagcatactggcatgttcactgttgcccagctggctacaatcttcgggaacattgaggatatttacaagttccaaagaaagttcctgaaagacctggaaaagcagtacaacaaagaggagccacacctttccgagataggaagttgctttttacagaatcaagagggattcgcgatttatagtgaatactgtaacaaccacccaggagcctgtctcgagctggctaacctcatgaaacaaggcaaatatagacactttttcgaggcgtgtcgtctactgcagcaaatgattgacatcgctattgacggttttctgttaacgcccgttcagaagatctgtaagtatccattacaactcgctgagcttttgaagtatactacacaggagcacggagattattcaaacattaaggcagcctacgaggccatgaagaatgttgcatgtctgatcaacgagagaaaacgaaagctggagtcgattgacaaaatagctaggtggcaagttagcatcgtgggctgggagggcctggatatcctggatcgcagtagcgagcttattcacagcggcgaactgactaaaatcacgaaacaaggcaagtcccagcagcgaacctttttcctgttcgaccatcagctggtatcctgtaaaaaggaccttctgcgcagggacatgttatattataagggccgactggatatggacgagatggaacttgtggatctgggcgacggcagggacaaagattgcaatttgagtgtgaagaatgccttcaagttagtgtcaagaactacagacgaggtgtatcttttttgtgcaaagaaacaggaagacaaggctaggtggcttcaggcttgtgccgatgaacggaggcgcgtacaggaggataaggagatggggatggagatctccgaaaaccaaaaaaaactggctatgctcaatgcccagaaagctggacacggtaagagtaaaggctacaaccggtgcccagtggctcctccccatcagggactgcaccctatccaccagcgacatatcactatgccaaccagtgttccccagcaacaggtgtttgggctcgctgagcccaagcggaaaagcagcctgttttggcatacctttaatcgtcttaccccctttcgcaaatag

SEQ ID NO: 245300 - DNA, 1851 bp, Artificial Sequence
  derived and/or modified sequence
atgccagcccatcaggtacctccttataaagcggtctcagccagattcagaccatttaccttttcccaatctacaccaattggcctcgatcgcgtaggaagacgccgtcaaatgcgcgcttccaacgtctcttccgacgggggtacagagcctagcgctctcgtcgacgataatggctctgaggaagacttctcttacgaggacctatgtcaggccagtccacgttatcttcagccaggcggtgagcagttggctatcaatgagcttatttcagatggtaacgttgtgtgcgcagaagctctctgggaccatgtcaccatggatgatcaggaactgggattcaaggcaggagacgtgatccaagttctcgaagctagtaacaaagattggtggtggggtcggagcgaggacaaagaggcatggtttccggcttctttcgtgagactgcgagtgaatcaggaggagttatctgagaactcatcatctaccccctccgaagagcaggatgaggaagcctcccaatccagacacaggcactgtgagaataaacaacagatgcgaaccaacgttataagggagatcatggacaccgagcgtgtgtacattaagcatctgcgggacatttgtgaaggatacatccggcagtgtcggaagcacactgggatgttcactgtggcgcaacttgctactatctttggcaacatcgaagatatctataaattccagcgaaaattcctgaaggatctcgaaaagcaatacaataaggaagaaccgcatctgtccgagataggctcctgcttcctccagaaccaggagggcttcgccatttattcggagtattgcaacaaccatccaggggcttgcctcgaactggccaacctgatgaagcaggggaaatacaggcatttcttcgaagcttgtaggcttcttcagcagatgatagatatcgctattgacggtttccttctcactcccgttcagaaaatctgtaagtatccattgcagcttgctgagctgcttaaatacacaactcaggagcatggagattattccaatatcaaagccgcttacgaagcaatgaagaacgtggcctgcctgatcaacgagagaaaaaggaaactggagtccattgataagatcgcgaggtggcaagtctctatagtgggctgggaggggctcgacattctagaccgctcaagcgagctcatccacagcggagagcttacaaagatcacaaaacagggtaaatcacagcaacgcactttcttcctcttcgaccatcaattggtgtcttgcaagaaggatctgcttaggcgggacatgctgtactataaaggtagactcgacatggatgaaatggagctggtagatctaggagatggaagagacaaggactgcaacctctcagtcaagaacgcttttaaacttgtttctagaacaacagacgaggtatacttgttctgtgccaaaaaacaggaagataaagcaaggtggttgcaggcctgcgccgacgaaagacgaagagtccaggaggataaggagatgggcatggaaatttcggagaaccagaagaaattggccatgcttaacgcacaaaaagccggtcatggaaagtcgaaggttaggctgcagcaggttccctgtggccctactgctcctggacctgcccctcatcctcccgctccgcaccactatgcccacaagcgtccaccagcagccggactctggcccggagggacacaggaagaggtgctcgcgttgcttgcacacctgcagcaggcacatcccctaccagaaatgaagaccggagggtgtgcctccatggagttgggggtgaagcgtcggaattag

SEQ ID NO: 245301 - DNA, 2111 bp, Artificial Sequence
  derived and/or modified sequence
acagattttgctttctttttgcagccggcttccaggccgcccatgcctgctcaccaggtgccaccctacaaggctgtgtcggcccggttccggcccttcacattctcccagagcacccccattgggttggaccgtgtgggacgccggcggcagatgagagcatccaacgtttcttcagatggaggtactgagccctctgccttagtggatgacaacggtagtgaggaggacttcagctatgaagacctctgccaggccagccctcggtacctgcagcccggcggggagcagctggccatcaatgagctgatcagtgatggcaacgtggtctgcgcagaagccctgtgggaccatgtgaccatggatgaccaggaactgggcttcaaagccggggatgtcatccaggttctggaagcctccaacaaggactggtggtggggccgcagtgaagataaggaagcctggttccccgcgagcttcgtcagattgcgagtgaatcaggaagagctgtcggaaaactccagcagcacccccagtgaggagcaggacgaggaggccagccagagccgccacagacactgtgagaacaagcagcagatgcggaccaacgtcatccgggagatcatggacaccgagcgggtgtacatcaaacacctcagggacatctgtgagggctatatccgacagtgccgcaagcacacaggaatgttcaccgttgcgcagctagccactatttttggaaacattgaagatatttacaaattccaaagaaagtttctgaaagaccttgagaaacagtacaacaaagaggaacctcacttaagtgaaataggatcttgctttcttcaaaatcaagagggctttgccatctattccgagtactgcaacaaccacccgggcgcctgcctggagctcgccaacctcatgaagcagggcaagtacagacatttctttgaagcctgccgcctgctgcagcagatgattgacatcgccatcgacgggttcctgctcacaccagtgcagaagatctgcaaatacccgctgcagctggccgagctgctcaagtataccacacaggaacacggtgattacagcaacataaaggcagcatatgaggccatgaagaatgtggcctgtctgatcaacgagcgcaagcgcaagctggagagcatcgacaagatagctcgctggcaggtgtctatcgtgggctgggagggactggatatcttagaccgaagctcagaattgattcattctggggagctgaccaaaatcactaagcaaggcaaaagccagcagcggacgttcttcctgtttgaccaccagctggtgtcctgcaagaaggacctgctgcgcagggacatgctgtactacaagggccggctggacatggatgagatggagcttgtggacctgggggatgggcgcgacaaggactgcaacctcagcgtgaaaaatgccttcaagctcgtcagtaggaccacagacgaggtttatttgttttgtgccaaaaaacaagaagacaaggcgaggtggctgcaggcctgtgcagatgaaaggaggcgggtgcaagaggacaaggagatgggaatggaaatttcagaaaaccagaagaaacttgccatgttaaatgctcaaaaggcaggacatggaaagtcaaaagtcaggctacaacaggtgccctgtggccccaccgcaccagggcctgcaccccatccaccagcgccacatcactatgcccacaagcgtcccccagcagcaggtctttggcctggcggaacccaagaggaagtcctcgctcttctggcacaccttcaacaggctcacccccttccggaaatgaaaacaggaggctgtgcttccatggagctgggtgtcaagagaagaaattgagctcttactctcttctgtaatactgggggacctacagctgccgtggggctgaccacggtgttccctggcatcgtctgtgtccacacagatgctaactggtagtgcaaatgtcatcctgcaaggttcctcttcctgcaagcaaagtggagagaaagaagatgcatctgtcaccttcatcagggtcctcagtgcagagcaacttacgcatcctcaagaat

SEQ ID NO: 245302 - protein, 896 aa, Artificial Sequence
  derived and/or modified sequence
MAARAVLDEFTAPAEKAELLEQSRGRIEGLFGVSLAVLGALGAEEPLPARIWLQLCGAQEAVHSAKEYIKGICEPELEERECYPKDMHCIFVGAESLFLKSLIQDTCADLCILDIGLLGIRGSAEAVVMARSHIQQFVKLFENKENLPSSQKESEVKREFKQFVEAHADNYTMDLLILPTSLKKELLTLTQGEENLFETGDDEVIEMRDSQQTEFTQNAATGLNISRDETVLQEEARNKAGTPVSELTKQMDTVLSSSPDVLFDPINGLTPDEEALSNERICQKRRFSDSEERHTKKQFSLENVQEGEILHDAKTLAGNVIADLSDSSADSENLSPDIKETTEEMEYNILVNFFKTMGYSQEIVEKVIKVYGPSTEPLLLLEEIEKENKRFQEDREFSAGTVYPETNKTKNKGVYSSTNELTTDSTPKKTQAHTQQNMVEKFSQLPFKVEAKPCTSNCRINTFRTVPIEQKHEVWGSNQNYICNTDPETDGLSPSVASPSPKEVNFVSRGASSHQPRVPLFPENGLHQQPEPLLPNNMKSACEKRLGCCSSPHSKPNCSTLSPPMPLPQLLPSVTDARSAGPSDHIDSSVTGVQRFRDTLKIPYKLELKNEPGRTDLKHIVIDGSNVAITHGLKKFFSCRGIAIAVEYFWKLGNRNITVFVPQWRTRRDPNVTEQHFLTQLQELGILSLTPARMVFGERIASHDDRFLLHLADKTGGIIVTNDNFREFVNESVSWREIITKRLLQYTFVGDIFMVPDDPLGRSGPRLEEFLQKEVCLRDMQPLLSALPNVGMFDPSFRVPGTQAASTSHQPPTRIQGAPSSHWLPQQPHFPLLPALPSLQQNLPMPAQRSSAETNELREALLKIFPDSEQRLKIDQILVAHPYMKDLNALSAMVLD

SEQ ID NO: 245303 - DNA, 2691 bp, Artificial Sequence
  derived and/or modified sequence
atggcagccagggccgtcctggacgaattcacagccccagcagagaaggccgaactgctggagcaaagcaggggcaggattgaggggctgtttggcgtttcccttgccgtgcttggagccctgggggcagaggaacctttgcctgctcgcatctggctgcagctgtgcggcgcgcaggaagccgtgcatagcgcaaaagagtacattaagggcatttgcgaaccggagttggaggaaagagaatgctaccccaaagacatgcactgcattttcgtaggtgctgagagcctgtttttgaagtccctgatccaggacacatgtgccgatctgtgcatattagacataggcctgcttggaatccgtggcagcgccgaggccgtggttatggcacgaagccacatccagcaattcgtcaagctattcgagaacaaggaaaacctacccagctcccaaaaagagtctgaggtaaaaagagagttcaaacagttcgtggaggcccatgccgataattatactatggacctcttgatccttcctacatcgctcaagaaggagctactcacactgacccagggtgaggaaaacctatttgagaccggggatgacgaggtcatcgaaatgagagatagtcagcagaccgaatttacccagaatgctgccaccgggctaaacatttccagggacgagaccgtattacaagaggaggctagaaacaaagccggcacaccggtatcagagttgactaaacaaatggacacagtgctcagctcctcgcccgacgtcttatttgacccgattaacgggctcactcctgacgaagaggccctctccaatgaacgcatatgccagaaaagaagattcagcgactccgaggaacgacataccaaaaagcagttctctttggagaacgtgcaggagggcgaaatcttacatgacgccaaaacccttgcagggaacgtgatagctgacctttccgacagctctgctgatagcgaaaacctttcgccggacattaaggagactaccgaagaaatggaatacaatatactggtgaattttttcaagaccatgggatactctcaagaaatagtcgagaaggtcattaaagtttacgggcccagcaccgagcccctgttgctgcttgaggagatcgagaaggagaataagcggtttcaggaggacagggaattcagcgctggtacagtttaccccgagacaaacaagacaaagaataagggagtctattcaagcactaatgaactgacaactgattctactccaaaaaagacacaggcgcatacacagcagaacatggtcgagaaatttagtcagctgcctttcaaagttgaggccaaaccttgcactagcaactgtcggattaatacatttcgaacggtgccaattgagcagaagcacgaggtctggggcagcaaccagaactacatatgtaatacggaccctgagaccgacggcctgtcaccttcggttgccagccctagccctaaagaagtgaactttgtatccagaggcgcatcgtctcaccagccacgggtaccactatttcctgagaacggactgcatcaacagcccgagccacttctgccgaataacatgaagtctgcctgtgagaagcgcttgggctgctgttcaagtcctcactccaagcccaactgcagcacgttgagtcccccgatgcccctgccacagctgctaccatctgttactgatgcaagaagcgccggcccttctgaccatattgactcttctgtgaccggcgttcaaaggtttcgagacacacttaagatcccatataagctggaattgaagaacgagcccggcaggactgatctaaaacacatagtgattgatggaagcaatgtggccatcacccacggcctcaagaaattcttttcctgccggggaatcgcaatcgcagtggagtacttctggaaattggggaatagaaacataaccgtattcgtcccccagtggaggacgaggcgggacccaaatgtcaccgaacagcacttccttacacagctgcaggagctcggaatactctccctcacaccggctcgaatggtttttggggaacgcatagcaagccatgacgataggttccttcttcatttagcagacaagacaggtgggattatcgtcacaaacgataatttccgagaatttgtgaatgagagtgtgtcgtggcgggagattatcactaagagactgctgcaatatacctttgtgggggatattttcatggtccccgatgatccgctggggagatccgggcccagattggaggaattcctccagaaggaagtgtgcttaagagacatgcagccactgctcagcgccctgccaaacgtcggcatgtttgatccatcattccgcgtacctgggacgcaggctgcatcaactagccaccaacctccaactaggatacaaggtgcccccagctcccattggctgccacagcaacctcacttcccactcctaccagcactgccctcactgcaacaaaacttgcctatgcccgcacagcgaagctctgcagaaaccaacgagctcagggaggcgctgttgaaaatatttcctgacagtgaacagcgactgaagatcgatcaaattctggtggcacacccatatatgaaggatctcaacgccttaagtgcaatggtcttagattag

SEQ ID NO: 245304 - DNA, 7104 bp, Artificial Sequence
  derived and/or modified sequence
ggcccggcccgcggcggcggcaaaggggcggaggggttcgctgccagcaattgccaagctgctgcggtcgtggcgggatggtatagccgggcctgagggcgggcggcggggcgcgggcgggggcgaggcggccgggaagggccgacgccgcctgactggcttgggagcagcggcagcaagctgagggggcgtcgccgccgccggcccccggcgccgccgcgggaggccgcgcccgccatggcggcccgggcggtgctggacgagttcactgcgccagctgagaaggcggagctgctggagcagagccgcggccgtatcgagggcctgtttggcgtgagcctagccgtgctcggcgcgctaggggctgaggagccgctgcccgcgcgcatctggctgcagctctgcggggcgcaggaggcggtgcacagcgccaaggaatatattaaaggaatctgtgaacctgaactagaagaaagagaatgttaccccaaggacatgcactgcatttttgttggggcagagagcctgtttctgaaaagcttgattcaggatacttgtgctgacctctgcattctggacattggccttcttggcatcagaggaagtgctgaggctgtggtcatggctaggagtcacattcaacaatttgtaaagctctttgaaaataaagagaacctacccagtagtcagaaagaatcagaggtgaaaagggaattcaaacaatttgttgaagcccatgcagacaattacacaatggatttgttgattttgcccacttccttgaaaaaagaacttttgacactcacacaaggtgaggagaatctctttgaaacaggagatgatgaggttattgaaatgagagattctcaacaaacagagtttacacagaatgctgccacagggctgaatatttctagagatgaaactgttttgcaggaagaggcaagaaataaagctgggactcctgtttctgagcttacaaaacaaatggacacagtcctttctagctcaccagatgtgctttttgatccaataaatggtctaaccccagatgaagaggcactttccaatgagagaatttgtcagaaaaggagattttctgattctgaagaaaggcatacgaagaagcagttttctttggaaaatgttcaggagggggagattttacacgatgctaagacattggctggaaatgtaatagctgacctatctgattcttctgctgattctgaaaatttaagtccagatataaaagaaactactgaggaaatggaatacaacatcctcgtaaacttttttaaaaccatgggctactcccaagaaattgttgaaaaggtcattaaggtgtatggaccatctactgaaccattattgctcttagaggaaattgaaaaagaaaataaaagattccaagaagacagagaattttcagctggtacagtgtatccagagaccaacaaaaccaaaaataaaggtgtttatagcagcacaaatgagcttacaactgattccactccaaagaaaacacaggctcacacacagcaaaatatggtagaaaaattttctcagttaccattcaaagtggaagctaaaccatgtacctcaaattgtagaattaatactttcagaacagtgccaatagaacagaaacatgaagtctggggttcaaaccagaactacatttgtaacacagaccctgaaactgatggcctttcaccttctgttgcctctccaagtcccaaagaagtcaattttgtttcaaggggagcttcaagtcaccagcccagagttccactttttcctgaaaatggtttacaccagcagccagaacccttgcttccaaataatatgaaatctgcctgtgaaaaacgtttaggatgttgtagttctcctcattctaagccaaattgctcaaccctttctccaccaatgccactgccccagctgttaccttcggttactgatgcaaggtcggcaggaccttctgatcatattgattcctcagttactggggttcaaaggtttcgagatactctaaaaataccctacaagctggaattaaaaaatgaaccagggagaacggatttgaaacacattgttatagatgggagcaatgttgcaattacccatggtctgaaaaagttcttttcttgtcgtggaattgcaattgcagttgaatatttttggaagcttggcaacagaaacatcactgtatttgtccctcagtggagaacaaggcgtgatcctaatgtcacagaacagcacttcttaacccagctccaggagctcggaatattatctttaactcctgcccggatggtctttggagaaagaattgcttctcatgatgacaggtttctactacacttagcggacaaaactggtggcataattgtgacaaatgataatttcagagaatttgtgaatgagtcagtctcttggagagaaattattacaaaaaggctgctgcagtacacgttcgtgggggacatatttatggttcccgatgatcctctgggaagaagtggacctcgattagaggagtttcttcagaaggaagtctgtcttagagatatgcagcccctactcagtgccctgccaaatgtgggcatgtttgaccccagcttcagagtccctggcacccaggcagccagcaccagccaccagcctccgacccggattcagggagccccttcaagccactggctccctcagcagccccacttcccactgctgccagccctccccagtctccagcagaacctgcccatgccagctcagagatcttctgcagaaaccaacgagctgagggaagcccttctgaagatcttccctgactcagagcaaagactgaaaatagaccagatcttggtggcccacccatacatgaaagatctaaatgcgctttctgccatggtgttggattgaagattgtgctgagcgctgagcttgcgctcagggctggctgatcaaactcaagctcacacctgtacctgatgggaatgaacataatgtgaagaaacttatttcccagtgtaaacgcagttgtacagaaaaaaaatgttttgggtataaatctgggttttcaaaaccagcttttttctatatataaattatgctgctattacagatttaacattttctgttaaaggaaagtctacattttctgcctgttcagaactgtttaatagcagttactcttgagtgtatttacctttttatgttttttaaactattttccttaaagccgaaaatattgacaaatggatatggttagcctttataaataaataaaaaaaaaagtgttgctttcttaaggaaagcaagacgtcttaaagtatattttcttgagatgagtatgtcccatcactaccatgaagtgtgctcacccttccagcctcctctgccctcacccccggagttaaagtgggtaagagttggtttgttctgcagtctttggttggagtgttgtgaaagtggacccgcggtgccactagatggcacttggtgcctagccatggtgaatgaccagggcgaagttagtctcacagaataccagggctagaagacatcgtggagcccatggagtcccaccctccttcccccttccaccctgcgcaaaaggggacggcccagtgtgcacgccgtccggccatgcccacagccacagccacagctgaggagtggccgggcaggcagcaggctccccagccagggcttgacacgcccacagtcaggggcctccacatgcctggcctggctctggaagtcacgtcttagcttctgaacaccgtagcgggttatgaggaagtttaatgaagagcccggtcactgtggccatcttgtgtccccaactgcaggagacgccctgatgtggagtttgtacagctttgccaaaaaatggttttctattctcaaaagtgacccaagccaataaatagcattagtagcttctgtggggggatcccagagcccctgtatttattttccctgtgtttgtctctagtgtcctcctaaacagcctttcctgtgagtctttctcagaattgatatcttaatattgtctgttctaggtgttgcccaaattcagtgtcagtgaagttcttttcctgggcaatcttaacatctttactcttattgtctggaccttcaaagggctttgtattttacacctgcgcccccaggctgctcacagtcggcttgctgcctgtcctgcctgtccggatcttgtctcctagtcctgaggagcggaggctgagaactcagtgctggtttgtaaatggtgaggggacttgggggcatcccagagtgctccctccaggcctgcttcttggttttgtttgatcactgcgttcttcaagggatgaatccagagccctccatgaggccaagcttgtccttcaatcatgtttcctctcagatgcgtccgtgatgcctcctaatgtggaactggttgtccattgtttgggcctatggccaagtcacccagctgtggaagcagaggtagaagacgaggccagccaggagggcgacttcagtcacagctcccatgcctcagctttgtacctgttttcaaaagcacaactgaggtgtgcgggctggagctgtcttgcagtgattctggccttctggctcatggttcagtccagcagcctggctgacccactatttctcctctgcttcagaggaaacccaggaaatgcccttactgccaggctgagtctccacccatgctggttggtgctggctaggctgagggggccaccacttttcctggctagaagctacttgacctttgatgtttgagttctgtaagtcttcgtgttctgacttactgcttcagagggattggcctgtcccctttccctttctcggctatgggaaggaaggattgctcattggttgccttcatcagttacagcatgagacggaattcatcattccttccgaaacccctgatatttaatatttaatatttaaaaacccaaattatcaaaccattaagaactcattactggttctcagcctcctccagtactagcctcagtgtggctgctgcataagtatctgtagcctgtctacctcctgcagtggggccgctcgcctcttccctgtctactgctcaggctctcccacttcgtggcatccatgtaaagtaggtggcagggcagagatgtcactctcattcaacagggaggatgtctgttgctcagagaggttgtcctgaggggctgggtgattcctgggcctacattcttcccgaggctccaggccgctgtctctggaagtaaaagagccttgtctgaccttaatgcaagcagtctgtttgaacccctgtaggctgcattcaggagacagaaggtgtctgggccatcctgggcggccggtcagcgttgctaggcaggctcggctgtctggccgggacttgggcctgggtggcttttgagaccagtgaagaagggagagccggcctcatgccgatgcggcttgtggcacggctgggatgtgagggaggactcagatctacacacagaaacccctcttctccccgccctcccccagctcctacctgcctcccacgcctcaggtgtggctgcctgtgggaccatcccccaacccctttcctcgcacctccttgtcctcacccagttcctgcagtgtctctgacccacgcctcccgcctcctggccgacttgcccaggaggtgtctctggctcacctccgtctgttcatcaccttcctccccagtgtttccacttatcttggatgttttagattgaaacagcctgattcccggaagaatcctcttcattcattgctagtgcttcccctcacctcccactctccacttcccagtttgcaaatgtggctttcgcccaccaagtgaaagcggactgagagcagcccttggggacggcccggtgcctggctgcaaggccgcgctggggctctgtcttggtgcacatggcttgaccggactttccctgcttcccaccacttccctcactcccagacctccctcattctttttgtctcttctttttgcctaaagccagtccttaacaccctattcttcctctgcaggtggcttgcagacttttccccacctttggggctcgtggtggtggagagggcagctggtgttaagaatgtaggttaccgggcatgacccggcagatgcttgcccagtagttctggaggaaggcccgggaatctgcaaatgagcgcattccccaggcagttcccatgcaggtgatccacggaccacatgttgagaaactgcagtcacccttagggccacaccgtccctctcctcgctgtcccctctctgtagtgactggccctgaccttcaggagtgcactttccactctaccaggaagccctatgacatcctcaggctccccagacctgcagcttgcatggggcccctcccttcttccacacccaccctccgtatggtcccctgctctgccctcgtgctttgctggcccctgcccgctactcccactctcagacacccaggggtggtgggccctaactggctggcccctcccagcgctgccctctgccgtccagatgctgcagtgtggccagatttaccttccagtaacatacttctagtcacccctcctcctgcgaagtgatctgcagtggctgtttgaccagaccacaaagttcacatctcctgagcttagtgtccgtggctgtccacctcccagccatacttgactgtccccaaactctccctgcagccacatgtttcccatgacctgtgggctctgcagatggacctctctccgctagagatgcccttctcccaaatggcttccctcctggaaggcccagcctgagtcctcgtctcctttccagtgcttctgccagaagcatccccatgatgttgtgaccgcacagcactttgtgtctcgctttgagcacttgccactctggctggtgctgctgccactgattgtgtactgtcttgctgccctttctagactgtgagctcctcgtgggcagggaccgcctgtgttctctgtatttcccacggcgcctagcacagtgccttgcacttgataggtgcttaataaatgtctgctcaactg

SEQ ID NO: 245305 - DNA, 2691 bp, Artificial Sequence
  derived and/or modified sequence
atggccgcccgggctgtgctggatgagttcaccgccccagctgagaaggccgagctgctggagcagagccggggcagaattgagggcctgtttggagtgtccctggccgtgctgggcgccctgggcgctgaggagcccctgcctgcccgcatctggctgcagctgtgtggggcccaggaggccgtgcacagcgccaaggagtacatcaagggcatctgtgagcctgagctggaggagcgggagtgctaccccaaggacatgcactgcatctttgtgggcgctgagagcctcttcctgaagagcctcatccaggacacctgtgccgacctgtgcatcctggacatcggcctgctgggcatccggggcagcgctgaggccgtggtgatggcccggagccacatccagcagtttgtgaagctgtttgagaacaaggagaacctgcccagcagccagaaggagagcgaggtgaagcgggagttcaagcagtttgtggaggcccacgccgacaactacaccatggacctgctgatcctgcccaccagcctgaagaaggagctgctgaccctgacccagggcgaggagaacctgtttgaaacaggagatgatgaggtgattgagatgagggacagccagcagacagagttcacccagaatgctgccaccggcctgaacatcagcagagatgagaccgtgctgcaggaggaggccaggaacaaggccggcacccctgtgtctgagctgaccaagcagatggacacagtgctgagcagcagcccagatgtgctgtttgaccccatcaatggcctgaccccagatgaggaggccctgagcaatgaaagaatctgccagaagaggcgcttcagtgacagcgaggagcggcacaccaagaagcagttcagcctggagaatgtgcaggagggggagatcctgcatgatgccaagaccctggccggaaatgtgattgctgacctgagtgacagcagcgctgacagcgagaacctgagcccagacatcaaggagaccacagaggagatggagtacaacatcctggtgaacttcttcaagaccatgggctacagccaggagatcgtggagaaggtgatcaaggtgtatggccccagcacagagcccctgctgctgctggaggagattgagaaggagaacaagcgcttccaggaggaccgggagttctctgctggcaccgtgtacccagagaccaacaagaccaagaacaagggcgtgtacagcagcaccaatgagctgaccacagacagcacccccaagaagacccaggcccacacccagcagaacatggtggagaagttcagccagctgcccttcaaggtggaggccaagccctgcaccagcaactgccgcatcaacaccttcagaacagtgcccatcgagcagaagcatgaggtgtggggcagcaaccagaactacatctgcaacacagatcctgagacagatggcctgagccccagcgtggccagccccagccccaaggaggtgaactttgtgtccagaggagccagcagccaccagccccgggtgcccctcttcccagaaaatggcctgcaccagcagcctgagcccctgctgcccaacaacatgaagagcgcctgtgagaagaggctgggctgctgcagcagcccccacagcaagcccaactgcagcaccctgagcccccccatgcccctgccccagctgctgcccagcgtgacagatgcccggtctgctggccccagcgaccacatcgacagctctgtgactggagtgcagcgcttccgggacaccctgaagatcccctacaagctggagctgaagaatgagcccggccgcacagacctgaagcacatcgtgattgatggcagcaatgtggccatcacccacggcctgaagaagttcttcagctgccggggcatcgccatcgctgtggagtacttctggaagctgggcaacagaaacatcaccgtgtttgtgccccagtggaggacccggcgggaccccaacgtgacagagcagcacttcctgacccagctgcaggagctgggcatcctgagcctgaccccagccaggatggtgtttggagagcgcatcgccagccatgatgaccgcttcctgctgcacctggccgacaagacaggaggcatcatcgtgaccaatgacaacttccgggagtttgtgaatgaatctgtgtcctggagggagatcatcaccaagaggctgctgcagtacacctttgtgggggacatcttcatggtgcctgatgaccccctgggccgcagcggcccccggctggaggagttcctgcagaaggaggtgtgcctgcgggacatgcagcccctgctgagcgccctgcccaacgtgggcatgtttgaccccagcttccgggtgcccggcacccaggccgccagcaccagccaccagccccccacccgcatccagggcgcccccagcagccactggctgccccagcagccccacttccccctgctgcctgccctgcccagcctgcagcagaacctgcccatgcctgcccagaggagcagcgctgagaccaatgagctgcgggaggccctgctgaagatcttcccagacagcgagcagaggctgaagattgaccagatcctggtggcccacccctacatgaaggacctgaatgccctgagcgccatggtgctggactag

SEQ ID NO: 245306 - DNA, 2691 bp, Artificial Sequence
  derived and/or modified sequence
atggccgcccgggccgtgctggacgagttcaccgcccccgccgagaaggcggagttgctagaacagagtcgcggacgaatcgagggactttttggagtttctctggcagtcctaggggccctgggcgccgaggaacctctccctgctcggatctggttgcaactttgtggagcacaggaagctgtacactcagcaaaggagtatattaaagggatttgtgagccagaactggaagagcgcgagtgctaccctaaggacatgcattgcattttcgtcggggccgagtcactctttctcaaatcactgattcaagacacatgtgccgacctttgcattcttgatatcggcctgcttggaatcagaggctctgccgaggcggtggtcatggcccgctcacacatacagcagtttgttaagctgtttgaaaataaggagaacctgcccagctctcaaaaagagtccgaggtgaagcgggagtttaagcagttcgtggaagcacacgctgacaactataccatggatttgcttattcttcccacatctctgaaaaaggagcttctaaccctgacacagggcgaagagaacttatttgaaacgggcgatgacgaagtgattgagatgcgagacagccagcagactgaatttactcagaacgcggcgactggcctgaatatttcccgagatgaaacagtactgcaggaggaagctcggaataaggccggcactccagtatcagagctgacaaaacagatggataccgttctgtcttcctcccccgacgtgctgtttgaccctatcaatgggctgactcccgatgaggaagctctgagcaatgaaagaatctgccagaagcgccgcttttctgactcggaggaacggcacacaaaaaaacagttctcgctggaaaacgtgcaggagggcgaaatactgcacgatgctaaaaccctggctgggaacgtgatcgctgacctgagcgattcgagtgcggattctgagaaccttagccccgacattaaggaaaccactgaggagatggagtataatatacttgtcaattttttcaagactatgggttattctcaagagatagttgagaaggtaataaaagtctatggcccgagcacggagccattgctcctgttagaagagatcgaaaaggagaacaaacgtttccaggaagatagagaattctcagccggaactgtgtatcccgaaactaataagactaaaaacaaaggcgtctatagcagtacaaacgagctgactacggactcaaccccgaaaaagacccaagctcatactcaacagaatatggttgaaaaattttctcaactacctttcaaggttgaagccaagccatgtaccagtaactgcagaatcaatactttcaggaccgtgcccattgaacaaaaacatgaggtgtggggaagcaatcagaactatatctgcaacactgaccccgagacagacggactcagcccctctgtggcatcaccatcccccaaggaggtaaactttgtgagtaggggtgcgagcagccaccaacccagggtgcccttgttccccgaaaatggcctccatcagcaaccggagcctctgttgccaaataatatgaagagtgcctgtgaaaagagactggggtgttgcagtagccctcactctaaacctaattgctccactctgagtcctcccatgcctctgccacagctgctgccttcagtgactgacgcccgctccgcggggccgtcggatcacatagactcaagtgtgactggggttcaacgttttcgtgataccctgaagattccgtataagctggagctgaagaacgagcccggccgcactgatcttaagcacatcgtgattgatgggagcaatgtagccataacgcatgggctgaagaagttcttctcatgccgcggcatcgctattgcggttgagtatttctggaaactgggcaacagaaacattactgtattcgtgccccaatggcgcacccgtagagatcctaacgtcaccgagcaacacttccttacacagctgcaagagctaggcatcctctctctaacacccgcgcggatggtattcggggagcgcatcgccagtcatgacgaccgatttctcctccatctggccgataagaccggaggcatcatcgtcactaatgataacttccgagagttcgtcaacgaaagtgtttcctggcgggagatcataaccaaacggctgctgcagtacaccttcgtcggcgacatctttatggtgccagacgatcctctaggcagaagtggccctcgacttgaagaattcctacaaaaggaagtgtgtctgcgagacatgcagcccctgctgtccgccttgccaaatgtgggaatgtttgacccatctttcagggtacctggaacacaggcagcgtcaacctctcaccaaccccctacccggattcagggggccccctccagtcattggctgccacagcagccccatttcccgttactccccgcacttccaagcctccaacagaatctgccgatgcccgcccagagaagctcagctgaaaccaacgaactgagggaggcactgcttaagatttttcctgattcagagcagaggctgaaaatcgatcagattctggtcgcccacccatatatgaaggatttgaatgccctgtccgcaatggtcctcgattag

SEQ ID NO: 245307 - DNA, 2691 bp, Artificial Sequence
  derived and/or modified sequence
atggccgctagggccgtcctggatgaattcacagctcccgctgagaaggcagaactgctggaacagtcaaggggtaggatagagggtctgttcggggtatctctggccgtccttggggcactgggggcagaggagccccttcctgcacgtatatggctgcaattatgtggggctcaggaagctgttcattcagccaaggaatacataaaaggaatatgcgagccggaactggaggagcgtgagtgctatccgaaagacatgcactgtatcttcgttggagcagagagcctcttcctaaaatcactcatacaggatacttgcgcggacctgtgcatactcgatataggcctgctgggaattcgcggaagtgctgaggccgtcgtaatggccaggagccacatccagcagttcgtgaaactctttgagaataaggagaacctgccctctagccagaaagaaagcgaagtcaagcgcgagttcaaacagtttgtggaggcacacgcagacaattacacaatggatttattgatactgccaactagtctgaagaaggagctgctcacattgacacagggagaggaaaatctgtttgaaacaggggacgacgaagttattgagatgcgggactcacagcagaccgagttcacccagaacgcagctacaggcctgaatataagcagagatgagaccgtgctgcaggaggaggcccgtaacaaagccggtacacctgtcagcgaattgacaaagcagatggataccgttctctctagctctccagatgtcctcttcgacccaataaacggcttgacaccggatgaagaagcgctgtccaatgagcggatttgccagaagcggaggttttccgattctgaagaacggcatacaaagaaacaattttcactggaaaacgtgcaggagggcgaaattctccatgacgccaaaacactagccggaaatgttattgcagatctgagtgacagctcagctgatagcgaaaacctatcacccgacattaaggagacgaccgaagagatggagtataatatacttgtaaacttttttaagactatgggttactcacaagagattgtggaaaaagtgattaaggtatacggaccctccaccgagcccctcctgttactggaggaaattgaaaaagaaaataagcggtttcaggaagatagagaatttagcgccggtactgtgtaccctgaaacaaataagacgaaaaacaagggtgtgtattccagcaccaatgaactcactacagactctactccgaaaaagacacaagcacacacccagcaaaacatggtggagaagtttagccagctcccatttaaggttgaggccaaaccttgtacctcaaactgcagaatcaacacattcagaactgtgccaatcgaacagaaacatgaggtctggggttccaaccagaattacatctgtaacacggacccggaaaccgatggtctatcgcccagcgtggccagcccctccccaaaagaggttaattttgtcagtaggggcgctagctcccaccaacctagagtgccactgttcccagaaaatggactccatcagcagcctgagccccttcttccgaacaacatgaaatcagcgtgcgaaaaaaggttggggtgttgcagctctcctcactccaagcctaattgtagtaccctcagtccccctatgcctttgccccagttgctgccctcagtgaccgatgctagatctgctggtcccagcgatcacattgatagttccgtaaccggcgtgcaaaggtttagggacacattaaagatcccctataagctggagctaaagaatgaaccaggcaggactgacttaaagcacatcgtgatagacgggtcaaacgtggcgataacacacggcctgaagaaattctttagttgccgaggaattgcaatcgccgttgagtatttctggaaactcggaaaccgcaacatcacagtttttgtgccacagtggagaaccagacgggaccctaatgtaaccgagcaacacttcttgacccaattacaggaactcggcatcctcagcttaactcccgcaagaatggtttttggagaaagaatagcgtcccatgacgaccgattcctcctgcaccttgcggacaagaccggtggaatcatcgtcacaaatgataactttcgggagttcgtgaacgagagcgtaagctggcgagagatcatcactaaacggctactgcagtacacattcgtgggagatatcttcatggtgcctgatgaccctcttggacgctctggaccgaggttagaggagtttctgcagaaggaagtctgcctcagagatatgcagccactgttgagcgctttaccgaacgtggggatgtttgatccctcattcagggtccctggcacccaggctgcctcgactagccaccaaccgcctacaagaattcaaggagcgccatcatctcattggcttccccaacagcctcacttccctctgctgccggcactgccctcgttgcagcagaatctcccaatgcccgcacagaggtcttctgcagagacgaatgagttgcgggaggccctgctgaagattttccccgattccgaacagagattaaagattgatcaaattctggtggcacacccttatatgaaggacctgaacgcattgtcagccatggtcttagactag

SEQ ID NO: 245308 - DNA, 2691 bp, Artificial Sequence
  derived and/or modified sequence
atggccgccagagccgtgctggacgagttcaccgcccccgccgagaaggccgagctgctggagcagagcagaggcagaatcgagggcctgttcggcgtgagcctggccgtgctgggcgccctgggcgccgaggagcccctgcccgccagaatctggctgcagctgtgcggcgcccaggaggccgtgcacagcgccaaggagtacatcaagggcatctgcgagcccgagctggaggagagagagtgctaccccaaggacatgcactgcatcttcgtgggcgccgagagcctgttcctgaagagcctgatccaggacacctgcgccgacctgtgcatcctggacatcggcctgctgggcatcagaggcagcgccgaggccgtggtgatggccagaagccacatccagcagttcgtgaagctgttcgagaacaaggagaacctgcccagcagccagaaggagagcgaggtgaagagagagttcaagcagttcgtggaggcccacgccgacaactacaccatggacctgctgatcctgcccaccagcctgaagaaggagctgctgaccctgacccagggcgaggagaacctgttcgagaccggcgacgacgaggtgatcgagatgagagacagccagcagaccgagttcacccagaacgccgccaccggcctgaacatcagcagagacgagaccgtgctgcaggaggaggccagaaacaaggccggcacccccgtgagcgagctgaccaagcagatggacaccgtgctgagcagcagccccgacgtgctgttcgaccccatcaacggcctgacccccgacgaggaggccctgagcaacgagagaatctgccagaagagaagattcagcgacagcgaggagagacacaccaagaagcagttcagcctggagaacgtgcaggagggcgagatcctgcacgacgccaagaccctggccggcaacgtgatcgccgacctgagcgacagcagcgccgacagcgagaacctgagccccgacatcaaggagaccaccgaggagatggagtacaacatcctggtgaacttcttcaagaccatgggctacagccaggagatcgtggagaaggtgatcaaggtgtacggccccagcaccgagcccctgctgctgctggaggagatcgagaaggagaacaagagattccaggaggacagagagttcagcgccggcaccgtgtaccccgagaccaacaagaccaagaacaagggcgtgtacagcagcaccaacgagctgaccaccgacagcacccccaagaagacccaggcccacacccagcagaacatggtggagaagttcagccagctgcccttcaaggtggaggccaagccctgcaccagcaactgcagaatcaacaccttcagaaccgtgcccatcgagcagaagcacgaggtgtggggcagcaaccagaactacatctgcaacaccgaccccgagaccgacggcctgagccccagcgtggccagccccagccccaaggaggtgaacttcgtgagcagaggcgccagcagccaccagcccagagtgcccctgttccccgagaacggcctgcaccagcagcccgagcccctgctgcccaacaacatgaagagcgcctgcgagaagagactgggctgctgcagcagcccccacagcaagcccaactgcagcaccctgagcccccccatgcccctgccccagctgctgcccagcgtgaccgacgccagaagcgccggccccagcgaccacatcgacagcagcgtgaccggcgtgcagagattcagagacaccctgaagatcccctacaagctggagctgaagaacgagcccggcagaaccgacctgaagcacatcgtgatcgacggcagcaacgtggccatcacccacggcctgaagaagttcttcagctgcagaggcatcgccatcgccgtggagtacttctggaagctgggcaacagaaacatcaccgtgttcgtgccccagtggagaaccagaagagaccccaacgtgaccgagcagcacttcctgacccagctgcaggagctgggcatcctgagcctgacccccgccagaatggtgttcggcgagagaatcgccagccacgacgacagattcctgctgcacctggccgacaagaccggcggcatcatcgtgaccaacgacaacttcagagagttcgtgaacgagagcgtgagctggagagagatcatcaccaagagactgctgcagtacaccttcgtgggcgacatcttcatggtgcccgacgaccccctgggcagaagcggccccagactggaggagttcctgcagaaggaggtgtgcctgagagacatgcagcccctgctgagcgccctgcccaacgtgggcatgttcgaccccagcttcagagtgcccggcacccaggccgccagcaccagccaccagccccccaccagaatccagggcgcccccagcagccactggctgccccagcagccccacttccccctgctgcccgccctgcccagcctgcagcagaacctgcccatgcccgcccagagaagcagcgccgagaccaacgagctgagagaggccctgctgaagatcttccccgacagcgagcagagactgaagatcgaccagatcctggtggcccacccctacatgaaggacctgaacgccctgagcgccatggtgctggactag

SEQ ID NO: 245309 - protein, 289 aa, Artificial Sequence
  derived and/or modified sequence
MVVVTGREPDSRRQDGAMSSSDAEDDFLEPATPTATQAGHALPLLPQEFPEVVPLNIGGAHFTTRLSTLRCYEDTMLAAMFSGRHYIPTDSEGRYFIDRDGTHFGDVLNFLRSGDLPPRERVRAVYKEAQYYAIGPLLEQLENMQPLKGEKVRQAFLGLMPYYKDHLERIVEIARLRAVQRKARFAKLKVCVFKEEMPITPYECPLLNSLRFERSESDGQLFEHHCEVDVSFGPWEAVADVYDLLHCLVTDLSAQGLTVDHQCIGVCDKHLVNHYYCKRPIYEFKITWW

SEQ ID NO: 245310 - DNA, 870 bp, Artificial Sequence
  derived and/or modified sequence
atggtcgtcgttactggtcgtgaaccagactcaagaagacaggatggggctatgtcctcctcagatgccgaggacgatttcctggagccagccacaccaacagccacccaggcaggtcacgcactacccctgcttccccaggaatttccggaggtcgttccactgaacattggaggtgcacacttcacaacccgcttgtcaaccctccgctgttatgaagacaccatgttggctgctatgttctccgggcgacattacatacccacagatagcgaggggaggtattttattgatagggacggaacccatttcggagatgtgctgaatttcctgcggtcaggcgatcttccaccccgggagcgcgtgcgcgccgtctataaggaagcccaatactacgctattggtccactgttggaacagctggaaaacatgcagcctctgaagggcgaaaaagtgcgccaggcgtttttgggtttaatgccttattacaaggatcacctggaaaggatagtggagattgctcgcttacgtgcagtgcaacgtaaagccagatttgccaagttgaaggtatgtgtgtttaaggaagaaatgccaatcaccccctacgagtgcccccttcttaacagtctccgctttgagcgcagcgagtccgatggccaactgtttgagcaccactgcgaggttgacgtgtcctttgggccttgggaggcagtagccgatgtttacgatctgctgcactgcttagtgaccgatctgagcgcccaggggctcacggtggaccaccagtgtatcggcgtgtgcgacaaacatctggtgaaccattactactgtaaaaggcccatctacgagtttaagatcacttggtggtag

SEQ ID NO: 245311 - DNA, 870 bp, Artificial Sequence
  derived and/or modified sequence
atggtggtggtgacaggccgggagccagacagccggcggcaggatggagccatgagcagcagtgatgctgaagatgacttcctggagcccgccacccccacagccacccaggccggccacgccctgcccctgctgccccaggagttccctgaggtggtgcccctgaacattggaggagcccacttcaccacccggctgagcaccctgcgctgctatgaggacaccatgctggccgccatgttcagcggccgccactacatccccacagattctgagggccgctacttcatcgacagagatggcacccactttggagatgtgctgaacttcctgcggagcggggacctgcccccccgggagcgggtgcgggctgtgtacaaggaggcccagtactatgccatcggccccctgctggagcagctggagaacatgcagcccctgaagggggagaaggtgcggcaggccttcctgggcctgatgccctactacaaggaccacctggagcgcatcgtggagatcgcccggctgcgggctgtgcagaggaaggccaggtttgccaagctgaaggtgtgtgtgttcaaggaggagatgcccatcaccccctatgaatgtcccctgctgaacagcctgcgctttgagaggtctgagagtgatggccagctgtttgagcaccactgtgaggtggatgtgtcctttggcccctgggaggccgtggctgatgtgtatgacctgctgcactgcctggtgacagacctgagcgcccagggcctgactgtggaccaccagtgcatcggcgtgtgtgacaagcacctggtgaaccactactactgcaagaggcccatctatgagttcaagatcacctggtggtag

SEQ ID NO: 245312 - DNA, 870 bp, Artificial Sequence
  derived and/or modified sequence
atggtggtggtgaccggccgggagcccgacagccggcggcaggacggggcgatgtcttcttccgacgctgaggacgatttcctggagcctgccaccccaactgccactcaggccggccacgcattgcccctattgcctcaggaattccccgaggtagtccccctgaacattggcggagctcactttactacccggttatccacccttcgttgttacgaagataccatgttagcagccatgttcagtggtcggcattacatccctactgacagtgaaggcagatatttcattgatcgggacggtactcatttcggggatgtgctgaatttcctcaggtccggggatctccctccccgggaaagggtacgcgccgtatataaggaggctcagtattacgccataggacctttactggagcaactggaaaacatgcagcccctgaagggggaaaaagttagacaagctttcctaggtctgatgccatattacaaggaccacctcgagagaattgtggagatcgcccgcctcagagcagtccagcggaaagctcgattcgcaaagctgaaggtctgtgtcttcaaagaagagatgccaatcactccatatgaatgtccactattgaatagtttgcgcttcgaaagaagtgagtcggatgggcagctatttgagcaccactgcgaagtggacgtctcctttggaccatgggaggctgtggcagatgtttatgatttgctgcattgcctggttactgatctgtccgctcaaggccttactgtggaccaccagtgtattggagtgtgtgacaaacatcttgtcaatcactactattgtaaacggccaatatatgaatttaaaatcacctggtggtag

SEQ ID NO: 245313 - DNA, 4873 bp, Artificial Sequence
  derived and/or modified sequence
agctgggcgcgagcgggtcggcgttgagggagccaccgccctcccgcctgcgcactgcctctcgcccccctccggccagcccgcagccggccgcgtcatgccaggcgctgctcggcggtagggagtgcccggggccgccgcctccgcccgcccgaagccgcgcccactgcccagagccagagggatggtggtagtcacggggcgggagccagacagccgtcgtcaggacggtgccatgtccagctctgacgccgaagacgactttctggagccggccacgccgacggccacgcaggcggggcacgcgctgcccctgctgccacaggagtttcctgaggttgttccccttaacatcggaggggctcacttcactacacgcctgtccacactgcggtgctacgaagacaccatgttggcagccatgttcagtgggcggcactacatccccacggactccgagggccggtacttcatcgaccgagatggcacacactttggagatgtgctgaatttcctgcgctcaggggacctcccacccagggagcgtgttcgagctgtgtacaaagaggcccagtactatgccatcgggcccctcctggagcagctggagaacatgcagccactgaagggcgagaaggtgcgccaagcgtttctgggactcatgccctattacaaagaccacttggagcggattgtggagatcgcccggctgcgtgcggtccagcggaaggcccgctttgccaagctcaaggtctgtgtcttcaaggaggagatgcccatcaccccctatgagtgtccgctcctcaactccctgcgatttgagcggagtgagagtgacgggcagctttttgagcaccactgtgaagtggatgtgtcttttgggccctgggaggctgtggctgatgtttatgacctgctgcactgcctggtcacggacctctcggcccagggtctcaccgtggaccaccagtgcatcggggtgtgtgacaagcacctcgtgaaccactactactgcaagcgccccatctatgagttcaagatcacatggtggtgagtagccccggtaggcgagagtcccatcagggaggatgtccaccttgcttggtggctctgggagtaagatccctgaaggggctgctgactgccccagaatctgccgaggtgagaacagcatcctgaggcacagctcccaggggacagaggtgtagctccaatctccctgactgcacctcagggttgggctcagggcttgcggcctgcaggcactccagccagcgctcacctggcctttcctcaaggcatggtagtctttccttgaggctgatagctagggcttgaccaggaagtcccgagaagttttgtcaccttcttgaccttgcaagagagtttctgcccattttagagccacgttaccaaatcgatgtaggcctaatcacttcctcaaccctgttcaagcgtccctcccttgtgctcagtatattggtgtgaacacggaacatgatgggggatttacctgaccagccaccccatagcccctggctgaagaagaaagagcatcttctctcccactgcaccccttctcctccaagaatagttgcccacattcccaaaatgtggaaagacttttcttttccttccggaacatgttcttcaccaccttttggagatttaaccatagctgccaaagctatgcacccagttggccttagaaaaccacaatgtttacagccctgtcttagggccgcggcttctcttatcttccaccaccttccttgcttgcagggttatcttctcacagggctggaatgcaaatttcagaggcttcttttgaagattccccaagtcaagcaggcaagatgcctagatcttctgttatctttgacatgtaacatcctttttagaggctcagaacacctccttggctgctatctcatgtgttagaatccagtttgtggtgaacctctttggaaggggaccccctctctttaaaccctgttcctctgtcctggtaacattctccttctaggagagcctctcttctgagaaggtaaaggaagggctgggtgagacacacagctatcctaggagccgtaggaagacaaaacttcccttttgttttactcctcactcctctatttttgttttactcacttctttatattttgttttactcctcactcctgtatattttggtttacttactcctctatttcagaaattgaaaaagatccccaaggatctgttactactgcatttccttcttgctctgtctacagcctaggccaactagtcagggtctggacatgcatctcctaaaggaagaactgtgtagcaccattgatcacaatgtaacatttccatgctgcattaagggtgtctctctctaatcatgattgtacctgtctcttcctgggtaaagggagatttttttttttaatgtgtaaagaattgatgcgagccaggaacatgtctgtagtcccagctacttgggcacacgcctgtagtccaggccactcgagcacacacctgtagtaccagctactctggaggctgaggcaggaggatcacttgagcccaggagattaagactgtagtatactatgatcgtgcctgtggctagccactgtgctccagcctgggcaacaccatcgtaaaaataaataaataaataaataaattggggaggacagcctcactggtatcagacttacaggaccagatagacaagatgggtataaggggagctgaagtctgtgttcatatgaggaagagaagaccaagccctgggactttggctgaattcctccgtggggctggacggcagtgatctcctgttccctatgtgtaaacaaagattccagggcgtggttttgcactcctgttgtactcttttagaggtggaaaagaggtggatactgagatctaagaggaaaggatagtcattcacgttctgagatatgcgctctctctattgttctcgtacacaaagggatagtctcttttctggagctgatgtccctgcttggaggttagccccaaaacatggctcttgtattgttctaagagaaaaggctttcattttggttcttctgattggtgttacctactgcctaatatgtgttcattttttgacagagaggcagactattgaaaaagtctgtgtgaacagagagcagttcattaagcccattgctttcagtaatgtggccttgaccccttctgcttcccccttctcccatggagcatggcagggcttggttatttagagtccatacatgcaagccattgagagacttgtttgctcaaatgcaagtttgctcaaaaacaggtcctgaaggcttgcttaggattacagggatgctgggtaagaacaccgttcctctctctcgctggagaaatccctgtttctctgactccctttgtgatcctcacagtaatgtattctgtgccactgtaggacacaaggctctgggccagtagaacaggcagagaggtgacactgggcagcaagctgagagctctttctaaatggagtgaaggaattcagtggcctagtttcgccattctctaatgagaaaccaaggccaggctgaaaagtgcaattagatgtggtggattgtggtaacggcctccagataaaggggttatccctgtggaagtgacttttccccatttgatcccttttcaactctaaatggccaggcccagaacagaagaagggttgggtctggaaggaaggctccaaaggatgaaagcttctccctgatcataaggaagtgcatctttatagaattgttgtgcataatgtcagtaaatccctctcacttgacaagggactggattcatcttgccttgagacgggccagtagttatcagtgagtcaaagcaaagtgaaagtttcaggagatgggaccaatggtgcaatgctcgccataacaaaattccttaaaaataaaaaagctaatgttatagcaacaaaaaaagactgaagcaaaaccacactgaaatgcatcccactccaggagaggaattcttagcgtaacactctaaataaatggaaggaatcatcaccttccttattttacctctgccttgttcaccaggctgcccagtgcttaccatgcagaaagcagtcagctgtactctggaagtttctgttcttctttcctggggcttaggatattctgggagctgtctgagccttgtgcctaaggcttatcaggtgatataatcttcctgttctgggctgcttgctggaggaataggaagtgacatttataagacacaggcggtgtgagcatccatgtgtggtcttggtctaaaccagctcttgaacaggttaaagcaaacagcaataacaaaacaaaaactactgatgctgagcgttttgatcctagtaatatttcaaatattgtccttctgcatatgttctatccatatttgattccaatatacattattaagctttcttgggtactattttgctggggctcttgcgtgaaggtggtacctgtctcatgatccttaaaagagagaggcttttttcatccaaagctgtagtgttgggaactggggtgggagaggcactttttggaattctgaaagaatcatatctgtgtatatacatactgagtggggaaggatgggggttggcaggggttgagggaggtgggaacaaacagtgagtatgggaacaggcagtcacctcgagtgtgggaggtcacctgggtccgtcgtcttccttctgtatggtgttgggtttatgtacacactataacacttcctgtgtgagttcatgtacctgtctgtgagtgctttggtgtattgagcctcagtacactccaagggcattaaagtcaagaactagaacctg

SEQ ID NO: 245314 - DNA, 870 bp, Artificial Sequence
  derived and/or modified sequence
atggtggtggtgaccggccgagaacccgatagccgacggcaagatggcgcaatgagtagtagcgacgccgaggacgattttctagagccagcgacaccgactgctacacaggcgggacacgctctccctctccttccgcaggagttccccgaggtggtgcctctgaatataggcggagcacactttacaacccgccttagtactctccgctgttatgaagatactatgctggcagcgatgttttcaggtcgccattacattccaactgattcagaagggaggtacttcatagatagagacggaactcactttggagatgtcctgaatttcctccgtagcggcgatctccccccacgcgagcgcgttcgcgctgtctataaagaggcacagtattatgctattgggccactcctggaacaacttgaaaacatgcaaccattaaaaggagaaaaggtccggcaggcattcctgggtctgatgccatactataaggatcatcttgagcgcatagtggagatcgcacgactgagagccgtacagcgcaaagcaaggttcgccaaactaaaagtgtgtgtgtttaaggaggaaatgcccataaccccctacgaatgcccactgcttaacagcctgcggttcgagcggtcggaatctgatggtcagctattcgagcatcactgcgaggtagacgtaagtttcggaccttgggaggcggttgcggacgtttatgatctgcttcactgcctggtgaccgacctatcagcacagggactgactgtcgatcaccagtgcatcggggtgtgcgacaagcatttggtaaaccattactactgtaaacggccaatatacgaattcaaaattacttggtggtag

SEQ ID NO: 245315 - DNA, 870 bp, Artificial Sequence
  derived and/or modified sequence
atggtggtggtgaccggcagagagcccgacagcagaagacaggacggcgccatgagcagcagcgacgccgaggacgacttcctggagcccgccacccccaccgccacccaggccggccacgccctgcccctgctgccccaggagttccccgaggtggtgcccctgaacatcggcggcgcccacttcaccaccagactgagcaccctgagatgctacgaggacaccatgctggccgccatgttcagcggcagacactacatccccaccgacagcgagggcagatacttcatcgacagagacggcacccacttcggcgacgtgctgaacttcctgagaagcggcgacctgccccccagagagagagtgagagccgtgtacaaggaggcccagtactacgccatcggccccctgctggagcagctggagaacatgcagcccctgaagggcgagaaggtgagacaggccttcctgggcctgatgccctactacaaggaccacctggagagaatcgtggagatcgccagactgagagccgtgcagagaaaggccagattcgccaagctgaaggtgtgcgtgttcaaggaggagatgcccatcaccccctacgagtgccccctgctgaacagcctgagattcgagagaagcgagagcgacggccagctgttcgagcaccactgcgaggtggacgtgagcttcggcccctgggaggccgtggccgacgtgtacgacctgctgcactgcctggtgaccgacctgagcgcccagggcctgaccgtggaccaccagtgcatcggcgtgtgcgacaagcacctggtgaaccactactactgcaagagacccatctacgagttcaagatcacctggtggtag

SEQ ID NO: 245316 - protein, 163 aa, Artificial Sequence
  derived and/or modified sequence
MGDECSNPDLLAEPGSSPPWDHGNQRQEAANESNTRVPRVLKAHLGPETAQPTKRSKRNRWRRQSCQGPSPARSGQFLGSADLGLQRGVLKSAARTCLSEISNSTRASPESAQSTDPGRAARPRTRTLPTPHSFKIGEEAEEMKKKKERKRRKERKKERNFKK

SEQ ID NO: 245317 - protein, 17 aa, Artificial Sequence
  derived and/or modified sequence
MGDECSNPDLLAEPGSS

SEQ ID NO: 245318 - DNA, 492 bp, Artificial Sequence
  derived and/or modified sequence
atgggcgacgagtgcagcaaccccgacctgctggccgagcccggcagcagccccccctgggaccacggcaaccagagacaggaggccgccaacgagagcaacaccagagtgcccagagtgctgaaggcccacctgggccccgagaccgcccagcccaccaagagaagcaagagaaacagatggagaagacagagctgccagggccccagccccgccagaagcggccagttcctgggcagcgccgacctgggcctgcagagaggcgtgctgaagagcgccgccagaacctgcctgagcgagatcagcaacagcaccagagccagccccgagagcgcccagagcaccgaccccggcagagccgccagacccagaaccagaaccctgcccaccccccacagcttcaagatcggcgaggaggccgaggagatgaagaagaagaaggagagaaagagaagaaaggagagaaagaaggagagaaacttcaagaagtag

SEQ ID NO: 245319 - DNA, 54 bp, Artificial Sequence
  derived and/or modified sequence
atgggcgacgagtgcagcaaccccgacctgctggccgagcccggcagcagctag

SEQ ID NO: 245320 - DNA, 1699 bp, Artificial Sequence
  derived and/or modified sequence
aagtgtgggcgcagccgggacaatttcgagacaacttcgagacaatttcgaatggacaaattgcggagaagttgcttctgccgctcagaagccggttcacctccttctccaccgcggcatttccaaaacaacagggacaagtctccccggctcgccgcaggcctgaccgcccagctccgccaggatttgcagagagcagcgcgctccatttgcagaaaggaaatcgagactggactccttctgactccacgcggccccagctcctgaaccagcgcagtgagcctcagccgcttctcaaactgggtctcagaaaatttctcctcgagatggatttcagcggcaggaaagaggggccagtgacgcgaggagcaagaaaagagtaacatgggagatgaatgttcaaacccagatctcctcgctgagcctggaagctcgccaccgtgggatcacgggaaccagaggcaagaggctgcgaatgagtccaacacccgcgttcctcgagttttaaaagcacacctggggccagagactgcacagccaactaaacggagtaaacgcaacaggtggaggaggcagagttgtcaggggccaagcccggcgcgatctggccagttcttggggagcgcggacctgggactgcagagaggcgttttgaagagtgctgcgcgcacctgcctctcggagatatccaactccacccgggcgtctcctgagagcgcacagtccacagaccccgggagggctgcccgccctaggacacgtactctcccgacccctcactctttcaaaattggggaagaggcggaggagatgaaaaagaagaaagagagaaagagaagaaaagagagaaagaaggaaagaaattttaaaaaataataaaaggagggaagaatggaggtaaaacgcgggggagagaagaggggagaaactctcctcaccacaaccaaagcaggaggcctaagcttcctgaatttctacacatgacttgcattaagttccttcctagaacttaaactttttcatctcccgtcacccaagaaaacacccatttcctcttttaaataaagtttctttttctggagatgaacctttaaataagtcgtacgtttgggagcgagggacaggagaataattttgatccagaaccttggagattggagaagcaggtggaaaaattctaaaaagatgaaaactgaccatctccgacacagaaacccatcgaaaggggccaccgagacccgttgattagctggagggagcatgcggcagaagtgcagacccctcgctaacccgccaacctccaagagccctcttgcagaaagctgcccggctccccacggtggccctgcgcgcgcaccatcctcgcggtctcgcttcttcgccccggaaaactctatgaggggcaccccagcctcagccgggttaagacaagtagccccaagaggaaggagcctcagagagcctttcttcctgttcttcttcgtcttcttttttttctaaacgaaatctaatactatctggctgcaaaaatatattatcaccggctctcagcctaagagactaacatttggatatgtaggaaatgtaatctgcatggctaattgattctcagcgtatcagtttaaaggataaagatcgatatctacatgatggatattgtattaataggggcataaataaaggtcgaagagtcgttacc

SEQ ID NO: 245321 - DNA, 441 bp, Artificial Sequence
  derived and/or modified sequence
ggaagataggaagagagaaggaaaataggaaaggaaaaagaaaagaggaaaagaagagagaggtacttttttttttaaaggcagtgagggagggagagaagaataaatctcacagcagctggtgtcctagttcatttgggtctgagaaaattatttttaggcaaacaaggaagacaggattccgccgcccgattctccagggcgggaagaataggatgtcttgtaaaaaataagactggactccttctgactccacgcggccccagctcctgaaccagcgcagtgagcctcagccgcttctcaaactgggtctcagaaaatttctcctcgagatggatttcagcggcaggaaagaggggccagtgacgcgaggagcaagaaaagagtaacatgggagatgaatgttcaaacccagatctcctcgctgagcctggaagctcg

SEQ ID NO: 245322 - DNA, 492 bp, Artificial Sequence
  derived and/or modified sequence
atgggcgacgaatgttcaaatccagatctgctggctgaaccaggatcatctcctccatgggatcacgggaaccagcgccaggaggccgccaacgaaagcaacacccgtgtgcctcgagtccttaaggcccatctggggccagagaccgcacagccgaccaagaggtccaaacggaaccgctggcggcggcagtcatgccagggacccagcccagcaagatctgggcaatttcttggctctgctgacctcgggcttcaacgtggagtactaaaatcagccgcccgcacatgtttgtcggagatctctaattctactcgcgcatcccctgagtctgcccaatctactgaccccggacgagctgcccgtcctaggacccgtacactgccaacaccccacagttttaagatcggtgaggaagccgaagaaatgaagaagaagaaggagaggaaacgtcgtaaagaacgaaagaaggaaaggaacttcaagaaatag

SEQ ID NO: 245323 - DNA, 54 bp, Artificial Sequence
  derived and/or modified sequence
atgggagatgagtgcagcaatcctgatctcctggccgaacccggtagctcttag

SEQ ID NO: 245324 - DNA, 492 bp, Artificial Sequence
  derived and/or modified sequence
atgggagatgagtgcagcaacccagacctgctggccgagcccggcagcagccccccctgggaccacggcaaccagaggcaggaggccgccaatgaaagcaacaccagggtgccccgggtgctgaaggcccacctgggccctgagacagcccagcccaccaagaggagcaagaggaaccgctggaggcggcagagctgccagggccccagccctgcccggagcggccagttcctgggcagcgctgacctgggcctgcagaggggcgtgctgaagtctgctgcccggacctgcctgtctgagatcagcaacagcacccgggccagccctgagagcgcccagagcacagatcctggccgggccgcccggcccaggaccaggaccctgcccaccccccacagcttcaagatcggggaggaggccgaggagatgaagaagaagaaggagaggaagaggaggaaggagaggaagaaggagaggaacttcaagaagtag

SEQ ID NO: 245325 - DNA, 54 bp, Artificial Sequence
  derived and/or modified sequence
atgggagatgagtgcagcaacccagacctgctggccgagcccggcagcagctag

SEQ ID NO: 245326 - DNA, 492 bp, Artificial Sequence
  derived and/or modified sequence
atgggcgacgagtgcagcaaccccgacctgctggccgagcccggcagtagccccccatgggatcacggtaaccagcgccaggaggcggcaaatgaatccaatacacgagtaccccgcgtattgaaggcacacttaggccctgaaactgcacaacccacaaaaaggtcaaaaaggaaccgatggcgccggcagagttgtcagggtccaagtccagcacgctccggacagttcctgggcagcgccgacctggggcttcaaaggggcgtgctgaagagcgcagctagaacttgtctgagcgaaatcagtaattctacgcgcgcatcccccgagtcagcccagtcaaccgatcccggtagggcggccaggccacgaacccgcacactgccaactcctcactcctttaaaatcggggaggaagcggaagaaatgaaaaagaaaaaggaacgcaagcgccggaaagagaggaaaaaagagaggaatttcaagaagtag

SEQ ID NO: 245327 - DNA, 54 bp, Artificial Sequence
  derived and/or modified sequence
atgggcgacgagtgcagcaaccccgacctgctggccgagcccggcagcagttag

SEQ ID NO: 245328 - DNA, 492 bp, Artificial Sequence
  derived and/or modified sequence
atgggcgatgaatgttcaaatccggacctactcgctgaaccgggaagttcccctccatgggaccatgggaatcagcgccaggaggcagccaacgagagtaatacaagggttccaagagtactgaaggcccatttgggacccgaaacagcccagcctactaaaagatccaagagaaaccgctggaggaggcagagttgccagggccctagccccgcaagatctggccagttcctcggttccgctgacttggggcttcagcgtggggtgctcaaaagtgcagcacggacttgcctgagcgaaatctctaactcaaccagggcaagcccagagtccgcacagagtaccgacccagggagagctgctaggccaagaacacgaaccctgcccactccgcatagcttcaaaattggcgaggaagctgaagagatgaaaaagaagaaagagcgcaagcgcaggaaagagcgcaagaaggagcggaattttaaaaaatag

SEQ ID NO: 245329 - DNA, 54 bp, Artificial Sequence
  derived and/or modified sequence
atgggcgacgaatgttctaatcccgacctgcttgcagagcccggttcgtcttag

SEQ ID NO: 245330 - protein, 178 aa, Artificial Sequence
  derived and/or modified sequence
MNKRTSVDASKEDLHPADPQSGEGVPPNRKNTKTSPRGEGTAPPFSARPCVWTLCEMLSILALVGVLHPFYRSNNQVYQKLKTHLRCQSSRVDGLMLKPTLLTPSQLKSPEGHLILPTFNHLVIRHILDPKQIFCVADVCTDCKFNCGSIERHQKRHLMRVSQDWEHLIRYRNQICLS

SEQ ID NO: 245331 - DNA, 1749 bp, Artificial Sequence
  derived and/or modified sequence
attggaaccactggaggagctttaaaacctcctgaaacctaggtctggccttcagggaatctgattccttggtctggggtatggcccgggcatctcctgaagctcaccaggtcacacagaggtgtagccccagctgggaaccactgacccagactcagttcctgaatttctgtgaccgcttccatggcagcccctctcaggcccctggtgtgaggtctttcttttgcttctggcttctgagagtttcctttcctgattccaggctgggctcggttttgtctggtgggtttttttgccactgccgttgtgttagtggcatccaggtctccggattactgcatgcttgcagtgggaggaaaggcctgtctaccatgttctctgcctccccttcatgttctgtgaggagaggggccttgtctggcatgttcaccgaggcattcctgaccactagaactgtgcttggcacagagtaggcacttaataaactcctgctgcatgaacaaaagaacaagtgtggatgcttcaaaggaagacttgcacccggctgacccccagagtggggaaggggtcccacctaataggaagaacaccaagacttccccaagaggagaaggaacggctccccctttctcggcgaggccatgtgtctggaccctgtgtgagatgctttctatactagcccttgttggggtgttgcacccattttacagatcaaacaaccaagtttatcagaaattaaagactcatttaagatgccaaagctcacgagtggatggtttgatgctgaagccaacattgttaacaccatctcagctcaaaagccctgaaggccacttaattctaccaaccttcaaccatcttgtcataagacacatcctcgacccaaagcagatattctgtgtagctgatgtgtgtacagattgcaaattcaattgcggaagcatagagaggcaccagaagaggcatcttatgagagtcagccaggactgggaacatttaataagatacagaaaccagatttgcttgagctgaatgctggatcgccatggcaaccttcctttggaggttatccaagtcaggtagtgacagcaaagctgagttaaaggtcacccctgctgagaaagatgggcattgataaaggattttaacaagacccagaggagctggtatttggaagctacctacagaggatcgacgaggccctaggaatgggtggcaaacaacatcaggaagaggggggcatcctgcaggggctcccaccagagccccgacctcgcccttcagatcgggagctccagccttcaccagaagctgagattggagctgttcgtaattgttcaatggaagggggaacaaccattttaaccaggcatccagatgggaaagaaatacacttatgccactctacacccaagacacgcattcctgaaaagttctgaacaagccaaatgcttgcaaatggaacgggcttgaccttctttatcactccagaaatgctttatttaatcttttttctattggagcatcactttaaaacctcaaagttgagaaggcttttctttgcatgatgctgaagccagaagccttcaaggaaacaacataaatataaatatctctgtggccagtctctacaaaaatacataaaaatgaattttaagcataataaaatgtgaaaaattgcccaactttcctcacaaatgagtaaaagccaatttaaatgataagaaatgaataaatgcatattaaagc

SEQ ID NO: 245332 - DNA, 537 bp, Artificial Sequence
  derived and/or modified sequence
atgaacaagagaaccagcgtggacgccagcaaggaggacctgcaccccgccgacccccagagcggcgagggcgtgccccccaacagaaagaacaccaagaccagccccagaggcgagggcaccgccccccccttcagcgccagaccctgcgtgtggaccctgtgcgagatgctgagcatcctggccctggtgggcgtgctgcaccccttctacagaagcaacaaccaggtgtaccagaagctgaagacccacctgagatgccagagcagcagagtggacggcctgatgctgaagcccaccctgctgacccccagccagctgaagagccccgagggccacctgatcctgcccaccttcaaccacctggtgatcagacacatcctggaccccaagcagatcttctgcgtggccgacgtgtgcaccgactgcaagttcaactgcggcagcatcgagagacaccagaagagacacctgatgagagtgagccaggactgggagcacctgatcagatacagaaaccagatctgcctgagctag

SEQ ID NO: 245333 - DNA, 537 bp, Artificial Sequence
  derived and/or modified sequence
atgaacaaacgcacatccgtagacgcatctaaagaggacctgcatccagctgatccacagagcggtgaaggcgtgcctcccaaccggaagaataccaagacctctccccggggcgagggcacagccccccctttcagcgcccggccttgcgtttggaccctctgcgaaatgctctctatccttgcactggtaggcgtgttgcaccccttctaccggagtaataatcaagtttatcagaagctcaagacacacctgagatgtcagtccagccgtgtggatggcctgatgctaaagccaacactactgaccccctcacagctcaagtctccagaggggcacctcatcctgcccactttcaaccacctggtaattaggcacattctcgaccccaagcagattttctgcgtggctgacgtctgcactgattgcaagtttaattgtggctccattgagaggcatcagaaacgccacttaatgcgcgtgtcccaggactgggagcacctcatccgctatcggaatcagatatgtctcagttag

SEQ ID NO: 245334 - DNA, 537 bp, Artificial Sequence
  derived and/or modified sequence
atgaacaagaggacctctgtggatgccagcaaggaggacctgcaccctgctgacccccagagcggggagggcgtgccccccaacaggaagaacaccaagaccagccccagaggagagggcacagccccacccttcagcgcccggccctgtgtgtggaccctgtgtgagatgctgagcatcctggccctggtgggcgtgctgcaccccttctaccgcagcaacaaccaggtgtaccagaagctgaagacccacctgcgctgccagagcagccgggtggatggcctgatgctgaagcccaccctgctgacccccagccagctgaagagccctgagggccacctgatcctgcccaccttcaaccacctggtgatccgccacatcctggaccccaagcagatcttctgtgtggctgatgtgtgcacagactgcaagttcaactgtggcagcattgaaagacaccagaagaggcacctgatgagggtgtcccaggactgggagcacctgatccgctacagaaaccagatctgcctgtcctag

SEQ ID NO: 245335 - DNA, 537 bp, Artificial Sequence
  derived and/or modified sequence
atgaacaagcggaccagcgtggacgccagcaaggaggacctgcaccctgcagatccccagtctggggaaggcgtgcctcctaatagaaagaatacgaagacatccccccgcggggaaggaactgctccgccattcagtgcaaggccttgcgtctggacattatgtgagatgctcagcattctggccctggtgggcgttttacacccattctatcgatccaataatcaagtctaccagaaactgaaaacgcacctcagatgccagtccagccgggttgacgggttgatgcttaagccgaccctcttgaccccctcccagctcaagtctcctgaaggtcatctaattctgcccacattcaaccatctcgtcattcggcacatccttgatccaaaacagatattctgcgtggccgacgtctgcacagactgtaaattcaactgtggttctatcgagcggcaccagaagagacacctcatgagagtgtcacaggattgggagcatctgatcaggtacaggaatcagatttgcctgtcgtag

SEQ ID NO: 245336 - DNA, 537 bp, Artificial Sequence
  derived and/or modified sequence
atgaataagcggacctcagtggatgcgagtaaagaggatcttcaccccgctgacccccagagtggcgagggagttccacccaacagaaagaataccaagacttcacccagaggggagggaaccgcaccaccattttctgccagaccatgcgtatggacactatgcgagatgctgagcattcttgctctggtaggcgtcttacatccattctatcgaagcaacaaccaggtataccaaaaactcaagactcaccttagatgccaaagctctcgggtagacggcctgatgcttaagcccacactgttaactcctagccagctaaagtccccagaggggcatctgattttacccacatttaatcacctggtaatcaggcatatcttagaccccaagcaaatcttttgtgtggccgatgtttgtacagattgtaaattcaattgtggcagtattgaacgccaccagaaaaggcatttaatgcgtgtgagccaggactgggagcacctaatccgctaccggaaccagatctgtcttagttag

SEQ ID NO: 245337 - protein, 342 aa, Artificial Sequence
  derived and/or modified sequence
MACEPQVDPGATGPLPPSSPGWSALPGGSPPGWGQELHNGQVLTVLRIDNTCAPISFDLGAAEEQLQTWGIQVPADQYRSLAESALLEPQVRRYIIYNSRPMRLAFAVVFYVVVWANIYSTSQMFALGNHWAGMLLVTLAAVSLTLTLVLVFERHQKKANTNTDLRLAAANGALLRHRVLLGVTDTVEGCQSVIQLWFVYFDLENCVQFLSDHVQEMKTSQESLLRSRLSQLCVVMETGVSPATAEGPENLEDAPLLPGNSCPNERPLMQTELHQLVPEAEPEEMARQLLAVFGGYYIRLLVTSQLPQAMGTRHTNSPRIPCPCQLIEAYILGTGCCPFLAR

SEQ ID NO: 245338 - DNA, 2314 bp, Artificial Sequence
  derived and/or modified sequence
ggcgggaacccgtgccccaagatgccgtgcacgtggtcggctccgcgcggaggctccttccggcgtcccgggggggcgctcggctgatgaaacgcggcctccagctccgctccgccgcgggcccgggaggcgcgttccctcttggccccaaagcgagtccggcgggcggctcctcggggttgggcgaccgagcggggccggccgggcggggggcgggcccgtgaaggcggcgcagcgcggcgcgggaggcgtgctgggcgcggggctgcggtgcccagaggctgcggcattaggggctcggcgcccccgaccttccgcgtcccggggtggcggcggcggcggcggcggcggcgcgggcggcatatgatgctgagctggctgctccagaatgaaccacagctctgagaaggggaagtagaaacagctggcgccctgccatggcctgtgaaccacaggtggacccgggggccactggcccattgcccccctcctcccctggctggagtgccctgcctggagggagccctcctggctgggggcaagagctccacaatggccaggtcctcactgttctccggattgacaatacctgtgcacccatctccttcgacctgggagccgcagaagagcaactgcaaacttggggcatccaggtcccggctgaccagtacaggagcttggctgagagtgccctcttggagccccaagtgagaagatatatcatctacaactcgaggcctatgcggctggcctttgctgtggttttctatgtggtggtgtgggccaatatctactctaccagtcagatgtttgccttggggaaccactgggctggcatgctgctcgtgaccctggccgcggtgagcctgaccttgactcttgtgctggtctttgaaagacaccagaagaaggccaacaccaacacggacctgaggctggcagctgccaatggagccctcctgagacaccgggtgctgctgggggtgacagacacagtggaaggatgccagagtgtgattcagctttggtttgtctacttcgacctggagaactgtgtgcagtttttgtctgatcatgttcaagaaatgaagactagccaagagtccttgctgagaagcagattgagccagttgtgtgttgtcatggagactggggtgagccctgcaacagcggaggggcctgagaacttggaggatgctcctctcctgcccggcaattcttgtcctaacgagaggccactcatgcagactgagcttcatcagcttgttcctgaggctgagccggaggaaatggcccgccagctgctggcagtgtttggcggctactacatccggcttctagtgacctcccagctccctcaggcaatggggacacgacacacgaactctccgagaattccatgcccctgccagctcatagaagcctacatcctaggcacagggtgctgcccgttcctggcgaggtgacctagggatgaaggtactcatcttccttcaagactgagcagtcaggaaggcttcaggagcccaagatggccaatggggagccccaggtgaggagagaagcatctgggggcactccaaaaggggcctgtgatgtcagccactggggtgttgtgctcacttcagggcccagcacaaaaatccttgtttgacatctcatgctgaccccctggcctttgcagaagctgatggttacagagctagtcccaccaaagctactctctctgctgcttagaactgtggacacgtatggaaagactggacccccattgctttcattgttcagagaacccaggagacatgaagatgaccagactgggcaaattatgtgtccaaaacttggcctcagatgatgtttccatctccaaccccttcatgccagatggggaaactgaggctcagagaggatactgctctatgtggcattgccttgaacccctaaaattatcagacttcctttttccaatataaagaaaaaaagtaagttttcagaattctctcaatttttaagtttttctcccccatattttgtgaaaagcagtggtatgtgtacgtgttgtctaccagtacacaggctgcagaagacagagacagaagaaagagatcaagggcagataactgttgataggaatatttgagaaagattgatcctgtttgacttgaggacttattttgttcacaggcatgcacgcttgtggttgtggttttatattacagatgtagaacaatggttatgtttcccgacatgaacattgtcctggaatgaagtgtgatcagccacttgtggaattctttgaagagctcagaggctt

SEQ ID NO: 245339 - DNA, 1029 bp, Artificial Sequence
  derived and/or modified sequence
atggcctgcgagccccaggtggaccccggcgccaccggccccctgccccccagcagccccggctggagcgccctgcccggcggcagcccccccggctggggccaggagctgcacaacggccaggtgctgaccgtgctgagaatcgacaacacctgcgcccccatcagcttcgacctgggcgccgccgaggagcagctgcagacctggggcatccaggtgcccgccgaccagtacagaagcctggccgagagcgccctgctggagccccaggtgagaagatacatcatctacaacagcagacccatgagactggccttcgccgtggtgttctacgtggtggtgtgggccaacatctacagcaccagccagatgttcgccctgggcaaccactgggccggcatgctgctggtgaccctggccgccgtgagcctgaccctgaccctggtgctggtgttcgagagacaccagaagaaggccaacaccaacaccgacctgagactggccgccgccaacggcgccctgctgagacacagagtgctgctgggcgtgaccgacaccgtggagggctgccagagcgtgatccagctgtggttcgtgtacttcgacctggagaactgcgtgcagttcctgagcgaccacgtgcaggagatgaagaccagccaggagagcctgctgagaagcagactgagccagctgtgcgtggtgatggagaccggcgtgagccccgccaccgccgagggccccgagaacctggaggacgcccccctgctgcccggcaacagctgccccaacgagagacccctgatgcagaccgagctgcaccagctggtgcccgaggccgagcccgaggagatggccagacagctgctggccgtgttcggcggctactacatcagactgctggtgaccagccagctgccccaggccatgggcaccagacacaccaacagccccagaatcccctgcccctgccagctgatcgaggcctacatcctgggcaccggctgctgccccttcctggccagatag

SEQ ID NO: 245340 - DNA, 1029 bp, Artificial Sequence
  derived and/or modified sequence
atggcttgtgaacctcaggtggatcccggggcaacaggcccccttcctccctcaagtccgggctggagtgcactgcccggaggcagtcctccggggtggggacaagagctgcacaatgggcaagtgctcactgtactccgaattgacaatacctgtgcaccaatcagctttgacctcggggctgctgaagaacagctccaaacctggggaattcaggtaccagctgaccagtatcgctctctggcagagagcgcgctcctggagccccaggtgaggaggtacatcatctataatagtcgccccatgcggttagccttcgccgttgtcttctacgttgttgtatgggccaacatttattccactagccagatgtttgcactcgggaaccactgggcgggtatgctgctggtcacactggccgcggtgtctttaactctgaccctggtgctggtgttcgagcgtcaccaaaagaaggctaacaccaacactgacctgaggctggctgctgcaaacggggcgctgttgcggcacagggtccttttgggggtcaccgacaccgtagaggggtgccagagtgtgatacagctgtggttcgtctattttgacctcgagaactgtgtccagttcttgagcgatcacgtccaagaaatgaaaacctcccaggagtcattactgaggagccggctctcccagctctgtgtggtgatggagactggcgtgagtcccgcgacggctgaaggcccagagaatctggaggatgctccactcttgccgggcaactcatgccccaacgaacgcccactgatgcaaaccgaactgcaccagttagtgcctgaagcagagcccgaagaaatggcccgccagctgcttgctgtgtttggcggttattacatccgcctgctcgtcacatctcagctgccccaggcaatgggaaccagacacacaaacagtcccaggatcccctgtccttgccagctgatcgaagcctacatcctgggcaccggctgttgtccattcttggctcgatag

SEQ ID NO: 245341 - DNA, 1029 bp, Artificial Sequence
  derived and/or modified sequence
atggcctgtgagccccaggtggaccccggggccaccggccccctgccccccagcagccctggctggagcgccctgcccggcggcagccccccaggctggggccaggagctgcacaacggccaggtgctgactgtgctgagaattgacaacacctgtgcccccatcagctttgacctgggcgctgctgaggagcagctgcagacctggggcatccaggtgcctgctgaccagtaccgcagcctggccgagagcgccctgctggagccccaggtgcggcgctacatcatctacaacagccggcccatgaggctggcctttgctgtggtgttctacgtggtggtgtgggccaacatctacagcaccagccagatgtttgccctgggcaaccactgggccggcatgctgctggtgaccctggccgctgtgtccctgaccctgaccctggtgctggtgtttgagcggcaccagaagaaggccaacaccaacacagacctgcggctggccgccgccaatggagccctgctgcggcaccgggtgctgctgggcgtgacagacacagtggagggctgccagagcgtcatccagctgtggtttgtgtactttgacctggagaactgtgtgcagttcctgagtgaccacgtgcaggagatgaagaccagccaggagagcctgctgcggagccggctgagccagctgtgtgtggtgatggagaccggggtgtccccagccacagctgagggccctgagaacctggaggatgcccccctgctgcccggcaacagctgccccaatgaaagacccctgatgcagacagagctgcaccagctggtgcctgaggccgagcctgaggagatggcccggcagctgctggccgtgtttggaggctactacatccggctgctggtgaccagccagctgccccaggccatgggcaccaggcacaccaacagcccccgcatcccctgcccctgccagctgattgaggcctacatcctgggcaccggctgctgccccttcctggccaggtag

SEQ ID NO: 245342 - DNA, 1029 bp, Artificial Sequence
  derived and/or modified sequence
atggcctgcgagccccaggtggaccccggcgccaccggccccctgccacctagcagtcccggatggtctgctctgcccggcggttcccccccaggctgggggcaggagctgcataatggacaggtgctgactgtcctccggatcgataacacatgcgctcctatctccttcgacttgggagctgccgaagagcaactgcagacatggggaattcaagtgccagccgaccagtatcgaagtctggccgagtccgcactgttagagccccaggttaggcggtacatcatctacaattccagacctatgcgtttggctttcgccgtagtgttctacgtggtcgtttgggctaatatctattctacaagtcagatgtttgctcttggcaatcactgggcaggaatgctgctcgtcacacttgctgcagtttccctcaccttaacactggtactggtgtttgaacgccatcagaagaaagccaataccaacactgatttgcgcctggctgccgctaatggagcccttctgcgccatagggttcttttgggagtcaccgacaccgtggagggttgtcagtccgtgatccagttgtggttcgtttatttcgaccttgagaactgcgtgcagtttctctccgaccacgtccaggagatgaaaaccagtcaggaatcactcctgagatctcggctgtcgcaactgtgtgtggtaatggagaccggggtatcgccagccaccgctgaaggcccggaaaatctcgaggacgcacccctgctgcccggcaactcatgtcccaatgagagacccctgatgcagactgagttgcaccagctggttccggaggcggagccagaggaaatggcgcgccagctgctggcagtttttggagggtattacatcaggctgctggtgacttcacagctgccccaggccatgggaacaagacatacaaatagcccccgcataccgtgcccatgccagctgatcgaagcctatattttgggcaccggatgctgccccttccttgcacggtag

SEQ ID NO: 245343 - DNA, 1029 bp, Artificial Sequence
  derived and/or modified sequence
atggcatgtgagccacaggtcgaccccggagctactggacctctaccaccatcttctccaggctggagcgccctgccgggaggatccccaccgggatggggccaggaactacataatggacaagtactgaccgttctgcggattgataacacttgtgccccaatatcctttgacctcggcgctgctgaggagcagttacaaacctgggggattcaggtgccggcagaccagtacaggagcctggcagagtctgctctgctagagcctcaagtgcgtaggtacattatttataattcccgccctatgaggcttgcgtttgccgtagtgttttatgtagtcgtgtgggctaatatttatagtacttcacaaatgttcgcactcgggaaccattgggctggcatgctgctggttaccctcgctgccgtctccctgacactgactctggttcttgtcttcgaacgccatcagaagaaagctaacactaatacagatcttcgactggctgctgcaaacggcgctctgttacgccaccgggttttgctgggcgttaccgatacagtggaaggatgccagtcagtgatccagctttggtttgtctactttgacttagaaaactgcgtccagtttttgtcggatcacgttcaggagatgaagacatctcaagagtcgctgctgcggagtagactgtcccagctttgcgtagtcatggaaacaggagtctccccagccacagccgaaggcccagaaaacttggaggacgctcccttactgcctggcaacagctgccctaatgagcggcctttgatgcagactgaactgcaccagttggtgcctgaggcagagcccgaagaaatggcacgacagctcctggccgtcttcggaggttattacatccggctgcttgtgacttctcagttgccacaggccatgggaacccggcacactaacagccctcgcatcccctgcccctgccagctgattgaggcctacattctgggaacaggctgctgcccattccttgccaggtag

SEQ ID NO: 245344 - protein, 1191 aa, Artificial Sequence
  derived and/or modified sequence
MLRKLTIEQINDWFTIGKTVTNVELLGAPPAFPAGAAREEVQRQDVAPGAGPAAQAPALAQAPARPAAAFERSLSQRSSEVEYINKYRQLEAQELDVCRSVQPTSGPGPRPSLAKLSSVTCIPGTTYKYPDLPISRYKEEVVSLIESNSVVIIHGATGSGKSTQLPQYILDHYVQRSAYCSIVVTQPRKIGASSIARWISKERAWTLGGVVGYQVGLEKIATEDTRLIYMTTGVLLQKIVSAKSLMEFTHIIIDEVHERTEEMDFLLLVVRKLLRTNSRFVKVVLMSATISCKEFADYFAVPVQNKMNPAYIFEVEGKPHSVEEYYLNDLEHIHHSKLSPHLLEEPVITKDIYEVAVSLIQMFDDLDMKESGNKAWSGAQFVLERSSVLVFLPGLGEINYMHELLTSLVHKRLQVYPLHSSVALEEQNNVFLSPVPGYRKIILSTNIAESSVTVPDVKYVIDFCLTRTLVCDEDTNYQSLRLSWASKTSCNQRKGRAGRVSRGYCYRLVHKDFWDNSIPDHVVPEMLRCPLGSTILKVKLLDMGEPRALLATALSPPGLSDIERTILLLKEVGALAVSGQREDENPHDGELTFLGRVLAQLPVNQQLGKLIVLGHVFGCLDECLIIAAALSLKNFFAMPFRQHLDGYRNKVNFSGSSKSDCIALVEAFKTWKACRQTGELRYPKDELNWGRLNYIQIKRIREVAELYEELKTRISQFNMHVDSRRPVMDQEYIYKQRFILQVVLAGAFYPNYFTFGQPDEEMAVRELAGKDPKTTVVLKHIPPYGFLYYKQLQSLFRQCGQVKSIVFDGAKAFVEFSRNPTERFKTLPAVYMAIKMSQLKVSLELSVHSAEEIEGKVQGMNVSKLRNTRVNVDFQKQTVDPMQVSFNTSDRSQTVTDLLLTIDVTEVVEVGHFWGYRIDENNSEILKKLTAEINQLTLVPLPTHPHPDLVCLAPFADFDKQRYFRAQVLYVSGNSAEVFFVDYGNKSHVDLHLLMEIPCQFLELPFQALEFKICKMRPSAKSLVCGKHWSDGASQWFASLVSGCTLLVKVFSVVHSVLHVDVYQYSGVQDAINIRDVLIQQGYAELTEESYESKVNILRAAINKLVCDGPNGCKCLGPERVAQLQDIARQKLLGLFCQSKPREKIVPKWHEKPYEWNQVDPKLVMEQADRESSRGKNTFLYQLHKLVVLGT

SEQ ID NO: 245345 - protein, 1382 aa, Artificial Sequence
  derived and/or modified sequence
MLRKLTIEQINDWFTIGKTVTNVELLGAPPAFPAGAAREEVQRQDVAPGAGPAAQAPALAQAPARPAAAFERSLSQRSSEVEYINKYRQLEAQELDVCRSVQPTSGPGPRPSLAKLSSVTCIPGTTYKYPDLPISRYKEEVVSLIESNSVVIIHGATGSGKSTQLPQYILDHYVQRSAYCSIVVTQPRKIGASSIARWISKERAWTLGGVVGYQVGLEKIATEDTRLIYMTTGVLLQKIVSAKSLMEFTHIIIDEVHERTEEMDFLLLVVRKLLRTNSRFVKVVLMSATISCKEFADYFAVPVQNKMNPAYIFEVEGKPHSVEEYYLNDLEHIHHSKLSPHLLEEPVITKDIYEVAVSLIQMFDDLDMKESGNKAWSGAQFVLERSSVLVFLPGLGEINYMHELLTSLVHKRLQVYPLHSSVALEEQNNVFLSPVPGYRKIILSTNIAESSVTVPDVKYVIDFCLTRTLVCDEDTNYQSLRLSWASKTSCNQRKGRAGRVSRGYCYRLVHKDFWDNSIPDHVVPEMLRCPLGSTILKVKLLDMGEPRALLATALSPPGLSDIERTILLLKEVGALAVSGQREDENPHDGELTFLGRVLAQLPVNQQLGKLIVLGHVFGCLDECLIIAAALSLKNFFAMPFRQHLDGYRNKVNFSGSSKSDCIALVEAFKTWKACRQTGELRYPKDELNWGRLNYIQIKRIREVAELYEELKTRISQFNMHVDSRRPVMDQEYIYKQRFILQVVLAGAFYPNYFTFGQPDEEMAVRELAGKDPKTTVVLKHIPPYGFLYYKQLQSLFRQCGQVKSIVFDGAKAFVEFSRNPTERFKTLPAVYMAIKMSQLKVSLELSVHSAEEIEGKVQGMNVSKLRNTRVNVDFQKQTVDPMQVSFNTSDRSQTVTDLLLTIDVTEVVEVGHFWGYRIDENNSEILKKLTAEINQLTLVPLPTHPHPDLVCLAPFADFDKQRYFRAQVLYVSGNSAEVFFVDYGNKSHVDLHLLMEIPCQFLELPFQALEFKICKMRPSAKSLVCGKHWSDGASQWFASLVSGCTLLVKVFSVVHSVLHVDVYQYSGVQDAINIRDVLIQQGYAELTEESYESKQSHEVLKGLFSKSVENMTDGSVPFPMKDDEKYLIRILLESFSTNKLGTPNCKAELHGPFNPYELKCHSLTRISKFRCVWIEKESINSVIISDAPEDLHQRMLVAASLSINATGSTMLLRETSLMPHIPGLPALLSMLFAPVIELRIDQNGKYYTGVLCGLGWNPATGASILPEHDMELAFDVQFSVEDVVEVNILRAAINKLVCDGPNGCKCLGPERVAQLQDIARQKLLGLFCQSKPREKIVPKWHEKPYEWNQVDPKLVMEQADRESSRGKNTFLYQLHKLVVLGT

SEQ ID NO: 245346 - protein, 918 aa, Artificial Sequence
  derived and/or modified sequence
  misc_feature (1)..(1): Xaa can be any naturally occurring amino acid
XRTNSRFVKVVLMSATISCKEFADYFAVPVQNKMNPAYIFEVEGKPHSVEEYYLNDLEHIHHSKLSPHLLEEPVITKDIYEVAVSLIQMFDDLDMKESGNKAWSGAQFVLERSSVLVFLPGLGEINYMHELLTSLVHKRLQVYPLHSSVALEEQNNVFLSPVPGYRKIILSTNIAESSVTVPDVKYVIDFCLTRTLVCDEDTNYQSLRLSWASKTSCNQRKGRAGRVSRGYCYRLVHKDFWDNSIPDHVVPEMLRCPLGSTILKVKLLDMGEPRALLATALSPPGLSDIERTILLLKEVGALAVSGQREDENPHDGELTFLGRVLAQLPVNQQLGKLIVLGHVFGCLDECLIIAAALSLKNFFAMPFRQHLDGYRNKVNFSGSSKSDCIALVEAFKTWKACRQTGELRYPKDELNWGRLNYIQIKRIREVAELYEELKTRISQFNMHVDSRRPVMDQEYIYKQRFILQVVLAGAFYPNYFTFGQPDEEMAVRELAGKDPKTTVVLKHIPPYGFLYYKQLQSLFRQCGQVKSIVFDGAKAFVEFSRNPTERFKTLPAVYMAIKMSQLKVSLELSVHSAEEIEGKVQGMNVSKLRNTRVNVDFQKQTVDPMQVSFNTSDRSQTVTDLLLTIDVTEVVEVGHFWGYRIDENNSEILKKLTAEINQLTLVPLPTHPHPDLVCLAPFADFDKQRYFRAQVLYVSGNSAEVFFVDYGNKSHVDLHLLMEIPCQFLELPFQALEFKICKMRPSAKSLVCGKHWSDGASQWFASLVSGCTLLVKVFSVVHSVLHVDVYQYSGVQDAINIRDVLIQQGYAELTEESYESKVNILRAAINKLVCDGPNGCKCLGPERVAQLQDIARQKLLGLFCQSKPREKIVPKWHEKPYEWNQVDPKLVMEQADRESSRGKNTFLYQLHKLVVLGT

SEQ ID NO: 245347 - DNA, 4149 bp, Artificial Sequence
  derived and/or modified sequence
atgctgagaaagctgaccatcgagcagatcaacgactggttcaccatcggcaagaccgtgaccaacgtggagctgctgggcgccccccccgccttccccgccggcgccgccagagaggaggtgcagagacaggacgtggcccccggcgccggccccgccgcccaggcccccgccctggcccaggcccccgccagacccgccgccgccttcgagagaagcctgagccagagaagcagcgaggtggagtacatcaacaagtacagacagctggaggcccaggagctggacgtgtgcagaagcgtgcagcccaccagcggccccggccccagacccagcctggccaagctgagcagcgtgacctgcatccccggcaccacctacaagtaccccgacctgcccatcagcagatacaaggaggaggtggtgagcctgatcgagagcaacagcgtggtgatcatccacggcgccaccggcagcggcaagagcacccagctgccccagtacatcctggaccactacgtgcagagaagcgcctactgcagcatcgtggtgacccagcccagaaagatcggcgccagcagcatcgccagatggatcagcaaggagagagcctggaccctgggcggcgtggtgggctaccaggtgggcctggagaagatcgccaccgaggacaccagactgatctacatgaccaccggcgtgctgctgcagaagatcgtgagcgccaagagcctgatggagttcacccacatcatcatcgacgaggtgcacgagagaaccgaggagatggacttcctgctgctggtggtgagaaagctgctgagaaccaacagcagattcgtgaaggtggtgctgatgagcgccaccatcagctgcaaggagttcgccgactacttcgccgtgcccgtgcagaacaagatgaaccccgcctacatcttcgaggtggagggcaagccccacagcgtggaggagtactacctgaacgacctggagcacatccaccacagcaagctgagcccccacctgctggaggagcccgtgatcaccaaggacatctacgaggtggccgtgagcctgatccagatgttcgacgacctggacatgaaggagagcggcaacaaggcctggagcggcgcccagttcgtgctggagagaagcagcgtgctggtgttcctgcccggcctgggcgagatcaactacatgcacgagctgctgaccagcctggtgcacaagagactgcaggtgtaccccctgcacagcagcgtggccctggaggagcagaacaacgtgttcctgagccccgtgcccggctacagaaagatcatcctgagcaccaacatcgccgagagcagcgtgaccgtgcccgacgtgaagtacgtgatcgacttctgcctgaccagaaccctggtgtgcgacgaggacaccaactaccagagcctgagactgagctgggccagcaagaccagctgcaaccagagaaagggcagagccggcagagtgagcagaggctactgctacagactggtgcacaaggacttctgggacaacagcatccccgaccacgtggtgcccgagatgctgagatgccccctgggcagcaccatcctgaaggtgaagctgctggacatgggcgagcccagagccctgctggccaccgccctgagcccccccggcctgagcgacatcgagagaaccatcctgctgctgaaggaggtgggcgccctggccgtgagcggccagagagaggacgagaacccccacgacggcgagctgaccttcctgggcagagtgctggcccagctgcccgtgaaccagcagctgggcaagctgatcgtgctgggccacgtgttcggctgcctggacgagtgcctgatcatcgccgccgccctgagcctgaagaacttcttcgccatgcccttcagacagcacctggacggctacagaaacaaggtgaacttcagcggcagcagcaagagcgactgcatcgccctggtggaggccttcaagacctggaaggcctgcagacagaccggcgagctgagataccccaaggacgagctgaactggggcagactgaactacatccagatcaagagaatcagagaggtggccgagctgtacgaggagctgaagaccagaatcagccagttcaacatgcacgtggacagcagaagacccgtgatggaccaggagtacatctacaagcagagattcatcctgcaggtggtgctggccggcgccttctaccccaactacttcaccttcggccagcccgacgaggagatggccgtgagagagctggccggcaaggaccccaagaccaccgtggtgctgaagcacatccccccctacggcttcctgtactacaagcagctgcagagcctgttcagacagtgcggccaggtgaagagcatcgtgttcgacggcgccaaggccttcgtggagttcagcagaaaccccaccgagagattcaagaccctgcccgccgtgtacatggccatcaagatgagccagctgaaggtgagcctggagctgagcgtgcacagcgccgaggagatcgagggcaaggtgcagggcatgaacgtgagcaagctgagaaacaccagagtgaacgtggacttccagaagcagaccgtggaccccatgcaggtgagcttcaacaccagcgacagaagccagaccgtgaccgacctgctgctgaccatcgacgtgaccgaggtggtggaggtgggccacttctggggctacagaatcgacgagaacaacagcgagatcctgaagaagctgaccgccgagatcaaccagctgaccctggtgcccctgcccacccacccccaccccgacctggtgtgcctggcccccttcgccgacttcgacaagcagagatacttcagagcccaggtgctgtacgtgagcggcaacagcgccgaggtgttcttcgtggactacggcaacaagagccacgtggacctgcacctgctgatggagatcccctgccagttcctggagctgcccttccaggccctggagttcaagatctgcaagatgagacccagcgccaagagcctggtgtgcggcaagcactggagcgacggcgccagccagtggttcgccagcctggtgagcggctgcaccctgctggtgaaggtgttcagcgtggtgcacagcgtgctgcacgtggacgtgtaccagtacagcggcgtgcaggacgccatcaacatcagagacgtgctgatccagcagggctacgccgagctgaccgaggagagctacgagagcaagcagagccacgaggtgctgaagggcctgttcagcaagagcgtggagaacatgaccgacggcagcgtgcccttccccatgaaggacgacgagaagtacctgatcagaatcctgctggagagcttcagcaccaacaagctgggcacccccaactgcaaggccgagctgcacggccccttcaacccctacgagctgaagtgccacagcctgaccagaatcagcaagttcagatgcgtgtggatcgagaaggagagcatcaacagcgtgatcatcagcgacgcccccgaggacctgcaccagagaatgctggtggccgccagcctgagcatcaacgccaccggcagcaccatgctgctgagagagaccagcctgatgccccacatccccggcctgcccgccctgctgagcatgctgttcgcccccgtgatcgagctgagaatcgaccagaacggcaagtactacaccggcgtgctgtgcggcctgggctggaaccccgccaccggcgccagcatcctgcccgagcacgacatggagctggccttcgacgtgcagttcagcgtggaggacgtggtggaggtgaacatcctgagagccgccatcaacaagctggtgtgcgacggccccaacggctgcaagtgcctgggccccgagagagtggcccagctgcaggacatcgccagacagaagctgctgggcctgttctgccagagcaagcccagagagaagatcgtgcccaagtggcacgagaagccctacgagtggaaccaggtggaccccaagctggtgatggagcaggccgacagagagagcagcagaggcaagaacaccttcctgtaccagctgcacaagctggtggtgctgggcacctag

SEQ ID NO: 245348 - DNA, 4149 bp, Artificial Sequence
  derived and/or modified sequence
atgttacggaaacttacaatcgagcagatcaatgattggtttactattggtaagactgtcacgaatgtcgagttgctgggggctcctccagctttccctgcaggcgccgctagggaggaggtgcagcgacaggatgtggcccctggcgcaggtcccgctgcccaggcccccgcactcgctcaggcacctgcccgtccagccgccgccttcgagcgttcactcagtcagcgctcttcagaggtagagtatataaacaagtatcgccagctggaggcccaggagctcgacgtgtgccgtagtgttcagcctacttctgggcctggcccaagacccagcctggccaagctcagcagcgttacatgcattcccggaactacttataagtaccccgacctacccatctccagatataaagaggaggtagtgagcctgattgagtctaatagtgttgtgataattcacggagccactgggagcggaaaatccactcaattgccccaatacattctggatcattatgtacagcggagcgcctactgttctatcgtcgtcacacagcctagaaagattggcgctagcagcattgcccggtggataagtaaagagagggcttggaccttgggcggcgttgtcggctatcaggtgggactcgagaagatagccaccgaggatacaaggttgatttatatgactacgggcgtgctgcttcagaagatcgtgagtgcgaaatctctgatggaattcacccacatcatcatcgatgaggtgcatgaaaggacggaagagatggatttcttgctactggttgtgcggaagctgctgcgaacaaattcaaggtttgttaaggttgtattgatgtcagcaacaatctcatgtaaggagttcgcagattattttgccgtaccagtgcaaaataagatgaaccctgcctacatctttgaagtagagggtaaaccacattcggtggaggagtattaccttaatgacttagagcacatccaccactccaagctttcaccccatctgttggaggaacccgttattactaaagacatctacgaggttgccgtttccctgatccagatgtttgatgatttggatatgaaggagagcgggaacaaagcatggtcaggtgcccagttcgtcctggagcgctcctccgtgttggtgtttctgccagggttgggcgaaatcaactatatgcacgagttactgacttctctagtccacaaacgcctccaggtgtatccactgcactcatcagtcgccctggaagaacagaataacgtgtttcttagcccggtcccaggatatagaaaaattatattgtctaccaacatcgccgaaagctcagtgacagttcccgacgtcaagtacgtgattgacttctgcctgaccagaactctcgtttgtgacgaggacaccaactatcagtccttgcgcctgtcgtgggccagcaaaactagttgcaatcagcgaaagggcagggcagggcgcgtgagccgtggatattgctaccgtctggtgcataaggatttttgggataactcaatccccgaccatgtagtgccagagatgctcaggtgcccccttgggtctacaatcctgaaggtcaagctcctggatatgggggagccgagggcattactagctaccgcactcagtccacccgggctcagtgatattgagagaacaattctgctgctcaaggaggtgggggccctggcggtgagtgggcagagagaggatgagaacccacatgacggggagctcactttcctcggccgggtccttgctcagctccccgtgaatcagcagttaggcaagcttattgtgctagggcatgtcttcggctgccttgacgagtgcctgataattgccgccgctttaagtctcaaaaacttcttcgccatgccctttcgccagcatctagatggctaccgcaataaggtgaacttttcaggttcatcgaagagtgattgtatcgcactggttgaggctttcaagacatggaaagcctgcaggcagactggggaattgagataccccaaggatgagctgaattggggacgcctgaactatattcagattaagagaatacgagaagtcgcagagctctacgaagagttaaaaacccggatctcgcagttcaatatgcatgtcgactcccggcggccagtgatggatcaggagtacatatataagcagcggttcattttacaggtggtgttggctggagctttctaccccaactatttcacgttcggccagccagacgaggaaatggccgttcgcgaactcgctggtaaggacccaaaaacaactgtggttctgaaacatatacccccttacggtttcctatattacaagcagctccagagtttgttccggcaatgcggacaggtgaaaagcatcgtgttcgacggcgctaaggccttcgtggagttcagcaggaaccctacagagagattcaagactctgcctgctgtctacatggccattaagatgtctcaactgaaggtgtctctggagctgtcagttcattccgccgaggagatcgagggcaaggtacagggcatgaacgtctcaaagctgcgcaatactagggtaaacgtcgatttccagaaacagaccgtcgaccccatgcaggtctcgtttaacacgtcagatcggtctcagacagtaacggatctgctgctcactattgatgtgacagaggttgttgaagtgggacatttttggggctatcgcatcgacgaaaataactccgagatactgaagaagctgaccgctgagatcaaccagcttacgctggtccctctccccacacatcctcaccctgacctggtgtgtctcgcgccctttgcggatttcgataaacagagatattttcgcgcccaggttctgtacgtcagtgggaattctgcagaggtgttcttcgtggattacggcaataaatcgcacgttgaccttcacttactgatggagatcccctgtcagttccttgagctgccttttcaggctctcgaatttaaaatctgtaagatgaggccgtccgctaagtcactcgtctgtggaaagcactggagtgacggagccagccagtggttcgcttccctcgtcagcggatgcactctgttggttaaggttttctctgtcgtgcactccgttttgcatgtggacgtttaccagtactctggggttcaggacgcgattaacatcagagatgtgctcattcagcaaggctacgctgagctcacagaggagtcgtatgaatctaagcagagtcacgaggtgctcaagggtttgtttagcaagtcagtagaaaacatgaccgacggctcagtgccgtttccgatgaaggacgacgagaagtatcttatccggatcctcctcgaaagtttcagtacgaacaaactgggtacacctaattgtaaggcggagcttcacggacctttcaacccctatgagctgaagtgtcatagtctcacaagaatctccaaattccggtgcgtctggatcgaaaaggaaagcataaactctgtcatcattagtgatgcccctgaggatctccaccagcgcatgctggtggctgctagcctgagcattaatgctactggctctaccatgcttcttcgtgagacatcccttatgccccacatacctggcctacctgcgctgctgtcaatgttgtttgcccccgtgattgaactgcgaatcgatcagaacgggaaatattacaccggggtgctgtgcggcctggggtggaatccagctacaggagcgtcaatcctccctgagcacgatatggaactagcctttgacgtgcagttctctgtggaagatgtggttgaggtcaacatactgcgagcagccatcaacaagctcgtatgcgacggtcccaatggctgtaagtgtctaggtcccgagcgtgtggcccaattgcaggatatagcccgtcagaagctcctggggctgttttgtcagtcaaagcctcgcgagaagatagtaccgaagtggcacgagaagccctacgagtggaatcaagtggatccaaagctagtgatggagcaagccgacagggaaagttccagggggaagaatactttcctttaccagctgcataagttggtggtgctcgggacttag

SEQ ID NO: 245349 - DNA, 4149 bp, Artificial Sequence
  derived and/or modified sequence
atgctgaggaagctgaccatcgagcagatcaatgactggttcaccatcggcaagacagtgaccaacgtggagctgctgggcgcccccccagccttccctgctggggccgcccgggaggaggtgcagaggcaggatgtggcccctggggccggccctgctgcccaggccccagccctggcccaggccccagcccggcctgctgctgcctttgagaggagcctgagccagaggagcagcgaggtggagtacatcaacaagtaccggcagctggaggcccaggagctggatgtgtgccgctctgtgcagcccaccagcggccctggcccccggcccagcctggccaagctgagctctgtgacctgcatccctggcaccacctacaagtacccagacctgcccatcagccgctacaaggaggaggtggtgtccctgattgagagcaacagcgtggtgatcatccacggggccactggaagtggcaagagcacccagctgccccagtacatcctggaccactacgtgcagaggtctgcctactgcagcatcgtggtgacccagcccaggaagatcggggccagcagcatcgcccgctggatcagcaaggagcgggcctggaccctgggcggcgtggtgggctaccaggtgggcctggagaagatcgccacagaggacaccaggctcatctacatgaccaccggggtgctgctgcagaagatcgtgtctgccaagagcctgatggagttcacccacatcatcattgatgaggtgcatgagaggacagaggagatggacttcctgctgctggtggtgaggaagctgctgcggaccaacagcagatttgtgaaggtggtgctgatgtctgccaccatcagctgcaaggagtttgctgactactttgctgtgcctgtgcagaacaagatgaacccagcctacatctttgaggtggagggcaagccccacagcgtggaggagtactacctgaatgacctggagcacatccaccacagcaagctgagcccccacctgctggaggagcccgtcatcaccaaggacatctatgaggtggccgtgtccctcatccagatgtttgatgacctggacatgaaggagagcggcaacaaggcctggagcggggcccagtttgtgctggagaggagctctgtgctggtgttcctgcccggcctgggggagatcaactacatgcatgagctgctgaccagcctggtgcacaagaggctgcaggtgtaccccctgcacagctctgtggccctggaggagcagaacaacgtgttcctgagccctgtgcccggctacaggaagatcatcctgagcaccaacattgctgagagctctgtgacagtgcctgatgtgaagtatgtgattgacttctgcctgaccaggaccctggtgtgtgatgaggacaccaactaccagagcctgcggctgtcctgggccagcaagaccagctgcaaccagaggaagggccgggccggccgggtgtcccggggctactgctaccgcctggtgcacaaggacttctgggacaacagcatcccagaccacgtggtgcctgagatgctgcgctgccccctgggcagcaccatcctgaaggtgaagctgctggacatgggagagccccgggccctgctggccacagccctgagccccccaggcctgagtgacatcgagaggaccatcctgctgctgaaggaggtgggcgccctggccgtgtctggccagcgggaggatgagaacccccatgatggagagctgaccttcctgggccgggtgctggcccagctgcctgtgaaccagcagctgggcaagctgattgtgctgggccacgtgtttggctgcctggatgagtgcctgatcatcgccgccgccctgagcctgaagaacttctttgccatgcccttccggcagcacctggatggctacagaaacaaggtgaacttcagcggcagcagcaagagtgactgcatcgccctggtggaggccttcaagacctggaaggcctgccggcagacaggagagctgcgctaccccaaggatgagctgaactggggccgcctgaactacatccagatcaagaggatccgggaggtggccgagctgtatgaggagctgaagacccgcatcagccagttcaacatgcacgtggacagccggcggcctgtgatggaccaggagtacatctacaagcagcgcttcatcctgcaggtggtgctggccggggccttctaccccaactacttcaccttcggccagccagatgaggagatggctgtgcgggagctggccggcaaggaccccaagaccaccgtggtgctgaagcacatccccccctacggcttcctgtactacaagcagctgcagagcctcttccggcagtgtggccaggtgaagagcatcgtgtttgatggagccaaggcctttgtggagttcagcaggaaccccacagagcgcttcaagaccctgcctgctgtgtacatggccatcaagatgagccagctgaaggtgtccctggagctgtctgtgcacagcgctgaggagattgagggcaaggtgcagggcatgaatgtgtccaagctgaggaacaccagggtgaatgtggacttccagaagcagacagtggaccccatgcaggtgtccttcaacaccagtgacaggagccagacagtgacagacctgctgctgaccattgatgtgacagaggtggtggaggtgggccacttctggggctacagaattgatgagaacaacagcgagatcctgaagaagctgacagctgagatcaaccagctgaccctggtgcccctgcccacccacccccacccagacctggtgtgcctggccccctttgctgactttgacaagcagcgctacttccgggcccaggtgctgtatgtgtctggcaacagcgctgaggtgttctttgtggactatggcaacaagagccacgtggacctgcacctgctgatggagatcccctgccagttcctggagctgcccttccaggccctggagttcaagatctgcaagatgaggccttctgccaagagcctggtgtgtgggaagcactggagcgatggagccagccagtggtttgccagcctggtgtctggctgcaccctgctggtgaaggtgttttctgtggtgcacagcgtgctgcacgtggatgtgtaccagtacagcggcgtgcaggatgccatcaacatcagagatgtgctgatccagcagggctacgccgagctgacagaggagagctatgagagcaagcagagccatgaggtgctgaagggcctcttcagcaagtctgtggagaacatgacagatggctctgtgcccttccccatgaaggatgatgagaagtacctgatccgcatcctgctggagagcttcagcaccaacaagctgggcacccccaactgcaaggccgagctgcacggccccttcaacccctatgagctgaagtgccacagcctgacccgcatcagcaagttccgctgtgtgtggattgagaaggagagcatcaacagcgtcatcatcagtgatgcccctgaggacctgcaccagaggatgctggtggccgccagcctgagcatcaatgccaccggcagcaccatgctgctgcgggagaccagcctgatgccccacatccctggcctgcctgccctgctgtccatgctgtttgcccctgtgattgagctgagaattgaccagaatggcaagtactacacaggagtgctgtgtggcctgggctggaacccagccaccggggccagcatcctgcctgagcatgacatggagctggcctttgatgtgcagttctctgtggaggatgtggtggaggtgaacatcctgcgggccgccatcaacaagctggtgtgtgatggccccaacggctgcaagtgcctgggccctgagcgggtggcccagctgcaggacatcgcccggcagaagctgctgggcctcttctgccagagcaagccccgggagaagatcgtgcccaagtggcatgagaagccctatgagtggaaccaggtggaccccaagctggtgatggagcaggccgaccgggagagcagccggggcaagaacaccttcctgtaccagctgcacaagctggtggtgctgggcacctag

SEQ ID NO: 245350 - DNA, 4149 bp, Artificial Sequence
  derived and/or modified sequence
atgctgcggaagctgaccatcgagcagatcaacgactggttcaccattggcaagaccgtgacaaacgtggagctcctcggggctcccccagcttttcccgccggcgcagcccgtgaggaagtgcagaggcaagacgtcgcccccggggctggacctgcagcccaagctccagcactggcgcaggccccagcccggccagcagcagccttcgagcgttccttgagtcaaagaagcagcgaagtagaatacatcaacaaatataggcagctcgaggctcaggagcttgacgtgtgcagatccgtccagccaaccagcggccctgggccccgtccctccctggccaagctttcgagtgtcacctgcatcccaggcaccacctacaaataccctgatctccctatcagccgctacaaagaagaggtggtgagcctgatcgaaagcaactctgtggtcatcatccatggtgcaaccggctcaggaaagagtacccagctgccccagtacattttggatcactacgtgcagagaagcgcttactgctccatcgttgtcacacaaccccgcaaaataggggcatcgagcatcgccagatggatttccaaggaaagggcttggactctgggcggggtggttggataccaggtgggtctggaaaaaatagcaaccgaagatacacggcttatttacatgacaacgggggtactcctacagaaaatcgtctccgccaagtcattaatggagtttacccatattatcattgacgaggtgcacgagcggaccgaggaaatggacttcctactcttggtggtgaggaaactgctgaggaccaatagccgctttgtgaaagtggttttgatgtcagccacaatcagttgtaaagagttcgccgactatttcgctgtccccgtgcaaaataagatgaatcctgcttatattttcgaggtggagggaaaacctcactcggttgaagaatattatctgaatgacctagaacatatacaccacagtaaactgagtcctcatctgctcgaggagcctgtgattactaaagatatctatgaagtggcggtgtcactaattcaaatgttcgacgatttagacatgaaggagagcgggaacaaggcatggtccggagcccaatttgtgcttgagcggtcgagtgtgctggtatttctgcccgggctcggggaaatcaactatatgcatgagctcctcacaagcctggtgcataagcggctgcaagtataccccctccacagctcagtcgcacttgaggagcagaacaatgtatttctgagtcctgtgccagggtatcgaaaaataattttatctacgaacatagccgaatcatccgtcactgtgcccgatgtaaaatacgtgatagatttctgcttgacacgcaccttggtgtgcgatgaggacaccaactatcagtctctcaggctgtcctgggcctctaaaacctcatgcaaccagcgaaaaggcagggccggacgggtctcgagagggtattgctacagactagtgcacaaggacttttgggataatagtatcccagatcacgttgtacctgaaatgttgcggtgccctttaggctcaactatcttgaaggtaaagttactggatatgggggagcccagagccctgctggccacagccctgtctcctcccgggctgagcgatatcgagagaactatcttgctgctgaaggaggtaggagccctggccgttagtggccagcgagaggacgaaaaccctcacgatggggagctaaccttccttggccgggttctggcccaactgcccgtgaaccagcagttggggaaacttatcgtattagggcatgtgtttggctgcttggacgagtgtctgataatcgccgcagcgctttctctgaaaaattttttcgccatgccatttcggcagcatcttgacggctataggaataaagtgaacttctctggatcctccaagagcgactgcattgccctggttgaagccttcaaaacctggaaggcctgccggcaaacgggtgagctgcgctacccaaaggatgagctcaattggggacgccttaattatatccaaatcaaaagaattcgcgaggtggccgaattatacgaagaacttaaaaccaggatctcacagttcaacatgcatgtggatagccggcgccctgtcatggaccaagaatacatttacaagcagcgattcattttacaggtcgttttagcaggggccttttatcctaactactttacttttggccagcccgacgaagagatggcggtaagagaactggcaggaaaggatcctaaaacaaccgtggtgctgaagcacatacccccctacggcttcttgtactataagcagctccagtccttatttcggcagtgtggacaggtgaagagtatagtgtttgacggcgctaaagcttttgtggagttcagcaggaacccaacggagcgttttaaaacattacccgccgtctatatggccattaagatgagccagctcaaggtcagcctcgaattatccgttcattctgcggaggaaatagaagggaaagtacaaggcatgaacgtatctaagctcagaaacacacgggtcaacgtagactttcagaaacaaactgtggatcctatgcaggtatccttcaatacatccgatcgatcgcagaccgttaccgacctgttactcacgatcgatgtcaccgaagttgtggaagtaggtcacttttggggctaccggatcgatgagaataatagcgagattttgaagaagctgactgctgaaatcaatcagctgactcttgtaccccttcctactcaccctcatccagatttggtttgtctcgccccttttgccgactttgacaagcaaaggtattttcgggctcaggtgttatacgtctcggggaactcagccgaagtatttttcgtggactacggaaataaatcccacgtggacctccatctacttatggagatcccgtgccagttcctggagctcccattccaggcgctggaatttaaaatttgtaaaatgagaccttcagctaagagtttagtgtgtgggaaacactggagcgatggggcgtcacaatggttcgcttccctggtctccggttgcactctgttagtgaaggtgttcagcgtagtccacagtgtcctacatgtggatgtgtaccagtacagcggtgtgcaggatgccatcaatattagggatgttctcatacagcaggggtacgcggaactaaccgaggaaagctacgagagtaaacagtctcacgaggtactgaagggcctcttttcaaagtctgtcgaaaatatgaccgatggctccgtccctttccctatgaaagacgacgagaagtacttgatccgcatcctactggagtccttctcgaccaacaagctgggaaccccgaactgcaaggctgagttgcacggccctttcaatccatacgagcttaagtgtcattctctgacacgtatctctaagttcaggtgcgtttggattgagaaggagtctatcaattcggtgatcatcagtgatgctccagaggatcttcaccagagaatgctcgttgcggcttcactcagcattaatgccacagggagtactatgctgttgcgggagacaagccttatgcctcacataccagggctccccgcattgttaagtatgctgttcgccccagtcatagagcttcggattgaccagaacgggaaatattacacaggagttctgtgtggcctgggatggaatccggctaccggtgcgtctatactgcctgagcacgacatggagctggccttcgatgtgcagttctccgttgaggacgtagtggaggtcaacatcctgcgcgctgccatcaacaaattggtgtgtgatggacccaacggatgcaaatgcctgggccctgaacgagttgcccagttgcaggatatcgctcggcagaagctcctgggactgttctgtcaaagtaagcccagggagaagattgtacccaaatggcatgaaaaaccgtatgaatggaatcaagtggatcctaaacttgtgatggagcaggccgatcgcgagtcttctaggggtaagaacacttttctttaccagttacacaagcttgtggtcttggggacatag

SEQ ID NO: 245351 - DNA, 4782 bp, Artificial Sequence
  derived and/or modified sequence
gccgcggagacccggcagttgggggatgccgacgcctgggccttgaggatgctgcggaagctcaccatcgagcagatcaacgactggttcaccatcggcaagacggtgaccaatgtggagctgctgggcgcgccgcccgccttcccggcaggggcggccagggaggaggtgcagcgccaggacgtggcccccggcgctggtcccgcggcccaggctccggctctggcccaagctccggcccggccggccgctgcgttcgaaaggtcactcagccaaaggagctcagaagtagagtatattaacaaatacagacagctcgaagcacaagagcttgatgtgtgtcgcagtgtccaaccaaccagtgggccaggtccaaggccatctttggctaaattaagcagtgtgacatgcatcccagggacaacttataaatatcctgatttgcctataagtcgatacaaggaagaggttgtgtctttgatagaaagtaattccgtggtgattatccatggggccacgggaagcggtaaaagcactcagctcccgcagtatatcttggaccactacgttcagcgctccgcctactgcagcattgtggtcacccagccccggaagataggggcaagcagcatcgccaggtggatcagtaaagagcgtgcctggaccctgggaggtgtggtgggctaccaggtagggctagagaaaatagcaacagaggacaccaggctaatttatatgacaactggagtcctgcttcagaaaatagttagtgccaagagtttgatggaattcacacatatcatcattgatgaagtacacgaacgaacagaagaaatggatttcctgctattggtagtccgcaaactcttaagaacaaattcacgttttgtgaaggtggtcctgatgtcggctaccatcagctgtaaagagtttgcagactactttgctgttcctgttcaaaacaagatgaatcctgcatatatttttgaagtggaaggcaagccccattcagttgaagagtattatcttaatgatttggagcacattcatcatagcaagctctctcctcatctcctggaggaaccggtgataactaaggatatatatgaagttgctgtctctctcattcagatgtttgatgacttggatatgaaggagagtgggaacaaggcttggtcgggggcccagtttgtgttggagcgaagcagtgtgttggtgtttttgccaggtctgggtgaaataaattatatgcatgaacttctcacaagcctggttcataaaaggttgcaggtctatccactccattcaagtgtggctttagaagaacagaataatgtctttttaagtccagtccctgggtacagaaagattattctgtccaccaatattgcagagagttctgtcacagttccagatgtcaaatatgttatagatttttgtttgactagaactttggtctgtgatgaagatacaaattatcagagtctgcgattgagttgggcttctaaaaccagctgtaatcagagaaaaggccgtgctggacgagtgtctagagggtactgttaccggctggtacacaaggatttctgggacaactccatccctgatcatgttgttcctgagatgttgcgttgtccattaggaagcacgatcttgaaagtgaaattacttgacatgggtgagccgagagctctgctggccactgccctttccccgcctggtctgagtgacattgagcgcaccatccttctactaaaggaggttggagcacttgcagtgagtgggcagagagaagatgaaaacccccatgatggtgaattgaccttcttaggaagagttttagcccaacttcctgtaaatcagcaacttggtaaactcatagtccttggacatgtatttggatgtctagatgaatgtcttattatagcggcagctctttctttgaagaatttttttgcaatgcctttccggcagcatctcgatggatataggaacaaagtgaatttctctggcagtagcaagagtgactgtattgcacttgttgaggcatttaaaacatggaaggcttgcagacagacaggggagctgcggtacccgaaggatgaacttaattggggacggttaaattacattcaaatcaagagaattagagaggtggctgaattatatgaagaattgaagactagaatctcacagttcaacatgcatgttgattctcggcgacctgtcatggaccaagagtatatatataagcagcgattcatcctacaggttgtattggcaggtgctttctatccaaattactttacttttggacagccggatgaggagatggcggtgagggagctggctggcaaggaccccaagacaactgtcgtgttgaaacacattcctccctatggatttctttactataaacaactacagtctctctttagacagtgtggtcaagtcaaatccattgtatttgatggtgcaaaagcctttgtggaattctcacgaaatccaacagagagatttaaaacccttcctgcagtatatatggcaattaagatgtctcaactaaaagtttcacttgaactcagcgttcattctgcagaggaaattgaagggaaggtgcaaggcatgaacgtctcaaagctcaggaacacaagggtgaatgtggacttccagaagcagacggtagatcctatgcaagtctcctttaacacatcagacaggtcccagacagttacagatctccttctaactattgatgtcacagaggtggttgaagtgggacacttttggggatacaggattgatgaaaacaactcagagattctgaaaaagcttactgctgaaatcaaccaactgacgctggtgcccttgcccactcacccacatccagacttggtctgtctggcaccttttgctgattttgataaacaacgctactttagagctcaagtcctttatgtttctggaaattctgctgaggtattctttgtagattatggcaataagtctcatgtagatctacatcttttgatggagattccctgtcaatttcttgaacttcctttccaggctttggaatttaagatttgcaaaatgagaccatcagcaaagtctcttgtttgtggcaagcactggagtgacggggccagccagtggttcgcctctctggtgagcggctgcaccctccttgtgaaggtcttctctgtggtgcacagcgtcctgcacgtggatgtgtaccagtactcaggggtccaggatgccatcaacataagagacgtcctcatccagcagggctatgccgagctcacggaggagtcctacgagtccaagcaaagccatgaagttctcaagggcctcttttccaagtcagtagaaaacatgacagatggctctgtgccctttcccatgaaagacgacgagaaatatctcatccggattttgttagagagcttttctaccaataaactgggtactccaaactgtaaggcagaacttcacgggccttttaacccttatgaactaaagtgccatagtttgaccagaatatccaaattcaggtgtgtttggattgagaaggagagcatcaactctgtcattatcagtgacgcccctgaagaccttcaccagagaatgctggttgcagcttccctttccatcaatgcgactggatctacgatgctgctgagagaaacctctctgatgcctcatatccctggcctcccggctctcctcagcatgttattcgcaccggtgatagagttaaggattgatcagaatggcaagtactatactggagtcctttgtggtttggggtggaatccagctacaggggcttccatactgcccgagcacgacatggagcttgcgtttgacgttcaattcagcgtggaggatgtcgtcgaggttaatattctcagggctgctattaacaagctagtctgtgatggaccaaatggatgcaagtgtcttgggccagagagagttgcgcagcttcaagacattgcccgtcagaagcttttaggtttgttctgtcagtcaaaaccaagggagaagattgttcccaagtggcatgaaaagccctacgagtggaatcaggttgatccaaagctggtcatggagcaggccgaccgtgagagcagcagagggaagaacacctttctctaccagctccacaaactggttgtgctcggcacctgagcatgtccacaggtggcctccagcacacccctcaggaagctgtggaggctggattccaggctccctccgcagactgactttcctctgtgtctgggtgttacagtctgtgcccactgcatcctaaaggccttttctttcttcttttctctttgggtgatagtcagagagtggtgtttttgttcaggtgggaaggattggaaactctagtcttttctagaaacagaaaatcactgtattaaatattttggaaagattgttctgaaagaagtctgtttggataaagagctgtattttgctttaaatttattaaggtaaatataagtagttaatcttagatgtaaggttccagaatgtgcttacatattctgttctgttacagtgatttaaaccagtagtataggaaaaaacttaaaaaaacaaaaaaaccatgtagtattttctgatttttttttccatgagggaaaatatctaatttttataagactaagttgagttatacttcttggttcacattttggaaatcagagattacagattacatggccatagcttatctgtgttaaaacaataaaagcattaaatgaa

SEQ ID NO: 245352 - DNA, 4149 bp, Artificial Sequence
  derived and/or modified sequence
atgctgcgcaagctgacaatcgagcagatcaacgattggtttacaatcgggaagacggtgactaacgtcgaactcctcggagctccgccagctttccccgcaggagctgcgagggaagaagtgcagagacaggacgttgctcctggagcaggccctgctgcacaggctcccgctcttgctcaggcccctgcaaggcccgctgccgcatttgagcggagtctcagtcagaggtctagcgaagtggaatacataaataagtacaggcagttggaagcccaggaattagatgtctgtcgaagcgtgcagccaacttcaggcccagggcctcgcccatccctcgctaaactctctagtgtcacctgcattccgggtaccacttataaatatccagacctgccaatatccaggtataaagaggaggtagtgtccttgatagaatctaattccgtggttataatccacggagctaccggttcaggcaaatcaacccagctgcctcagtatattctcgaccactatgtccaaagatctgcatactgcagcattgtcgtgacccagccacggaagattggggctagctcaattgccaggtggatcagcaaagagagagcttggactctgggcggagtggtgggttatcaagttggcttggaaaaaatagccacagaagacactcggctgatttacatgaccacaggcgtgctactccaaaaaattgtgtctgccaaaagcttgatggagttcacccatattatcatcgatgaagtccacgaacgcactgaggagatggactttctgctgcttgtggttagaaagctgctcagaactaactcccgttttgtcaaggtggtgctaatgtcggcaactatttcttgcaaggagtttgcagactatttcgcagttccggtccagaacaaaatgaatccggcatacattttcgaagtggagggcaagccacactccgtcgaagaatactatctgaatgacttggaacacatccatcattccaagctgtcaccccatctgcttgaagaaccagtgattacaaaagacatttacgaggtcgccgttagtctgatccagatgtttgacgatctggatatgaaggagagcgggaacaaggcttggtctggtgcacagttcgtcctcgagcggtcctccgtcctagtctttttacctggcttaggcgaaattaattacatgcacgagctgctcacatcgctggtgcataagaggctccaggtgtatcctctacactctagtgtggcactcgaggaacaaaacaatgtctttctgtcccccgtgcccggttaccgcaagattattctgtctactaacatcgccgaaagctcagtgaccgtcccagatgtaaaatatgttatagatttctgccttactagaactttggtctgcgacgaggatacaaactatcaatcgctgcggctgtcttgggcaagtaaaacatcctgcaaccagcggaaggggcgtgcaggtagagtgtcgaggggctattgttatcgactggtgcataaagatttctgggataactctatcccagatcatgtagtgccagagatgttacgttgtcccttgggctccacaattctgaaggttaagctcttggacatgggagaacctcgagcattactggcgactgcactgagcccgccaggtttatccgatatagagcgtactatcttactgctcaaggaagttggcgctctggctgtctcaggccagcgagaagacgaaaatccccacgacggcgagctgacttttttgggcagggttctagcacagctgccagtgaaccagcaactaggaaaactcatcgtgctcggacacgtgtttggctgtctggacgagtgcctgattatcgctgccgcactgagccttaagaatttttttgcgatgccttttcgccagcaccttgatggttaccgaaacaaggtgaacttttccggcagcagcaagtctgattgcatagctttagtagaagcctttaaaacttggaaggcttgtcgccagaccggtgaactgcgttatcctaaagacgagttaaactggggcaggcttaactatatccagattaagagaattcgagaggttgctgaactgtacgaggaattgaaaacccggatatctcagtttaacatgcatgttgacagtagaagaccggtgatggatcaggagtatatttacaaacagcggttcattttacaggtcgtgttggctggcgctttctacccaaattatttcacctttggccagcctgatgaggaaatggccgtgagagaattggccggaaaagaccccaagaccacagtggtgctgaaacacattccaccttacgggttcctgtactataaacagctgcagagcctgttcagacagtgcgggcaggtcaagtcaattgttttcgatggtgccaaagcttttgtcgaattttctagaaatccaactgagagattcaaaaccctgcccgctgtatacatggctatcaagatgtctcagctgaaggtgagtctggagctgtcagtacattccgccgaggagatagaagggaaggttcaaggaatgaatgtgtccaaactaagaaacactcgcgttaatgtagacttccagaagcagaccgtcgacccaatgcaagtgtcgtttaacacatccgatcgaagccagaccgtaactgatcttttactgacaattgacgtaacagaggttgtggaggttggacacttttggggttaccgtatagatgagaacaacagcgagatactgaagaagttgacagctgaaataaatcagctgacgcttgtcccgctcccaacgcatccacatcccgatctggtctgccttgcccctttcgctgactttgataaacagagatattttagggcacaggttctctatgtgtcgggcaattctgccgaagtgttttttgtggactatgggaataagtcgcacgtggacctccatctcttaatggaaatcccatgtcagtttttggaactgccttttcaagctctagaatttaaaatctgtaagatgcgcccaagtgctaagtcattggtttgtggcaagcactggtcagatggcgcaagccaatggtttgcttccctcgtttccgggtgcacacttctggtcaaagtcttcagcgttgtgcactcagttctacacgtagatgtttatcagtacagcggagttcaggatgccattaacatcagggacgttctcatccagcagggctatgctgaactcaccgaggaaagctacgagagtaagcagtctcacgaggtgctgaagggtctatttagcaaaagcgttgaaaatatgactgacggctccgtgccatttcccatgaaagacgatgagaagtatttgatcaggattctgttagagtctttttctaccaataaactgggtacgccgaactgcaaggctgagctgcatggtcccttcaacccttatgagctgaagtgtcatagcttaactcgcatttccaaatttaggtgcgtgtggattgagaaggagtctatcaattccgtgattatatctgacgccccagaagatctccaccagaggatgctagtcgctgcctctcttagcattaacgctactggtagcaccatgctgcttagggagacctccctcatgccccatatccccggactcccagccctactctcaatgctctttgcccctgtgatagaactgaggattgatcagaatggaaaatattacaccggggtcctgtgtggattgggatggaatcccgctaccggcgcttcgatcctccccgagcacgacatggagctggcattcgatgtccaattcagcgtagaagatgtggtcgaggtgaacattctgcgcgcagccattaacaaactcgtctgtgacgggcctaatgggtgtaagtgtttgggccctgaaagggttgcccagctgcaggatatcgccaggcaaaaattattggggctgttctgtcagagtaagcctagggagaagatcgttcccaaatggcatgaaaaaccatatgagtggaaccaggttgatcctaagttagttatggaacaggcagaccgggagagtagcagagggaagaatacgttcctgtaccagttgcacaagttagtcgtgctgggcacctag

SEQ ID NO: 245353 - protein, 1170 aa, Artificial Sequence
  derived and/or modified sequence
MDEETRHSLECIQANQIFPRKQLIREDENLQVPFLELHGESTEFVGRAEDAIIALSNYRLHIKFKESLVNVPLQLIESVECRDIFQLHLTCKDCKVIRCQFSTFEQCQEWLKRLNNAIRPPAKIEDLFSFAYHAWCMEVYASEKEQHGDLCRPGEHVTSRFKNEVERMGFDMNNAWRISNINEKYKLCGSYPQELIVPAWITDKELESVSSFRSWKRIPAVIYRHQSNGAVIARCGQPEVSWWGWRNADDEHLVQSVAKACASDSRSSGSKLSTRNTSRDFPNGGDLSDVEFDSSLSNASGAESLAIQPQKLLILDARSYAAAVANRAKGGGCECPEYYPNCEVVFMGMANIHSIRRSFQSLRLLCTQMPDPGNWLSALESTKWLHHLSVLLKSALLVVHAVDQDQRPVLVHCSDGWDRTPQIVALAKLLLDPYYRTIEGFQVLVEMEWLDFGHKFADRCGHGENSDDLNERCPVFLQWLDCVHQLQRQFPCSFEFNEAFLVKLVQHTYSCLFGTFLCNNAKERGEKHTQERTCSVWSLLRAGNKAFKNLLYSSQSEAVLYPVCHVRNLMLWSAVYLPCPSPTTPVDDSCAPYPAPGTSPDDPPLSRLPKTRSYDNLTTACDNTVPLASRRCSDPSLNEKWQEHRRSLELSSLAGPGEDPLSADSLGKPTRVPGGAELSVAAGVAEGQMENILQEATKEESGVEEPAHRAGIEIQEGKEDPLLEKESRRKTPEASAIGLHQDPELGDAALRSHLDMSWPLFSQGISEQQSGLSVLLSSLQVPPRGEDSLEVPVEQFRIEEIAEGREEAVLPIPVDAKVGYGTSQSCSLLPSQVPFETRGPNVDSSTDMLVEDKVKSVSGPQGHHRSCLVNSGKDRLPQTMEPSPSETSLVERPQVGSVVHRTSLGSTLSLTRSPCALPLAECKEGLVCNGAPETENRASEQPPGLSTLQMYPTPNGHCANGEAGRSKDSLSRQLSAMSCSSAHLHSRNLHHKWLHSHSGRPSATSSPDQPSRSHLDDDGMSVYTDTIQQRLRQIESGHQQEVETLKKQVQELKSRLESQYLTSSLHFNGDFGDEVMTRWLPDHLAAHCYACDSAFWLASRKHHCRDTDRVDQTWNCGNVFCSSCCNQKVPVPSQQLFEPSRVCKSCYSSLHPTSSSIDLELDKPIAATSN

SEQ ID NO: 245354 - DNA, 3513 bp, Artificial Sequence
  derived and/or modified sequence
atggatgaagagactagacactcactcgagtgtatacaggcaaaccaaatctttccaagaaaacagctcatccgtgaggacgaaaatttacaggtccccttcctcgagctgcacggggagtccactgaatttgtgggcagggccgaagacgccatcattgccctgtccaactaccggctccacattaaatttaaagaaagtctggtgaatgtgcccctccagctgatcgagagcgtggagtgccgagacatcttccagctgcacctgacttgcaaggactgtaaagtaattaggtgccaattttctacttttgaacagtgccaagagtggttgaaaaggttaaacaatgccataaggccaccagccaagatcgaagacctcttttcctttgcctaccacgcttggtgtatggaagtgtatgcatctgagaaagagcagcacggggatttatgccggcctggcgagcacgtgacttcacgctttaaaaacgaagtggagaggatgggatttgatatgaacaacgcctggcgcatcagtaatattaacgagaagtataagctgtgtggcagctacccccaggaactcatagtgccagcttggattaccgataaagagctagagagcgtcagttcattcagaagctggaaacgtattccggccgtaatctaccgtcaccaaagtaacggtgccgtgattgcacggtgcgggcagccagaggtgtcatggtggggttggaggaatgccgacgacgaacatctggttcagtcagtggccaaggcgtgtgcctcagatagtaggagctccggttctaaattgtcaaccaggaatactagtagagattttcctaatggcggtgacctgtccgacgtggaattcgattcgagtctaagtaacgcctctggtgcggaatcccttgcaattcagccccaaaaactacttattctggacgcccgatcttacgccgccgctgtggccaacagagcaaagggcggagggtgtgaatgtcctgaatactatcccaattgcgaggtcgtgttcatgggtatggccaacatacacagtatccgtaggagcttccagagcttgcggcttctatgtacgcagatgccggatcccggcaattggttgtcagctctggagtcgactaaatggttacatcatcttagtgtccttcttaaatctgccctgctcgtcgtccacgccgtcgatcaggaccagaggccggttctagtgcactgttccgatggttgggatagaacaccacaaattgtggctctagccaaactgctgctcgacccttactatcggaccatcgaaggcttccaggtcctcgtagaaatggagtggctcgattttggccacaaattcgccgatcggtgcggacatggggaaaacagtgacgatctgaacgaaaggtgtcctgtgttccttcagtggctagactgtgtccatcagcttcagcgacagtttccttgctccttcgaatttaacgaggcctttcttgtcaagctagtacagcacacctacagctgtctgttcggcaccttcctgtgtaataacgccaaggaaaggggcgagaaacatacccaggagcgaacgtgtagcgtctggagcctgctgagagccggcaataaggcattcaagaatttactgtacagctctcaatcagaagccgtgctgtaccccgtatgccatgtaaggaatctcatgctttggagcgctgtgtacctcccgtgcccatcacccaccacccccgtggatgactcttgcgccccgtaccccgcccctggtaccagtcccgatgacccaccattgtctcggctgcctaaaacacggagttacgataacttgactacagcctgtgacaatactgtgcctttggcctctcgccgctgcagtgacccaagcttaaacgagaagtggcaagagcacagaaggtctctagaattgtcgtcattggccggcccaggcgaggaccctctaagcgccgacagcttgggcaaacccacgagggtgcctggcggagccgagctgagcgtcgccgccggcgttgccgagggacagatggagaatattctacaggaagccacaaaggaggagagcggtgtcgaggagcccgcgcaccgagccggcatcgaaatacaggagggcaaggaagatcctctgctggagaaggagtcaagacgaaagacacccgaagcatcagctatcggcctgcatcaggaccctgagttaggcgatgcagcccttcgatcacacctggatatgagttggcctctattctcacagggaattagtgagcaacagtctggactatccgtgctgttgtcctcccttcaggtcccaccaaggggggaagactcactggaggtgccggttgagcaattccgaatagaggagatcgctgaggggagggaagaagccgtcttaccgatcccagtcgacgccaaagtgggttacggaacatcacaaagttgttccctgctccccagccaggttccttttgagactcgaggacctaatgtggatagctctactgatatgcttgtggaggacaaagtcaaatccgtgtctggaccgcagggacaccaccgcagctgcctcgtgaactcgggtaaagaccgacttccccagacaatggaaccatcgccatccgagaccagcttagtggaacggccccaagttgggtcggtggtccatcgcaccagcctcggctccacgctgtccctcacccggtcaccgtgcgctctgccccttgctgaatgtaaggaaggactggtctgtaatggcgcaccagagacagagaatagagcctcagaacagccccccggcctgtcaaccctgcagatgtacccaacccccaatggtcattgcgccaatggagaggcggggcgcagtaaggattcactcagtcggcagctatccgccatgagctgctcgtcggctcacctgcactcccgcaacctgcatcacaagtggctgcacagccatagcggacgcccctcagccactagcagccccgatcaacccagccgtagtcacctcgacgatgatgggatgtcagtctataccgataccattcagcagcgacttcggcaaatcgagtcgggccaccagcaagaggtggagaccttaaaaaagcaggttcaagagctaaagtcaaggctcgaaagtcaataccttacaagtagtctgcactttaatggggattttggcgacgaagtgatgactcgatggctccccgaccacctggccgcccactgctacgcatgcgacagtgcattttggctcgcttcgcgtaagcaccactgtagggatacggaccgcgtggaccagacctggaactgcggtaacgtcttttgctctagctgctgcaaccagaaagtgccggtgccaagccagcagcttttcgagccatccagagtatgtaagagctgctacagctccctccacccaacaagtagcagcatcgatctggagctagataagccaattgcagccacctccaactag

SEQ ID NO: 245355 - DNA, 3513 bp, Artificial Sequence
  derived and/or modified sequence
atggacgaggagacccgccactctctggaatgcattcaggctaatcaaattttcccccgaaagcagctcattcgtgaggacgaaaacctccaggtcccattcctcgagctgcatggcgaatccacggagtttgtcggtcgtgctgaggatgcgattattgcattgtctaactacagacttcacatcaaattcaaggaatctctagtaaacgtgccgttacaattgatagaatctgttgagtgtcgtgatatcttccaactgcacctaacctgtaaggactgtaaagtgataaggtgccagttttctacttttgagcagtgtcaggaatggctgaaaagattaaataacgccattagaccgcccgccaaaatcgaggatctattctcttttgcttatcacgcttggtgcatggaagtctatgccagcgaaaaggagcagcacggcgatctctgccgacctggtgaacacgtcaccagccggtttaagaacgaagtcgagcgtatggggtttgatatgaacaatgcttggcggatatcgaatatcaacgaaaaatataagctttgcgggtcttatccccaggaattgattgttccagcgtggataactgataaggaactggagtccgtgagctccttcagaagctggaaaagaattccagccgtgatctaccgccaccagagcaatggagcagtgatcgcccggtgtggacagcctgaggtgagttggtggggatggcggaacgccgatgacgagcacctggtccagtcagtcgccaaggcatgtgcctcggatagtagaagttccggaagcaagttaagcacgcggaacacatcccgcgatttccctaacggaggagatctgagtgatgttgagtttgactcttcgcttagcaacgcctccggggctgagagcttggcaatccagccccagaagctactcattctcgacgctcgctcatatgcggctgccgtcgcaaaccgggcgaaaggaggcggctgtgagtgccccgagtattatcccaactgcgaggtggttttcatgggcatggcaaacatccacagcattcgtaggagtttccagtcgttaagacttctgtgtacccagatgccggatcccgggaattggctgtctgccttggagtcgacgaaatggttgcatcacctctccgttctattgaagagtgctctcctcgtggtgcacgcggttgatcaggatcagcgaccggtgctcgtgcactgctctgatggctgggacagaacgccacaaatagttgctctggccaagctgcttctcgatccctattaccgaactattgaggggttccaggtgctagtcgaaatggaatggctggacttcggacacaaatttgccgatcgctgtggccacggagagaacagtgacgacttgaacgagcgctgcccggtcttccttcagtggctagattgcgtacaccagctgcagcgccagttcccatgttctttcgagttcaatgaagcctttttagtgaagttggtccagcatacctactcatgcctgttcggtacattcctgtgcaataatgcgaaagaacggggagaaaaacacacccaggaacggacatgttccgtttggagcctgctgagagcaggaaacaaagcttttaagaatctgctctattccagccagagtgaagccgttctataccctgtatgccacgtacggaatctaatgctgtggtctgctgtctatttaccttgcccgtccccaacgactcccgtggacgatagttgcgccccataccccgcacctggaacctcacctgatgaccctcctctttccagacttcccaaaacaaggtcctacgataacctgacaaccgcctgtgataacaccgtccctttggcctccagaagatgtagtgatccatccctcaacgaaaagtggcaggagcatagacggagtttggagctctcctctctcgcgggacctggggaagatcccttgtcagccgattccctgggaaaacccactcgtgtgcccggcggcgctgaactgtcagtcgccgccggggtggctgagggccaaatggagaatattttacaggaggccaccaaagaagagtcgggggtcgaggagcctgctcaccgcgccggtattgaaattcaggaagggaaagaggatccactgctggagaaagagagtagacgaaagactccagaggcatctgcgatcgggcttcatcaggacccagaattgggtgatgccgccttgcgctctcacctcgacatgtcatggcccctgtttagtcaggggattagcgaacagcaatccgggttatccgtgctactgtcaagcttgcaggtccccccaagaggtgaagacagtctcgaggtaccggtcgaacagttccgcattgaagagatagccgagggacgcgaggaggccgtgctgcctatcccggtcgatgccaaagtgggatatggaacctcgcagtcatgctctctcctcccctctcaggtgcctttcgaaaccagagggcctaacgtggacagttcgacagacatgctggtggaggacaaggtgaagagcgtcagtggaccccagggccatcacagaagctgccttgtcaactctgggaaggatagactgcctcagactatggaaccatcacccagcgaaacctctctggtcgagcggcctcaggtgggctccgtagtacaccggacttcccttgggagtaccctgtcccttacacggtctccgtgcgccctccccctcgccgagtgtaaggaagggttggtgtgcaacggagccccagaaaccgagaatcgagccagcgagcagccaccgggcttgagcacccttcaaatgtaccccaccccaaatggccactgcgccaatggcgaagccggtcgctctaaggactccctgtccaggcaactcagcgctatgagctgttctagcgcccacctgcactcccgcaacctgcaccacaagtggctgcactcccactccggcaggccatccgccacttccagccctgaccagccaagccgctcccatctcgatgatgacggaatgagtgtgtacactgacactattcagcagcggttgagacaaatagagtcaggccaccagcaagaagtggagacccttaaaaagcaagttcaggagctcaaaagtcggctcgaatcccaatatttgacctcctccctgcactttaacggggacttcggcgatgaggtgatgacccgctggctcccagaccacttggctgctcactgttacgcctgtgactctgcgttctggctcgccagccggaagcatcactgcagagataccgatagagtggatcagacctggaattgcggcaatgttttttgttcttcttgctgtaaccagaaggtacccgtcccaagccaacagctctttgagcctagtcgggtgtgcaagagctgctatagcagcctgcaccctaccagctcctccatcgatttggagctggacaagccgattgcagctacttccaactag

SEQ ID NO: 245356 - DNA, 3513 bp, Artificial Sequence
  derived and/or modified sequence
atggatgaggagaccaggcacagcctggagtgcatccaggccaaccagatcttccccaggaagcagctgatccgggaggatgagaacctgcaggtgcccttcctggagctgcacggggagagcacagaatttgtgggccgggcagaagatgccatcatcgccctgagcaactaccgcctgcacatcaagttcaaggagagcctggtgaatgtgcccctgcagctgattgagagcgtggagtgccgggacatcttccagctgcacctgacctgcaaggactgcaaggtgatccgctgccagttcagcacctttgagcagtgccaggagtggctgaagaggctgaacaatgccatccggcccccagccaagattgaagatctcttctcctttgcctaccacgcctggtgcatggaggtgtatgccagcgagaaggagcagcacggggacctgtgcaggcctggagagcacgtgaccagccgcttcaagaatgaggtggagaggatgggctttgacatgaacaatgcctggaggatcagcaacatcaatgagaagtacaagctgtgtggcagctacccccaggagctgattgtgcctgcctggatcacagacaaggagctggagagcgtgtcctccttccgctcctggaagaggatcccagctgtgatctaccgccaccagagcaatggagctgtgattgcccgctgtggccagcctgaggtgtcctggtggggctggagaaatgctgatgatgagcacctggtgcagagcgtggccaaggcctgtgccagtgacagccgcagcagcggcagcaagctgagcaccaggaacaccagccgggacttccccaatggaggagacctgagtgatgtggagtttgacagcagcctgagcaatgccagcggggctgagagcctggccatccagccccagaagctgctgatcctggatgcccggagctatgctgctgctgtggccaacagagccaagggcggcggctgtgagtgcccagagtactaccccaactgtgaggtggtgttcatgggcatggccaacatccacagcatccgccgctccttccagagcctgcggctgctgtgcacccagatgccagaccccggcaactggctgagcgccctggagagcaccaagtggctgcaccacctgtctgtgctgctgaagagcgccctgctggtggtgcatgctgtggaccaggaccagaggcctgtgctggtgcactgcagtgatggctgggacaggaccccccagatcgtggccctggccaagctgctgctggacccctactaccgcaccatcgagggcttccaggtgctggtggagatggagtggctggactttggccacaagtttgctgacagatgtggccacggggagaacagtgatgacctgaatgaacgctgccctgtgttcctgcagtggctggactgtgtgcaccagctgcagaggcagttcccctgcagctttgagttcaatgaggccttcctggtgaagctggtgcagcacacctacagctgcctgtttggcaccttcctgtgcaacaatgccaaggagcggggggagaagcacacccaggagaggacctgcagcgtgtggagcctgctgcgggccggcaacaaggccttcaagaacctgctgtacagcagccagagcgaggccgtgctgtaccctgtgtgccacgtgaggaacctgatgctgtggagcgctgtgtacctgccctgccccagccccaccacccctgtggatgacagctgtgccccctacccagcccctggcaccagcccagatgatcctcccctgagccggctgcccaagaccaggagctatgacaacctgaccacagcctgtgacaacacagtgcccctggccagccgccgctgcagcgaccccagcctgaatgagaagtggcaggagcacagaagaagcctggagctgagcagcctggccggccctggagaggaccccctgtctgctgacagcctgggcaagcccaccagggtgcctggaggagctgagctgtctgtggccgccggcgtggccgagggccagatggagaacatcctgcaggaggccaccaaggaggagagcggcgtggaggagcccgcccaccgggccggcatcgagatccaggagggcaaggaggaccccctgctggagaaggagagcaggaggaagaccccagaggccagcgccatcggcctgcaccaggaccctgagctgggagatgctgccctgcggagccacctggacatgtcctggcccctcttcagccagggcatcagcgagcagcagagcggcctgtctgtgctgctgagcagcctgcaggtgcccccaagaggagaggacagcctggaggtgcctgtggagcagttccgcatcgaggagattgctgagggccgggaggaggccgtgctgcccatccctgtggatgccaaggtgggctacggcaccagccagagctgcagcctgctgcccagccaggtgccctttgagacccggggccccaacgtggacagcagcacagacatgctggtggaggacaaggtgaagtctgtgtctggcccccagggccaccacaggagctgcctggtgaacagcggcaaggaccggctgccccagaccatggagcccagccccagcgagaccagcctggtggagcggccccaggtgggctctgtggtgcacaggaccagcctgggcagcaccctgagcctgaccaggagcccctgtgccctgcccctggccgagtgcaaggagggcctggtgtgcaatggagcccctgagacagaaaatagagccagcgagcagcccccaggcctgagcaccctgcagatgtaccccaccccaaatggccactgtgccaacggggaggccggccgcagcaaggacagcctgagccggcagctgagcgccatgagctgcagcagcgcccacctgcacagcaggaacctgcaccacaagtggctgcacagccacagcggccggcccagcgccaccagcagcccagaccagcccagccgcagccacctggatgatgatggcatgtctgtgtacacagacaccatccagcagaggctgcggcagatcgagagcggccaccagcaggaggtggagaccctgaagaagcaggtgcaggagctgaagagccggctggagagccagtacctgaccagcagcctgcacttcaacggggactttggagatgaggtgatgacccgctggctgcctgaccacctggccgcccactgctacgcctgtgacagcgccttctggctggccagcaggaagcaccactgccgggacacagacagagtggaccagacctggaactgtggaaatgtgttctgcagcagctgctgcaaccagaaggtgcctgtgcccagccagcagctgtttgagcccagccgggtgtgcaagagctgctacagcagcctgcaccccaccagcagcagcattgacctggagctggacaagcccatcgccgccaccagcaactag

SEQ ID NO: 245357 - DNA, 8906 bp, Artificial Sequence
  derived and/or modified sequence
agcgcgctctgtgtggccgctgccgccatgttgttgtggttgtgagaaggcggcggcggcggcggagtagcagccggacgagacgtcccagcggctcaggcgctgcccagcgccggccctggcagggagcctggtggggtggcggagggggagactgtgccgtggagggcctcgccatgtcctgctgcccgacttccttgtgaaacctcctagtagaaaaagttcttgggacaaacttcatttgacttcaccataagggaaagaagagagccttgttggacactgaagaagggacggggatttctcctcctaatctgggcctcttgtcatggatgaagagactcggcacagccttgagtgcatccaggccaatcagatctttcccaggaagcagctgatccgggaggatgagaatcttcaggttcctttccttgaacttcatggagagagcacagagtttgtgggccgtgccgaggatgccatcattgccctttccaattacagacttcacatcaagttcaaggagtctcttgttaatgttccattacagcttatagaaagtgttgaatgccgagatatatttcagcttcatttgacttgcaaagactgcaaagttatcaggtgtcagttttcaacctttgagcagtgtcaagagtggctgaagagactgaacaacgcaatccgaccacctgctaaaatagaagatctcttctcatttgcataccatgcttggtgcatggaggtctatgccagtgaaaaagagcaacatggagacctgtgcagaccaggggagcatgtaacttcaaggtttaaaaacgaggtggagaggatgggttttgatatgaacaacgcctggaggatttccaacatcaatgagaagtacaaattatgtggtagctatcctcaagagctcatagtgcctgcctggatcactgacaaagaactggaaagtgtatcaagtttcaggtcctggaagcgcatccctgccgtcatctacaggcaccagagcaatggagctgtcattgcccgctgtggacagccagaggttagctggtggggctggcgaaatgcagatgatgagcatctggtacagtcagtagccaaagcttgtgcctctgactcccgatcgagtggcagcaagctgtcaactaggaacacttctcgagactttcccaatgggggagacctttctgacgtggagttcgattcttctctgtcaaatgcttcaggagcagagagtttagccatccaaccgcagaagcttttgatcttggatgcacgctcctatgcagctgctgtggcaaaccgagccaaaggaggaggctgcgaatgcccagagtattacccaaactgtgaagttgtgtttatggggatggcaaacattcattctattcggaggagttttcagtctctgcggttgctgtgcactcagatgccagatccgggaaattggctatcagctcttgaaagcacaaaatggctccatcacttgtctgtgcttctgaaatcagcgcttctggtagtgcatgctgtggatcaggatcagcggccggtgctagtacactgctcagatggctgggaccgcaccccccagattgtggcattggctaagctcttgctggacccttattaccgaaccatagagggtttccaggtcctcgtggaaatggagtggctggattttggccataaatttgctgaccggtgtggtcatggggagaactcggatgatctgaatgaacgttgcccagtgtttctgcagtggcttgactgtgttcatcagcttcagaggcaatttccttgctcttttgagttcaatgaagcattccttgtgaaactggtgcagcatacctattcctgcctgtttggaacattcctgtgcaacaacgccaaggagagaggggaaaagcatactcaggaacggacatgttccgtgtggtcacttcttcgggcaggcaacaaggctttcaaaaacctactgtattcctctcagtcagaagccgtgctgtaccctgtgtgccatgtgcgtaacctgatgctgtggagtgcagtgtacctgccctgcccatccccaaccacccctgtggacgacagctgtgcaccatacccagccccaggcaccagccctgatgatccccccctgagccggctaccaaagactagatcatacgacaatctgaccacagcctgtgacaacacagtgcctctggccagccggcgctgcagcgaccccagcctgaacgagaagtggcaggagcaccggcgctcactagagctgagcagcctggctggccctggagaggatcccctttctgccgacagcctagggaagcccaccagagtgccggggggtgccgagctttctgttgcagccggagtagctgaggggcagatggagaacatcttgcaggaggccaccaaagaggagagtggagtagaggaacctgcccacagggcaggcattgagatacaggagggtaaagaggaccctctcttagaaaaggagagcaggaggaagacacctgaggcctcagccattggacttcaccaagacccagaactgggtgatgctgctctgaggagccatctggatatgagctggcctctgttctcacagggcatttctgaacagcagagtgggctcagtgttctcctcagttctctccaggtcccccccaggggagaggattccctggaggtccctgtggagcagtttcgaatagaagagattgcagagggtagggaggaagcagttcttccaatcccagtagatgcaaaagttggctatggtacctcacagtcatgttctctgctaccttcccaagtcccttttgagaccagaggaccaaacgtggacagttctacagacatgttagtggaagataaggtgaagtcagtaagtgggccccaaggtcatcatagatcttgccttgtaaatagtggcaaggacaggcttcctcagaccatggaacccagcccttcagagacaagcctggtcgagaggccccaagtggggtctgtggtgcataggacttcccttggcagcactctcagcctgacacgttccccttgtgccttgcctttagccgaatgtaaagaggggcttgtgtgcaatggtgccccagagactgaaaacagggcctcagagcagcccccaggtcttagcaccctccagatgtaccccacacccaatgggcattgcgccaatggggaggctggtaggagcaaggactcactgagccgtcagctgtctgctatgagctgcagctctgcccacttacactcaaggaacttgcaccacaagtggctgcatagccactcaggaaggccatctgcaaccagcagccccgaccagccttcccgcagccacctggacgatgatggcatgtcagtgtacacagacacgatccaacagcgcctgcgtcagattgagtcaggccaccagcaggaagtagaaactttgaagaaacaagtccaggagctgaagagtcgcctggagagccagtacctgaccagctccctacactttaatggagactttggggatgaggtgatgacccgttggcttcctgaccacctggccgcccactgctatgcgtgcgacagtgccttctggcttgccagcaggaagcaccactgcagggacactgaccgtgttgatcaaacgtggaattgtgggaacgtattctgctccagttgttgtaaccagaaggttccagttcccagccagcagctctttgaacccagtcgagtatgcaagtcttgctatagcagcctacatcccacaagctccagcattgaccttgaactggataagcccattgctgccacttccaactgaagctcagtgacctgggtgggcagtggccaagctgctgttcctatgacaggcccactcaacctgggcagaccgagaggcccgtgcactttggaatgggagcgtggaaccacctgtacagagtgacagatttgggatgcaccactggattgtagattgatttttctttcctgtccccctactccctccctaccttttccatcctcctcctctgccttcaaaaaaggaaactttcccttggttgtcttaattttttttttttttgatggaagaccaagggttgccaggcccactgtaactgccgagctgcctgctgtcacgtgacactgagggatggcttgtttcttccgggtgggaggatggtggtcagagccaggagtatggagatctgagaccgtgagcagggaagaaagccagtgctaacatgcaaccattcctcacgccaccgccacatcagagctggttgggaaccctttgctgctggggaggctggaagcatattccccaagagcactgccctgggcatcatctccctcctgcgaggagctgagccagtcccctcacagatggataaatgaggctgatgtttggagggagaggcacacggtaaatggcatccccttaggcgcctctttgggaaaggaaagtggatgctcctttgaggcaggcgaggggctgggagtgggtagccgtcatgttgtcccccgtgggatcccatttttaacttgacccagattgtcttgggctccttttactttcagggggctgctttcctgggccaggctgtgtagcacttcccaccctcaggcatgagtacagactggtcaaaatgtttatgcagtcaaggccaaagcctgccctgagcccagacacacctgggtccccattctggggcctggtcccctaaacaatctcttcctcagccagcacagggaaatccagactcagggttccagaaatcccccgttcccaaaccaaaccaatcatggatcttccctttaaggggtagaatcagcctttagagttacaagcccctggaaaagggagcaggtcccatacaatcagcctttctcctcttctcttcttgggacaggaataactgctgagcagtccccctttgccactcctggctgtctgagtgggcacttgtctggctgctggccagcagtgaagggccacttggtgacttcgtagggttccttagagaagtgacatggccttgaggagattcagggcacctttcctcagtgagctttgatatggtccaaaaacagccttaaatcaagaatatttgtggaggtaggtgtggggaaggttggagaagagttaggtttgtgctttgtaatcttggcatccatgttttgtgcctgccctccctcttggggaggccatgcttgactctgctgaaagctgctaactggtgacagggtggatcatggtgaggactaggggtaaggtcagggaatgcttaagctctggccctgccctgtattcctcttccccttggtagcagttccctgaccaagggcaaggtgtgtctcaggaaggtggttctgtgcatgcctgggtgtggttaaggcgtggcccagaaggcttccctggtgctctcagtccaggcaaagcccagagcatctgagcacgtctctgacttccagtggcaacacagtttgaacgtggtgaaacagggtgtagttcttttccacattctgtgtcatctagtcgtgcaggtagggaaaaagttggtctaattgaagattgtgcatttcctagtgacaggtgccaagaggttatgatacgggtttcttgggtctgatgtacagtgtgaataaatgcttgcagctcttagctcttttttgatcgatgaagcacttttttattaatattttcctttgttaaaggaggaaccgtaactctccatagctgtacatataacccttttctcctaaagaggagtcagtcagtgctcctatatttttcattttttgtcaaagcaagaagtaaatactttagaattgttaaatatataaataaagcaaataaagttgagtgttccacatggtagcatttgctaacacttcctaattctttgccctgtggtttatcccctcttcgtcccttttccctctcacacagaagtgtttgagggcctgctgggaaactgacctttggcaaaggaaagctacagatagccttccgactctagaccttggcaaggagcctcaccatgatgttcaagcactgaacgcatttcctcagtgattttgctcctaaaatctcccaggctaaaagagggcaaagcagtcagggatctgacctggcagctattcctccttctctgaagagttcccatcagtagtcattacaactacctctcgcctcaaggctccatttttagctgctgctctgatttcagggcagccagtactctggccccttcagtcggggagtggaaggagatgtggggtgggggtgagaaaatgcttctgcctgttgttcttgaaggatagactatgggtgggcagagagaactgggggcagaaatggaattagatgtgattgggttatgcagtcaactagaggtctccttcccgccctctctccacacagagaggaacctctgctccttagctcttacagcaggactgtggcatctagtcacttcaatactagttcttgctcttcacagaggtagatttttctttaccctacagcactgttgggcatccctcccatcacatgggtctgtgggtgagatatgttatgctgttcctccctcgggaaggttggtattgaggggtgccttgctccagaggcgccagcccagcatctgtggtgagttggctaagatccagagtgacctgctcagagctccccagaggccttcactctttggggcagtctctctagggtcactttctgaatgtaccttctacctaaagtatacaaacacaaagagccagctgagctggttctagtgtgaaagccgtaagtgccacccagcaggcgtttgaaaacaagaaatcattcttctgtggaaggagaatgtgccatctcagctaccctcagtccgccaggcagcccagtctgtgtattcatatgaagttgtgaaaaccatgagtgtgtgccatggccatcgtgtctacacacagccactattgttcctgtgggctagtctccagcaaattaaaacactggcatggcctaggaagggcgttgcgagctcctaaatggaaagcttctctgggggtagggagatgaagagccaagatgctggtgaagcaggtgcagtgaggatccaaggcaaggaattgccctgagggaggtggctgcatatggagaaaggcagttctctgtgggcaaggccagcttgcttcaggctgtagagggaatttggtctgaagcaacagggcatgaactgtgactttgagctgccaggttgtcttcatctcagaactttcctatcctggcactctcgttacctttcttctataccttggcctctgtaactgcagtccaaaacaagttacagctgccttaatccactgagattctctatgaggatgtacagaaaagttttcctgtaataattttgcttatatgctaactcttttcatgttagcaaagaatattctatgaattagaatgttactgtggtagatctaaaggagaatgaacagaaggtgctggaggacctgttaaacaatctctggctattaaaaaacatcaagatgagaattaaaggcatatcctgatatacttgcctgcttgcacatgaggctgggagatcccatgcctgttgaagttaactctagccctgacctctattgatcttttgggaatgagggctgatttgaaggtgctgttgcaggatttcatttagctgctgccagttcaagtgacctgtccccagggctgcagctgtatccacctgattgcagtaggtgagggctaacagcagaatttaaagtggaccctgggctgtggagcaaagtgactatccatttggacttttggataatgtggcaggagtcccagctgtttaatttctagtcacattttccagaaagttgttctaagttgagattactgacaagatttctcaagggcaggaccagatatgtgagagacttctagttcagagctgacccctctaagcctctgacacttaaacacgagtcctgctgtccccagcacacaactgcactgaagccttgttcctctcggctggtgtagagctcatctgcatgttgtgtgcagataccagtagcctccctgcttgaacaggcctctcctaggctaggcaggtgttcagaggcatgaaggtctgggcaggggaagggcgtcttctgaaatgggagttaccaggtttttaaatgctgctattgttttatttaccatttaaggtcttttctattatatctgagtaactagtcagtttttcttacagtgctcatagcagttgtatttgaattgtattttcagtgaaatttgttttacattgccatttaaaattggcctttaacagcttcccaactagcttataagatttttttttttaatgaaaacataacccatgaggctcagatgctgttgaagaaataaatggtatgttgctgctgacagtagtgcttgcctattgtaacagcattggttctgctgtagcctcggtgaccatttaagttgaataaatctgtcattttcacccacaaacagttgttgagcccctggatttgggttgtcactgtggttctcctgccagtgctataatccagtgtcgtaggtgcagggtatgaatcagctcagcctcttaggagagaggggctctcagcgaggagggggcggggggggggtcactatttatcttccagaggcagggttcatggattcctgatgtttagaggcggaagggaccttaggtcacctacttccacggttttcatactgttctctggggcctcgtggagagggagcctccaggcccattcaaagctttattagatttaaaagtaagatctggtatgaagaaaggttttgtttgtttcttaaaataaaaagtctgaaaatcact

SEQ ID NO: 245358 - DNA, 3758 bp, Artificial Sequence
  derived and/or modified sequence
cctcttgtcatggatgaagagactcggcacagccttgagtgcatccaggccaatcagatctttcccaggaagcagctgatccgggaggatgagaatcttcaggttcctttccttgaacttcatggagagagcacagagtttgtgggccgtgccgaggatgccatcattgccctttccaattacagacttcacatcaagttcaaggagtctcttgttaatgttccattacagcttatagaaagtgttgaatgccgagatatatttcagcttcatttgacttgcaaagactgcaaagttatcaggtgtcagttttcaacctttgagcagtgtcaagagtggctgaagagactgaacaacgcaatccgaccacctgctaaaatagaagatctcttctcatttgcataccatgcttggtgcatggaggtctatgccagtgaaaaagagcaacatggagacctgtgcagaccaggggagcatgtaacttcaaggtttaaaaacgaggtggagaggatgggttttgatatgaacaacgcctggaggatttccaacatcaatgagaagtacaaattatgtggtagctatcctcaagagctcatagtgcctgcctggatcactgacaaagaactggaaagtgtatcaagtttcaggtcctggaagcgcatccctgccgtcatctacaggcaccagagcaatggagctgtcattgcccgctgtggacagccagaggttagctggtggggctggcgaaatgcagatgatgagcatctggtacagtcagtagccaaagcttgtgcctctgactcccgatcgagtggcagcaagctgtcaactaggaacacttctcgagactttcccaatgggggagacctttctgacgtggagttcgattcttctctgtcaaatgcttcaggagcagagagtttagccatccaaccgcagaagcttttgatcttggatgcacgctcctatgcagctgctgtggcaaaccgagccaaaggaggaggctgcgaatgcccagagtattacccaaactgtgaagttgtgtttatggggatggcaaacattcattctattcggaggagttttcagtctctgcggttgctgtgcactcagatgccagatccgggaaattggctatcagctcttgaaagcacaaaatggctccatcacttgtctgtgcttctgaaatcagcgcttctggtagtgcatgctgtggatcaggatcagcggccggtgctagtacactgctcagatggctgggaccgcaccccccagattgtggcattggctaagctcttgctggacccttattaccgaaccatagagggtttccaggtcctcgtggaaatggagtggctggattttggccataaatttgctgaccggtgtggtcatggggagaactcggatgatctgaatgaacgttgcccagtgtttctgcagtggcttgactgtgttcatcagcttcagaggcaatttccttgctcttttgagttcaatgaagcattccttgtgaaactggtgcagcatacctattcctgcctgtttggaacattcctgtgcaacaacgccaaggagagaggggaaaagcatactcaggaacggacatgttccgtgtggtcacttcttcgggcaggcaacaaggctttcaaaaacctactgtattcctctcagtcagaagccgtgctgtaccctgtgtgccatgtgcgtaacctgatgctgtggagtgcagtgtacctgccctgcccatccccaaccacccctgtggacgacagctgtgcaccatacccagccccaggcaccagccctgatgatccccccctgagccggctaccaaagactagatcatacgacaatctgaccacagcctgtgacaacacagtgcctctggccagccggcgctgcagcgaccccagcctgaacgagaagtggcaggagcaccggcgctcactagagctgagcagcctggctggccctggagaggatcccctttctgccgacagcctagggaagcccaccagagtgccggggggtgccgagctttctgttgcagccggagtagctgaggggcagatggagaacatcttgcaggaggccaccaaagaggagagtggagtagaggaacctgcccacagggcaggcattgagatacaggagggtaaagaggaccctctcttagaaaaggagagcaggaggaagacacctgaggcctcagccattggacttcaccaagacccagaactgggtgatgctgctctgaggagccatctggatatgagctggcctctgttctcacagggcatttctgaacagcagagtgggctcagtgttctcctcagttctctccaggtcccccccaggggagaggattccctggaggtccctgtggagcagtttcgaatagaagagattgcagagggtagggaggaagcagttcttccaatcccagtagatgcaaaagttggctatggtacctcacagtcatgttctctgctaccttcccaagtcccttttgagaccagaggaccaaacgtggacagttctacagacatgttagtggaagataaggtgaagtcagtaagtgggccccaaggtcatcatagatcttgccttgtaaatagtggcaaggacaggcttcctcagaccatggaacccagcccttcagagacaagcctggtcgagaggccccaagtggggtctgtggtgcataggacttcccttggcagcactctcagcctgacacgttccccttgtgccttgcctttagccgaatgtaaagaggggcttgtgtgcaatggtgccccagagactgaaaacagggcctcagagcagcccccaggtcttagcaccctccagatgtaccccacacccaatgggcattgcgccaatggggaggctggtaggagcaaggactcactgagccgtcagctgtctgctatgagctgcagctctgcccacttacactcaaggaacttgcaccacaagtggctgcatagccactcaggaaggccatctgcaaccagcagccccgaccagccttcccgcagccacctggacgatgatggcatgtcagtgtacacagacacgatccaacagcgcctgcgtcagattgagtcaggccaccagcaggaagtagaaactttgaagaaacaagtccaggagctgaagagtcgcctggagagccagtacctgaccagctccctacactttaatggagactttggggatgaggtgatgacccgttggcttcctgaccacctggccgcccactgctatgcgtgcgacagtgccttctggcttgccagcaggaagcaccactgcagggacactgaccgtgttgatcaaacgtggaattgtgggaacgtattctgctccagttgttgtaaccagaaggttccagttcccagccagcagctctttgaacccagtcgagtatgcaagtcttgctatagcagcctacatcccacaagctccagcattgaccttgaactggataagcccattgctgccacttccaactgaagctcagtgacctgggtgggcagtggccaagctgctgttcctatgacaggcccactcaacctgggcagaccgagaggcccgtgcactttggaatgggagcgtggaaccacctgtacagagtgacagatttgggatgcaccactggattgtagattgatttttctttcctgtccccctactccctccctaccttttccatcctcctcctctgccttcaaaaaaggaaactttccctt

SEQ ID NO: 245359 - DNA, 3513 bp, Artificial Sequence
  derived and/or modified sequence
atggacgaggagacccggcacagcctggagtgcatccaggccaaccaaatcttcccgaggaagcaactgatccgggaggatgagaacttacaagtgcctttcctggaacttcatggggaatctactgagtttgtgggacgcgcagaagacgcaattattgctctcagtaactaccgcttacacataaaatttaaagagtcacttgtgaatgtcccactccagctgatcgaaagcgtcgaatgcagggatattttccagcttcatctgacatgtaaggattgtaaggtgatccgttgtcaatttagtacctttgagcagtgtcaggaatggctcaaacgactgaataacgccatcaggcctccagcaaagatagaggatctcttctctttcgcttaccacgcctggtgtatggaagtctatgcgtctgagaaagaacagcatggcgatttatgtcgacctggagagcatgtcacttcgagattcaaaaatgaagttgaaaggatgggattcgacatgaataacgcctggcggatttccaacatcaacgaaaagtataagctgtgcggctcctatccacaagaattaatcgttccagcttggatcactgacaaggaactggagtcagtttccagctttcggtcttggaaacgaatcccagccgtaatttataggcatcaatccaatggggctgtaattgcgaggtgtggtcagccagaagtcagctggtgggggtggcggaacgcggacgacgagcatttggtccagagtgtcgctaaggcatgtgcctccgactctcgcagcagtggatctaaattaagtacaagaaatacctcgagggatttcccaaacggaggggacctgtcagacgtagagttcgactccagtctctccaatgcatcaggtgctgagtcactcgccattcaaccgcagaagcttttgatcttggatgcgaggtcatatgcagcggctgtggccaaccgcgccaaaggcgggggctgcgagtgtcctgaatattatccaaactgcgaggtagtgttcatgggtatggcaaatattcattccattaggcgcagctttcagagtctgcgcctgctgtgtacgcagatgcctgaccccggcaactggctgtccgccctggagagtaccaagtggctgcaccatctgagcgtcctgttgaagagcgccctgttggtggtccacgccgtggatcaagatcagcggccagttttggtgcactgcagtgacggctgggaccggactccccagattgttgccttggcaaagctgcttctcgacccctactaccgtaccattgagggatttcaggtcttggtggagatggaatggctcgatttcggacataaatttgccgaccggtgcggacatggcgagaattcagacgaccttaacgagcgctgccccgtttttctgcaatggttagactgtgtgcaccaactccagagacaatttccttgcagctttgagtttaacgaagcgtttctcgtaaaactcgttcagcacacttattcgtgtctattcggtacattcctgtgtaacaatgccaaagagagaggagagaaacacacacaagagaggacctgcagtgtgtggtctctgctacgggcggggaacaaggccttcaaaaacctgctgtactcaagccagagcgaagcggttctctacccagtgtgtcatgtgcgcaaccttatgctgtggagtgcggtgtacctgccatgcccaagcccaaccacaccagtggatgactcgtgtgcgccttatccagcacctggtacatctccggatgatcccccactgagccggctcccaaagacccgatcttacgacaacttgacaacggcctgcgacaacaccgtgcccttagcatctcgccgatgctcagacccatccctcaatgaaaagtggcaagaacatcggaggtctttggagctcagtagtttagccggccccggtgaggatccgctttcggccgacagccttggaaaaccgacgcgcgttcctgggggcgccgaactgagcgttgctgctggagtggctgaagggcaaatggagaacatactccaggaggcaaccaaggaggagtctggagtggaggagccggcccatagagctgggatcgagatacaggaagggaaggaggatcctcttctggaaaaggagtcgagacggaaaacccccgaagcgagcgcaatcgggttacatcaggaccccgaactcggagacgcagcgctgagaagtcacttggacatgtcctggccactgttctcccagggcatctccgaacagcagagcggcttatcggtgttactgagctcactgcaggtccccccccggggagaggattctctggaagtccccgttgagcagtttcgcattgaagagatcgcggagggcagagaggaggcggtgctcccaatccctgtggatgcaaaggtcgggtatggaacatctcaaagctgttccctgctcccctcacaggtacctttcgagactaggggacctaacgtcgatagcagcacggacatgctggtcgaggataaggtcaaatcggtgtctgggcctcagggccatcacagatcctgcctggtgaactccgggaaagatcgcctgccgcagaccatggaacccagcccttcagagactagtttagtggagcggccacaggtcggatcagttgttcatagaacttctttaggatcaacactaagtctgacaagatctccctgcgcgctgcctttagctgagtgcaaggagggactcgtctgcaatggggctcctgagaccgagaatcgggcctctgaacaacctcctggtctgagtaccctgcagatgtatccaactcccaacggacactgcgcgaacggcgaggcagggagatcgaaagatagtctatctcgtcagctttccgctatgagttgctcatcggcccacttgcatagccggaatctacaccataaatggttgcatagccactccggacgcccctctgccacatctagccctgaccagcctagcaggtcccacctggacgatgacggcatgtcggtatacactgacacaattcagcagcgcttgaggcagattgagtccggccatcaacaagaagtcgagaccctcaagaagcaagtgcaggaactgaagagcaggctagaaagccagtacctgacatcctccctgcattttaacggagattttggggacgaagttatgacacgatggctgcccgatcaccttgctgctcattgctatgcatgtgacagcgccttttggttagcatcgcgcaaacaccattgcagagataccgatagagtcgatcagacctggaattgtggaaatgtgttttgcagtagctgctgcaatcaaaaggttcctgtgccctcacagcagctgtttgaaccaagtcgggtgtgtaaaagctgttactcctccctgcatcccacgtcctcctctatcgacctcgaactggacaaacccattgccgcgacctctaactag

SEQ ID NO: 245360 - DNA, 3513 bp, Artificial Sequence
  derived and/or modified sequence
atggacgaggagacccggcacagcctggagtgcatccaggccaaccaaatcttccctaggaagcaattaattcgagaagatgagaacctgcaagtgccctttctcgagctccatggggaatctacagaatttgtcggccgcgccgaggatgctatcatcgctttgtcaaactaccgcctgcacataaaattcaaggagtccctcgtgaacgtgcccctgcagcttatcgaaagtgtggagtgccgagatatctttcaactgcaccttacatgcaaggattgtaaggtgatacggtgccaattctctacatttgagcaatgccaggagtggctcaagaggctcaataatgcgatccggcctcccgcaaagatcgaagacctcttcagctttgcctatcatgcgtggtgcatggaggtgtacgcatcagaaaaggaacagcatggtgacctgtgtcggccgggcgaacacgtgaccagtagatttaaaaatgaagtcgaacggatgggtttcgacatgaataatgcttggagaatttcaaacatcaatgaaaagtataagctgtgtggatcttaccctcaggagttaattgttcctgcctggattacggataaagaactggagtccgttagcagcttcagatcttggaaacgcatccccgccgtgatttatagacaccagagcaatggcgccgtcatcgctagatgtggccagcctgaggtgtcatggtggggctggagaaatgccgacgatgaacacctggtccagtctgttgccaaggcctgcgcctcggacagcagatccagcggaagcaagttgtctacccggaatacctcgagggacttcccgaacgggggggatctttcggatgtggagtttgattcttcactgtctaacgcaagcggagctgagtccctggccattcagccacagaagcttctgattctggacgccagatcttacgctgccgcagtggcaaaccgcgcgaaaggagggggatgcgagtgtcccgaatattatccgaattgcgaagtggtatttatgggaatggcaaacatccactctattcggcgctctttccaaagtctccgcttgctgtgtacccaaatgccagatccaggcaattggctgtccgcactggaaagcacaaaatggctgcaccacttaagcgtgcttctgaaatcagccctcctagttgtgcatgccgtggaccaggaccagcgccctgtgctggtgcattgttcagatggctgggatcgaaccccccaaattgtcgccctagctaaactgcttctagacccctactataggacgattgagggcttccaggtccttgtggagatggaatggctcgactttggacacaaattcgccgataggtgcggacacggggaaaattccgatgacctgaacgaacggtgcccagtgttcctccaatggctcgattgtgttcaccaactgcagcgccagtttccttgctcctttgagttcaatgaggcctttttggttaagctcgtgcagcatacgtacagttgcttgttcggaacattcctgtgcaataatgccaaggagcgcggagaaaagcacacacaagagcgcacctgtagcgtctggagtctgctgagagccggtaacaaagcctttaagaacctgttatactctagccagtcggaagcagtactgtatccagtgtgtcacgtgaggaaccttatgctgtggagcgccgtatacctgccctgtccatcacccacaactccggttgatgattcatgcgcaccctatcccgctccagggacaagtcccgacgaccctcctctctctcggctaccaaaaactcgctcatatgataacctcacaaccgcttgcgacaatacagtacctctggcctctcgaaggtgcagcgacccaagtctgaatgagaaatggcaagaacacaggcgctctctcgaactcagttccctggccggaccaggtgaagatccacttagcgctgactcgctgggcaagccgactcgggtccctggcggcgcggagctgtctgtcgccgccggagttgctgaagggcaaatggaaaacattttgcaagaggccacaaaagaggagtccggcgtggaggaaccagcccatcgcgccgggatcgaaatacaggaggggaaggaggatccactcctggagaaggaatcccgtcgaaagactcccgaagcctctgccatcggcttacaccaagatcctgagctgggcgacgcagctctgaggtctcatttagacatgagttggccactcttctctcagggaatatcggagcagcagagcggactcagcgtgctgctctctagccttcaggtgcctccaaggggagaggattctctggaagtccccgtagaacagttccgcattgaagagatcgctgagggccgcgaggaggctgtattacccattccagtcgacgcaaaggtcggctacggaacttcccaatcctgctccctgttgccttcacaggtaccattcgagacacgcggaccaaatgtggactcaagcaccgatatgctcgtcgaagataaagttaagagcgtatctggcccacaagggcaccatcgctcttgtctggtcaatagtggcaaggaccgcttgcctcaaactatggagccatcaccgtccgagacgtccctcgtggagcgccctcaggtcggaagcgttgtccaccggacaagcctcggctccaccctaagcttgacgcgaagcccttgcgctctgcctctggccgagtgcaaggaaggcctcgtgtgcaacggagcgcctgagacagagaacagggcttccgaacaaccacccggcctgtctacgctgcaaatgtatcctactcccaatggacactgcgccaatggagaagccggcaggagcaaagattccctatccaggcagttaagcgctatgagctgtagcagtgcacatctgcactccaggaacctacaccataagtggctgcattcccacagcggcaggccctcagcaacatctagcccagatcagccatcccgaagccacctggatgatgacgggatgtccgtttatactgatacgatccagcagcgattaaggcagattgagtctggacaccagcaggaagtggagactctgaaaaagcaggtgcaggaacttaagtcgaggctggagtctcagtacctgacttcctcgctgcacttcaatggcgattttggagacgaagtgatgacccgctggttgccggatcacctcgcggcccactgttacgcctgcgacagcgccttctggctcgcctctagaaaacatcactgtcgcgacactgaccgtgtggaccagacttggaactgcggcaatgtattttgtagctcttgctgtaaccaaaaagttccagtgccatctcagcagctctttgaaccctcccgcgtatgtaagtcatgctactcatctttgcacccaacctcatcgtccatcgaccttgagctcgacaagcctatagctgccactagcaattag

SEQ ID NO: 245361 - DNA, 3513 bp, Artificial Sequence
  derived and/or modified sequence
atggatgaggaaacccgccactccctcgagtgcatccaggctaatcagatctttcccaggaaacagttaattcgagaagatgaaaatctgcaggtgcccttccttgaactacacggcgaatctaccgagttcgtcggcagagccgaggacgcaataatcgctctgagtaattacaggctacacattaagttcaaggagagtctggttaacgtgccccttcaacttattgaaagcgtggagtgtcgggatattttccaactgcacttaacttgtaaggattgtaaggttatacggtgccagttctctacgttcgaacagtgtcaggagtggttgaagcgcttgaacaacgctatccgccctccggcaaagatcgaagacttgttctcattcgcctaccacgcatggtgtatggaggtttatgcctcggagaaagagcagcacggtgacctctgtcgcccaggagagcacgtgaccagccgctttaagaacgaagttgagcgtatgggattcgatatgaacaatgcctggcggatatccaacatcaatgaaaagtacaagttatgtggttcgtaccctcaggagctgattgtacccgcatggattacagacaaggagctggagtccgtatcttcctttagaagctggaagaggatccctgcggtgatctaccgccaccagtcaaatggcgctgtgatcgccagatgcggtcagccagaagtctcctggtgggggtggcggaacgccgatgacgagcaccttgttcagagcgtcgccaaagcttgtgccagcgactcaagatcttcaggttccaagcttagcacccgaaacacttctcgggacttccccaacggaggggatttgtcagatgtggagtttgattcttctctcagcaacgcctcgggtgccgagagtctggctatccagccccaaaagttgctgatattggacgctcgcagctatgctgccgctgtggccaatagagctaagggcggaggctgtgaatgtcctgagtactatcccaactgcgaagtggtctttatgggtatggctaacatccattctataagaagatccttccagtctctgcggctgctgtgcactcagatgccagaccccggaaactggctaagtgccctggagtctactaagtggctgcatcatctgagtgtgctcctgaaatctgcactgctggtggtccatgccgttgatcaggatcagcgccctgtcctggtccactgctcagacggctgggatagaacacctcagatagtcgccctagccaagctgttattagatccctactaccgaacgattgagggctttcaggtgctggtcgagatggagtggctggactttggtcacaaattcgcggataggtgcggacatggggagaatagcgatgacctgaacgagcgctgccccgttttccttcagtggcttgactgcgtgcaccagctccagcggcagtttccttgttcatttgagtttaatgaagctttcctggtcaaactggttcagcacacctattcttgcctgtttgggacattcctgtgcaacaacgctaaagaacggggtgagaagcatacgcaggaacgcacgtgctcagtgtggtcactgttgcgcgctggaaataaagcttttaagaatctgctttatagttcgcaaagtgaggctgtgctgtacccagtctgtcacgtgcggaatctgatgttatggtccgctgtatatcttccatgtccctcacccaccacaccagtggacgactcctgtgcaccatatcccgcacctggtactagccctgatgacccccctctctctcgcttgccaaagactcggagctacgacaatctcaccactgcatgtgacaacacagtccctctagctagcaggagatgttccgatcccagcctaaacgaaaagtggcaggaacacagaagatcccttgaattgtctagcctggcaggaccaggggaggatcccttatctgcagactctctgggaaagccaacccgcgttcctggaggagctgagctctccgtggcagccggagttgcagagggccagatggagaacatactgcaagaagctacaaaggaggaaagcggtgtcgaagaacctgctcaccgtgccggtattgaaatccaggagggcaaggaggatcccttgttggagaaggaaagccgcagaaaaacccccgaagccagcgctattggattacatcaagaccctgaacttggcgacgctgccctccgctcgcatctcgacatgagttggcctcttttctcccaaggcattagcgagcaacagtccggcctttctgttctgctgagctcgctccaggtaccacctagaggcgaagattctctggaggtcccggtcgaacagtttcggatcgaggagatagccgaagggagggaagaggccgtgctgcccatccccgttgatgcaaaggtgggctacgggacatcacagtcttgttcgttactgccttcccaagtgccattcgagacacgaggccctaacgtggactctagcaccgacatgctggttgaggataaggtgaagtcagtcagtggccctcaggggcatcaccgttcctgcttagttaatagcggaaaagatcgcctcccccaaacgatggaacccagtccttccgagacgtcactggtggagcgaccacaggtggggtccgttgtgcaccggacctcgttgggatcaaccttgtcgctgactcggagtccctgcgccctccccctcgccgagtgcaaggagggtttggtttgcaatggggcacccgaaactgagaatcgcgctagcgaacagccacccggactctcaacactgcaaatgtatcccactccaaatgggcactgtgccaatggcgaggccggacggtccaaagactccctgtctcgtcagctcagcgccatgagctgctcctcggctcatctgcactcacgtaacctgcaccacaaatggctgcactcccacagcgggaggccttcagctacctcttctcccgatcaaccgtctcgatcccacctggacgacgacggcatgagtgtgtatacagacacaatccagcagcgactcaggcaaattgagagcggccatcagcaggaagtagaaactctgaaaaagcaagttcaggagctgaaatcaagattagagagtcaatatctgacatctagtctgcatttcaacggcgacttcggagatgaggttatgactcgctggctcccagatcacttggccgcacattgttacgcatgtgatagcgccttttggttggccagtcgtaagcaccactgtagagacactgatcgggtcgaccaaacatggaactgcggaaatgttttttgtagcagttgctgcaatcagaaggtgccggtgcctagtcagcaactgtttgagcccagtcgcgtctgtaagtcttgctactcctctctacatcctacttccagcagtatcgacctggagctcgataagccaatcgccgctacaagtaactag

SEQ ID NO: 245362 - DNA, 3513 bp, Artificial Sequence
  derived and/or modified sequence
atggatgaggaaacgcgacacagccttgaatgtatccaggctaaccagatattccccagaaagcaactgattcgcgaggatgagaacctgcaggtgccatttttggaactgcacggggagtccactgaatttgttggacgggctgaggatgccattatagccctgtccaattatcgccttcacattaaattcaaggagtcattggttaatgtgccgctccagttgatagaatcggtggaatgtcgagatatattccagcttcatctgacctgcaaagactgcaaagtgataaggtgccagttttctacttttgagcagtgtcaggagtggttgaaacgactgaacaacgccatccgcccaccagcaaagattgaggacttattttcttttgcataccatgcctggtgtatggaggtgtacgcctccgaaaaggagcagcacggagatctctgtcggcctggggagcacgttactagccggttcaaaaatgaagtggagaggatggggttcgatatgaacaacgcctggagaatatctaatatcaacgagaagtacaagctgtgcggctcttatccacaggaattaatcgttcccgcttggatcaccgataaggaactggaatccgtgtcaagcttcagatcctggaagcggattcctgccgtcatttacagacaccagtccaatggagcagtcatagccaggtgtggccagcctgaagtcagctggtggggctggcgaaacgccgacgacgagcacctagttcagagcgtggccaaggcttgcgccagtgactcccgctcatccgggtccaaactgtctacacgtaacacctccagagattttcccaatgggggagatcttagcgacgtcgaatttgacagcagcctgtcaaatgccagcggtgccgaaagtctggctatccaacctcagaagctgctgattcttgatgctagatcttatgctgcagccgtagcaaaccgtgccaaggggggaggatgtgaatgcccagagtattaccctaattgcgaagtggtatttatgggcatggcaaatatacatagcattaggcgctctttccagtccctgcggttattgtgtacgcaaatgcctgaccctggcaactggctatcagccttggaatcgacaaagtggctccaccatctgtcagtgttactgaaaagtgcactcctggtggtgcatgccgtcgatcaggatcaacggcctgtgcttgtgcattgttctgatgggtgggacaggacccctcagatcgtcgctctagctaagctgctgctggacccctactaccggaccatagagggatttcaggtcctggtcgagatggaatggttggatttcgggcacaaatttgcggacaggtgcggccatggggaaaactccgatgacttgaatgaacgctgtccagtgtttcttcaatggcttgactgcgtacatcagctccagagacagtttccttgtagctttgaattcaatgaagccttcctcgtgaagctcgtccagcatacctactcatgtctcttcggaacctttctgtgtaataacgccaaggaacgtggtgagaagcacacccaggagagaacttgttccgtatggtcactgttgcgtgctggcaataaagcgttcaaaaatctgctctactcctcccagtcggaagccgttctgtaccctgtctgtcacgtcagaaatctgatgctgtggtctgctgtttatttgccctgtccgtcccccaccacccccgtcgacgatagttgtgctccataccccgctccaggcacatcccccgacgatcctccgctgagcaggcttcccaagaccaggagctacgataacctcacaacagcctgcgataataccgtcccccttgcgtcgagacgctgctctgatcccagccttaacgaaaaatggcaggagcatagaaggagcctggaactgtcctcactggccggtcccggagaggaccctctgagcgcagatagtctcggaaagcctacacgggtaccaggcggagccgagttgtcagtcgctgctggagtcgctgagggccaaatggagaatatcctgcaagaggcaacaaaggaggagtcaggggtggaggagcccgctcaccgggcaggcatcgagatccaggaggggaaggaagaccccctgctcgaaaaggaaagccgtcgaaaaaccccagaagcctccgcaatcggcctgcaccaagatcccgaacttggagatgcagccctgcggtctcatcttgatatgagctggccactgttcagccagggcataagtgagcaacagagtggactgtccgtgctccttagcagtctacaggtgcctccccgtggcgaggacagcctcgaggtccctgttgagcagttcagaatcgaggagatcgctgagggtcgggaggaggctgtgctgcccattccagttgatgccaaggtgggttacgggacttctcaatcctgctcactgctgccttcgcaagtccccttcgaaacaagaggcccaaatgttgattcttctactgatatgctcgtggaggacaaagtcaagtctgtaagtgggcctcaggggcaccacaggtcttgtctggtgaatagtggtaaagatcgactgcctcagaccatggagccctcgccatcggagacatctttggttgagcgccctcaagtcggatccgtggtgcaccgcaccagtctcgggtccaccttatcactgacgcgtagcccctgcgctttgcccctggcggaatgtaaagagggtttagtgtgtaatggcgctcccgagactgagaaccgtgcgagcgaacagcccccagggctgtctaccttgcaaatgtatccgaccccaaatggccattgcgcgaatggagaggcgggtagatcaaaggattctctgtcccgccagctgtcagcaatgtcttgcagcagcgcccacctgcactcacgtaacctgcaccacaaatggctgcattctcactctggcaggccgagcgccacgagctcccccgaccagccctcccggtcacacttagacgacgatgggatgtccgtgtacaccgacaccattcaacagaggcttcgtcagatagagagcggccatcagcaggaggtggagacacttaagaagcaggtccaggagttgaagtctcgcctggagtcccaatatcttactagctccttgcattttaatggcgattttggcgacgaggtgatgacaaggtggttgccagaccatttggccgctcactgctatgcctgtgacagcgccttctggctggcaagccggaaacaccattgtcgtgataccgatagagtcgaccagacctggaactgtggtaacgttttttgcagctcttgctgtaaccagaaagtgcctgtcccttcacagcagctgttcgaacctagtagggtgtgtaaatcctgttattcgagcttgcacccaacctcatctagcatcgaccttgagctggataagccaatcgcagccactagcaattag

SEQ ID NO: 245363 - DNA, 3513 bp, Artificial Sequence
  derived and/or modified sequence
atggacgaggagaccagacacagcctggagtgcatccaggccaaccagatcttccccagaaagcagctgatcagagaggacgagaacctgcaggtgcccttcctggagctgcacggcgagagcaccgagttcgtgggcagagccgaggacgccatcatcgccctgagcaactacagactgcacatcaagttcaaggagagcctggtgaacgtgcccctgcagctgatcgagagcgtggagtgcagagacatcttccagctgcacctgacctgcaaggactgcaaggtgatcagatgccagttcagcaccttcgagcagtgccaggagtggctgaagagactgaacaacgccatcagaccccccgccaagatcgaggacctgttcagcttcgcctaccacgcctggtgcatggaggtgtacgccagcgagaaggagcagcacggcgacctgtgcagacccggcgagcacgtgaccagcagattcaagaacgaggtggagagaatgggcttcgacatgaacaacgcctggagaatcagcaacatcaacgagaagtacaagctgtgcggcagctacccccaggagctgatcgtgcccgcctggatcaccgacaaggagctggagagcgtgagcagcttcagaagctggaagagaatccccgccgtgatctacagacaccagagcaacggcgccgtgatcgccagatgcggccagcccgaggtgagctggtggggctggagaaacgccgacgacgagcacctggtgcagagcgtggccaaggcctgcgccagcgacagcagaagcagcggcagcaagctgagcaccagaaacaccagcagagacttccccaacggcggcgacctgagcgacgtggagttcgacagcagcctgagcaacgccagcggcgccgagagcctggccatccagccccagaagctgctgatcctggacgccagaagctacgccgccgccgtggccaacagagccaagggcggcggctgcgagtgccccgagtactaccccaactgcgaggtggtgttcatgggcatggccaacatccacagcatcagaagaagcttccagagcctgagactgctgtgcacccagatgcccgaccccggcaactggctgagcgccctggagagcaccaagtggctgcaccacctgagcgtgctgctgaagagcgccctgctggtggtgcacgccgtggaccaggaccagagacccgtgctggtgcactgcagcgacggctgggacagaaccccccagatcgtggccctggccaagctgctgctggacccctactacagaaccatcgagggcttccaggtgctggtggagatggagtggctggacttcggccacaagttcgccgacagatgcggccacggcgagaacagcgacgacctgaacgagagatgccccgtgttcctgcagtggctggactgcgtgcaccagctgcagagacagttcccctgcagcttcgagttcaacgaggccttcctggtgaagctggtgcagcacacctacagctgcctgttcggcaccttcctgtgcaacaacgccaaggagagaggcgagaagcacacccaggagagaacctgcagcgtgtggagcctgctgagagccggcaacaaggccttcaagaacctgctgtacagcagccagagcgaggccgtgctgtaccccgtgtgccacgtgagaaacctgatgctgtggagcgccgtgtacctgccctgccccagccccaccacccccgtggacgacagctgcgccccctaccccgcccccggcaccagccccgacgacccccccctgagcagactgcccaagaccagaagctacgacaacctgaccaccgcctgcgacaacaccgtgcccctggccagcagaagatgcagcgaccccagcctgaacgagaagtggcaggagcacagaagaagcctggagctgagcagcctggccggccccggcgaggaccccctgagcgccgacagcctgggcaagcccaccagagtgcccggcggcgccgagctgagcgtggccgccggcgtggccgagggccagatggagaacatcctgcaggaggccaccaaggaggagagcggcgtggaggagcccgcccacagagccggcatcgagatccaggagggcaaggaggaccccctgctggagaaggagagcagaagaaagacccccgaggccagcgccatcggcctgcaccaggaccccgagctgggcgacgccgccctgagaagccacctggacatgagctggcccctgttcagccagggcatcagcgagcagcagagcggcctgagcgtgctgctgagcagcctgcaggtgccccccagaggcgaggacagcctggaggtgcccgtggagcagttcagaatcgaggagatcgccgagggcagagaggaggccgtgctgcccatccccgtggacgccaaggtgggctacggcaccagccagagctgcagcctgctgcccagccaggtgcccttcgagaccagaggccccaacgtggacagcagcaccgacatgctggtggaggacaaggtgaagagcgtgagcggcccccagggccaccacagaagctgcctggtgaacagcggcaaggacagactgccccagaccatggagcccagccccagcgagaccagcctggtggagagaccccaggtgggcagcgtggtgcacagaaccagcctgggcagcaccctgagcctgaccagaagcccctgcgccctgcccctggccgagtgcaaggagggcctggtgtgcaacggcgcccccgagaccgagaacagagccagcgagcagccccccggcctgagcaccctgcagatgtaccccacccccaacggccactgcgccaacggcgaggccggcagaagcaaggacagcctgagcagacagctgagcgccatgagctgcagcagcgcccacctgcacagcagaaacctgcaccacaagtggctgcacagccacagcggcagacccagcgccaccagcagccccgaccagcccagcagaagccacctggacgacgacggcatgagcgtgtacaccgacaccatccagcagagactgagacagatcgagagcggccaccagcaggaggtggagaccctgaagaagcaggtgcaggagctgaagagcagactggagagccagtacctgaccagcagcctgcacttcaacggcgacttcggcgacgaggtgatgaccagatggctgcccgaccacctggccgcccactgctacgcctgcgacagcgccttctggctggccagcagaaagcaccactgcagagacaccgacagagtggaccagacctggaactgcggcaacgtgttctgcagcagctgctgcaaccagaaggtgcccgtgcccagccagcagctgttcgagcccagcagagtgtgcaagagctgctacagcagcctgcaccccaccagcagcagcatcgacctggagctggacaagcccatcgccgccaccagcaactag

SEQ ID NO: 245364 - protein, 1161 aa, Artificial Sequence
  derived and/or modified sequence
MDEETRHSLECIQANQIFPRKQLIREDENLQVPFLELHGESTEFVGRAEDAIIALSNYRLHIKFKESLVNVPLQLIESVECRDIFQLHLTCKDCKVIRCQFSTFEQCQEWLKRLNNAIRPPAKIEDLFSFAYHAWCMEVYASEKEQHGDLCRPGEHVTSRFKNEVERMGFDMNNAWRISNINEKYKLCGSYPQELIVPAWITDKELESVSSFRSWKRIPAVIYRHQSNGAVIARCGQPEVSWWGWRNADDEHLVQSVAKACASDSRSSGSKLSTRNTSRDFPNGGDLSDVEFDSSLSNASGAESLAIQPQKLLILDARSYAAAVANRAKGGGCECPEYYPNCEVVFMGMANIHSIRRSFQSLRLLCTQMPDPGNWLSALESTKWLHHLSVLLKSALLVVHAVDQDQRPVLVHCSDGWDRTPQIVALAKLLLDPYYRTIEGFQVLVEMEWLDFGHKFADRCGHGENSDDLNERCPVFLQWLDCVHQLQRQFPCSFEFNEAFLVKLVQHTYSCLFGTFLCNNAKERGEKHTQERTCSVWSLLRAGNKAFKNLLYSSQSEAVLYPVCHVRNLMLWSAVYLPCPSPTTPVDDSCAPYPAPGTSPDDPPLSRLPKTRSYDNLTTACDNTVPLASRRCSDPSLNEKWQEHRRSLELSSLAGPGEDPLSADSLGKPTRVPGGAELSVAAGVAEGQMENILQEATKEESGVEEPAHRAGIEIQEGKEDPLLEKESRRKTPEASAIGLHQDPELGDAALRSHLDMSWPLFSQGISEQQSGLSVLLSSLQVPPRGEDSLEVPVEQFRIEEIAEGREEAVLPIPVDAKVGYGTSQSCSLLPSQVPFETRGPNVDSSTDMLVEDKVKSVSGPQGHHRSCLVNSGKDRLPQTMEPSPSETSLVERPQVGSVVHRTSLGSTLSLTRSPCALPLAECKEGLVCNGAPETENRASEQPPGLSTLQMYPTPNGHCANGEAGRSKDSLSRQLSAMSCSSAHLHSRNLHHKWLHSHSGRPSATSSPDQPSRSHLDDDGMSVYTDTIQQRLRQIESGHQQEVETLKKQVQELKSRLESQYLTSSLHFNGDFGDEVMTRWLPDHLAAHCYACDSAFWLASRKHHCRNCGNVFCSSCCNQKVPVPSQQLFEPSRVCKSCYSSLHPTSSSIDLELDKPIAATSN

SEQ ID NO: 245365 - protein, 139 aa, Artificial Sequence
  derived and/or modified sequence
MDEETRHSLECIQANQIFPRKQLIREDENLQVPFLELHGESTEFVGRAEDAIIALSNYRLHIKFKESLVNVPLQLIESVECRDIFQLHLTCKDCKVIRCQFSTFEQCQEWLKRLNNAIRPPAKIEDLFSFAYHAWCMEV

SEQ ID NO: 245366 - DNA, 3486 bp, Artificial Sequence
  derived and/or modified sequence
atggacgaagaaactcgacactccttggaatgcatccaggctaaccagatcttccccagaaaacaattgatccgagaagatgagaatctgcaggtgccttttttggaactgcacggtgagtcaacagagtttgtgggacgtgcagaagatgccattatcgccctgtcgaactatcgactgcacatcaaatttaaagagagccttgtcaatgttcctctccagctgatagagtctgtcgaatgtcgagatatcttccagctgcatctcacctgcaaggactgcaaagtcatcaggtgtcagttctccacattcgagcaatgtcaggagtggcttaaacgtctcaataacgccattaggcctccagctaagattgaggatctgttcagtttcgcctaccatgcatggtgtatggaagtgtacgcttccgagaaagagcagcacggtgatctctgcaggcccggcgagcacgtgacctctagattcaaaaacgaagtcgaacgtatgggctttgacatgaataatgcatggaggatcagtaatataaatgagaagtataaactttgtggcagctacccacaggaactgatagttcccgcttggatcacagacaaagagctggagtccgtcagctctttccgtagctggaaaagaatccccgccgtgatttatcggcaccagtctaacggagcagtaatcgctagatgtggccagcctgaggtctcctggtggggttggcggaatgctgacgatgaacatctagtgcagtccgttgccaaggcctgcgcctcggacagtaggagctcagggtcaaaactgagtaccaggaatacctcacgggactttccgaacggcggagacctcagtgatgtcgagttcgacagcagcctgtccaatgcaagcggggcggagtctctggctatacagccacagaaactactgattctggatgctcggtcttatgcagcggcagtggctaatcgcgcaaaagggggaggctgcgaatgtcccgagtattatccaaattgtgaggtggtttttatggggatggctaatattcacagcatacgtcgcagcttccaatcattgcggctgctctgcacccagatgcctgaccctggaaattggttaagcgccttagagtccacaaagtggctgcatcatttatccgtcctactgaaatcagcccttctcgttgtgcacgccgtggatcaggatcagagacctgtgcttgtccactgctcagacggttgggaccgcacgcctcagatcgtggctctagccaaactgctccttgatccgtattataggaccattgaagggtttcaggtgctggtcgagatggaatggctggattttggtcacaagttcgccgatcggtgtggccacggcgagaattctgacgacttgaatgaacgctgccccgtgtttctgcagtggcttgattgcgttcatcagctccagcgccagttcccttgtagctttgagtttaacgaggcattcctggtcaaattggttcagcacacctatagctgcctgttcggaacatttctttgtaataatgccaaggagcgaggtgaaaagcacactcaggagcgcacatgttctgtctggtcactcctacgcgctggcaataaggcgttcaagaatctgctttattcctctcaaagcgaagccgtgctatatcctgtctgccacgtgaggaatctgatgctgtggtcagccgtgtacctgccttgcccttccccaacaacgccggtggatgattcatgtgccccatacccagctcctgggacttctccggacgatccccctctgagccgtctgcccaagacgagatcctacgataatctcactacagcctgcgacaacaccgtgcctttagcctcccgcagatgcagcgatccaagcctgaacgagaagtggcaggaacaccgccggagcttagagctttcttctctggccggtccaggcgaagatccactgagcgcagactcgttaggaaaaccgacgagagtgcccggtggagctgagctctctgtcgccgccggtgtagcggaggggcaaatggagaatattctgcaggaagcaacaaaggaggaatccggcgtggaggaacccgcgcacagggccggaatcgaaattcaggagggaaaggaagacccactactagaaaaggaaagtagacggaagactcctgaggccagcgccatcggtctccaccaagacccagagttgggcgacgcagcgctcaggtcccacctggatatgtcttggcccctattctctcaaggcattagtgagcaacagtctggtctgtcggttctgctctcaagcctgcaagttcctcctcgtggcgaggatagcctggaagtccccgtggagcagtttcggatcgaggagatagctgagggcagagaagaagctgtccttccgattcctgtcgatgctaaggtgggctacggcacttctcagagttgttctcttttaccttctcaagtccccttcgaaaccagaggtcccaatgtcgactcctccaccgatatgctggtcgaagacaaagtgaagagtgtgtcaggcccacagggccatcatcggagttgtctagtgaatagtggcaaagacaggctgccccagacaatggaaccctccccttctgagacaagtctggtggagcggccccaggttggctccgtggtgcatcgaacatcactcggctcaaccctgtctctgactcgctcaccatgcgctctccccctggctgaatgcaaagaaggtttggtctgcaacggagcccccgagactgagaatcgggcttccgagcagccccccggcttgtcaacgttgcagatgtatcccacccctaatggacactgcgccaatggggaagccggaaggtctaaagatagcctctcacgccagctcagcgcgatgtcatgctctagcgcacacctgcacagcaggaacctgcaccataaatggctccactcacactcaggcagaccatcagctaccagcagcccagaccagcctagccgttcccacctggatgacgatggcatgtctgtgtacaccgataccatccagcagcggttacgacagattgaaagtggccatcagcaggaggtcgagacgttaaaaaagcaggtgcaggagctgaaatccaggcttgagtcccaatacctgacaagttccctgcactttaatggtgacttcggtgatgaggtgatgaccagatggctgcccgaccatttagccgctcattgctacgcctgcgactccgccttctggctagcttcacgtaagcaccattgtagaaactgtgggaatgtattttgctccagttgttgtaatcagaaggtgcctgtcccctcgcagcaactgtttgaaccttctcgggtttgcaaatcatgttattccagtctccaccccaccagtagcagcatagatttggagttggacaaacccatcgcagccacctcgaactag

SEQ ID NO: 245367 - DNA, 420 bp, Artificial Sequence
  derived and/or modified sequence
atggacgaagagaccaggcactctctggaatgcatccaggcaaatcagatttttcccagaaagcagttaatacgggaagatgaaaatctgcaagtgcccttcctagaactacacggcgagtcaactgagttcgtcggccgagccgaggatgcaattattgccctgagcaattatcgtttgcacattaagtttaaagagagccttgtcaacgtgcctttgcagcttatagagagcgtagaatgccgagacatttttcagttacacctcacttgcaaggattgtaaggttatccgatgccagttcagcacctttgagcagtgccaggagtggctcaagcgattgaataacgcaatcagaccacccgccaaaatcgaagacttgtttagcttcgcctatcatgcttggtgtatggaggtttag

SEQ ID NO: 245368 - DNA, 3486 bp, Artificial Sequence
  derived and/or modified sequence
atggatgaggagaccaggcacagcctggagtgcatccaggccaaccagatcttccccaggaagcagctgatccgggaggatgagaacctgcaggtgcccttcctggagctgcacggggagagcacagaatttgtgggccgggcagaagatgccatcatcgccctgagcaactaccgcctgcacatcaagttcaaggagagcctggtgaatgtgcccctgcagctgattgagagcgtggagtgccgggacatcttccagctgcacctgacctgcaaggactgcaaggtgatccgctgccagttcagcacctttgagcagtgccaggagtggctgaagaggctgaacaatgccatccggcccccagccaagattgaagatctcttctcctttgcctaccacgcctggtgcatggaggtgtatgccagcgagaaggagcagcacggggacctgtgcaggcctggagagcacgtgaccagccgcttcaagaatgaggtggagaggatgggctttgacatgaacaatgcctggaggatcagcaacatcaatgagaagtacaagctgtgtggcagctacccccaggagctgattgtgcctgcctggatcacagacaaggagctggagagcgtgtcctccttccgctcctggaagaggatcccagctgtgatctaccgccaccagagcaatggagctgtgattgcccgctgtggccagcctgaggtgtcctggtggggctggagaaatgctgatgatgagcacctggtgcagagcgtggccaaggcctgtgccagtgacagccgcagcagcggcagcaagctgagcaccaggaacaccagccgggacttccccaatggaggagacctgagtgatgtggagtttgacagcagcctgagcaatgccagcggggctgagagcctggccatccagccccagaagctgctgatcctggatgcccggagctatgctgctgctgtggccaacagagccaagggcggcggctgtgagtgcccagagtactaccccaactgtgaggtggtgttcatgggcatggccaacatccacagcatccgccgctccttccagagcctgcggctgctgtgcacccagatgccagaccccggcaactggctgagcgccctggagagcaccaagtggctgcaccacctgtctgtgctgctgaagagcgccctgctggtggtgcatgctgtggaccaggaccagaggcctgtgctggtgcactgcagtgatggctgggacaggaccccccagatcgtggccctggccaagctgctgctggacccctactaccgcaccatcgagggcttccaggtgctggtggagatggagtggctggactttggccacaagtttgctgacagatgtggccacggggagaacagtgatgacctgaatgaacgctgccctgtgttcctgcagtggctggactgtgtgcaccagctgcagaggcagttcccctgcagctttgagttcaatgaggccttcctggtgaagctggtgcagcacacctacagctgcctgtttggcaccttcctgtgcaacaatgccaaggagcggggggagaagcacacccaggagaggacctgcagcgtgtggagcctgctgcgggccggcaacaaggccttcaagaacctgctgtacagcagccagagcgaggccgtgctgtaccctgtgtgccacgtgaggaacctgatgctgtggagcgctgtgtacctgccctgccccagccccaccacccctgtggatgacagctgtgccccctacccagcccctggcaccagcccagatgatcctcccctgagccggctgcccaagaccaggagctatgacaacctgaccacagcctgtgacaacacagtgcccctggccagccgccgctgcagcgaccccagcctgaatgagaagtggcaggagcacagaagaagcctggagctgagcagcctggccggccctggagaggaccccctgtctgctgacagcctgggcaagcccaccagggtgcctggaggagctgagctgtctgtggccgccggcgtggccgagggccagatggagaacatcctgcaggaggccaccaaggaggagagcggcgtggaggagcccgcccaccgggccggcatcgagatccaggagggcaaggaggaccccctgctggagaaggagagcaggaggaagaccccagaggccagcgccatcggcctgcaccaggaccctgagctgggagatgctgccctgcggagccacctggacatgtcctggcccctcttcagccagggcatcagcgagcagcagagcggcctgtctgtgctgctgagcagcctgcaggtgcccccaagaggagaggacagcctggaggtgcctgtggagcagttccgcatcgaggagattgctgagggccgggaggaggccgtgctgcccatccctgtggatgccaaggtgggctacggcaccagccagagctgcagcctgctgcccagccaggtgccctttgagacccggggccccaacgtggacagcagcacagacatgctggtggaggacaaggtgaagtctgtgtctggcccccagggccaccacaggagctgcctggtgaacagcggcaaggaccggctgccccagaccatggagcccagccccagcgagaccagcctggtggagcggccccaggtgggctctgtggtgcacaggaccagcctgggcagcaccctgagcctgaccaggagcccctgtgccctgcccctggccgagtgcaaggagggcctggtgtgcaatggagcccctgagacagaaaatagagccagcgagcagcccccaggcctgagcaccctgcagatgtaccccaccccaaatggccactgtgccaacggggaggccggccgcagcaaggacagcctgagccggcagctgagcgccatgagctgcagcagcgcccacctgcacagcaggaacctgcaccacaagtggctgcacagccacagcggccggcccagcgccaccagcagcccagaccagcccagccgcagccacctggatgatgatggcatgtctgtgtacacagacaccatccagcagaggctgcggcagatcgagagcggccaccagcaggaggtggagaccctgaagaagcaggtgcaggagctgaagagccggctggagagccagtacctgaccagcagcctgcacttcaacggggactttggagatgaggtgatgacccgctggctgcctgaccacctggccgcccactgctacgcctgtgacagcgccttctggctggccagcaggaagcaccactgcaggaactgtggaaatgtgttctgcagcagctgctgcaaccagaaggtgcctgtgcccagccagcagctgtttgagcccagccgggtgtgcaagagctgctacagcagcctgcaccccaccagcagcagcattgacctggagctggacaagcccatcgccgccaccagcaactag

SEQ ID NO: 245369 - DNA, 420 bp, Artificial Sequence
  derived and/or modified sequence
atggatgaggagaccaggcacagcctggagtgcatccaggccaaccagatcttccccaggaagcagctgatccgggaggatgagaacctgcaggtgcccttcctggagctgcacggggagagcacagaatttgtgggccgggcagaagatgccatcatcgccctgagcaactaccgcctgcacatcaagttcaaggagagcctggtgaatgtgcccctgcagctgattgagagcgtggagtgccgggacatcttccagctgcacctgacctgcaaggactgcaaggtgatccgctgccagttcagcacctttgagcagtgccaggagtggctgaagaggctgaacaatgccatccggcccccagccaagattgaagatctcttctcctttgcctaccacgcctggtgcatggaggtgtag

SEQ ID NO: 245370 - DNA, 4464 bp, Artificial Sequence
  derived and/or modified sequence
agaaggcggcggcggcggcggagtagcagccggacgagacgtcccagcggctcaggcgctgcccagcgccggccctggcagggagcctggtggggtggcggagggggagactgtgccgtggagggcctcgccatgtcctgctgcccgacttccttgtgaaacctcctagtagaaaaagttcttgggacaaacttcatttgacttcaccataagggaaagaagagagccttgttggacactgaagaagggacggggatttctcctcctaatctgggcctcttgtcatggatgaagagactcggcacagccttgagtgcatccaggccaatcagatctttcccaggaagcagctgatccgggaggatgagaatcttcaggttcctttccttgaacttcatggagagagcacagagtttgtgggccgtgccgaggatgccatcattgccctttccaattacagacttcacatcaagttcaaggagtctcttgttaatgttccattacagcttatagaaagtgttgaatgccgagatatatttcagcttcatttgacttgcaaagactgcaaagttatcaggtgtcagttttcaacctttgagcagtgtcaagagtggctgaagagactgaacaacgcaatccgaccacctgctaaaatagaagatctcttctcatttgcataccatgcttggtgcatggaggtctatgccagtgaaaaagagcaacatggagacctgtgcagaccaggggagcatgtaacttcaaggtttaaaaacgaggtggagaggatgggttttgatatgaacaacgcctggaggatttccaacatcaatgagaagtacaaattatgtggtagctatcctcaagagctcatagtgcctgcctggatcactgacaaagaactggaaagtgtatcaagtttcaggtcctggaagcgcatccctgccgtcatctacaggcaccagagcaatggagctgtcattgcccgctgtggacagccagaggttagctggtggggctggcgaaatgcagatgatgagcatctggtacagtcagtagccaaagcttgtgcctctgactcccgatcgagtggcagcaagctgtcaactaggaacacttctcgagactttcccaatgggggagacctttctgacgtggagttcgattcttctctgtcaaatgcttcaggagcagagagtttagccatccaaccgcagaagcttttgatcttggatgcacgctcctatgcagctgctgtggcaaaccgagccaaaggaggaggctgcgaatgcccagagtattacccaaactgtgaagttgtgtttatggggatggcaaacattcattctattcggaggagttttcagtctctgcggttgctgtgcactcagatgccagatccgggaaattggctatcagctcttgaaagcacaaaatggctccatcacttgtctgtgcttctgaaatcagcgcttctggtagtgcatgctgtggatcaggatcagcggccggtgctagtacactgctcagatggctgggaccgcaccccccagattgtggcattggctaagctcttgctggacccttattaccgaaccatagagggtttccaggtcctcgtggaaatggagtggctggattttggccataaatttgctgaccggtgtggtcatggggagaactcggatgatctgaatgaacgttgcccagtgtttctgcagtggcttgactgtgttcatcagcttcagaggcaatttccttgctcttttgagttcaatgaagcattccttgtgaaactggtgcagcatacctattcctgcctgtttggaacattcctgtgcaacaacgccaaggagagaggggaaaagcatactcaggaacggacatgttccgtgtggtcacttcttcgggcaggcaacaaggctttcaaaaacctactgtattcctctcagtcagaagccgtgctgtaccctgtgtgccatgtgcgtaacctgatgctgtggagtgcagtgtacctgccctgcccatccccaaccacccctgtggacgacagctgtgcaccatacccagccccaggcaccagccctgatgatccccccctgagccggctaccaaagactagatcatacgacaatctgaccacagcctgtgacaacacagtgcctctggccagccggcgctgcagcgaccccagcctgaacgagaagtggcaggagcaccggcgctcactagagctgagcagcctggctggccctggagaggatcccctttctgccgacagcctagggaagcccaccagagtgccggggggtgccgagctttctgttgcagccggagtagctgaggggcagatggagaacatcttgcaggaggccaccaaagaggagagtggagtagaggaacctgcccacagggcaggcattgagatacaggagggtaaagaggaccctctcttagaaaaggagagcaggaggaagacacctgaggcctcagccattggacttcaccaagacccagaactgggtgatgctgctctgaggagccatctggatatgagctggcctctgttctcacagggcatttctgaacagcagagtgggctcagtgttctcctcagttctctccaggtcccccccaggggagaggattccctggaggtccctgtggagcagtttcgaatagaagagattgcagagggtagggaggaagcagttcttccaatcccagtagatgcaaaagttggctatggtacctcacagtcatgttctctgctaccttcccaagtcccttttgagaccagaggaccaaacgtggacagttctacagacatgttagtggaagataaggtgaagtcagtaagtgggccccaaggtcatcatagatcttgccttgtaaatagtggcaaggacaggcttcctcagaccatggaacccagcccttcagagacaagcctggtcgagaggccccaagtggggtctgtggtgcataggacttcccttggcagcactctcagcctgacacgttccccttgtgccttgcctttagccgaatgtaaagaggggcttgtgtgcaatggtgccccagagactgaaaacagggcctcagagcagcccccaggtcttagcaccctccagatgtaccccacacccaatgggcattgcgccaatggggaggctggtaggagcaaggactcactgagccgtcagctgtctgctatgagctgcagctctgcccacttacactcaaggaacttgcaccacaagtggctgcatagccactcaggaaggccatctgcaaccagcagccccgaccagccttcccgcagccacctggacgatgatggcatgtcagtgtacacagacacgatccaacagcgcctgcgtcagattgagtcaggccaccagcaggaagtagaaactttgaagaaacaagtccaggagctgaagagtcgcctggagagccagtacctgaccagctccctacactttaatggagactttggggatgaggtgatgacccgttggcttcctgaccacctggccgcccactgctatgcgtgcgacagtgccttctggcttgccagcaggaagcaccactgcaggaattgtgggaacgtattctgctccagttgttgtaaccagaaggttccagttcccagccagcagctctttgaacccagtcgagtatgcaagtcttgctatagcagcctacatcccacaagctccagcattgaccttgaactggataagcccattgctgccacttccaactgaagctcagtgacctgggtgggcagtggccaagctgctgttcctatgacaggcccactcaacctgggcagaccgagaggcccgtgcactttggaatgggagcgtggaaccacctgtacagagtgacagatttgggatgcaccactggattgtagattgatttttctttcctgtccccctactccctccctaccttttccatcctcctcctctgccttcaaaaaaggaaactttcccttggttgtcttaattttttttttttttgatggaagaccaagggttgccaggcccactgtaactgccgagctgcctgctgtcacgtgacactgagggatggcttgtttcttccgggtgggaggatggtggtcagagccaggagtatggagatctgagaccgtgagcagggaagaaagccagtgctaacatgcaaccattcctcacgccaccgccacatcagagctggttgggaaccctttgctgctggggaggctggaagcatattccccaagagcactgccctgggcatcatctccctcctgcgaggagctgagccagtcccctcacagatggataaatgaggctgatgtttggagggagaggcacacggtaaatggcatccccttaggcgcctctttgggaaaggaaagtggatgctcctttgaggcaggcgaggggctgggagtgggtagccgtcatg

SEQ ID NO: 245371 - DNA, 665 bp, Artificial Sequence
  derived and/or modified sequence
tgttgttgtggttgtgagaaggcggcggcggcggcggagtagcagccggacgagacgtcccagcggctcaggcgctgcccagcgccggccctggcagggagcctggtggggtggcggagggggagactgtgccgtggagggcctcgccatgtcctgctgcccgacttcaccataagggaaagaagagagccttgttggacactgaagaagggacggggatttctcctcctaatctgggcctcttgtcatggatgaagagactcggcacagccttgagtgcatccaggccaatcagatctttcccaggaagcagctgatccgggaggatgagaatcttcaggttcctttccttgaacttcatggagagagcacagagtttgtgggccgtgccgaggatgccatcattgccctttccaattacagacttcacatcaagttcaaggagtctcttgttaatgttccattacagcttatagaaagtgttgaatgccgagatatatttcagcttcatttgacttgcaaagactgcaaagttatcaggtgtcagttttcaacctttgagcagtgtcaagagtggctgaagagactgaacaacgcaatccgaccacctgctaaaatagaagatctcttctcatttgcataccatgcttggtgcatggaggtct

SEQ ID NO: 245372 - DNA, 3486 bp, Artificial Sequence
  derived and/or modified sequence
atggacgaggagacccggcacagcctggagtgcatccaggccaaccagatcttcccaaggaagcagttgattcgggaagacgagaatcttcaggttccttttctggagctccacggtgagagcaccgagttcgttggccgagctgaggacgctatcattgcgctgagtaactaccgtcttcacatcaagtttaaggagtccctggtcaatgtgcctcttcagctcatcgagtcggtggaatgcagagatatcttccagcttcatctcacgtgtaaagactgtaaggtaatacggtgccaattttcaacctttgagcagtgtcaggagtggttgaaacgcctcaacaatgctatccgacctcccgcgaagattgaggaccttttctcttttgcctatcatgcttggtgtatggaagtctatgccagcgaaaaggaacagcacggagacttatgtcggcccggagagcacgtcacttctcggttcaagaatgaagttgagcgcatgggcttcgatatgaataatgcatggcgcatctccaatattaacgagaaatataagctgtgtgggtcttatcctcaggagctgatcgttcccgcatggatcacagataaagaattggagagcgtcagttccttccgctcctggaaacgtattcccgccgtcatctacaggcatcagagcaacggcgctgtgatagccaggtgtgggcagcccgaagtatcatggtggggttggaggaacgcagatgatgagcacctggttcagtctgtcgccaaagcatgcgcaagcgactcccgcagttccgggagcaagctcagcacccgcaacacctccagggatttcccgaatggaggggatctaagtgatgtggaatttgatagctccttgagcaatgctagcggcgccgagagtctggcaattcagcctcagaagctgctcattctagacgcacggagttatgccgctgctgtggccaatcgggccaaaggcggaggttgtgaatgccctgagtactaccccaattgcgaggttgtatttatgggaatggccaacatccattcgatccgccggagcttccagtcattgcgactactttgtacgcagatgcctgaccctggcaattggttatctgctctggagtctactaagtggcttcatcatctgtccgtgttgctgaaatccgcactattggtggtgcatgcggtggaccaagatcagcggcccgtgctggttcactgtagcgacggatgggatcgaacccctcagatcgtcgcgctggcgaagctgctgttagatccgtattaccgtacaatcgaaggctttcaggtcttggtcgaaatggagtggttggatttcggtcataagtttgccgacagatgtggacacggtgaaaattctgacgacctaaacgagcgatgtcccgtgttcctgcaatggctggattgtgtacaccagctgcagagacagttcccttgctcgttcgaattcaacgaagcatttcttgtgaagctggtgcagcacacttactcctgcctttttggtacctttctgtgcaacaacgcaaaggagcgtggcgagaaacacacccaggaacggacgtgcagcgtctggagcctgcttagagcgggaaacaaggcctttaagaatctgctgtattcatctcagagtgaggctgttctctatcctgtttgccatgtaaggaacctgatgctttggagtgccgtatatctcccttgcccctctcccaccacgcccgtagacgacagctgtgccccgtatcccgctccaggaacctcccccgatgatccaccactgtcccggctccctaagactcgctcttatgacaacctgaccacggcttgcgataatacagttccccttgcgtcacgccgttgtagcgacccaagtctgaatgagaaatggcaggaacacaggagatcactagagttgtccagcttggcgggacctggcgaggatcctctgtcagctgacagcctcggcaagccaacccgggttccaggcggggccgagctaagcgttgccgctggagtagctgaaggtcagatggagaacatccttcaggaggccaccaaggaggagtccggcgtcgaagagcccgcccatagagcagggatcgagatccaggagggaaaagaggatcccctgctggaaaaggagtccaggaggaagacccccgaagcttctgcaattggcttgcatcaggacccagaactgggtgatgcagcgctccgtagccatttagatatgtcctggcctctgtttagccagggcatcagcgaacagcaatcagggctgtcggtgctgctgtcttctctgcaggtccctccacgcggcgaggattctctggaggtacccgtggaacaattccgcattgaagaaatcgcagaggggcgggaggaagccgttctccctataccagtagacgctaaagtgggatatggtacatcccagagctgttctcttcttccgtcacaggtgccgttcgagacccgcggtcccaacgtggactccagcacggatatgctagtcgaagacaaggttaagtccgtgtcgggccctcagggacatcaccgatcctgcttggtaaactctggaaaggaccggcttccacagactatggagccaagcccctcagagacatccttggtagaaaggcctcaggtcggatcagtggtgcataggaccagcctgggcagcactctgtcactcacgcgtagcccgtgtgcactcccactggctgagtgtaaagagggtctagtgtgcaacggcgcccctgagaccgagaaccgggcttccgaacaacctccaggacttagcactctgcagatgtatcccaccccaaacgggcattgtgctaatggcgaggccggcagatctaaggactcactgtctcggcagctctccgccatgtcttgtagctctgctcatttgcactcacgaaatctgcatcacaaatggcttcacagtcatagcggcaggcccagtgctacgagttccccagaccagcctagcaggtctcacttggacgacgatgggatgtccgtgtacaccgataccatccagcagcgactgcggcaaatagaaagtggccatcaacaagaggtggagactttgaagaaacaggtgcaggaactcaaatcccggctggagagccagtacctcacatcctcattgcacttcaatggagatttcggcgacgaagtgatgacaagatggcttcctgaccatttagctgcacactgctatgcgtgcgacagcgcattttggctagcctcacgaaagcatcactgtcgaaattgtggaaatgtcttttgcagttcatgttgtaatcagaaggtccccgtcccctctcagcagctcttcgaacccagtagggtgtgtaagagctgctattcttcactacacccgacttctagtagcattgatttggagctagataagcctatcgctgctacctccaattag

SEQ ID NO: 245373 - DNA, 420 bp, Artificial Sequence
  derived and/or modified sequence
atggacgaggagacccggcacagcctggagtgcatccaggccaaccagatttttccacgcaagcagctgatccgggaggatgagaacctgcaggtcccctttttagaattgcatggcgagtctactgagttcgtcggacgagccgaagatgccattatagcactgagcaactacagattgcatatcaaatttaaggaatctctcgtgaacgttcccctccaactgattgagtccgtggagtgccgagacatctttcaactgcacctcacctgcaaggattgtaaggtgattagatgccagttctcaacattcgagcagtgccaggagtggctgaaaagactgaataacgccatacgccctccggctaaaattgaagacttgttcagctttgcttaccacgcttggtgcatggaggtttag

SEQ ID NO: 245374 - DNA, 3486 bp, Artificial Sequence
  derived and/or modified sequence
atggacgaggaaacgagacacagtctcgagtgcattcaggcaaatcaaatatttcctcgaaagcagttgatcagagaggacgagaacttacaagtgcccttccttgagctccacggcgagagtaccgagttcgtgggacgagctgaagacgccatcatcgccctgtcaaattatcgtctgcatatcaagttcaaagaatctctggtcaacgtccccctgcagttaattgaaagcgtggaatgtcgggacatatttcagctgcaccttacatgcaaggattgtaaagttatcagatgtcaattctccacattcgaacagtgtcaagaatggcttaagaggcttaataacgctatccggccacccgctaaaattgaggatttgttttctttcgcataccatgcctggtgtatggaagtgtatgcctcagagaaggagcagcatggggatctgtgtcgcccaggagagcacgtcacatctaggtttaagaatgaagtggagaggatgggattcgatatgaataatgcctggcggatctctaatattaatgaaaagtacaagctttgtgggagttatcctcaggagcttatcgtgccggcttggataaccgacaaggagctggaaagcgtttcctcatttagatcgtggaagaggattcctgcagttatataccgccaccagtctaacggggctgtgatcgcccgttgtggccagcccgaagtttcatggtggggttggcgcaacgccgatgacgagcacttggtccaatctgttgcaaaggcctgcgcgtcggattcacggagctctgggagcaaattgtctacacgaaatacctctcgggactttcccaacggaggagacttgtctgacgtggaatttgatagtagcctgtcgaacgccagtggggcagaatctctcgccatacagcctcagaagctgcttatactagacgcccgatcctacgccgcagcagtggctaatagggccaaagggggagggtgcgaatgtccggaatactatcctaattgtgaagtcgtcttcatggggatggccaacatccacagtattagaaggtcctttcagagcctgagactcctgtgtacccagatgcccgacccgggtaattggctctcagcgctcgagagtacgaaatggctccaccacctgtccgtgttgttgaagagcgcacttctcgtggttcacgctgtcgaccaggaccagcgacctgtattggttcattgtagtgacgggtgggatcgtactccacagattgtggcccttgccaaactcttgctggatccttactatagaaccatcgagggctttcaggtgttagtggaaatggagtggctagatttcggccacaaatttgcagacagatgtggccacggagagaacagcgatgacctgaacgagcgatgcccagttttcctgcagtggttggactgtgtgcaccagttacagcgccaattcccttgctcgttcgagttcaacgaagcctttctcgtcaaactcgttcaacacacctactcatgcctgttcggcaccttcctgtgcaataatgcgaaagagagaggcgagaaacacacacaggaacggacctgctcagtttggagcctactgcgcgcaggcaataaagcttttaagaacttactttatagcagtcagagcgaggcggtgttgtatcctgtatgccacgttcgaaacctaatgctctggagtgccgtgtacctcccatgtccgtctcctacaactccggtggacgattcttgtgcgccttaccccgcaccaggaacgagtcctgacgaccctccactctcccggctgccaaaaacacggagttatgataacctgacaaccgcctgcgacaatacggtccctctggcctccaggcggtgcagtgacccatccttaaacgaaaagtggcaggagcaccggagatccttggaactgtccagtctggcaggaccaggcgaagacccgttatccgctgacagtctgggaaagcccacacgggtgcccggaggtgccgaactgtctgtggccgctggagtggcggaaggacaaatggagaacatcctccaggaagcaacaaaagaggagagcggagtcgaggagcccgctcatcgcgcaggcatagagatccaggagggcaaggaagatcccttgctcgagaaagagtctaggcgtaagacaccggaggctagcgcaatcggcctacaccaggaccctgaattaggggacgccgctctcagaagccatttggatatgagctggccgctgttttcccagggcatcagcgagcagcaatccggtctcagtgttctgctttcttcactgcaggtcccacccagaggagaagatagtctcgaggtccctgtggaacaatttaggattgaggaaatagccgagggcagagaagaggccgtcctgcccattccagttgacgctaaggtgggatatgggacatcccagtcatgttccctgttaccctcccaggttcctttcgaaacgcggggtccgaatgtggattcctcaactgatatgctggtcgaagacaaagtgaaatctgtctctggacctcagggccatcaccgctcatgtctggtgaactccggcaaagaccgactcccgcagactatggaaccatcaccttcggagacaagcttggtcgagcgccctcaggtagggtccgttgttcacagaacaagcttgggcagcaccctgagccttactaggtccccttgtgctcttcctttggcagaatgtaaggagggcttggtctgtaatggtgctcccgaaaccgagaatcgtgcgtccgaacagccacccggtcttagtacccttcagatgtatcccacgccgaacgggcattgtgcgaatggagaagctgggagaagcaaagattctctgtcgaggcagctgagcgcgatgtcctgctcctcagcccacttgcacagcaggaatttacaccataaatggctgcatagccatagcggccgtcccagcgcaacttcatcaccagaccagccatcccgctcccacttggacgacgacggcatgagtgtgtatacagacactatccagcagagattgaggcagatcgaaagcggtcatcagcaggaggttgaaactctgaaaaaacaggtacaggagctaaaaagccggctggaatctcagtacctgacctcatctctccatttcaatggagattttggcgatgaagtgatgacacgttggttaccagatcaccttgcagcacactgttatgcgtgcgactccgccttttggctggccagtagaaaacatcactgccgcaactgcggaaacgtcttctgttcttcttgctgtaatcagaaggtccctgtgccctcacaacagctgttcgaaccatccagagtctgtaaatcatgttacagctcactgcaccccacatccagctctatcgatctggagttggataaaccaatcgctgcgacaagcaactag

SEQ ID NO: 245375 - DNA, 420 bp, Artificial Sequence
  derived and/or modified sequence
atggacgaggagacgaggcactccctggaatgtatccaggccaatcagatattcccccgaaagcagctgattagagaagacgaaaatctacaagtgcctttcttagagttgcacggtgagtcaacagagtttgttggcagggctgaggatgctatcattgccttaagtaactacagactacacatcaaattcaaagagtcccttgtcaatgtgccgcttcaactgatcgagagtgtggaatgtcgtgatattttccagctgcaccttacctgtaaagactgcaaggtgattcggtgccaattttcaactttcgaacagtgccaggagtggctgaagcggttgaataacgccatcagacctcctgctaagatcgaggatctgttttcttttgcctaccacgcctggtgcatggaggtctag

SEQ ID NO: 245376 - DNA, 3486 bp, Artificial Sequence
  derived and/or modified sequence
atggacgaggagaccagacacagcctggagtgcatccaggccaaccagatcttccccagaaagcagctgatcagagaggacgagaacctgcaggtgcccttcctggagctgcacggcgagagcaccgagttcgtgggcagagccgaggacgccatcatcgccctgagcaactacagactgcacatcaagttcaaggagagcctggtgaacgtgcccctgcagctgatcgagagcgtggagtgcagagacatcttccagctgcacctgacctgcaaggactgcaaggtgatcagatgccagttcagcaccttcgagcagtgccaggagtggctgaagagactgaacaacgccatcagaccccccgccaagatcgaggacctgttcagcttcgcctaccacgcctggtgcatggaggtgtacgccagcgagaaggagcagcacggcgacctgtgcagacccggcgagcacgtgaccagcagattcaagaacgaggtggagagaatgggcttcgacatgaacaacgcctggagaatcagcaacatcaacgagaagtacaagctgtgcggcagctacccccaggagctgatcgtgcccgcctggatcaccgacaaggagctggagagcgtgagcagcttcagaagctggaagagaatccccgccgtgatctacagacaccagagcaacggcgccgtgatcgccagatgcggccagcccgaggtgagctggtggggctggagaaacgccgacgacgagcacctggtgcagagcgtggccaaggcctgcgccagcgacagcagaagcagcggcagcaagctgagcaccagaaacaccagcagagacttccccaacggcggcgacctgagcgacgtggagttcgacagcagcctgagcaacgccagcggcgccgagagcctggccatccagccccagaagctgctgatcctggacgccagaagctacgccgccgccgtggccaacagagccaagggcggcggctgcgagtgccccgagtactaccccaactgcgaggtggtgttcatgggcatggccaacatccacagcatcagaagaagcttccagagcctgagactgctgtgcacccagatgcccgaccccggcaactggctgagcgccctggagagcaccaagtggctgcaccacctgagcgtgctgctgaagagcgccctgctggtggtgcacgccgtggaccaggaccagagacccgtgctggtgcactgcagcgacggctgggacagaaccccccagatcgtggccctggccaagctgctgctggacccctactacagaaccatcgagggcttccaggtgctggtggagatggagtggctggacttcggccacaagttcgccgacagatgcggccacggcgagaacagcgacgacctgaacgagagatgccccgtgttcctgcagtggctggactgcgtgcaccagctgcagagacagttcccctgcagcttcgagttcaacgaggccttcctggtgaagctggtgcagcacacctacagctgcctgttcggcaccttcctgtgcaacaacgccaaggagagaggcgagaagcacacccaggagagaacctgcagcgtgtggagcctgctgagagccggcaacaaggccttcaagaacctgctgtacagcagccagagcgaggccgtgctgtaccccgtgtgccacgtgagaaacctgatgctgtggagcgccgtgtacctgccctgccccagccccaccacccccgtggacgacagctgcgccccctaccccgcccccggcaccagccccgacgacccccccctgagcagactgcccaagaccagaagctacgacaacctgaccaccgcctgcgacaacaccgtgcccctggccagcagaagatgcagcgaccccagcctgaacgagaagtggcaggagcacagaagaagcctggagctgagcagcctggccggccccggcgaggaccccctgagcgccgacagcctgggcaagcccaccagagtgcccggcggcgccgagctgagcgtggccgccggcgtggccgagggccagatggagaacatcctgcaggaggccaccaaggaggagagcggcgtggaggagcccgcccacagagccggcatcgagatccaggagggcaaggaggaccccctgctggagaaggagagcagaagaaagacccccgaggccagcgccatcggcctgcaccaggaccccgagctgggcgacgccgccctgagaagccacctggacatgagctggcccctgttcagccagggcatcagcgagcagcagagcggcctgagcgtgctgctgagcagcctgcaggtgccccccagaggcgaggacagcctggaggtgcccgtggagcagttcagaatcgaggagatcgccgagggcagagaggaggccgtgctgcccatccccgtggacgccaaggtgggctacggcaccagccagagctgcagcctgctgcccagccaggtgcccttcgagaccagaggccccaacgtggacagcagcaccgacatgctggtggaggacaaggtgaagagcgtgagcggcccccagggccaccacagaagctgcctggtgaacagcggcaaggacagactgccccagaccatggagcccagccccagcgagaccagcctggtggagagaccccaggtgggcagcgtggtgcacagaaccagcctgggcagcaccctgagcctgaccagaagcccctgcgccctgcccctggccgagtgcaaggagggcctggtgtgcaacggcgcccccgagaccgagaacagagccagcgagcagccccccggcctgagcaccctgcagatgtaccccacccccaacggccactgcgccaacggcgaggccggcagaagcaaggacagcctgagcagacagctgagcgccatgagctgcagcagcgcccacctgcacagcagaaacctgcaccacaagtggctgcacagccacagcggcagacccagcgccaccagcagccccgaccagcccagcagaagccacctggacgacgacggcatgagcgtgtacaccgacaccatccagcagagactgagacagatcgagagcggccaccagcaggaggtggagaccctgaagaagcaggtgcaggagctgaagagcagactggagagccagtacctgaccagcagcctgcacttcaacggcgacttcggcgacgaggtgatgaccagatggctgcccgaccacctggccgcccactgctacgcctgcgacagcgccttctggctggccagcagaaagcaccactgcagaaactgcggcaacgtgttctgcagcagctgctgcaaccagaaggtgcccgtgcccagccagcagctgttcgagcccagcagagtgtgcaagagctgctacagcagcctgcaccccaccagcagcagcatcgacctggagctggacaagcccatcgccgccaccagcaactag

SEQ ID NO: 245377 - DNA, 420 bp, Artificial Sequence
  derived and/or modified sequence
atggacgaggagaccagacacagcctggagtgcatccaggccaaccagatcttccccagaaagcagctgatcagagaggacgagaacctgcaggtgcccttcctggagctgcacggcgagagcaccgagttcgtgggcagagccgaggacgccatcatcgccctgagcaactacagactgcacatcaagttcaaggagagcctggtgaacgtgcccctgcagctgatcgagagcgtggagtgcagagacatcttccagctgcacctgacctgcaaggactgcaaggtgatcagatgccagttcagcaccttcgagcagtgccaggagtggctgaagagactgaacaacgccatcagaccccccgccaagatcgaggacctgttcagcttcgcctaccacgcctggtgcatggaggtgtag

SEQ ID NO: 245378 - protein, 280 aa, Artificial Sequence
  derived and/or modified sequence
MPKKAKPTGSGKEEGPAPCKQMKLEAAGGPSALNFDSPSSLFESLISPIKTETFFKEFWEQKPLLIQRDDPALATYYGSLFKLTDLKSLCSRGMYYGRDVNVCRCVNGKKKVLNKDGKAHFLQLRKDFDQKRATIQFHQPQRFKDELWRIQEKLECYFGSLVGSNVYITPAGSQGLPPHYDDVEVFILQLEGEKHWRLYHPTVPLAREYSVEAEERIGRPVHEFMLKPGDLLYFPRGTIHQADTPAGLAHSTHVTISTYQNNDAGARMRRCDLRAIAPQK

SEQ ID NO: 245379 - protein, 465 aa, Artificial Sequence
  derived and/or modified sequence
MPKKAKPTGSGKEEGPAPCKQMKLEAAGGPSALNFDSPSSLFESLISPIKTETFFKEFWEQKPLLIQRDDPALATYYGSLFKLTDLKSLCSRGMYYGRDVNVCRCVNGKKKVLNKDGKAHFLQLRKDFDQKRATIQFHQPQRFKDELWRIQEKLECYFGSLVGSNVYITPAGSQGLPPHYDDVEVFILQLEGEKHWRLYHPTVPLAREYSVEAEERIGRPVHEFMLKPGDLLYFPRGTIHQADTPAGLAHSTHVTISTYQNNSWGDFLLDTISGLVFDTAKEDVELRTGIPRQLLLQVESTTVATRRLSGFLRTLADRLEGTKELLSSDMKKDFIMHRLPPYSAGDGAELSTPGGKLPRLDSVVRLQFKDHIVLTVLPDQDQSDEAQEKMVYIYHSLKNSRETHMMGNEEETEFHGLRFPLSHLDALKQIWNSPAISVKDLKLTTDEEKESLVLSLWTECLIQVV

SEQ ID NO: 245380 - DNA, 1398 bp, Artificial Sequence
  derived and/or modified sequence
atgcctaagaaggctaagcccacgggctccggaaaagaggagggaccagctccttgtaagcagatgaaacttgaagcagcgggagggcccagtgcgctgaactttgactccccttcctcattattcgagtcactgattagtcctatcaagaccgagacctttttcaaagaattttgggagcagaagcctctgttaatccagagggacgacccagccctggcaacatactacggaagcttgttcaaactgacggacctgaaatcgctgtgctctaggggtatgtactacggcagagacgtcaatgtatgccgctgcgtgaacgggaaaaagaaagtgctgaacaaggatggcaaggcccattttctgcagcttcgaaaggattttgaccagaaacgcgccactattcagttccaccagcctcagaggttcaaggatgaattgtggagaatccaggaaaagcttgagtgctattttggttccctcgttgggagcaatgtgtacataacaccggctgggagtcagggacttccaccacactacgatgatgttgaagtattcattctgcaattggagggcgagaaacactggcgcctctaccaccccactgtaccgctggccagggaatacagcgtggaagccgaggagaggattggaagacccgtgcacgaatttatgctgaagccaggagacctgttatattttccaaggggaacgattcatcaggccgatactcccgcgggtctcgcccattccacacatgtgacaatatccacctaccagaataacagctggggggattttctgctggatactatctctgggctggtttttgataccgctaaggaggacgtggagctcaggaccggtatccctcgacagctgctgctgcaggtagaatctacaacagttgctacccggaggcttagtgggttcctgaggacgttggccgaccgccttgaagggacgaaggaattattgagctccgatatgaaaaaggactttataatgcatcgcttgcctccttactctgccggagacggcgccgaactttccacccctgggggcaaactgccccgactcgatagcgtggttaggctgcaatttaaagaccatattgtgcttacggtactcccggatcaagatcagtccgacgaagctcaggagaagatggtgtacatctaccactcactcaaaaactccagggaaactcacatgatgggaaacgaagaggagaccgagttccacggactccggttcccgctgtctcatctcgatgctcttaaacaaatctggaactcacctgctatctcagttaaagacctgaagttgacgacagacgaagagaaggagagtctggtactgtcgctgtggactgaatgccttattcaggtggtgtag

SEQ ID NO: 245381 - DNA, 1398 bp, Artificial Sequence
  derived and/or modified sequence
atgcccaaaaaagcgaagcctaccggctcaggcaaagaggaaggtccagctccttgcaagcagatgaaacttgaggctgcaggaggcccatctgctctcaatttcgactccccaagcagccttttcgagtcactcatctcccctataaaaacagaaaccttctttaaggagttctgggaacagaaaccactcttgatccagagggacgatccggcactcgctacttactatgggtctcttttcaaacttaccgatctgaaaagcctgtgtagccgtggcatgtactatgggcgcgatgtcaatgtgtgtcggtgcgttaacgggaaaaaaaaggtgctgaataaagatggcaaggcccacttcctccagctcaggaaggattttgaccagaagagagctactatccaattccaccagcctcaaagatttaaggatgaattgtggcgcatccaagagaaactggaatgctactttgggtctcttgtcggcagtaacgtttacattaccccagcgggatctcagggcctccctccccattacgacgatgtggaagtgtttatcctgcagctggagggtgaaaagcactggagactctaccatccgacggttcctctagctagagaatattctgtagaggccgaagaacggattggtcgacccgtacatgaattcatgttgaaacctggggaccttctgtactttccccggggaaccattcaccaggctgatacgcccgccgggttggctcactccacacacgtcacgatttctacatatcagaataacagctggggagacttcctcctagacacaatctcaggcctcgtctttgatacagccaaagaggacgttgagctgagaacggggatacctcgccagttactgctgcaggtggagtctaccacagttgcaactaggcgcctatcaggattcctgaggacattagccgacaggctggagggaactaaggaactcttatcatctgacatgaagaaggactttatcatgcatcgcctgccaccttattctgccggagatggtgctgagctctctacacctggtggtaaattgcctagactcgatagcgtggtgagacttcaattcaaagaccacatcgtgctgaccgtgctgcccgaccaggatcaatccgacgaggcccaggagaagatggtttatatctatcacagcctgaaaaatagccgagagacgcacatgatgggaaatgaggaggaaacggagtttcatgggttgcgtttccccctttctcaccttgacgcccttaagcagatttggaactctcccgccatcagtgtgaaggaccttaaactgacgacagatgaagagaaggaatcactggtcttgtcactatggacagaatgcctgattcaggtggtgtag

SEQ ID NO: 245382 - DNA, 1398 bp, Artificial Sequence
  derived and/or modified sequence
atgcccaagaaggccaagcccaccggcagcggcaaggaggagggccctgccccctgcaagcagatgaagctggaggccgccggcggccccagcgccctgaactttgacagccccagcagcctgtttgagagcctcatcagccccatcaagacagagaccttcttcaaggagttctgggagcagaagcccctgctgatccagagagatgatcctgccctggccacctactacggcagcctcttcaagctgacagacctgaagagcctgtgcagccggggcatgtactacggcagagatgtgaatgtgtgccgctgtgtgaatggcaagaagaaggtgctgaacaaggatggcaaggcccacttcctgcagctgaggaaggactttgaccagaagagggccaccatccagttccaccagccccagcgcttcaaggatgagctgtggaggatccaggagaagctggagtgctacttcggcagcctggtgggcagcaatgtgtacatcaccccagctggcagccagggcctgcccccccactatgatgatgtggaggtgttcatcctgcagctggagggggagaagcactggaggctgtaccaccccaccgtgcccctggcccgggagtacagcgtggaggccgaggagagaattggccggcctgtgcatgagttcatgctgaagccaggggacctgctgtacttcccccggggcaccatccaccaggccgacaccccagctggcctggcccacagcacccacgtgaccatcagcacctaccagaacaacagctggggagacttcctgctggacaccatcagcggcctggtgtttgacacagccaaggaggatgtggagctgaggacaggcatcccccggcagctgctgctgcaggtggagagcaccaccgtggccacccggcggctgagcggcttcctgcggaccctggccgaccggctggagggcaccaaggagctgctgagcagtgacatgaagaaggacttcatcatgcaccggctgcccccctacagcgctggagatggagctgagctgagcaccccaggcggcaagctgccccggctggacagcgtggtgcggctgcagttcaaggaccacatcgtgctgactgtgctgcctgaccaggaccagagtgatgaggcccaggagaagatggtgtacatctaccacagcctgaagaacagccgggagacccacatgatgggaaatgaggaggagacagagttccacggcctgcgcttccccctgagccacctggatgccctgaagcagatctggaacagccctgccatctctgtgaaggacctgaagctgaccacagatgaggagaaggagagcctggtgctgagcctgtggacagaatgtctcatccaggtggtgtag

SEQ ID NO: 245383 - DNA, 2923 bp, Artificial Sequence
  derived and/or modified sequence
gtgcccacgctgccccgcctccagccgctgcgccgcaacgcagtgggctcgcggccgcgagcaacaggccgtgccgggtgagtggggcgctctcgtgggcatcccagcgccggggcaggccgggtagtgcccgatcccgcggggcgcgcgctgctgctttaggcacccgggctcgggtgcgggtctgggagacctgtcggtcggcgagaagcctcggtggccggcgctgtggttgcgggacctgggacgcgctcccaggcgtcccacctccccggagactggggcagggtgggtggggcccggatctaggggtagggtcgcggaagccttggttacagagagtcgcacacgtggcctgctaatggtcgcgacaccggtgacgagcgcacggaaagtttggaggcttagcaaggagggtggtgccggcctccgcccggtggtggcagaactgcctgtgcgagcacggcttccacgtgggctgcgccgccgggcgtcatgtcgggcctaagagacacgctctacagctgtgaaatctgaagttcaggtttgcatttccttactgctttgtcttgaagacagaacgatgccaaagaaagcaaagcctacagggagtgggaaggaagaggggccggctccctgtaagcagatgaagttagaagcagctggggggccttcagctttaaactttgacagtcccagtagtctctttgaaagtttaatctcgcccatcaagacagagacttttttcaaggaattctgggagcagaagccccttctcattcagagagatgaccctgcactggccacatactatgggtccctgttcaagctaacagatctgaagagtctgtgcagccgggggatgtactatggaagagatgtgaatgtctgccggtgtgtcaatgggaagaagaaggttttaaataaagatggcaaagcacactttcttcagctgagaaaagattttgatcagaaaagggcaacgattcagtttcaccaacctcagagatttaaggatgagctttggaggatccaggagaagctggaatgttactttggctccttggttggctcgaatgtgtacataactcccgcaggatctcagggcctgccgccccattatgatgatgtcgaggttttcatcctgcagctggagggagagaaacactggcgcctctaccaccccactgtgcccctggcacgagagtacagcgtggaggccgaggaaaggatcggcaggccggtgcatgagtttatgctgaagccgggtgatttgttgtactttcccagaggaaccattcatcaagcggacactcctgcggggctggcccactctactcacgtgaccatcagcacctaccagaacaattcatggggagatttccttttggataccatctcggggcttgtatttgatactgcaaaggaagacgtggagttacggaccggcataccccggcagctgctcctgcaggtggaatccacaactgttgctacaagacgattaagtggcttcctgaggacacttgcagaccggctggagggcaccaaagaactgctttcctcagacatgaagaaggattttattatgcacagactccccccttactctgcgggagatggggcagagctgtcaacaccaggtggaaagttaccgaggctggacagtgtagtgagactgcagtttaaagaccacattgtcctcacagtactgccggatcaagatcaatctgatgaagctcaagaaaagatggtgtacatctatcattccttaaagaatagtagagagacacacatgatgggaaatgaggaggaaacagagtttcatggacttcgcttccctttgtcacatttggatgcactgaagcaaatttggaatagtccagctatttctgtcaaggacctgaaacttactacagatgaggaaaaggaaagcctggtattatccctctggacagaatgtttaattcaagtagtctagtgcctttgcagaatcaaatgcctactattttatatgcatatattaaaagaaaagcaaagacctgagccgaggagaggatgaattcaagtttccttacctgcgtatctactaacaaacatgagacctccctgttacaggtggtcagttggccaaatgtactaacgggcacatgaaagaaagaacagcaaattaccaagtgtctcagaaaatgacaaaaccatattttgacaagtttatttaatccagtgtggtagaaaaggcacaattccaatgtatcatttagaattgaatgtcattaacctggctttgttctttggaagaaacaacttctttaaagagcttctttggctctagaaaaatttcaaacaattaaaataagaaaaaattttaaactggttttttataatgaaaatatacatacctttgtgtatagacaagcccatgcccattaaaataaagttatcctgtaacataaattttattaaataatacttccccacagatgagaggcacgcaacacctatggacaaaagggagttacagaggctgcttaaaagatggagaaaagcctgagattgaaggaggaaaaaaacccagtatttaaagtctataaaaaatactcaaaatagtgggtcttcgagtttaaaatagtcattgttattttacattctaaagtgcatgtaggttgatattttttaaaatatcattggagaatttaatctttctttataaaaatagagcatttttctgctttctggcaaaagttggggataaaaggaaaaaaagttgtcaaaatgtaattttcagtccaattcaccaggaaaacatgcttgtgaattgtgcagtaaaaggtggtaatgactactggaagctaagtcaaaggtgatttcctacctgattttacttacttaaataaaagttacttacaatgggagtgaaaaa

SEQ ID NO: 245384 - DNA, 2341 bp, Artificial Sequence
  derived and/or modified sequence
acgctgccccgcctccagccgctgcgccgcaacgcagtgggctcgcggccgcgagcaacaggccgtgccgggtttgcatttccttactgctttgtcttgaagacagaacgatgccaaagaaagcaaagcctacagggagtgggaaggaagaggggccggctccctgtaagcagatgaagttagaagcagctggggggccttcagctttaaactttgacagtcccagtagtctctttgaaagtttaatctcgcccatcaagacagagacttttttcaaggaattctgggagcagaagccccttctcattcagagagatgaccctgcactggccacatactatgggtccctgttcaagctaacagatctgaagagtctgtgcagccgggggatgtactatggaagagatgtgaatgtctgccggtgtgtcaatgggaagaagaaggttttaaataaagatggcaaagcacactttcttcagctgagaaaagattttgatcagaaaagggcaacgattcagtttcaccaacctcagagatttaaggatgagctttggaggatccaggagaagctggaatgttactttggctccttggttggctcgaatgtgtacataactcccgcaggatctcagggcctgccgccccattatgatgatgtcgaggttttcatcctgcagctggagggagagaaacactggcgcctctaccaccccactgtgcccctggcacgagagtacagcgtggaggccgaggaaaggatcggcaggccggtgcatgagtttatgctgaagccgggtgatttgttgtactttcccagaggaaccattcatcaagcggacactcctgcggggctggcccactctactcacgtgaccatcagcacctaccagaacaattcatggggagatttccttttggataccatctcggggcttgtatttgatactgcaaaggaagacgtggagttacggaccggcataccccggcagctgctcctgcaggtggaatccacaactgttgctacaagacgattaagtggcttcctgaggacacttgcagaccggctggagggcaccaaagaactgctttcctcagacatgaagaaggattttattatgcacagactccccccttactctgcgggagatggggcagagctgtcaacaccaggtggaaagttaccgaggctggacagtgtagtgagactgcagtttaaagaccacattgtcctcacagtactgccggatcaagatcaatctgatgaagctcaagaaaagatggtgtacatctatcattccttaaagaatagtagagagacacacatgatgggaaatgaggaggaaacagagtttcatggacttcgcttccctttgtcacatttggatgcactgaagcaaatttggaatagtccagctatttctgtcaaggacctgaaacttactacagatgaggaaaaggaaagcctggtattatccctctggacagaatgtttaattcaagtagtctagtgcctttgcagaatcaaatgcctactattttatatgcatatattaaaagaaaagcaaagacctgagccgaggagaggatgaattcaagtttccttacctgcgtatctactaacaaacatgagacctccctgttacaggtggtcagttggccaaatgtactaacgggcacatgaaagaaagaacagcaaattaccaagtgtctcagaaaatgacaaaaccatattttgacaagtttatttaatccagtgtggtagaaaaggcacaattccaatgtatcatttagaattgaatgtcattaacctggctttgttctttggaagaaacaacttctttaaagagcttctttggctctagaaaaatttcaaacaattaaaataagaaaaaattttaaactggttttttataatgaaaatatacatacctttgtgtatagacaagcccatgcccattaaaataaagttatcctgtaacataaattttattaaataatacttccccacagatgagaggcacgcaacacctatggacaaaagggagttacagaggctgcttaaaagatggagaaaagcctgagattgaaggaggaaaaaaacccagtatttaaagtctataaaaaatactcaaaatagtgggtcttcgagtttaaaatagtcattgttattttacattctaaagtgcatgtaggttgatattttttaaaatatcattggagaatttaatctttctttataaaaatagagcatttttctgctttctggcaaaagttggggataaaaggaaaaaaagttgtcaaaatgtaattttcagtccaattcaccaggaaaacatgcttg

SEQ ID NO: 245385 - DNA, 1398 bp, Artificial Sequence
  derived and/or modified sequence
atgcccaagaaggccaagcccaccggcagcggcaaggaggagggccctgccccctgcaagcaaatgaaattggaggctgctggaggcccgtccgctctcaactttgactccccgtcttccctcttcgagagcctcatatccccaattaaaactgaaaccttttttaaggaattttgggagcagaaacctttgctgattcagcgcgacgaccctgctttagcgacatactacggaagcttgttcaaactgaccgacctgaaaagtctgtgcagtcgcggaatgtactatggacgtgacgttaatgtgtgcagatgtgtcaacggaaagaagaaggtcctgaacaaggatgggaaagcgcacttcctgcaattgaggaaggacttcgatcagaagagagcaacaattcagttccatcagccacagagatttaaagacgaattatggaggatacaagagaagctggaatgttacttcgggtcacttgttggcagcaacgtgtacattacacccgctggaagtcagggcctcccaccccactatgatgacgtggaagtcttcatactacagctggagggcgaaaaacactggcgcttgtaccacccaactgtgccactcgctcgcgaatattctgtggaggccgaagaaaggatagggcgccctgtgcacgagtttatgcttaagcccggagatctgctgtacttcccaagggggaccattcaccaagcagacactcccgcaggtctggcacattcaacgcacgtgacaattagcacctaccagaacaactcttggggagacttcctgcttgataccatctcaggcctagtgttcgacacagccaaggaggatgtggagttaaggactgggattcccagacagcttttactgcaggtcgagtctacgactgttgccactcggcggctgagtgggttccttaggaccctcgccgacaggctggaaggcactaaagaactcctgtcaagtgatatgaaaaaggacttcataatgcatcggctccccccgtacagtgccggggacggcgctgaactgagcacgcctggagggaagttacccaggttggactctgtagttaggctccaatttaaagatcatatcgtcctcacggtgttgcccgatcaggaccagagtgacgaagcgcaggaaaaaatggtgtatatctaccacagtctgaaaaattccagggaaactcacatgatgggtaatgaggaggagacagagttccatggcctcaggtttcccctcagccatctggacgctctgaagcagatctggaacagcccagctatcagtgttaaggatctcaaactgacaacagacgaggagaaagagagtctggtactcagtctctggacggagtgtctaattcaggtggtctag

SEQ ID NO: 245386 - DNA, 1398 bp, Artificial Sequence
  derived and/or modified sequence
atgcccaagaaggccaagcccaccggcagcggcaaggaggagggccccgccccatgcaaacagatgaagctcgaggccgctggaggtcctagcgcactcaactttgattccccatcatctcttttcgaatcactgattagccctatcaagacagagacgttttttaaggagttctgggaacaaaaaccgcttctgattcagcgggacgatcctgcattagccacctattacggctcgctgtttaaactcaccgatttaaaatctttgtgctcccgcgggatgtactatggaagagacgtcaacgtgtgccggtgtgttaacggcaagaagaaagtgctcaacaaagacgggaaagcacattttctgcagctgagaaaggattttgatcagaagcgcgctaccattcagtttcaccaaccacagcgcttcaaggatgagttatggcgtattcaagagaaactggaatgctactttggaagcctggtcgggagcaacgtgtacatcaccccggcagggagccagggtctgccgccacattatgacgatgttgaagtctttatcctccagttggagggcgaaaagcactggcgcctttatcaccccaccgtgcctctcgcacgtgagtacagcgttgaagccgaagaacggatagggagacctgtccacgagttcatgttaaagcccggcgacctgctgtacttccctcgtggaaccattcaccaggccgacaccccggccggcttggcccacagtacccacgtaacaattagcacctatcagaataactcctggggtgatttcctcctcgatactatatccggcctcgtatttgatactgccaaggaggatgtggaactgaggactggcatccctaggcagctgttactgcaggtggagtccactacagtcgctacccgtagattgtcgggtttcctgcggaccctggcagacaggctggagggcactaaagagctcctgtccagtgacatgaagaaggattttatcatgcacagactccccccatacagcgctggcgacggggcagagttatctacacccgggggcaaactcccccgcctcgattctgtagtgaggctgcaatttaaagaccatattgttctgactgtacttccggaccaggaccagagcgacgaagctcaggagaaaatggtttatatttaccattctctaaagaactccagggaaacacacatgatgggaaacgaggaggaaaccgaattccacggcctgaggttccctctgagccacttagacgccctgaagcaaatttggaatagccccgctatttccgtcaaggatctgaaattgacaactgacgaggagaaagaaagtctagttttaagtctctggacggagtgtctaatacaagtggtctag

SEQ ID NO: 245387 - DNA, 1398 bp, Artificial Sequence
  derived and/or modified sequence
atgccaaaaaaggccaagcccactggctcaggcaaggaagaaggaccagcaccttgtaaacagatgaagcttgaggccgcaggcggtccgtcagccctcaatttcgacagcccttcctcgcttttcgaaagcctgatttcccccattaaaacagaaactttcttcaaggagttctgggagcagaagccattactgattcagcgggatgatcctgccctagctacatattatggaagcctgttcaagttgacagacctgaaatcactttgcagccgcggtatgtattacggccgagatgtgaacgtgtgcagatgtgttaacgggaaaaagaaggtgctgaataaggatggaaaagcacattttctgcagcttaggaaggattttgaccagaagcgcgctaccattcagttccatcagcctcagcggtttaaggatgagttatggcgaattcaagaaaaattggaatgttactttggcagtcttgttggctccaatgtgtatattacccctgccggttcacagggccttccccctcactacgatgatgtggaggtgttcatactgcagttggaaggagaaaaacactggcggctgtaccaccctaccgtccccctagcccgtgagtatagcgtggaagccgaggaaagaatcggacggcctgtgcatgagttcatgctgaaaccgggtgacctgttgtactttcctcggggaacaatacaccaagcggatacacctgcgggtctagcccattctacacacgtaacaatcagtacctaccagaataattcctggggtgactttcttttggataccatctccgggctggtattcgacacggcaaaggaagatgtggaactgcgaaccggcatccccaggcagcttctactgcaggtggagtcaacaacggtcgcaacccgcagactctcgggctttctccgaacattggccgatagattggaaggcaccaaggaactgttgtccagcgacatgaagaaggactttataatgcacagactgccgccttattctgccggagacggggcagaactgtcaaccccaggagggaagctccccagactggactctgtggtgcggttgcagtttaaggaccacatcgtccttactgtccttcccgaccaggatcagtctgatgaagcccaggagaaaatggtatatatctatcactctttaaaaaactcaagggagacccacatgatgggcaacgaggaggaaacagagtttcacggcttacgtttccccctctcccacctggacgccctgaaacagatttggaattcccctgcaattagcgtgaaagatctgaaactgacgacagacgaggaaaaggagtctctggtactaagcctgtggaccgaatgcctgatccaggtggtttag

SEQ ID NO: 245388 - DNA, 1398 bp, Artificial Sequence
  derived and/or modified sequence
atgcctaaaaaagctaagccgaccggttctgggaaggaagaaggacccgctccatgcaagcagatgaagttagaggcagctggtgggccaagtgctttgaatttcgactctccctctagcttatttgagagtctgatttccccgatcaagacggagacctttttcaaggagttttgggagcagaaaccactcttaattcagcgcgatgatccagccctcgctacgtattatggctcgctgtttaaactgaccgatctgaaatcactatgttcccgaggtatgtactatggacgagacgtgaatgtgtgtcggtgcgttaacgggaagaaaaaagtgctgaacaaggacgggaaagcccattttctccagctgaggaaggattttgaccagaagagggccaccatccagtttcatcaaccccagcggttcaaggacgaactgtggaggatccaggaaaaattagaatgctactttggcagtctcgttggaagcaatgtgtatataacccctgctggtagccagggtctgccccctcattatgacgacgtggaagttttcattctgcagctggagggggaaaagcactggaggctgtaccatcctacggtgccactggccagagagtacagcgtggaagccgaagaacgcatcggcagacctgtgcatgagtttatgctcaaacctggcgacctgctctatttccccagagggaccatccaccaagctgatacccccgcaggtctggcccactctactcatgtaactatttctacctaccagaataactcctggggcgatttcttactcgatactatctctggactggttttcgacaccgccaaagaggacgtggaattgaggactgggatccccaggcagctcctattacaggtggaatctactaccgttgctactcgacgcctgagtgggtttctcaggaccctggccgaccgcttagaaggcactaaagaactgcttagtagcgatatgaagaaagattttattatgcacagacttcccccatactctgctggtgacggggcagagctgagcactcctggaggcaagctgcctcgcctggactcagtggtgcggctacagttcaaggatcacattgtcctcactgtgcttccagatcaggatcagtcagacgaagctcaggagaagatggtttacatctatcactccctgaaaaactcgcgggaaacacatatgatggggaatgaagaagagaccgaatttcacgggttaaggttccccctgtcccacctggacgcacttaaacagatctggaactcaccggcaattagcgtcaaagacttgaaacttacgacagacgaggagaaggaatccctggtgctttcattgtggacggagtgtctaattcaggtggtgtag

SEQ ID NO: 245389 - DNA, 1398 bp, Artificial Sequence
  derived and/or modified sequence
atgcccaagaaggccaagcccaccggcagcggcaaggaggagggccccgccccctgcaagcagatgaagctggaggccgccggcggccccagcgccctgaacttcgacagccccagcagcctgttcgagagcctgatcagccccatcaagaccgagaccttcttcaaggagttctgggagcagaagcccctgctgatccagagagacgaccccgccctggccacctactacggcagcctgttcaagctgaccgacctgaagagcctgtgcagcagaggcatgtactacggcagagacgtgaacgtgtgcagatgcgtgaacggcaagaagaaggtgctgaacaaggacggcaaggcccacttcctgcagctgagaaaggacttcgaccagaagagagccaccatccagttccaccagccccagagattcaaggacgagctgtggagaatccaggagaagctggagtgctacttcggcagcctggtgggcagcaacgtgtacatcacccccgccggcagccagggcctgcccccccactacgacgacgtggaggtgttcatcctgcagctggagggcgagaagcactggagactgtaccaccccaccgtgcccctggccagagagtacagcgtggaggccgaggagagaatcggcagacccgtgcacgagttcatgctgaagcccggcgacctgctgtacttccccagaggcaccatccaccaggccgacacccccgccggcctggcccacagcacccacgtgaccatcagcacctaccagaacaacagctggggcgacttcctgctggacaccatcagcggcctggtgttcgacaccgccaaggaggacgtggagctgagaaccggcatccccagacagctgctgctgcaggtggagagcaccaccgtggccaccagaagactgagcggcttcctgagaaccctggccgacagactggagggcaccaaggagctgctgagcagcgacatgaagaaggacttcatcatgcacagactgcccccctacagcgccggcgacggcgccgagctgagcacccccggcggcaagctgcccagactggacagcgtggtgagactgcagttcaaggaccacatcgtgctgaccgtgctgcccgaccaggaccagagcgacgaggcccaggagaagatggtgtacatctaccacagcctgaagaacagcagagagacccacatgatgggcaacgaggaggagaccgagttccacggcctgagattccccctgagccacctggacgccctgaagcagatctggaacagccccgccatcagcgtgaaggacctgaagctgaccaccgacgaggagaaggagagcctggtgctgagcctgtggaccgagtgcctgatccaggtggtgtag

SEQ ID NO: 245390 - protein, 437 aa, Artificial Sequence
  derived and/or modified sequence
MFVLFLCNLSLVPAAASKNKVKGSQGQFPLTQNVTVVEGGTAILTCRVDQNDNTSLQWSNPAQQTLYFDDKKALRDNRIELVRASWHELSISVSDVSLSDEGQYTCSLFTMPVKTSKAYLTVLGVPEKPQISGFSSPVMEGDLMQLTCKTSGSKPAADIRWFKNDKEIKDVKYLKEEDANRKTFTVSSTLDFRVDRSDDGVAVICRVDHESLNATPQVAMQVLEIHYTPSVKIIPSTPFPQEGQPLILTCESKGKPLPEPVLWTKDGGELPDPDRMVVSGRELNILFLNKTDNGTYRCEATNTIGQSSAEYVLIVHDVPNTLLPTTIIPSLTTATVTTTVAITTSPTTSATTSSIRDPNALAGQNGPDHALIGGIVAVVVFVTLCSIFLLGRYLARHKGTYLTNEAKGAEDAPDADTAIINAEGSQVNAEEKKEYFI

SEQ ID NO: 245391 - DNA, 1314 bp, Artificial Sequence
  derived and/or modified sequence
atgttcgtgctgttcctgtgcaacctgagcctggtgcccgccgccgccagcaagaacaaggtgaagggcagccagggccagttccccctgacccagaacgtgaccgtggtggagggcggcaccgccatcctgacctgcagagtggaccagaacgacaacaccagcctgcagtggagcaaccccgcccagcagaccctgtacttcgacgacaagaaggccctgagagacaacagaatcgagctggtgagagccagctggcacgagctgagcatcagcgtgagcgacgtgagcctgagcgacgagggccagtacacctgcagcctgttcaccatgcccgtgaagaccagcaaggcctacctgaccgtgctgggcgtgcccgagaagccccagatcagcggcttcagcagccccgtgatggagggcgacctgatgcagctgacctgcaagaccagcggcagcaagcccgccgccgacatcagatggttcaagaacgacaaggagatcaaggacgtgaagtacctgaaggaggaggacgccaacagaaagaccttcaccgtgagcagcaccctggacttcagagtggacagaagcgacgacggcgtggccgtgatctgcagagtggaccacgagagcctgaacgccaccccccaggtggccatgcaggtgctggagatccactacacccccagcgtgaagatcatccccagcacccccttcccccaggagggccagcccctgatcctgacctgcgagagcaagggcaagcccctgcccgagcccgtgctgtggaccaaggacggcggcgagctgcccgaccccgacagaatggtggtgagcggcagagagctgaacatcctgttcctgaacaagaccgacaacggcacctacagatgcgaggccaccaacaccatcggccagagcagcgccgagtacgtgctgatcgtgcacgacgtgcccaacaccctgctgcccaccaccatcatccccagcctgaccaccgccaccgtgaccaccaccgtggccatcaccaccagccccaccaccagcgccaccaccagcagcatcagagaccccaacgccctggccggccagaacggccccgaccacgccctgatcggcggcatcgtggccgtggtggtgttcgtgaccctgtgcagcatcttcctgctgggcagatacctggccagacacaagggcacctacctgaccaacgaggccaagggcgccgaggacgcccccgacgccgacaccgccatcatcaacgccgagggcagccaggtgaacgccgaggagaagaaggagtacttcatctag

SEQ ID NO: 245392 - DNA, 1314 bp, Artificial Sequence
  derived and/or modified sequence
atgtttgtgctctttctgtgcaacttgagcctagttccagcagccgcttccaagaataaggtgaagggaagccagggtcagttcccgctgacgcagaacgtgactgtggtggaaggcggaacagcgatcctcacctgccgggtcgatcaaaacgataatacgtccctacaatggagcaatcctgcccagcagactctgtatttcgatgataaaaaggctctgagggacaatcgcattgaactagtgcgggcgtcttggcacgaattaagcatcagtgtatccgacgtgtctttatcagatgaaggtcagtatacatgtagtttgttcacgatgcctgtgaaaaccagtaaagcatacctcacagtgctcggcgtccctgaaaagcctcagatatccgggttcagctcccccgtaatggaaggagacctgatgcagctgacctgtaagacctccgggagcaaacctgccgccgacatacgttggtttaaaaacgacaaggagattaaagacgtgaaatacttgaaagaggaggatgccaaccgcaaaacattcacagtatcgtccacccttgactttagggtggacagaagcgacgatggtgtagccgtgatttgcagagtagatcatgagagcctgaatgccacaccgcaggttgccatgcaagtgcttgagatccattatacccctagtgttaagataatcccatccacaccatttcctcaagaaggacagcccctcatcctgacctgtgaatccaagggaaaaccattacccgaacccgtgctctggaccaaggatggaggggagttaccagaccccgatcggatggttgtaagtggtagggaactcaatatactgttcctgaacaaaacagataacggcacctaccggtgtgaagcaaccaataccattggccagtctagcgcagaatacgtactgatcgtacacgacgtgcctaacaccctgctgccaaccaccattatcccttctctgaccacggcaaccgttacaactactgttgccatcactacctctccgacaacttctgcaaccacatcctctattagggaccccaatgcgctggccggccaaaatggtcccgatcatgcattgatcggcggaatcgtggcagtggtggtgttcgtgaccctttgttccatcttcctgctgggccgctacctggcgagacataagggtacctatctcaccaacgaggctaaaggcgcagaggacgcacctgacgcagacacagctatcatcaatgccgagggaagccaagtgaacgccgaggaaaagaaggagtacttcatctag

SEQ ID NO: 245393 - DNA, 1314 bp, Artificial Sequence
  derived and/or modified sequence
atgtttgtgctcttcctgtgcaacctgagcctggtgcctgctgctgccagcaagaacaaggtgaagggcagccagggccagttccccctgacccagaatgtgacagtggtggagggcggcacagccatcctgacctgccgggtggaccagaatgacaacaccagcctgcagtggagcaacccagcccagcagaccctgtactttgatgacaagaaggccctgcgggacaacagaattgagctggtgcgggcctcctggcatgagctgagcatctctgtgtctgatgtgtccctgagtgatgagggccagtacacctgcagcctcttcaccatgcctgtgaagaccagcaaggcctacctgactgtgctgggcgtgcctgagaagccccagatcagcggcttcagcagccctgtgatggagggggacctgatgcagctgacctgcaagaccagcggcagcaagccagctgctgacatccgctggttcaagaatgacaaggagatcaaggatgtgaagtacctgaaggaggaggatgccaacaggaagaccttcaccgtgagcagcaccctggacttccgggtggacagaagtgatgatggagtggccgtcatctgccgggtggaccacgagagcctgaatgccaccccccaggtggccatgcaggtgctggagatccactacacccccagcgtgaagatcatccccagcacccccttcccccaggagggccagcccctcatcctgacctgtgagagcaagggcaagcccctgcctgagcctgtgctgtggaccaaggatggaggagagctgcctgaccctgacaggatggtggtgtctggccgggagctgaacatcctcttcctgaacaagacagacaatggcacctaccgctgtgaggccaccaacaccatcggccagagcagcgcagaatatgtgctgattgtgcatgatgtgcccaacaccctgctgcccaccaccatcatccccagcctgaccacagccaccgtgaccaccaccgtggccatcaccaccagccccaccaccagcgccaccaccagcagcatccgggaccccaatgccctggccggccagaatggaccagaccacgccctgattggaggcatcgtggccgtggtggtgtttgtgaccctgtgcagcatcttcctgctgggccgctacctggcccggcacaagggcacctacctgaccaatgaggccaagggagcagaagatgccccagatgctgacacagccatcatcaatgctgagggcagccaggtgaatgctgaggagaagaaggagtacttcatctag

SEQ ID NO: 245394 - DNA, 1314 bp, Artificial Sequence
  derived and/or modified sequence
atgttcgtgctgttcctgtgcaacctgagcctggtgcccgccgccgcaagcaagaataaagtcaagggaagtcaaggtcagttcccattaacacagaatgttactgtggtggaaggtggcactgcaatcctaacctgcagagtggatcaaaacgacaatacttctctgcagtggagtaacccagcacagcagaccctctacttcgacgataaaaaagctttacgggataatcggattgaactggtcagagcctcttggcacgagctaagtatcagtgtcagcgatgtgtctctatcagacgagggccaatatacatgttcactgttcaccatgccagtgaaaactagtaaggcttaccttaccgtgctgggcgtgcccgaaaaaccacagatttcggggttttcttctccggtcatggaaggagaccttatgcagctcacttgcaagacgtcgggcagtaaaccggcagccgacattaggtggttcaagaacgacaaggagatcaaagacgtgaagtatctgaaggaagaggacgccaatcgcaaaacgtttacggtgagcagcaccctggactttcgcgtggatagatccgacgatggggtggctgtgatctgccgagtggatcatgaatctctcaacgctaccccacaggttgccatgcaggtgcttgagatccactacacaccatcagtaaagatcattccctccaccccgtttccccaggagggccagcccttaattttaacctgcgagagcaaaggaaagcctctgccagaaccagtgctctggactaaggacggaggcgaactgccggatccggaccgcatggtggtgagcgggagggaactcaatattctttttctgaacaagacagataatgggacttatcggtgcgaggccacaaacactattggacagagcagtgccgaatatgtgctcatcgtgcatgacgttcctaatacactgctcccaacgaccattattccttcattaacgactgccacagtgacgactaccgtggcaatcacaacaagccctactacctcagccactacatcaagcatccgcgacccaaacgcactagcaggtcagaacggcccagatcacgcacttatcggtggtattgtggcggtcgttgtattcgtcacgttgtgtagcatattcctgctggggcggtaccttgccagacataagggcacctatctaacaaacgaagcaaaaggcgcggaggatgccccggatgctgacaccgcgataatcaacgctgaaggatcacaagtgaacgctgaagagaagaaagaatacttcatttag

SEQ ID NO: 245395 - DNA, 1314 bp, Artificial Sequence
  derived and/or modified sequence
atgtttgtgctgttcctgtgcaacttatccctggttcccgcagccgcaagtaagaacaaagtgaaaggctctcaggggcaattcccattaacccagaacgtgactgtcgttgagggcggaacagccattctgacttgcagggtggatcagaacgacaatacatctctgcagtggtctaatcccgcacagcaaacactgtatttcgatgacaaaaaggctctccgggataacagaatcgaactcgtgcgagcctcttggcatgagctatccatctcagtgtcggatgtctcattgtcagatgaaggtcagtatacctgttctctgttcaccatgcccgtgaaaacatcaaaagcatatctgacagttctgggggtccctgagaagcctcagatttccggcttttcctcccctgtgatggaaggcgacctaatgcagctgacttgtaagactagcggctccaagcctgcagccgacatacgctggtttaagaacgacaaggagatcaaggatgtgaaatacttaaaggaagaggacgcgaatagaaagacttttacggtatcctctacactggacttccgcgtggaccgttcggacgatggcgtggccgtcatctgccgcgtagatcacgagagccttaacgccactcctcaggtagctatgcaagttctggaaatccactacaccccctctgtcaagataatcccaagcacccctttcccccaggaaggtcaaccactgattctgacctgcgagtccaagggcaagccactgcctgaacctgtgctctggactaaggacgggggagagcttcccgacccagatcgaatggtcgtgtcgggcagggaactcaacattctttttcttaacaagacggacaatggaacttatcgatgtgaggcaaccaatacaattggacaatcgagcgcagaatatgtactcatcgtgcacgatgtgccaaatactctcctgccaaccactataattccaagtcttaccacagctactgttaccacgacagtggcgatcacgacctcaccaaccacctctgctaccacatccagtatcagggaccctaatgctttggccggacagaatggaccggaccatgcacttataggagggattgtggccgtggtggtgttcgtcaccctgtgctcgatcttcctcttggggagatacctagcacgtcataaggggacatatctgacgaatgaggctaagggggctgaagatgctcccgacgccgacactgccatcatcaacgccgagggaagccaggtgaatgcagaggagaagaaggagtatttcatatag

SEQ ID NO: 245396 - DNA, 1314 bp, Artificial Sequence
  derived and/or modified sequence
atgtttgttctcttcttgtgcaacctttccttggtaccagcggctgcttcaaagaataaagttaaaggcagccaagggcagtttccactaacacagaatgtaaccgttgttgaaggtggaactgcaattttgacctgcagggttgatcaaaatgataacacctccctccagtggtcaaatccagctcaacagactctgtactttgacgacaagaaagctttaagggacaataggatcgagctggttcgcgcttcctggcatgaattgagtattagtgtcagtgatgtgtctctctctgatgaaggacagtacacctgttctttatttacaatgcctgtcaaaacttccaaggcatatctcaccgttctgggtgttcctgaaaagcctcagattagtggattctcatcaccagttatggagggtgacttgatgcagctgacttgcaaaacatctggtagtaaacctgcagctgatataagatggttcaaaaatgacaaagagattaaagatgtaaaatatttaaaagaagaggatgcaaatcgcaagacattcactgtcagcagcacactggacttccgagtggaccggagtgatgatggagtggcggtcatctgcagagtagatcacgaatccctcaatgccacccctcaggtagccatgcaggtgctagaaatacactatacaccatcagttaagattataccatcgactccttttccacaagaaggacagcctttaattttgacttgtgaatccaaaggaaaaccactgccagaacctgttttgtggacaaaggatggcggagaattaccagatcctgaccgaatggttgtgagtggtagggagctaaacattcttttcctgaacaaaacggataatggtacatatcgatgtgaagccacaaacaccattggccaaagcagtgcggaatatgttctcattgtgcatgatgttcccaacactttgcttcccactactatcatcccctcccttaccactgcaacagtcacaaccactgtagccataacaaccagcccaaccacatctgcaacaaccagcagcatcagagatcctaatgctttggctggccagaatggccctgaccatgctctcataggaggaatagtggctgtagttgtatttgtcacgctgtgttctatctttctgcttggtcgatatctggcaaggcataaaggaacgtatttaacaaatgaagctaaaggagctgaagatgcaccagatgctgatacagccattatcaatgctgaaggcagccaagtcaatgctgaagagaaaaaagagtatttcatttaa

SEQ ID NO: 245397 - protein, 330 aa, Artificial Sequence
  derived and/or modified sequence
MAEGHHAVNIEGLKSARVEDEMQVQECEPEKVEIRERYELSEKMLSACNLLKNTINDPKALTSKDMGQVQWLTPMIPTLREADAGGSHERFCLNTLQHEWFRVSSQKSAIPAMVGDYIAAFEAISPDVLRYVINLADGNGNTALHYSVSHSNFEIVKLLLDADVCNVDHQNKAGYTPIMLAALAAVEAEKDMRIVEELFGCGDVNAKASQAGQTALMLAVSHGRIDMVKGLLACGADVNIQDDEGSTALMCASEHGHVEIVKLLLAQPGCNGHLEDNDGSTALSIALEAGHKDIAVLLYAHVNFAKAQSPGTPRLGRKTSPGPTHRGSFD

SEQ ID NO: 245398 - protein, 1194 aa, Artificial Sequence
  derived and/or modified sequence
METRRRLEQERATMQMTPGEFRRPRLASFGGMGTTSSLPSFVGSGNHNPAKHQLQNGYQGNGDYGSYAPAAPTTSSMGSSIRHSPLSSGISTPVTNVSPMHLQHIREQMAIALKRLKELEEQVRTIPVLQVKISVLQEEKRQLVSQLKNQRAASQINVCGVRKRSYSAGNASQLEQLSRARRSGGELYIDYEEEEMETVEQSTQRIKEFRQLTADMQALEQKIQDSSCEASSELRENGECRSVAVGAEENMNDIVVYHRGSRSCKDAAVGTLVEMRNCGVSVTEAMLGVMTEADKEIELQQQTIESLKEKIYRLEVQLRETTHDREMTKLKQELQAAGSRKKVDKATMAQPLVFSKVVEAVVQTRDQMVGSHMDLVDTCVGTSVETNSVGISCQPECKNKVVGPELPMNWWIVKERVEMHDRCAGRSVEMCDKSVSVEVSVCETGSNTEESVNDLTLLKTNLNLKEVRSIGCGDCSVDVTVCSPKECASRGVNTEAVSQVEAAVMAVPRTADQDTSTDLEQVHQFTNTETATLIESCTNTCLSTLDKQTSTQTVETRTVAVGEGRVKDINSSTKTRSIGVGTLLSGHSGFDRPSAVKTKESGVGQININDNYLVGLKMRTIACGPPQLTVGLTASRRSVGVGDDPVGESLENPQPQAPLGMMTGLDHYIERIQKLLAEQQTLLAENYSELAEAFGEPHSQMGSLNSQLISTLSSINSVMKSASTEELRNPDFQKTSLGKITGNYLGYTCKCGGLQSGSPLSSQTSQPEQEVGTSEGKPISSLDAFPTQEGTLSPVNLTDDQIAAGLYACTNNESTLKSIMKKKDGNKDSNGAKKNLQFVGINGGYETTSSDDSSSDESSSSESDDECDVIEYPLEEEEEEEDEDTRGMAEGHHAVNIEGLKSARVEDEMQVQECEPEKVEIRERYELSEKMLSACNLLKNTINDPKALTSKDMRFCLNTLQHEWFRVSSQKSAIPAMVGDYIAAFEAISPDVLRYVINLADGNGNTALHYSVSHSNFEIVKLLLDADVCNVDHQNKAGYTPIMLAALAAVEAEKDMRIVEELFGCGDVNAKASQAGQTALMLAVSHGRIDMVKGLLACGADVNIQDDEGSTALMCASEHGHVEIVKLLLAQPGCNGHLEDNDGSTALSIALEAGHKDIAVLLYAHVNFAKAQSPGTPRLGRKTSPGPTHRGSFD

SEQ ID NO: 245399 - protein, 398 aa, Artificial Sequence
  derived and/or modified sequence
MKKKDGNKDSNGAKKNLQFVGINGGYETTSSDDSSSDESSSSESDDECDVIEYPLEEEEEEEDEDTRGMAEGHHAVNIEGLKSARVEDEMQVQECEPEKVEIRERYELSEKMLSACNLLKNTINDPKALTSKDMGQVQWLTPMIPTLREADAGGSHERFCLNTLQHEWFRVSSQKSAIPAMVGDYIAAFEAISPDVLRYVINLADGNGNTALHYSVSHSNFEIVKLLLDADVCNVDHQNKAGYTPIMLAALAAVEAEKDMRIVEELFGCGDVNAKASQAGQTALMLAVSHGRIDMVKGLLACGADVNIQDDEGSTALMCASEHGHVEIVKLLLAQPGCNGHLEDNDGSTALSIALEAGHKDIAVLLYAHVNFAKAQSPGTPRLGRKTSPGPTHRGSFD

SEQ ID NO: 245400 - DNA, 993 bp, Artificial Sequence
  derived and/or modified sequence
atggccgagggccaccacgccgtgaacatcgagggcctgaagagcgccagagtggaggacgagatgcaggtgcaggagtgcgagcccgagaaggtggagatcagagagagatacgagctgagcgagaagatgctgagcgcctgcaacctgctgaagaacaccatcaacgaccccaaggccctgaccagcaaggacatgggccaggtgcagtggctgacccccatgatccccaccctgagagaggccgacgccggcggcagccacgagagattctgcctgaacaccctgcagcacgagtggttcagagtgagcagccagaagagcgccatccccgccatggtgggcgactacatcgccgccttcgaggccatcagccccgacgtgctgagatacgtgatcaacctggccgacggcaacggcaacaccgccctgcactacagcgtgagccacagcaacttcgagatcgtgaagctgctgctggacgccgacgtgtgcaacgtggaccaccagaacaaggccggctacacccccatcatgctggccgccctggccgccgtggaggccgagaaggacatgagaatcgtggaggagctgttcggctgcggcgacgtgaacgccaaggccagccaggccggccagaccgccctgatgctggccgtgagccacggcagaatcgacatggtgaagggcctgctggcctgcggcgccgacgtgaacatccaggacgacgagggcagcaccgccctgatgtgcgccagcgagcacggccacgtggagatcgtgaagctgctgctggcccagcccggctgcaacggccacctggaggacaacgacggcagcaccgccctgagcatcgccctggaggccggccacaaggacatcgccgtgctgctgtacgcccacgtgaacttcgccaaggcccagagccccggcacccccagactgggcagaaagaccagccccggccccacccacagaggcagcttcgactag

SEQ ID NO: 245401 - DNA, 1197 bp, Artificial Sequence
  derived and/or modified sequence
atgaagaagaaggacggcaacaaggacagcaacggcgccaagaagaacctgcagttcgtgggcatcaacggcggctacgagaccaccagcagcgacgacagcagcagcgacgagagcagcagcagcgagagcgacgacgagtgcgacgtgatcgagtaccccctggaggaggaggaggaggaggaggacgaggacaccagaggcatggccgagggccaccacgccgtgaacatcgagggcctgaagagcgccagagtggaggacgagatgcaggtgcaggagtgcgagcccgagaaggtggagatcagagagagatacgagctgagcgagaagatgctgagcgcctgcaacctgctgaagaacaccatcaacgaccccaaggccctgaccagcaaggacatgggccaggtgcagtggctgacccccatgatccccaccctgagagaggccgacgccggcggcagccacgagagattctgcctgaacaccctgcagcacgagtggttcagagtgagcagccagaagagcgccatccccgccatggtgggcgactacatcgccgccttcgaggccatcagccccgacgtgctgagatacgtgatcaacctggccgacggcaacggcaacaccgccctgcactacagcgtgagccacagcaacttcgagatcgtgaagctgctgctggacgccgacgtgtgcaacgtggaccaccagaacaaggccggctacacccccatcatgctggccgccctggccgccgtggaggccgagaaggacatgagaatcgtggaggagctgttcggctgcggcgacgtgaacgccaaggccagccaggccggccagaccgccctgatgctggccgtgagccacggcagaatcgacatggtgaagggcctgctggcctgcggcgccgacgtgaacatccaggacgacgagggcagcaccgccctgatgtgcgccagcgagcacggccacgtggagatcgtgaagctgctgctggcccagcccggctgcaacggccacctggaggacaacgacggcagcaccgccctgagcatcgccctggaggccggccacaaggacatcgccgtgctgctgtacgcccacgtgaacttcgccaaggcccagagccccggcacccccagactgggcagaaagaccagccccggccccacccacagaggcagcttcgactag

SEQ ID NO: 245402 - DNA, 993 bp, Artificial Sequence
  derived and/or modified sequence
atggccgagggtcatcacgccgtaaatattgaaggcctaaagtcagctagggtagaagacgaaatgcaggttcaggaatgtgagcccgagaaagtggagattcgcgagagatatgagcttagcgagaaaatgctttccgcctgtaacttgttaaaaaatacgatcaatgaccctaaggcactgacctccaaagatatgggccaggtgcagtggttaacacccatgattccgaccctccgggaggccgacgccgggggaagtcatgaaaggttttgtcttaacactttgcagcacgaatggtttcgagtgagttcccaaaagagcgcaattccagctatggttggtgattacattgccgccttcgaagcaatatctcccgatgtactccgttacgtcatcaatctggcagatgggaatggcaacactgccctgcactatagtgtgtcccactcaaacttcgagatcgtgaaactgttgctggatgctgatgtctgcaatgttgaccaccaaaataaagctgggtacacacccattatgctcgcagctctagccgcagtggaagcagagaaagacatgagaatcgtagaggaacttttcggctgcggtgatgtgaacgctaaagcttcgcaggctggacagactgccctcatgctggccgtttcacacggaaggattgacatggtcaagggcctcctggcctgcggcgccgacgtcaatatccaggacgacgagggttccactgctctgatgtgcgctagtgagcacggccatgtggaaatcgtgaagctgctcttggctcagcctggctgtaatggacacctagaggataacgacgggtccaccgctctatccattgcactggaagctggccacaaagatattgcggttctgctctatgcccacgtcaactttgctaaagctcagtcccctggcactccccggttaggacgtaagacctctccaggcccgactcatcgggggagctttgattag

SEQ ID NO: 245403 - DNA, 1197 bp, Artificial Sequence
  derived and/or modified sequence
atgaaaaaaaaagatggcaataaggactctaatggtgccaaaaagaacttacagtttgtcgggataaacgggggatacgagaccacgagcagtgacgactcctctagcgacgaatctagcagctccgaaagcgacgatgagtgcgatgttatagagtaccccctcgaggaggaggaggaggaagaagatgaggatactcggggtatggctgaaggtcaccacgccgtgaatattgagggcctgaagtcggcaagggtggaggacgaaatgcaggtccaagagtgtgagcctgagaaggtggagataagggaacggtatgagttgtcggaaaaaatgctctctgcgtgcaacttactcaaaaacactatcaacgatccaaaagctctgaccagcaaggatatgggccaggttcagtggctgaccccaatgatccctactttgcgggaagctgacgcagggggctcccacgagaggttttgcctgaatacattgcaacacgaatggtttcgggtcagcagccagaagagcgccattcccgccatggttggggactacatcgccgcttttgaagccatctctcctgacgtgctgaggtatgtgatcaatctagcagacggcaacggcaacactgccctgcactacagtgtctcccactcaaattttgaaatcgtaaagctcctcctggatgccgatgtctgtaatgtggaccaccagaataaggccggctataccccgattatgctggccgcactggccgcagtggaagcagagaaagacatgcggatcgtggaggaattgtttggttgtggcgacgtgaacgccaaggcttcgcaagctggccagaccgcccttatgctcgctgtcagccacggcaggatcgacatggtgaaagggctactcgcatgcggcgctgatgtcaatattcaggacgatgaagggagcactgctttaatgtgcgcctccgagcacggccacgtcgagatcgtcaagttactcctcgcccagcctggctgtaatgggcatctggaggataacgacgggtcaactgctttatcaattgccctggaggctggccacaaggatatagccgttctgttatacgcgcacgtcaactttgccaaggcccagtcgcccggcacaccacgtctcggacgtaagactagcccaggcccaacccaccggggttccttcgattag

SEQ ID NO: 245404 - DNA, 993 bp, Artificial Sequence
  derived and/or modified sequence
atggccgagggccaccacgctgtgaacatcgagggcctgaagagcgcccgggtggaggatgagatgcaggtgcaggagtgtgagcctgagaaggtggagatccgggagagatatgagctgtctgagaagatgctgagcgcctgcaacctgctgaagaacaccatcaatgaccccaaggccctgaccagcaaggacatgggccaggtgcagtggctgacccccatgatccccaccctgcgggaggctgatgctgggggcagccatgagcgcttctgcctgaacaccctgcagcacgagtggttccgggtgagcagccagaagagcgccatcccagccatggtgggggactacatcgccgcctttgaggccatcagcccagatgtgctgcgctacgtgatcaacctggctgatggaaatggaaacacagccctgcactacagcgtgagccacagcaactttgaaattgtgaagctgctgctggatgctgatgtgtgcaatgtggaccaccagaacaaggccggctacacccccatcatgctggccgccctggccgctgtggaggccgagaaggacatgagaattgtggaggagctgtttggctgtggagatgtgaatgccaaggccagccaggccggccagacagccctgatgctggccgtgagccacggcagaattgacatggtgaagggcctgctggcctgtggggctgatgtgaacatccaggatgatgagggcagcacagccctgatgtgtgccagcgagcacggccacgtggagatcgtgaagctgctgctggcccagcccggctgcaatggccacctggaggacaatgatggcagcacagccctgagcatcgccctggaggccggccacaaggacattgctgtgctgctgtatgcccacgtgaactttgccaaggcccagagccctggcaccccccggctgggcaggaagaccagccctggccccacccaccggggcagctttgattag

SEQ ID NO: 245405 - DNA, 1197 bp, Artificial Sequence
  derived and/or modified sequence
atgaagaagaaggatggcaacaaggacagcaatggagccaagaagaacctgcagtttgtgggcatcaatggaggctatgagaccaccagcagtgatgacagcagcagtgatgagagcagcagcagcgagagtgatgatgaatgtgatgtgattgagtaccccctggaggaggaggaggaggaggaggatgaggacacccggggcatggccgagggccaccacgctgtgaacatcgagggcctgaagagcgcccgggtggaggatgagatgcaggtgcaggagtgtgagcctgagaaggtggagatccgggagagatatgagctgtctgagaagatgctgagcgcctgcaacctgctgaagaacaccatcaatgaccccaaggccctgaccagcaaggacatgggccaggtgcagtggctgacccccatgatccccaccctgcgggaggctgatgctgggggcagccatgagcgcttctgcctgaacaccctgcagcacgagtggttccgggtgagcagccagaagagcgccatcccagccatggtgggggactacatcgccgcctttgaggccatcagcccagatgtgctgcgctacgtgatcaacctggctgatggaaatggaaacacagccctgcactacagcgtgagccacagcaactttgaaattgtgaagctgctgctggatgctgatgtgtgcaatgtggaccaccagaacaaggccggctacacccccatcatgctggccgccctggccgctgtggaggccgagaaggacatgagaattgtggaggagctgtttggctgtggagatgtgaatgccaaggccagccaggccggccagacagccctgatgctggccgtgagccacggcagaattgacatggtgaagggcctgctggcctgtggggctgatgtgaacatccaggatgatgagggcagcacagccctgatgtgtgccagcgagcacggccacgtggagatcgtgaagctgctgctggcccagcccggctgcaatggccacctggaggacaatgatggcagcacagccctgagcatcgccctggaggccggccacaaggacattgctgtgctgctgtatgcccacgtgaactttgccaaggcccagagccctggcaccccccggctgggcaggaagaccagccctggccccacccaccggggcagctttgattag

SEQ ID NO: 245406 - DNA, 1948 bp, Artificial Sequence
  derived and/or modified sequence
ctcttcttccgagtcagatgacgagtgtgatgtcattgagtatcctcttgaagaagaggaggaggaggaggatgaagacactcggggaatggcagaagggcaccatgcagttaatattgaaggtttgaagtctgccagggtggaagatgaaatgcaggttcaagaatgtgaacctgagaaggtggaaatcagagagaggtatgaattaagtgaaaagatgttgtctgcatgcaacttactgaaaaatactataaatgaccccaaagctttgaccagcaaagatatgggccaggtgcagtggctgacacctatgatcccaacacttcgggaggccgatgcaggtggatcacatgagaggttctgtctgaacaccctccagcacgagtggttccgcgtgtccagtcagaagtcagccattccagccatggtgggggactacatagctgcttttgaggccatttccccagatgtcctccgctatgtcatcaacttggcagacggcaacggcaacacagccctccattacagcgtgtcccactccaacttcgagattgtgaagctgctgttagatgccgatgtgtgtaatgtggatcaccagaacaaggcaggctacacccccatcatgttggcggccctcgccgctgtggaagcagagaaggacatgcggattgtggaagaactcttcggctgtggggatgtgaatgccaaagctagtcaggcgggacagacggccctcatgctggcggtcagtcacggacggatagacatggtgaagggccttctggcctgtggggctgatgtcaacatccaggatgacgagggctccacggccctcatgtgtgccagcgagcacggacacgtggagattgtcaagctgctgctggcccagcccggctgcaacggtcacctagaggacaacgatggcagcactgcgctctcaatcgccctggaagcaggacacaaggacatcgctgttcttctgtatgcccatgtcaactttgcaaaagcccagtctccgggcacccctaggcttggaaggaagacgtctcctggccccacccaccgaggttcatttgattgattgtatgcaaatagccctttatttacatgccactattaagctgctaattgttcctgttggggtgacagatactgaatgtatacgtattgtgcctgagctcaccagcaaacagaagcatcaagcccaggggtaaaggctgaagctttcacagtgcagagactgctagcctgggcacacacacctcctttctggccgtcttctgtgtagggcacactttaacccagtctctgttgctgttgagtctctgctccgttttgtacagtcacagggaattctgatctgaaggggcaccttctgttcactcccacaaagtggtgtctggttctcactgagacgttttaagatttttccacaaatatttatatgtactaaatgtggaaccattagaaagttcttccaaaatctcattccagcatagttttggatttttcttttgtcttattttaaaataaggaagtcgagatgactttgatcattggtaacttgggcctgggccagacaaagtataaaacttacaaaagaatattctcatttggtcttaactaggtagatgtaatatatgactttttataaaaagggtatctatatgaacttgacacagtattttcagcttttgtattccatactaaagccatgaagaactacacgtaacatcatcatttgtattaattgcacaactccaatgctaaaggttggattgtgttagaggaatcggctctgtatttgcctctagagaaacacagtgttctctttgtatttatggattcctttttaccgtgtcacatttactttggtcctctatgtatttaaatgtttgaagtgccttagactcttgccatattttcaaaataaaattccattaagctc

SEQ ID NO: 245407 - DNA, 993 bp, Artificial Sequence
  derived and/or modified sequence
atggccgagggccaccacgccgtgaacatcgagggcctgaagagcgcccgagtggaggatgagatgcaggtgcaggagtgcgagcccgagaaagttgaaatcagggagcgttacgagctttctgagaaaatgctctctgcttgtaacttgctaaagaatacaatcaatgaccccaaagccctaacatctaaggatatggggcaagtacagtggttgactcctatgatccctactctgagggaagccgatgccggcggcagtcacgagaggttctgcttaaatacactgcagcacgagtggttccgggttagctcccagaaatctgccatccccgctatggttggcgactatatagccgccttcgaagctattagtcccgacgtgctcaggtacgtgataaatctggctgacgggaacgggaacactgccctacattacagcgtttcccatagtaactttgagatcgtcaagttactgctcgatgccgacgtctgtaacgtcgaccaccagaataaagccggatatactccaatcatgctggccgcacttgccgccgtggaagccgagaaagatatgcgtatcgtcgaggagctgtttgggtgtggcgacgtaaacgcgaaggcgtcacaggccgggcagaccgcactgatgcttgccgttagccatggcaggatcgacatggtaaagggtctgctggcttgcggggccgatgtgaacatccaggacgatgagggtagcaccgcactcatgtgcgctagtgagcacggacacgtggaaatcgtgaagttgctactggcccagcccgggtgtaatggtcatctggaagacaacgacggcagtactgcgctttctatagcccttgaggcagggcacaaggatatcgccgtcctgctatatgcccatgtaaacttcgccaaggcccagtctcccggcactccacgactgggacggaaaacctcccctggtccaacacaccgcggaagcttcgactag

SEQ ID NO: 245408 - DNA, 1197 bp, Artificial Sequence
  derived and/or modified sequence
atgaagaagaaggacggcaacaaggacagcaacggcgccaagaagaatctgcaatttgtaggaatcaatgggggctacgaaacgacaagttcagatgactcttcaagcgatgagagcagctctagcgaaagtgatgatgagtgcgatgtcattgaataccctctggaggaagaagaggaagaggaagatgaagacacacgcggaatggcagaaggccatcatgctgtcaacattgaggggctgaaatctgcacgggtcgaggacgaaatgcaggtgcaggagtgcgaaccagagaaggttgaaataagggagaggtatgaactatccgaaaaaatgttatcggcctgtaatctcctgaagaacaccattaatgatcccaaggcactaacctcaaaggatatggggcaggtacagtggctgacacctatgattccaacccttcgggaagccgatgcaggaggctcacatgagaggttttgcctgaacactcttcaacatgagtggtttagggtgtcatctcaaaaaagcgccattcccgcaatggtcggcgactatattgccgccttcgaagctatatcccccgatgtattgaggtatgtcattaaccttgctgacgggaacggaaatacagcactgcattattccgtgtcacacagcaactttgagatcgtaaagctattgctagatgctgacgtttgtaatgtcgaccaccagaacaaggcgggttacacgcccattatgctggccgccttggcggcggttgaggctgaaaaagatatgcgaatcgtcgaagagctattcggctgcggggatgtaaacgccaaagcttctcaggctgggcaaacagctcttatgctggcagtcagtcacggccggattgacatggtaaaaggcttgctggcatgtggcgccgacgtgaacattcaggacgatgagggctccacagctctgatgtgtgcaagtgagcatggccacgtggaaatagttaaactcctgcttgctcagccagggtgcaacggccacctcgaggataacgatggcagtaccgctttaagtatcgcactggaggccggccacaaagatattgcagtgctgttgtacgcgcatgtgaattttgcaaaggcccaatctcccggaaccccacgtttgggacgcaagacatcaccagggccaacccaccgtggctcattcgattag

SEQ ID NO: 245409 - DNA, 993 bp, Artificial Sequence
  derived and/or modified sequence
atggctgaggggcatcacgccgtcaatatcgagggacttaaatccgccagggttgaagatgaaatgcaggtgcaagaatgcgaacccgagaaggtggaaatccgggaaaggtacgagctctctgaaaagatgctgtccgcatgcaatttgctgaagaacacaatcaacgaccccaaagcactgacctcgaaggatatgggccaagtgcagtggctgacacctatgatacccactctaagggaagctgatgccggtggcagtcacgagcgcttctgtctcaatacactgcagcacgagtggttccgtgtgtcttcccaaaagtctgccatccccgctatggttggcgactacatcgcagcctttgaggccatctcaccggacgtactccggtatgtgatcaatcttgctgatggtaatggaaacactgctctgcattacagcgtttcccactcaaattttgaaatagtcaagctgctgctagacgccgacgtttgcaatgttgatcaccagaacaaagctggttacacacctatcatgttggctgctctcgcagccgtggaagccgagaaagatatgcgtattgtggaggagttgttcggatgcggcgacgtcaacgcaaaagcttcccaggcaggacagaccgcccttatgcttgccgtgagtcatggacgaattgacatggtgaaaggcctcctggcctgcggtgcagacgttaacattcaagatgacgagggcagtactgcgctgatgtgtgcctctgagcacggacacgtggaaattgtcaaacttctcctcgctcaacctggatgcaacgggcacttagaagacaacgacggcagcaccgccctgtcaatagcactggaggctggccacaaagacatcgccgtgctgctgtacgctcatgtgaattttgcaaaggcccaatccccgggtactcctaggttgggcagaaaaacctcgcctggccctacccatcgcggtagttttgactag

SEQ ID NO: 245410 - DNA, 1197 bp, Artificial Sequence
  derived and/or modified sequence
atgaagaaaaaggatggaaacaaagacagtaacggcgctaaaaagaacttgcagtttgtaggcatcaacggtgggtatgagaccaccagtagcgacgatagctccagtgacgagtcttcctcttccgagagcgacgatgagtgtgacgtcatcgagtatccacttgaagaggaagaagaggaggaggatgaggatacaagagggatggccgagggccaccatgccgtcaacatagagggcctgaaatccgctcgtgtcgaagacgaaatgcaggtgcaagagtgtgagcctgagaaggtcgagatccgggagaggtatgaactgagcgagaaaatgctgtctgcttgtaacctcctcaaaaatacaattaatgaccccaaagccctgacctctaaggatatgggtcaggtacaatggctcacaccgatgatccctaccctgcgggaggccgacgccggtggctcccatgagcggttttgtttgaatacattgcaacatgagtggttccgggtgtccagtcagaaaagcgctatccccgcaatggtcggggattatattgccgctttcgaagcgatatcgcccgacgtcctccggtacgttatcaacctcgctgacggtaatgggaacacagcactgcactattctgtcagccacagtaacttcgagatcgtgaaactactgttggacgccgatgtctgtaatgtcgaccaccaaaacaaagctggatatacccctatcatgttagcggcattggcagccgtggaggctgagaaggatatgagaattgtggaggaactgttcggatgcggagatgttaacgcaaaggcctcacaggccggacagactgcacttatgctcgccgtcagtcacggtcgaattgacatggtgaagggcctgctcgcttgtggggcagatgtcaacatacaggatgatgaaggctccacagccttgatgtgcgcctcagaacacggccacgttgaaattgtgaagctcctgctggcccagcctgggtgtaacggacatctggaagataatgatggttctacggccctctccatcgccttggaggcagggcacaaggacatagcagtgctcctgtatgctcacgtgaactttgcaaaggcacagtccccgggtacgcctaggctggggagaaaaacctctcccggacctacccatagagggtcttttgattag

SEQ ID NO: 245411 - protein, 493 aa, Artificial Sequence
  derived and/or modified sequence
MSKGPAVGIDLGTTYSCVGVFQHGKVEIIANDQGNRTTPSYVAFTDTERLIGDAAKNQVAMNPTNTVFDAKRLIGRRFDDAVVQSDMKHWPFMVVNDAGRPKVQVEYKGETKSFYPEEVSSMVLTKMKEIAEAYLGKTVTNAVVTVPAYFNDSQRQATKDAGTIAGLNVLRIINEPTAAAIAYGLDKKVGAERNVLIFDLGGGTFDVSILTIEDGIFEVKSTAGDTHLGGEDFDNRMVNHFIAEFKRKHKKDISENKRAVRRLRTACERAKRTLSSSTQASIEIDSLYEGIDFYTSITRARFEELNADLFRGTLDPVEKALRDAKLDKSQIHDIVLVGGSTRIPKIQKLLQDFFNGKELNKSINPDEAVAYGAAVQAAILSGDKSENVQDLLLLDVTPLSLGIETAGGVMTVLIKRNTTIPTKQTQTFTTYSDNQPGVLIQVYEGERAMTKDNNLLGKFELTGMPGGMPGGFPGGGAPPSGGASSGPTIEEVD

SEQ ID NO: 245412 - DNA, 1482 bp, Artificial Sequence
  derived and/or modified sequence
atgtcgaagggccctgcggtcggcatcgacttgggtacaacctacagctgtgtaggggtgtttcagcacggcaaggtggagatcattgccaacgaccaaggtaacaggacaacaccgtcctatgtagctttcaccgacacggaacgtttgattggggatgctgctaaaaatcaggtggcaatgaatccaaccaacaccgtctttgacgcaaaaaggctaatcggaagacgcttcgatgacgcagtggtgcaaagtgatatgaagcattggccttttatggtggtgaatgacgctgggaggcctaaggtacaggttgaatacaagggcgaaactaaatctttctaccccgaggaggtgagtagcatggtgctcacaaaaatgaaggagattgccgaggcttatttagggaagactgtgactaatgcagtcgtcactgtacccgcgtattttaatgatagccagaggcaagctaccaaagatgcggggactattgccggcttgaacgtccttaggatcattaacgaacccacggctgctgcaattgcatatggattagataaaaaagtcggtgcggagagaaacgttctcatattcgacctggggggtggaaccttcgacgtctcaatcctcaccatcgaggacgggatattcgaagtcaaatccacggcaggcgacacacatctggggggagaggactttgataatagaatggtaaatcacttcatcgcagagtttaaaaggaagcataagaaagacattagtgaaaacaaacgggctgttcgtagactgagaactgcctgtgaaagggctaaaaggaccctctcttccagcacccaggcatccattgaaatcgactccctatatgaaggcattgatttttatacatccatcactcgggctagatttgaagaacttaacgccgatctgttcagggggacactggaccctgtcgagaaggccttaagggatgccaagctagataaatctcagatccatgatattgttctagtgggtggttctaccaggataccgaagatccagaaactgcttcaagactttttcaacggaaaggagctgaacaagtcaattaatccagacgaggccgtcgcgtacggagccgcagtccaggccgcaattctgtccggagataaaagcgagaatgtgcaggacctcctcctcctcgatgtaactccgttgtcacttggcattgagacggcaggcggggtgatgaccgttctgattaagcggaacacaacaattccaaccaagcaaacacaaactttcaccacctacagcgacaatcagcccggagtcctcattcaagtttatgagggagaaagagcaatgactaaagataataatctgctggggaagtttgagctgacaggtatgccaggtggcatgccgggcgggtttcccggggggggcgccccaccctcaggaggagcaagcagcggcccaactatcgaagaagtcgattag

SEQ ID NO: 245413 - DNA, 2004 bp, Artificial Sequence
  derived and/or modified sequence
atcgtgaggcggagcgcggtggggtgggtgcggaagggggcgaggcccgaggagtggagccgggcttgtgattgggtcttgtaagggcagccgggcgtctattggccggggaagccgtaatggcaggcagcaggggcgggccccttctggaaggttctaagatagggtataagaggcagggtggcgggcggaaaccggtctcattgaactcgcctgcagctcttgggttttttgtggcttccttcgttattggagccaggcctacaccccagcaaccatgtccaagggacctgcagttggtattgatcttggcaccacctactcttgtgtgggtgttttccagcacggaaaagtcgagataattgccaatgatcagggaaaccgaaccactccaagctatgtcgcctttacggacactgaacggttgatcggtgatgccgcaaagaatcaagttgcaatgaaccccaccaacacagtttttgatgccaaacgtctgattggacgcagatttgatgatgctgttgtccagtctgatatgaaacattggccctttatggtggtgaatgatgctggcaggcccaaggtccaagtagaatacaagggagagaccaaaagcttctatccagaggaggtgtcttctatggttctgacaaagatgaaggaaattgcagaagcctaccttgggaagactgttaccaatgctgtggtcacagtgccagcttactttaatgactctcagcgtcaggctaccaaagatgctggaactattgctggtctcaatgtacttagaattattaatgagccaactgctgctgctattgcttacggcttagacaaaaaggttggagcagaaagaaacgtgctcatctttgacctgggaggtggcacttttgatgtgtcaatcctcactattgaggatggaatctttgaggtcaagtctacagctggagacacccacttgggtggagaagattttgacaaccgaatggtcaaccattttattgctgagtttaagcgcaagcataagaaggacatcagtgagaacaagagagctgtaagacgcctccgtactgcttgtgaacgtgctaagcgtaccctctcttccagcacccaggccagtattgagatcgattctctctatgaaggaatcgacttctatacctccattacccgtgcccgatttgaagaactgaatgctgacctgttccgtggcaccctggacccagtagagaaagcccttcgagatgccaaactagacaagtcacagattcatgatattgtcctggttggtggttctactcgtatccccaagattcagaagcttctccaagacttcttcaatggaaaagaactgaataagagcatcaaccctgatgaagctgttgcttatggtgcagctgtccaggcagccatcttgtctggagacaagtctgagaatgttcaagatttgctgctcttggatgtcactcctctttcccttggtattgaaactgctggtggagtcatgactgtcctcatcaagcgtaataccaccattcctaccaagcagacacagaccttcactacctattctgacaaccagcctggtgtgcttattcaggtttatgaaggcgagcgtgccatgacaaaggataacaacctgcttggcaagtttgaactcacaggcatgccaggaggaatgcctgggggatttcctggtggtggagctcctccctctggtggtgcttcctcagggcccaccattgaagaggttgattaagccaaccaagtgtagatgtagcattgttccacacatttaaaacatttgaaggacctaaattcgtagcaaattctgtggcagttttaaaaagttaagctgctatagtaagttactgggcattctcaatacttgaatatggaacatatgcacaggggaaggaaataacattgcactttataaacactgtattgtaagtggaaaatgcaatgtcttaaataaaactatttaaaattggcaccatacaa

SEQ ID NO: 245414 - DNA, 1482 bp, Artificial Sequence
  derived and/or modified sequence
atgagcaaaggacctgctgtgggcatcgacctgggcaccacctacagctgtgtgggcgtcttccagcacggcaaggtggagatcatcgccaatgaccagggcaacagaaccacccccagctatgtggccttcacagacacagagcggctgattggagatgctgccaagaaccaggtggccatgaaccccaccaacacagtgtttgatgccaagaggctcatcggccgccgctttgatgatgctgtggtgcagagcgacatgaagcactggcccttcatggtggtgaatgatgctggccggcccaaggtgcaggtggagtacaagggggagaccaagagcttctacccagaggaggtgtcctccatggtgctgaccaagatgaaggagattgctgaggcctacctgggcaagacagtgaccaatgctgtggtgacagtgcctgcctacttcaatgacagccagaggcaggccaccaaggatgctggcaccatcgccggcctgaatgtgctgcgcatcatcaatgagcccacagctgctgccatcgcctacggcctggacaagaaggtgggcgctgagagaaatgtgctgatctttgacctgggcggcggcacctttgatgtgtccatcctgaccattgaagatggcatctttgaggtgaagagcacagctggggacacccacctgggcggagaagattttgacaacaggatggtgaaccacttcatcgccgagttcaagaggaagcacaagaaggacatcagcgagaacaagagagctgtgcggcggctgaggacagcctgtgagcgggccaagaggaccctgagcagcagcacccaggccagcattgaaattgacagcctgtatgagggcatcgacttctacaccagcatcacccgggccaggtttgaggagctgaatgctgacctcttccggggcaccctggaccctgtggagaaggccctgagagatgccaagctggacaagagccagatccatgacatcgtgctggtgggcggcagcacccgcatccccaagatccagaagctgctgcaggacttcttcaacgggaaggagctgaacaagagcatcaacccagatgaggccgtggcctatggagctgctgtgcaggccgccatcctgagcggggacaagtcagaaaatgtgcaggacctgctgctgctggatgtgacccccctgagcctgggcattgaaacagctgggggcgtgatgacagtgctgatcaagaggaacaccaccatccccaccaagcagacccagaccttcaccacctacagcgacaaccagcccggggtgctgatccaggtgtatgaaggagagcgggccatgaccaaggacaacaacctgctgggcaagtttgagctgaccggcatgcctgggggcatgcctgggggcttccctgggggcggggccccacccagcggcggggccagcagcggccccaccatcgaggaggtggactag

SEQ ID NO: 245415 - DNA, 1482 bp, Artificial Sequence
  derived and/or modified sequence
atgagcaagggccccgccgtgggcatcgacctgggcaccacctactcctgcgttggcgtttttcaacacggtaaggtggagatcatcgccaatgatcagggtaaccggactactcctagttatgtcgcttttaccgacacagagcgcctgataggagacgcagccaagaaccaggttgccatgaatcccaccaatacagtcttcgacgccaagaggctaataggccggagatttgacgatgcagtggtgcagagtgacatgaagcactggccctttatggtggtaaacgacgccgggcggccaaaagtccaggttgagtataaaggggaaacgaaaagtttctacccagaagaggtctcaagcatggtcttaaccaagatgaaagagatagcagaagcttatcttgggaaaactgtgacaaatgctgtagtgaccgttcccgcatactttaatgattctcagcgtcaggccactaaagacgcaggcaccatcgcaggactgaacgtgctgcgaatcattaacgagccaacagccgccgccatcgcatacggcttggacaagaaagtaggcgcagagcgaaacgtgctcattttcgacctgggcggaggcacatttgacgtatccatcctgaccattgaagacggaatcttcgaggttaaaagcacggcaggagatactcatcttggaggtgaggactttgacaatagaatggttaaccactttattgcagaattcaagcggaaacataagaaggacatttctgaaaataaaagggccgtgcgtcggctgcgcactgcttgcgagcgagctaagcggacactgtcctcatctacccaggcctctatcgagatagacagcctctacgaggggatcgacttctacacatcaatcactcgggccaggttcgaagagttgaacgcagatctttttaggggcactttggatccggtcgagaaggctctgcgcgatgccaaattagacaaatcccagattcacgacattgtactggtgggcggcagcacccgcattccaaaaatccagaagttgctgcaggacttctttaacgggaaagagttgaataagtccataaatcccgacgaggcagtggcttacggagctgctgttcaagctgcaatcctgtcgggcgataaaagtgaaaacgtgcaagatctgctgctactagacgtaactccactgtctttgggcattgagaccgccgggggagtcatgactgtgttgataaagagaaataccacaatcccgacaaaacaaactcaaacgtttaccacatactcggataaccagcccggcgtgctgattcaggtatatgagggagagagagctatgaccaaagacaacaacctactgggcaaatttgaactgaccggtatgccgggaggcatgcccggcggattcccagggggcggggctccccccagcgggggagcatctagcggacctactatcgaggaggtagactag

SEQ ID NO: 245416 - DNA, 1482 bp, Artificial Sequence
  derived and/or modified sequence
atgtcaaaaggaccagctgttggcattgacctgggcactacatatagctgtgttggggtgtttcagcacgggaaggtggaaatcatcgcaaacgatcagggcaatcggacgacaccctcatacgttgccttcacagatacagagcgtctgatcggagatgccgcaaaaaaccaagtggctatgaaccctaccaatactgtgttcgatgctaaacgtctcataggaagaagatttgatgacgctgtcgtccagtcagacatgaagcactggcccttcatggtggtcaatgacgccggacggcctaaggttcaggtagagtataagggcgaaacaaagagcttttaccccgaagaagtatccagtatggttctgacaaagatgaaggagattgctgaggcatatctgggcaagacagtgacaaatgcagttgttacagtgccggcttatttcaacgattcccagaggcaggctacaaaggatgcaggaaccatcgcgggactgaacgtgttgcggattatcaacgaacctaccgccgctgccatagcttacgggctagacaagaaagtgggcgcagagcgcaatgtgctaatctttgacctgggtggaggtacatttgacgtgtccatcctaactattgaggacggcattttcgaggtcaagtcaaccgccggagatacccaccttggaggggaagatttcgataaccggatggtgaaccacttcatcgcggagtttaagcgtaaacataaaaaggacatttccgagaataaacgtgcggtgcggagactgagaactgcctgcgagcgcgctaagcgaacgctgagctccagtacccaagcaagtatcgaaatcgactccctgtatgaggggatcgatttctacacatcaatcactagggctcggttcgaagagctgaatgctgacctgtttagggggacacttgatccagtggaaaaagcgttgagggacgccaagctggacaagagtcagatccacgatattgtgcttgtcggaggaagcactcggatcccaaagatacagaaactactacaagactttttcaacggtaaggagctgaacaagagcattaacccagatgaggccgttgcctacggtgcagccgtgcaagctgccattctgtccggcgacaagtctgagaatgtccaagatctcttgctcctcgatgttacaccactgtccctcggcatcgaaacagctggcggagtcatgaccgtgcttattaagcgcaatactacgattccaactaagcagacccagacctttaccacatacagtgacaatcagcccggagtgctcattcaggtatacgagggtgagcgggcaatgaccaaagataacaatctcctaggcaagtttgagctcaccggcatgccaggtggcatgcccggaggcttccccggtgggggagctccaccttcaggcggtgcatcatccggacccactatagaggaggtcgactag

SEQ ID NO: 245417 - DNA, 1482 bp, Artificial Sequence
  derived and/or modified sequence
atgtccaagggaccagccgtgggcatcgacctagggaccacctacagttgcgtgggagtcttccagcacggaaaggtagaaatcatcgcgaatgaccaagggaacaggactaccccatcctatgtggcctttaccgataccgaaagactgattggcgatgctgccaagaatcaggtggcaatgaaccctacaaacactgtctttgacgccaagcgcctgattggaagaagattcgacgacgcagtggtgcagtctgacatgaaacactggcccttcatggttgtcaacgatgctgggaggccaaaggtgcaggttgagtataagggggagaccaaatcattttatccagaagaagtctctagtatggtcctcaccaaaatgaaagaaattgctgaggcctatctcggaaagacggttaccaacgcagtggtgacggtgcccgcctactttaatgatagtcaacggcaagccacaaaggatgccggcactattgccgggcttaatgtgcttagaataataaacgaacctaccgccgccgccattgcatatggcctcgataaaaaggtcggcgccgagagaaacgtgttgatcttcgatctgggggggggcactttcgacgtgtctatcctcactatagaggacggaatctttgaggtcaagagtaccgccggagacacacatctgggcggcgaggattttgataatcgaatggtcaaccacttcatagcagagtttaagcggaagcacaagaaggatatctcagagaataaacgcgctgtaaggcgcctgcgaacagcttgtgagagggccaaaaggacattgagtagctctactcaggcatcgatcgagatcgatagtctttatgagggtatagatttctacaccagcatcaccagagccaggttcgaggaacttaatgctgatctatttagaggcaccctggaccctgtcgaaaaggccctgcgcgacgccaaactcgataaatcacagatccatgatatagtgctggttggcgggtctactcgcatcccaaagatccagaaactcctccaggatttctttaacggcaaagaactgaacaagagcattaatccagacgaggcagtggcatacggcgcagccgtgcaggctgcaatcttatccggtgataaaagcgagaatgtccaggacctcctgctgcttgacgtcacacctctgagtcttggtattgaaacagctgggggtgttatgaccgtgctgattaagagaaacactaccatcccgaccaagcagactcagactttcaccacatacagcgacaatcaaccaggagtactgatccaagtatacgaaggggaacgcgctatgacaaaagataacaatctgcttggtaagtttgaactcacaggaatgcccggaggtatgcctggcggatttcccggcgggggtgcgccaccttctggaggagcctctagcggtccaacgattgaggaagtagactag

SEQ ID NO: 245418 - DNA, 1482 bp, Artificial Sequence
  derived and/or modified sequence
atgagcaagggtcctgcagtcggcatagacctgggaacaacttattcctgtgtgggtgtgttccagcacggaaaagtcgagattatagcaaatgaccaaggaaaccgaactaccccctcatacgtagcgtttactgatactgaacgactcatcggagatgccgcaaagaatcaagtagctatgaaccccactaatactgtgttcgatgcgaaaaggcttatcggcaggaggttcgacgacgccgtggttcagtctgacatgaagcactggccgttcatggtcgtcaatgacgctggacggcccaaagtgcaggtggagtacaagggcgaaactaaaagcttctatcctgaggaggtttccagcatggtattaacaaagatgaaagagatagccgaagcttatctgggtaagacagtcaccaacgccgtggtcacagtccccgcatattttaacgatagtcagcgtcaggccaccaaagatgcagggacaatcgccggactgaatgttctccggattatcaacgaacccacagcagctgccatagcatacggactggataagaaggtgggggcagagcgtaacgtgttgatcttcgacctgggcggcggcacattcgatgtgagcattctaacgattgaggatggcatcttcgaggttaaatctactgccggtgacacacatcttggcggagaagacttcgataaccgaatggtgaatcacttcatcgccgagttcaaacgcaagcacaagaaagatatctcagagaacaagcgggcagtgagaagactgaggacagcgtgtgaaagagccaaaagaaccctgagcagtagcacacaggcttccatagaaatcgacagtttgtacgagggaattgacttctacaccagcattacacgggcccggttcgaagagctgaatgccgacttgttccggggcaccctcgatccagtcgaaaaggcattacgcgacgcaaaattggataagtcgcaaatccacgacattgttttagtcggcgggagcacacgtattccaaagattcaaaagttgcttcaagatttcttcaacggaaaggaattaaataagagcatcaacccagacgaggccgttgcatatggcgcagcagtgcaggccgccattctgagtggagacaagtccgagaacgtccaagacctgctactccttgatgtcaccccccttagtcttggtattgaaacagctgggggtgttatgaccgtgctgattaagagaaacactaccatcccgaccaagcagactcagactttcaccacatacagcgacaatcaaccaggagtactgatccaagtatacgaaggggaacgcgctatgacaaaagataacaatctgcttggtaagtttgaactcacaggaatgcccggaggtatgcctggcggatttcccggcgggggtgcgccaccttctggaggagcctctagcggtccaacgattgaggaagtagactag

SEQ ID NO: 245419 - DNA, 1482 bp, Artificial Sequence
  derived and/or modified sequence
atgagcaagggccccgccgtgggcatcgacctgggcaccacctacagctgcgtgggcgtgttccagcacggcaaggtggagatcatcgccaacgaccagggcaacagaaccacccccagctacgtggccttcaccgacaccgagagactgatcggcgacgccgccaagaaccaggtggccatgaaccccaccaacaccgtgttcgacgccaagagactgatcggcagaagattcgacgacgccgtggtgcagagcgacatgaagcactggcccttcatggtggtgaacgacgccggcagacccaaggtgcaggtggagtacaagggcgagaccaagagcttctaccccgaggaggtgagcagcatggtgctgaccaagatgaaggagatcgccgaggcctacctgggcaagaccgtgaccaacgccgtggtgaccgtgcccgcctacttcaacgacagccagagacaggccaccaaggacgccggcaccatcgccggcctgaacgtgctgagaatcatcaacgagcccaccgccgccgccatcgcctacggcctggacaagaaggtgggcgccgagagaaacgtgctgatcttcgacctgggcggcggcaccttcgacgtgagcatcctgaccatcgaggacggcatcttcgaggtgaagagcaccgccggcgacacccacctgggcggcgaggacttcgacaacagaatggtgaaccacttcatcgccgagttcaagagaaagcacaagaaggacatcagcgagaacaagagagccgtgagaagactgagaaccgcctgcgagagagccaagagaaccctgagcagcagcacccaggccagcatcgagatcgacagcctgtacgagggcatcgacttctacaccagcatcaccagagccagattcgaggagctgaacgccgacctgttcagaggcaccctggaccccgtggagaaggccctgagagacgccaagctggacaagagccagatccacgacatcgtgctggtgggcggcagcaccagaatccccaagatccagaagctgctgcaggacttcttcaacggcaaggagctgaacaagagcatcaaccccgacgaggccgtggcctacggcgccgccgtgcaggccgccatcctgagcggcgacaagagcgagaacgtgcaggacctgctgctgctggacgtgacccccctgagcctgggcatcgagaccgccggcggcgtgatgaccgtgctgatcaagagaaacaccaccatccccaccaagcagacccagaccttcaccacctacagcgacaaccagcccggcgtgctgatccaggtgtacgagggcgagagagccatgaccaaggacaacaacctgctgggcaagttcgagctgaccggcatgcccggcggcatgcccggcggcttccccggcggcggcgccccccccagcggcggcgccagcagcggccccaccatcgaggaggtggactag

SEQ ID NO: 245420 - protein, 787 aa, Artificial Sequence
  derived and/or modified sequence
MGWRPRRARGTPLLLLLLLLLLWPVPGAGVLQGHIPGQPVTPHWVLDGQPWRTVSLEEPVSKPDMGLVALEAEGQELLLELEKNHRLLAPGYIETHYGPDGQPVVLAPNHTDHCHYQGRVRGFPDSWVVLCTCSGMSGLITLSRNASYYLRPWPPRGSKDFSTHEIFRMEQLLTWKGTCGHRDPGNKAGMTSLPGGPQSRGRREARRTRKYLELYIVADHTLFLTRHRNLNHTKQRLLEVANYVDQLLRTLDIQVALTGLEVWTERDRSRVTQDANATLWAFLQWRRGLWAQRPHDSAQLLTGRAFQGATVGLAPVEGMCRAESSGGVSTDHSELPIGAAATMAHEIGHSLGLSHDPDGCCVEAAAESGGCVMAAATGHPFPRVFSACSRRQLRAFFRKGGGACLSNAPDPGLPVPPALCGNGFVEAGEECDCGPGQECRDLCCFAHNCSLRPGAQCAHGDCCVRCLLKPAGALCRQAMGDCDLPEFCTGTSSHCPPDVYLLDGSPCARGSGYCWDGACPTLEQQCQQLWGPGSHPAPEACFQVVNSAGDAHGNCGQDSEGHFLPCAGRDALCGKLQCQGGKPSLLAPHMVPVDSTVHLDGQEVTCRGALALPSAQLDLLGLGLVEPGTQCGPRMVCNSNHNCHCAPGWAPPFCDKPGFGGSMDSGPVQAENHDTFLLAMLLSVLLPLLPGAGLAWCCYRLPGAHLQRCSWGCRRDPACSGPKDGPHRDHPLGGVHPMELGPTATGQPWPLDPENSHEPSSHPEKPLPAVSPDPQADQVQMPRSCLW

SEQ ID NO: 245421 - DNA, 2364 bp, Artificial Sequence
  derived and/or modified sequence
atgggatggcgcccacgtcgggcacggggcacaccattactgctcctgctcctgctcctgctcctatggccagtgcccggcgctggggtgttgcagggtcatattccaggtcagccagtcactccccactgggttctggatggacagccttggcgtactgtatctctcgaagagcccgtcagtaaaccagatatgggcctggtagccctggaggcagaaggtcaggagctgctgcttgaactagagaaaaatcacagattactcgcacccggctatattgaaacccactacggtccagatggccaacccgttgtgctggcacccaaccacacagaccactgccactaccagggacgcgtaaggggctttcccgatagttgggtagtgctttgcacttgcagcggaatgagcggccttataaccctgagtcggaatgccagctactatttacggccatggccacctcgggggtccaaggattttagtacacacgaaatcttcagaatggagcagctcctgacgtggaaaggaacctgcgggcatcgagaccccggcaacaaagcgggcatgacttcacttcctggaggacctcaaagtcgcgggagacgtgaagcccgtagaaccagaaaatacctcgagctttatatcgtcgctgaccataccctcttcctgacccggcacaggaatctgaaccacactaagcagcggttgcttgaggttgcgaattatgtggatcagcttcttagaaccctagatattcaggtcgccctcaccgggctggaggtttggaccgagcgtgataggtcccgcgtcacacaggatgcaaatgcaacactctgggcatttttacagtggcgtcgcggcctgtgggctcagcgccctcacgacagcgcccagctgctaaccggccgagcctttcagggggcgacagttggactggcgcctgtggaagggatgtgcagggcggaaagcagtggcggcgtgtctacagatcactccgagctcccaattggagctgctgccacaatggctcatgagattgggcattcattagggctgagtcacgaccctgacgggtgctgtgttgaagccgcggccgaatcagggggatgcgtgatggcagctgctaccgggcaccccttccctcgtgtttttagcgcctgtagcagacggcagttgagagcgttctttcggaaaggcggtggggcatgcttatcaaacgcgcctgaccccggactacctgtgcctccggccctgtgcggaaatggttttgtggaagccggcgaagaatgcgactgtgggcccggccaggagtgccgggacctctgctgctttgcacataactgttccctgaggcccggcgcccagtgtgcccatggcgactgttgtgttcggtgccttcttaagcctgccggagcgctctgcaggcaggctatgggggactgcgacttgcctgagttttgcacaggaacaagctcacactgcccacccgatgtctacctgcttgatggctctccatgtgcgcgcggctcaggttattgttgggatggcgcctgccccaccttagagcaacaatgccagcagctgtgggggcctggctcacatcccgctcccgaagcatgttttcaggtggtgaactccgcaggagatgcccacgggaattgcggacaagactctgagggccactttctgccctgtgccggccgagacgcgctctgtgggaagctgcagtgtcagggagggaagccatccctgcttgcccctcacatggtgcccgtggattctaccgttcatctggacggccaggaagtgacttgtagaggcgctctggctctcccatctgctcaattagacttgctggggcttggcctggtggagcctggaacgcaatgtggcccgagaatggtgtgcaactcaaaccataactgtcactgcgccccgggctgggcccctcctttctgtgataagcccggattcggtggaagcatggattccggtcccgtacaggccgaaaaccacgataccttcctcttggccatgctactctctgtgctccttcccttactgcctggggccgggttagcttggtgctgctatcggcttcctggtgcacatttgcagaggtgtagttggggctgtcgacgggatcccgcttgttctgggccaaaagatgggcctcatagggatcacccactgggaggggtacacccaatggagttaggacctactgctaccggccagccatggccgcttgatccagagaactcccacgagccgtctagtcatccagaaaagccgctgccagcagtgtcccccgacccacaggccgaccaggtgcagatgccccggtcatgcctgtggtag

SEQ ID NO: 245422 - DNA, 2364 bp, Artificial Sequence
  derived and/or modified sequence
atgggctggaggccccggcgggcccggggcacccccctgctgctgctgctgctgctgctgctgctgtggcctgtgcctggggccggcgtgctgcagggccacatccctggccagcctgtgaccccccactgggtgctggatggccagccctggaggacagtgtccctggaggagcctgtgtccaagccagacatgggcctggtggccctggaggccgagggccaggagctgctgctggagctggagaagaaccaccggctgctggcccctggctacatcgagacccactacggcccagatggccagcctgtggtgctggcccccaaccacacagaccactgccactaccagggccgggtgcggggcttcccagacagctgggtggtgctgtgcacctgcagcggcatgagcggcctcatcaccctgagcagaaatgccagctactacctgcggccctggccaccccggggcagcaaggacttcagcacccatgagatcttcaggatggagcagctgctgacctggaagggcacctgtggccaccgggaccccggcaacaaggccggcatgaccagcctgcccggcggcccccagagccggggccggcgggaggcccggaggaccaggaagtacctggagctgtacatcgtggccgaccacaccctcttcctgaccaggcacaggaacctgaaccacaccaagcagaggctgctggaggtggccaactacgtggaccagctgctgcggaccctggacatccaggtggccctgaccggcctggaggtgtggacagagcgggacaggagccgggtgacccaggatgccaatgccaccctgtgggccttcctgcagtggaggcggggcctgtgggcccagaggcctcatgattctgcccagctgctgaccggccgggccttccagggcgccaccgtgggcctggcccctgtggagggcatgtgcagagctgagagcagtggaggagtgtccacagaccacagcgagctgcccatcggggccgccgccaccatggcccatgaaattggccacagcctgggcctgagccatgaccctgatggctgctgcgtggaggccgctgctgagagcggcggctgtgtgatggctgctgccaccggccaccccttccccagggtcttcagcgcctgcagccggcggcagctgcgggccttcttcagaaaaggaggaggagcctgcctgagcaatgccccagaccccggcctgcctgtgcccccagccctgtgtggaaatggatttgtggaggccggggaggagtgtgactgtggccctggccaggagtgccgggacctgtgctgctttgcccacaactgcagcctgcggcctggggcccagtgtgcccatggagactgctgcgtgcgctgcctgctgaagccagctggggccctgtgccggcaggccatgggagactgtgacctgcctgagttctgcaccggcaccagcagccactgccccccagatgtgtacctgctggatggcagcccctgtgcccggggcagcggctactgctgggatggagcctgccccaccctggagcagcagtgccagcagctgtggggccctggcagccacccagcccctgaggcctgcttccaggtggtgaacagcgctggagatgcccacggcaactgtggccaggacagcgagggccacttcctgccctgtgccggcagagatgccctgtgtgggaagctgcagtgccagggcggcaagcccagcctgctggccccccacatggtgcctgtggacagcacagtgcacctggatggccaggaggtgacctgccgcggggccctggccctgcccagcgcccagctggacctgctgggcctgggcctggtggagcccggcacccagtgtggccccaggatggtgtgcaacagcaaccacaactgccactgtgcccctggctgggccccacccttctgtgacaagccaggctttggaggctccatggattctggccctgtgcaggctgaaaatcatgacaccttcctgctggccatgctgctgtctgtgctgctgcccctgctgcccggggccggcctggcctggtgctgctaccgcctgcccggggcccacctgcagcgctgctcctggggctgccggcgggaccctgcctgcagcggccccaaggatggcccccaccgggaccaccccctgggcggcgtgcaccccatggagctgggccccacagccaccggccagccctggcccctggaccctgagaacagccatgagcccagcagccaccctgagaagcccctgcctgctgtgtccccagacccccaggccgaccaggtgcagatgcccaggagctgcctgtggtag

SEQ ID NO: 245423 - DNA, 2364 bp, Artificial Sequence
  derived and/or modified sequence
atgggctggcggccccggcgggcccggggcacccccctgctgctgctgctgctccttcttcttttatggcctgtgccgggggccggggtgctccagggtcacattcctggtcaacccgtgactccccactgggtactggatgggcagccgtggcgcacagtttcactagaagagcctgtatccaagccggatatgggcctggtggcgctagaggccgaaggacaggaactcttacttgagttggagaagaaccatagacttcttgcccccggatatatcgagacacactacggccccgacggccaacccgtcgtgctggcccccaatcacacggatcactgtcactatcaaggaagagtccgcggcttcccagactcttgggtagtgctctgtacctgttccggcatgtctggcctcattacgctttcgagaaatgcatcatattatctcagaccctggccccctagaggaagcaaggactttagtactcacgagattttccgcatggagcaactgctgacttggaagggaacctgcgggcaccgggacccggggaataaggcaggcatgaccagcctgccaggcggtccacaatccaggggaaggcgggaggctcgccgcacaagaaaatacctggagctttacattgttgctgatcacacgctgtttttaacccggcacagaaacctcaaccatacaaagcaacgccttctcgaggtcgctaattacgttgatcagctactaaggacactggatatacaggtcgcactgactggactcgaggtctggacagagcgggatcgcagcagagttacccaagatgctaatgcaacgttgtgggcattcttgcagtggagaaggggactgtgggcacaacgtccgcatgattctgcccaactgcttaccggccgggcatttcagggggccactgtgggattggcgccagttgagggcatgtgtagggcggaatcatctggcggcgtgagtacggatcattctgagcttccaattggagctgcagctacaatggcacacgaaattggacattcgttgggtttatctcacgatcctgatggctgctgtgtcgaagctgctgcagagagcggcggttgcgtcatggccgccgccacaggacatccatttcctagggttttctcagcctgctcacgccgccaactgcgggccttttttaggaaagggggtggagcctgtttgagcaacgcacctgatcccggcctgcccgtgcctcctgctttgtgtggcaacggtttcgtagaggccggtgaggagtgtgattgcggcccggggcaggagtgtcgtgatctttgctgtttcgcacacaactgttcgctgcggccaggcgcacagtgcgctcacggagattgctgtgtgcggtgcctgttaaaacccgccggggcactttgcagacaggctatgggggactgcgatttgcccgaattctgtacagggaccagttcgcactgtcctccggacgtttatctactggacggctcaccatgcgcccgcggaagcgggtattgctgggatggggcatgcccaaccctggagcagcaatgtcagcagctgtgggggccaggcagccatcccgcaccagaagcgtgtttccaggtggtcaacagtgctggagacgcacatggcaattgcggacaggattcagagggacatttcctaccatgcgctggtagagatgctctctgcgggaaacttcagtgccagggcggtaagccaagtctgctggcgccccacatggtgcccgttgatagtacggtgcatcttgacggccaggaggttacttgccggggtgcattagccctgcccagtgcacaactggacttacttggacttggtctcgtggagccggggactcagtgtggacctaggatggtttgcaattcaaaccataattgtcactgtgcacctggctgggcccctccattttgtgacaaacccggtttcggagggtctatggattctgggccggtgcaggctgaaaaccacgacaccttcctccttgctatgctgttgtccgttcttctgcccctcctgcctggcgcagggcttgcttggtgctgctaccgactccccggagcccacttacagcgttgttcctggggctgccgtcgagaccccgcgtgctcgggccccaaggacgggccccatcgggaccaccccctgggcggcgtgcaccccatggaactgggcccaacagcgacgggacagccctggcctttggaccctgaaaatagtcacgaaccttcttcccaccccgagaaacccctccccgcagtgagtcccgatccacaagccgatcaggtccagatgccgcgcagttgcctgtggtag

SEQ ID NO: 245424 - DNA, 2364 bp, Artificial Sequence
  derived and/or modified sequence
atgggatggagacccaggcgggctcggggtacacctctgctcctgctactgctcctgctgctcctctggcctgtgcccggtgctggcgtcctccaaggtcacatccccggacagcccgtgaccccacattgggtgctggacgggcagccctggagaactgtgagccttgaggagcccgtatctaagccagatatggggctggtcgccctggaggccgagggtcaggaattgctgctcgaacttgagaaaaaccaccgacttcttgctccgggttatattgaaacgcactacggaccggacggccaacctgtagtcctagcccctaatcacaccgaccactgtcactaccaagggagggtccggggattcccagactcatgggtggtgctttgcacttgttctgggatgagtggtctgattacacttagtcgaaacgcttcctattatctaaggccgtggccacctaggggcagtaaggatttctcaacccacgaaatatttagaatggagcagttgttaacatggaaagggacgtgtggacaccgggatccaggtaataaggcaggcatgacttctctgcccggaggtccccagtctcgtggacgcagagaggccaggcgcacaagaaagtatttggagctgtacatcgttgcagatcacaccttattcttaacgcggcatagaaaccttaaccatacaaagcagaggctgctggaggtcgctaattatgtcgatcagctgctgcgaaccctggatatacaggttgcactgactgggctcgaagtctggacagaacgagacaggtccagggtgacccaggacgctaatgcaacgctgtgggcatttctccaatggaggagaggcctatgggcccagcggccacatgacagcgcgcagctgctgactggaagagcatttcaaggtgcaacagtggggctcgcacccgttgagggaatgtgtcgcgcagagtcctctggaggcgtcagtactgaccactcagagctcccgatcggtgctgcagcgaccatggctcacgagattggccacagtctgggattatctcacgacccagatggctgctgcgtggaagccgctgcggaaagcggcggatgcgttatggccgctgctactggccatccattcccccgtgtcttttcagcttgttcacggaggcagctccgcgcatttttccgaaagggagggggagcctgcctgtcgaacgctccagacccagggctgccagtaccacccgctctatgcgggaatggatttgtggaggccggagaagagtgtgattgcggccctggacaggaatgtagagacctgtgttgtttcgcccataactgctcactgcgacccggagcacagtgtgcccacggcgactgctgtgtgcgctgtctactgaagccagccggagccctctgcagacaggccatgggagattgtgacctgccggagttctgtacgggaaccagttcccactgccccccagatgtttacctgctggacgggtccccctgtgctcggggaagcggatattgctgggacggagcctgccccaccttagagcagcaatgtcagcagctgtggggacccggatcacacccagccccagaagcttgcttccaggttgtgaactccgctggagatgctcacggaaattgtgggcaagatagtgagggacatttcctgccctgcgcaggtcgggacgcactctgcggcaagttacaatgccaggggggtaagccatctttactggcgccacatatggtccctgtggactcgaccgttcatcttgatggccaggaggtgacttgcagaggggctcttgcccttccatctgcccaactcgatctcctggggcttgggctcgtcgagcccggtacccaatgtggccctcgcatggtgtgcaactccaatcacaactgtcactgcgcccctggctgggcccctcctttttgtgataagccaggcttcgggggtagtatggactcagggccagtgcaagccgaaaatcatgacacctttctgctggcaatgctgctgtctgtgctgctcccactgctcccaggcgctggcctagcctggtgctgttatcggttgcctggcgctcacttgcagagatgctcatggggatgcagaagggatcctgcctgctctgggcctaaggacggcccacatcgagaccacccattgggtggcgtccaccccatggagctgggccctaccgcaaccgggcagccatggccgctggaccccgagaactcacatgaacccagctctcaccctgagaaacctctaccagccgtttctccagaccctcaggcggatcaggtacagatgccccgatcatgcctttggtag

SEQ ID NO: 245425 - DNA, 2364 bp, Artificial Sequence
  derived and/or modified sequence
atgggctggagacccagaagagccagaggcacccccctgctgctgctgctgctgctgctgctgctgtggcccgtgcccggcgccggcgtgctgcagggccacatccccggccagcccgtgaccccccactgggtgctggacggccagccctggagaaccgtgagcctggaggagcccgtgagcaagcccgacatgggcctggtggccctggaggccgagggccaggagctgctgctggagctggagaagaaccacagactgctggcccccggctacatcgagacccactacggccccgacggccagcccgtggtgctggcccccaaccacaccgaccactgccactaccagggcagagtgagaggcttccccgacagctgggtggtgctgtgcacctgcagcggcatgagcggcctgatcaccctgagcagaaacgccagctactacctgagaccctggccccccagaggcagcaaggacttcagcacccacgagatcttcagaatggagcagctgctgacctggaagggcacctgcggccacagagaccccggcaacaaggccggcatgaccagcctgcccggcggcccccagagcagaggcagaagagaggccagaagaaccagaaagtacctggagctgtacatcgtggccgaccacaccctgttcctgaccagacacagaaacctgaaccacaccaagcagagactgctggaggtggccaactacgtggaccagctgctgagaaccctggacatccaggtggccctgaccggcctggaggtgtggaccgagagagacagaagcagagtgacccaggacgccaacgccaccctgtgggccttcctgcagtggagaagaggcctgtgggcccagagaccccacgacagcgcccagctgctgaccggcagagccttccagggcgccaccgtgggcctggcccccgtggagggcatgtgcagagccgagagcagcggcggcgtgagcaccgaccacagcgagctgcccatcggcgccgccgccaccatggcccacgagatcggccacagcctgggcctgagccacgaccccgacggctgctgcgtggaggccgccgccgagagcggcggctgcgtgatggccgccgccaccggccaccccttccccagagtgttcagcgcctgcagcagaagacagctgagagccttcttcagaaagggcggcggcgcctgcctgagcaacgcccccgaccccggcctgcccgtgccccccgccctgtgcggcaacggcttcgtggaggccggcgaggagtgcgactgcggccccggccaggagtgcagagacctgtgctgcttcgcccacaactgcagcctgagacccggcgcccagtgcgcccacggcgactgctgcgtgagatgcctgctgaagcccgccggcgccctgtgcagacaggccatgggcgactgcgacctgcccgagttctgcaccggcaccagcagccactgcccccccgacgtgtacctgctggacggcagcccctgcgccagaggcagcggctactgctgggacggcgcctgccccaccctggagcagcagtgccagcagctgtggggccccggcagccaccccgcccccgaggcctgcttccaggtggtgaacagcgccggcgacgcccacggcaactgcggccaggacagcgagggccacttcctgccctgcgccggcagagacgccctgtgcggcaagctgcagtgccagggcggcaagcccagcctgctggccccccacatggtgcccgtggacagcaccgtgcacctggacggccaggaggtgacctgcagaggcgccctggccctgcccagcgcccagctggacctgctgggcctgggcctggtggagcccggcacccagtgcggccccagaatggtgtgcaacagcaaccacaactgccactgcgcccccggctgggccccccccttctgcgacaagcccggcttcggcggcagcatggacagcggccccgtgcaggccgagaaccacgacaccttcctgctggccatgctgctgagcgtgctgctgcccctgctgcccggcgccggcctggcctggtgctgctacagactgcccggcgcccacctgcagagatgcagctggggctgcagaagagaccccgcctgcagcggccccaaggacggcccccacagagaccaccccctgggcggcgtgcaccccatggagctgggccccaccgccaccggccagccctggcccctggaccccgagaacagccacgagcccagcagccaccccgagaagcccctgcccgccgtgagccccgacccccaggccgaccaggtgcagatgcccagaagctgcctgtggtag

SEQ ID NO: 245426 - DNA, 3452 bp, Artificial Sequence
  derived and/or modified sequence
cggcggcctgaggctgcaccgggcacgggtcggccgcaatccagcctgggcggagccggagttgcgagccgctgcctagaggccgaggagctcacagctatgggctggaggccccggagagctcgggggaccccgttgctgctgctgctactactgctgctgctctggccagtgccaggcgccggggtgcttcaaggacatatccctgggcagccagtcaccccgcactgggtcctggatggacaaccctggcgcaccgtcagcctggaggagccggtctcgaagccagacatggggctggtggccctggaggctgaaggccaggagctcctgcttgagctggagaagaaccacaggctgctggccccaggatacatagaaacccactacggcccagatgggcagccagtggtgctggcccccaaccacacggatcattgccactaccaagggcgagtaaggggcttccccgactcctgggtagtcctctgcacctgctctgggatgagtggcctgatcaccctcagcaggaatgccagctattatctgcgtccctggccaccccggggctccaaggacttctcaacccacgagatctttcggatggagcagctgctcacctggaaaggaacctgtggccacagggatcctgggaacaaagcgggcatgaccagccttcctggtggtccccagagcaggggcaggcgagaagcgcgcaggacccggaagtacctggaactgtacattgtggcagaccacaccctgttcttgactcggcaccgaaacttgaaccacaccaaacagcgtctcctggaagtcgccaactacgtggaccagcttctcaggactctggacattcaggtggcgctgaccggcctggaggtgtggaccgagcgggaccgcagccgcgtcacgcaggacgccaacgccacgctctgggccttcctgcagtggcgccgggggctgtgggcgcagcggccccacgactccgcgcagctgctcacgggccgcgccttccagggcgccacagtgggcctggcgcccgtcgagggcatgtgccgcgccgagagctcgggaggcgtgagcacggaccactcggagctccccatcggcgccgcagccaccatggcccatgagatcggccacagcctcggcctcagccacgaccccgacggctgctgcgtggaggctgcggccgagtccggaggctgcgtcatggctgcggccaccgggcacccgtttccgcgcgtgttcagcgcctgcagccgccgccagctgcgcgccttcttccgcaaggggggcggcgcttgcctctccaatgccccggaccccggactcccggtgccgccggcgctctgcgggaacggcttcgtggaagcgggcgaggagtgtgactgcggccctggccaggagtgccgcgacctctgctgctttgctcacaactgctcgctgcgcccgggggcccagtgcgcccacggggactgctgcgtgcgctgcctgctgaagccggctggagcgctgtgccgccaggccatgggtgactgtgacctccctgagttttgcacgggcacctcctcccactgtcccccagacgtttacctactggacggctcaccctgtgccaggggcagtggctactgctgggatggcgcatgtcccacgctggagcagcagtgccagcagctctgggggcctggctcccacccagctcccgaggcctgtttccaggtggtgaactctgcgggagatgctcatggaaactgcggccaggacagcgagggccacttcctgccctgtgcagggagggatgccctgtgtgggaagctgcagtgccagggtggaaagcccagcctgctcgcaccgcacatggtgccagtggactctaccgttcacctagatggccaggaagtgacttgtcggggagccttggcactccccagtgcccagctggacctgcttggcctgggcctggtagagccaggcacccagtgtggacctagaatggtttgcaatagcaaccataactgccactgtgctccaggctgggctccacccttctgtgacaagccaggctttggtggcagcatggacagtggccctgtgcaggctgaaaaccatgacaccttcctgctggccatgctcctcagcgtcctgctgcctctgctcccaggggccggcctggcctggtgttgctaccgactcccaggagcccatctgcagcgatgcagctggggctgcagaagggaccctgcgtgcagtggccccaaagatggcccacacagggaccaccccctgggcggcgttcaccccatggagttgggccccacagccactggacagccctggcccctggaccctgagaactctcatgagcccagcagccaccctgagaagcctctgccagcagtctcgcctgacccccaagcagatcaagtccagatgccaagatcctgcctctggtgagaggtagctcctaaaatgaacagatttaaagacaggtggccactgacagccactccaggaacttgaactgcaggggcagagccagtgaatcaccggacctccagcacctgcaggcagcttggaagtttcttccccgagtggagcttcgacccacccactccaggaacccagagccacattagaagttcctgagggctggagaacactgctgggcacactctccagctcaataaaccatcagtcccagaagcaaaggtcacacagcccctgacctccctcaccagtggaggctgggtagtgctggccatcccaaaagggctctgtcctgggagtctggtgtgtctcctacatgcaatttccacggacccagctctgtggagggcatgactgctggccagaagctagtggtcctggggccctatggttcgactgagtccacactcccctggagcctggctggcctctgcaaacaaacataattttggggaccttccttcctgtttcttcccaccctgtcttctcccctaggtggttcctgagcccccacccccaatcccagtgctacacctgaggttctggagctcagaatctgacagcctctcccccattctgtgtgtgtcggggggacagagggaaccatttaagaaaagataccaaagtagaagtcaaaagaaagacatgttggctataggcgtggtggctcatgcctataatcccagcactttgggaagccggggtaggaggatcaccagaggccagcaggtccacaccagcctgggcaacacagcaagacaccgcatctacagaaaaattttaaaattagctgggcgtggtggtgtgtacctgtaggcctagctgctcaggaggctgaagcaggaggatcacttgagcctgagttcaacactgcagtgagctatggtggcaccactgcactccagcctgggtgacagagcaagaccctgtctctaaaataaattttaaaaagacat

SEQ ID NO: 245427 - protein, 384 aa, Artificial Sequence
  derived and/or modified sequence
MVSGDYSLGLNDLNVSPPELTVHVGDSALMGCVFQSTEDKCIFKIDWTLSPGEHAKDEYVLYYYSNLSVPIGRFQNRVHLMGDILCNDGSLLLQDVQEADQGTYICEIRLKGESQVFKKAVVLHVLPEEPKELMVHVGGLIQMGCVFQSTEVKHVTKVEWIFSGRRAKEEIVFRYYHKLRMSVEYSQSWGHFQNRVNLVGDIFRNDGSIMLQGVRESDGGNYTCSIHLGNLVFKKTIVLHVSPEEPRTLVTPAALRPLVLGGNQLVIIVGIVCATILLLPVLILIVKKTCGNKSSVNSTVLVKNTKKTNPEIKEKPCHFERCEGEKHIYSPIIVREVIEEEEPSEKSEATYMTMHPVWPSLRSDRNNSLEKKSGGGMPKTQQAF

SEQ ID NO: 245428 - DNA, 1155 bp, Artificial Sequence
  derived and/or modified sequence
atggtctctggcgattacagtctaggcctcaatgacctgaatgtgtcaccgcctgaactgactgttcacgttggtgattctgccctcatgggctgtgttttccagagcacagaggacaaatgtatatttaaaatagattggacactatctcctggggagcacgctaaagatgagtacgtattgtattactactcaaatttaagtgtgcctatcgggcgcttccagaaccgcgtccacctaatgggggatattttatgtaatgacggatcccttcttctgcaggatgtccaggaggccgaccaagggacgtatatctgcgaaattcgcctcaaaggcgaatctcaagttttcaagaaagctgtggttctgcacgtgttaccagaggagcctaaagaattaatggttcacgtgggcggcctcatccagatgggctgtgtgtttcagtctacagaggtcaagcatgttactaaagtagagtggatcttttccggccggcgggcaaaggaagagatagtatttagatattaccacaagctcaggatgtccgttgaatattcccagagctggggacacttccagaatagggtcaacctcgtcggggatatcttcagaaacgacggatcaatcatgctgcaaggcgtgcgtgagtctgatggagggaattacacttgcagcatccacctcggcaatctggtattcaagaagaccattgttctgcacgtgtccccagaggaaccacgcactctagtgacccccgctgcattgcgtcctctagtgctgggaggcaatcagcttgtcatcatcgtcggcattgtatgtgctaccatactgctgttgcccgtgctaatacttattgtcaaaaagacatgtggtaataagagctctgtgaatagcaccgtgttggttaagaatacaaagaaaaccaaccctgaaattaaagaaaaaccatgtcactttgaaaggtgcgagggcgagaagcacatctactcccccatcattgttcgtgaagtgatcgaggaagaggaaccatcagagaagtcagaagctacatacatgaccatgcatcctgtctggccatcactgcggagcgaccggaacaattctcttgagaaaaagtccggaggcggaatgcccaaaacacagcaggctttttag

SEQ ID NO: 245429 - DNA, 1959 bp, Artificial Sequence
  derived and/or modified sequence
atcacttggctcttctctgatatgaactgggcagcatctaaatgtatctttcttgattttgttgtctctttgcatagagcatatcttgtgaaaacagaaatatccatgtaatggttttttcttgtagtgaccgctcgaaattgcttgagcaacatagagataatgggcaggggtccctgtgtgaagcacctagaggctggaaagctgatggcaaagctggaggggtgaggcagggagaggataaacacagtggaaatgcaggaggaaagctgtgctctgtggtggcctaattacaaggacctgccctacagccagaatcagccagcaaatgcttttgtaaaggaactaaaagaaagggaaaagaggaagtaaacaaaaggtcccttttcagagagggaaccagtgggagatttaagagcaaggaacaacccatttcgtcgttatggtaagtggagattattccttgggcctgaatgacttgaatgtttccccgcctgagctaacagtccatgtgggtgattcagctctgatgggatgtgttttccagagcacagaagacaaatgtatattcaagatagactggactctgtcaccaggagagcacgccaaggacgaatatgtgctatactattactccaatctcagtgtgcctattgggcgcttccagaaccgcgtacacttgatgggggacatcttatgcaatgatggctctctcctgctccaagatgtgcaagaggctgaccagggaacctatatctgtgaaatccgcctcaaaggggagagccaggtgttcaagaaggcggtggtactgcatgtgcttccagaggagcccaaagagctcatggtccatgtgggtggattgattcagatgggatgtgttttccagagcacagaagtgaaacacgtgaccaaggtagaatggatattttcaggacggcgcgcaaaggaggagattgtatttcgttactaccacaaactcaggatgtctgtggagtactcccagagctggggccacttccagaatcgtgtgaacctggtgggggacattttccgcaatgacggttccatcatgcttcaaggagtgagggagtcagatggaggaaactacacctgcagtatccacctagggaacctggtgttcaagaaaaccattgtgctgcatgtcagcccggaagagcctcgaacactggtgaccccggcagccctgaggcctctggtcttgggtggtaatcagttggtgatcattgtgggaattgtctgtgccacaatcctgctgctccctgttctgatattgatcgtgaagaagacctgtggaaataagagttcagtgaattctacagtcttggtgaagaacacgaagaagactaatccagagataaaagaaaaaccctgccattttgaaagatgtgaaggggagaaacacatttactccccaataattgtacgggaggtgatcgaggaagaagaaccaagtgaaaaatcagaggccacctacatgaccatgcacccagtttggccttctctgaggtcagatcggaacaactcacttgaaaaaaagtcaggtgggggaatgccaaaaacacagcaagccttttgagaagaatggagagtcccttcatctcagcagcggtggagactctctcctgtgtgtgtcctgggccactctaccagtgatttcagactcccgctctcccagctgtcctcctgtctcattgtttggtcaatacactgaagatggagaatttggagcctggcagagagactggacagctctggaggaacaggcctgctgaggggaggggagcatggacttggcctctggagtgggacactggccctgggaaccaggctgagctgagtggcctcaaaccccccgttggatcagaccctcctgtgggcagggttcttagtggatgagttactgggaagaatcagagataaaaaccaacccaaatcatt

SEQ ID NO: 245430 - DNA, 1155 bp, Artificial Sequence
  derived and/or modified sequence
atggtgtctggggactacagcctgggcctgaatgacctgaatgtgtccccacctgagctgactgtgcacgtgggggacagcgccctgatgggctgtgtgttccagagcacagaggacaagtgcatcttcaagattgactggaccctgagccctggagagcacgccaaggatgaatatgtgctgtactactacagcaacctgtctgtgcccatcggccgcttccagaacagagtgcacctgatgggagacatcctgtgcaatgatggcagcctgctgctgcaggatgtgcaggaggccgaccagggcacctacatctgtgagatccggctgaagggggagagccaggtgttcaagaaggctgtggtgctgcacgtgctgcctgaggagcccaaggagctgatggtgcacgtgggcggcctcatccagatgggctgtgtgttccagagcacagaggtgaagcacgtgaccaaggtggagtggatcttctctggaagaagagccaaggaggagatcgtgttccgctactaccacaagctgaggatgtctgtggagtacagccagagctggggccacttccagaacagagtgaacctggtgggggacatcttcagaaatgatggcagcatcatgctgcagggcgtgcgggagagtgatggcggcaactacacctgcagcatccacctgggcaacctggtgttcaagaagaccatcgtgctgcacgtgtccccagaggagcccaggaccctggtgaccccagctgccctgcggcccctggtgctgggcggcaaccagctggtgatcatcgtgggcatcgtgtgtgccaccatcctgctgctgcctgtgctgatcctgattgtgaagaagacctgtggcaacaagagctctgtgaacagcacagtgctggtgaagaacaccaagaagaccaaccctgagatcaaggagaagccctgccactttgagcgctgtgagggggagaagcacatctacagccccatcatcgtgcgggaggtgattgaggaggaggagcccagcgagaagtctgaggccacctacatgaccatgcaccctgtgtggcccagcctgcggagtgacaggaacaacagcctggagaagaagagcggcggcggcatgcccaagacccagcaggccttctag

SEQ ID NO: 245431 - DNA, 1155 bp, Artificial Sequence
  derived and/or modified sequence
atggtgagcggcgactacagcctgggcctgaacgacctgaacgtgtctccacccgagctcacggtgcacgtaggcgatagcgcattgatgggatgcgtgtttcagagcaccgaggataaatgcatcttcaagatcgactggaccctgtcccctggagaacacgccaaagacgagtacgtgttatattactactcaaatctgagtgtccccatcggaaggtttcaaaacagggtccatctgatgggggacattctctgtaatgatggctccttgctgttacaggatgttcaggaagctgatcagggcacttatatctgcgaaatacgactgaaaggtgagagccaggtattcaaaaaggcagtcgtgctccatgtccttcccgaagaaccaaaggagcttatggttcatgtgggagggctcatccagatgggatgcgtcttccagtccactgaggtgaagcatgttaccaaagtcgagtggatcttcagtgggaggagggcgaaggaggaaatcgtctttcgatactaccataaactgcgaatgtccgtggaatattcccagtcttggggacactttcagaatcgtgtcaacttggtcggcgacattttccgtaacgacggcagtataatgctgcagggggtgagggagagtgacggtggaaattatacttgttcaatccaccttgggaatctcgtgttcaaaaagacaatagtgctccacgttagtccggaggaacctagaaccctcgtcaccccagcggcccttcgcccgctggtgcttggcgggaaccagttagtgatcatcgtgggaatcgtgtgcgccactatcctgcttctgcctgttttgatactgattgtgaagaaaacttgtggcaataagtcttcagtgaacagcaccgtgctcgtaaagaacacaaaaaagacgaatccggagattaaagaaaagccatgccactttgagagatgcgagggtgaaaagcacatctactctcctattattgtgagagaggtcatagaagaggaggagccaagcgaaaaaagcgaggccacatatatgacaatgcatcctgtttggccaagcttaaggagcgaccgtaacaatagtctggaaaagaagtcgggaggtggtatgcccaagactcagcaagccttttag

SEQ ID NO: 245432 - DNA, 1155 bp, Artificial Sequence
  derived and/or modified sequence
atggtctctggtgactattcgctgggcctcaatgacctgaatgtcagccctcccgagctcacagtgcatgtgggagattcagcgcttatggggtgcgtgttccagtcaaccgaggacaaatgcatcttcaaaatcgactggaccttatctccaggggagcacgcaaaggacgagtatgtcctgtactattacagtaatctgtcagtccccataggacgcttccagaatcgagtgcacctaatgggcgacattctttgcaatgacggctctttgctactgcaggatgtgcaggaggcagatcagggtacgtacatctgcgaaatacggctgaaaggagagtcccaggtctttaaaaaagctgtggtgttgcatgtactgcccgaggagccaaaagaactgatggttcacgtaggaggcctgatccagatgggctgcgtgttccagagcactgaggttaagcacgttacgaaagtggagtggatctttagcggcagaagagcaaaggaggaaatcgttttccgttactaccataaactccgcatgtccgtcgagtacagccagtcatgggggcatttccagaacagggtgaatctcgtgggagatatttttcgcaacgacggatccatcatgcttcagggcgttagagaaagcgatggcggaaattatacctgctccatccacctgggaaacttggtgtttaagaagaccatcgtgctccatgtgtcccccgaggaacccaggactctagttaccccagcggcactgagacccctcgtgctgggaggcaatcaactggtgattatcgtggggattgtatgcgctaccatccttctgctgcctgtgctgattctgattgtcaagaaaacctgcggaaacaaatccagtgtgaatagtaccgttctcgttaaaaatacaaaaaagaccaaccccgagattaaggagaagccttgtcattttgagcggtgcgagggggagaagcacatctatagtcccattattgtgcgggaagtgatcgaggaagaggagccgtcagagaaatctgaggcaacctatatgacaatgcaccctgtctggccctcactccgatctgatcgaaacaatagtctcgagaaaaaaagcggcggagggatgccaaagactcagcaggctttctag

SEQ ID NO: 245433 - DNA, 1155 bp, Artificial Sequence
  derived and/or modified sequence
atggtgagcggcgactacagcctgggcctgaacgacctgaacgtgagcccccccgagctgaccgtgcacgtgggcgacagcgccctgatgggctgcgtgttccagagcaccgaggacaagtgcatcttcaagatcgactggaccctgagccccggcgagcacgccaaggacgagtacgtgctgtactactacagcaacctgagcgtgcccatcggcagattccagaacagagtgcacctgatgggcgacatcctgtgcaacgacggcagcctgctgctgcaggacgtgcaggaggccgaccagggcacctacatctgcgagatcagactgaagggcgagagccaggtgttcaagaaggccgtggtgctgcacgtgctgcccgaggagcccaaggagctgatggtgcacgtgggcggcctgatccagatgggctgcgtgttccagagcaccgaggtgaagcacgtgaccaaggtggagtggatcttcagcggcagaagagccaaggaggagatcgtgttcagatactaccacaagctgagaatgagcgtggagtacagccagagctggggccacttccagaacagagtgaacctggtgggcgacatcttcagaaacgacggcagcatcatgctgcagggcgtgagagagagcgacggcggcaactacacctgcagcatccacctgggcaacctggtgttcaagaagaccatcgtgctgcacgtgagccccgaggagcccagaaccctggtgacccccgccgccctgagacccctggtgctgggcggcaaccagctggtgatcatcgtgggcatcgtgtgcgccaccatcctgctgctgcccgtgctgatcctgatcgtgaagaagacctgcggcaacaagagcagcgtgaacagcaccgtgctggtgaagaacaccaagaagaccaaccccgagatcaaggagaagccctgccacttcgagagatgcgagggcgagaagcacatctacagccccatcatcgtgagagaggtgatcgaggaggaggagcccagcgagaagagcgaggccacctacatgaccatgcaccccgtgtggcccagcctgagaagcgacagaaacaacagcctggagaagaagagcggcggcggcatgcccaagacccagcaggccttctag

SEQ ID NO: 245434 - DNA, 1512 bp, Artificial Sequence
  derived and/or modified sequence
atggcagccgctattactgacatggccgacctggaggaactgtctcgcctgtcccccctcccgcccggaagtccaggatctgcggcccgcgggagggccgagcctccagaggaggaggaggaggaggaagaagaggaagaggaggcagaggctgaggctgtcgctgcactgctcctgaacggtggctctgggggcggtggcggaggcgggggcggtggggttggcggtggcgaagctgagaccatgtcagaaccatcccctgagtcagcctcacaggccggcgaagatgaagatgaggaggaggacgatgaagaagaggaggacgagtccagcagttccgggggaggcgaggaggagtcctctgccgaaagcctcgttggctctagcggcggatcgagtagtgacgagacacgttccctctcccctggtgcagcttcctctagcagcggcgacggagacgggaaggaagggttggaagaaccaaaaggcccacggggctcgcagggtggcggcggaggtggaagcagtagttcatctgtggtatctagcggtggcgatgagggctatggcacggggggcggggggtcgtcagctaccagtggcggaagacggggatcgctagaaatgtccagtgacggtgaacctctgagcagaatggacagtgaagactcaatctcatcaaccatcatggatgtggatagcactataagctcaggccgatcaacacccgcaatgatgaacggccagggctcaaccacctcatctagcaaaaatatagcctataactgttgctgggaccaatgccaggcatgttttaattcttcccccgacctggccgaccatatacgctccatccacgtggacggacaacgcggcggagtgttcgtctgcctctggaaaggatgcaaggtctataatacccctagcacaagtcagtcctggctgcagcgccacatgttgacacatagcggagacaaaccttttaaatgcgtggttggtggctgtaatgcctcattcgcatcacagggtggtctcgcccggcacgtgccgacacacttttcccagcagaattcctcaaaggtgagctctcagccaaaggccaaagaggaatctccaagtaaagcagggatgaacaagagacggaagctgaaaaacaagcgccgccgctcactccctaggccacacgactttttcgatgcacagaccctggacgccatcagacatcgggcaatctgctttaatttgtccgcgcatatagaaagtctaggaaaaggacactcagtggtgtttcatagcacagtgattgcaaagagaaaggaggattcaggcaagatcaaacttttgctgcactggatgcctgaagacattttaccagatgtgtgggtcaatgaaagtgagcgccaccagttgaagaccaaggttgtgcacctgagtaagctgccgaaagataccgctctccttctggatcccaacatatatcggaccatgcctcaaaagagactaaagcgctag

SEQ ID NO: 245435 - DNA, 1314 bp, Artificial Sequence
  derived and/or modified sequence
atggctgcggccataacggatatggcagacctggaagagctgagtcgcctgagtcctttgcctcccggctccccaggaagtgctgcaaggggccgggctgagccccccgaggaggaagaggaggatgagagtagctcgtccgggggcggggaggaggaatccagtgctgagtctctcgtcggcagttccggcgggagctccagtgatgagaccagatctctctctcctggcgctgcttcatcaagttcgggagatggcgatggtaaggagggcctggaggagcccaaggggcccaggggatcacagggaggaggcggggggggatcatccagctctagtgtggttagcagcggtggtgacgagggctacgggaccgggggcgggggcagctccgccacgtcaggcggcagacgtggctcactagagatgagctcagacggagagcctctaagcaggatggatagtgaggattctatcagttctactattatggatgtggattctaccatctcttccggtaggagcacccctgccatgatgaacggacagggcagtacaacctcatcatcaaaaaacatagcgtacaactgttgctgggaccaatgccaggcctgtttcaatagctctccggaccttgccgaccacattcggagcatacacgtggacgggcaacggggcggtgtgtttgtttgcctttggaagggctgtaaggtttataacactccatctacttcccagagctggcttcaacggcatatgctgacacactctggagataagccattcaaatgcgttgtgggtggatgtaacgcctcgttcgcctcccaaggcggcttggcccggcacgtccctacacatttctcccagcagaattcctctaaagtgtccagccagcccaaggccaaagaagaatctccttcaaaagccggaatgaataaacggagaaaactcaaaaataagcgcaggcgttcactaccacgccctcacgacttcttcgatgcacagactctggacgcaatcagacatagggcaatctgttttaatttgagtgcccatatcgaaagtctgggaaaggggcattccgtcgtttttcatagtaccgtgatcgcaaagagaaaggaggatagcggaaagattaaattactcttgcattggatgccggaagacattctgcccgatgtctgggttaacgagtctgagcggcatcagttgaagacgaaggtcgtgcacctgagcaagttgcccaaggacacagctttactcctggatcctaatatctaccggaccatgccgcagaaacgcttaaaaagatag

SEQ ID NO: 245436 - DNA, 1512 bp, Artificial Sequence
  derived and/or modified sequence
atggctgctgccatcacagacatggctgacctggaggagctgagccggctgagccccctgcccccaggcagccctggcagcgctgcccggggccgggcagagcccccagaggaggaggaggaggaggaggaggaggaggaggaggccgaggccgaggccgtggccgccctgctgctgaatggaggcagcggcggcggcggcggcggcggcggcggcggcgtgggcggcggggaggccgagaccatgtctgagcccagccctgagagcgccagccaggccggagaagatgaagatgaggaggaggatgatgaggaggaggaggatgagagcagcagcagcggcggcggggaggaggagagcagcgctgagagcctggtgggcagcagcggcggcagcagcagtgatgagaccaggagcctgagccctggggccgccagcagcagcagtggagatggagatggcaaggagggcctggaggagcccaagggcccccggggcagccagggcggcggcggcggcggcagcagcagcagctctgtggtgtcctctggaggagatgagggctatggaactggaggcggcggcagcagcgccaccagcggcggcagaagaggcagcctggagatgagcagtgatggagagcccctgagcaggatggattctgaggacagcatcagcagcaccatcatggatgtggacagcaccatcagcagcggccgcagcaccccagccatgatgaatggccagggcagcaccaccagcagcagcaagaacatcgcctacaactgctgctgggaccagtgccaggcctgcttcaacagcagcccagacctggccgaccacatccgcagcatccacgtggatggccagagaggaggagtgtttgtgtgcctgtggaagggctgcaaggtgtacaacacccccagcaccagccagagctggctgcagaggcacatgctgacccacagcggggacaagcccttcaagtgtgtggtgggcggctgcaatgccagctttgccagccagggcggcctggcccggcacgtgcccacccacttcagccagcagaacagcagcaaggtgagcagccagcccaaggccaaggaggagagccccagcaaggccggcatgaacaagaggaggaagctgaagaacaagagaagaagaagcctgccccggccccatgacttctttgatgcccagaccctggatgccatccgccaccgggccatctgcttcaacctgagcgcccacatcgagagcctgggcaagggccacagcgtggtgttccacagcacagtgattgccaagaggaaggaggacagcggcaagatcaagctgctgctgcactggatgcctgaggacatcctgcctgatgtgtgggtgaatgaaagtgagcggcaccagctgaagaccaaggtggtgcacctgagcaagctgcccaaggacacagccctgctgctggaccccaacatctaccgcaccatgccccagaagaggctgaagaggtag

SEQ ID NO: 245437 - DNA, 1314 bp, Artificial Sequence
  derived and/or modified sequence
atggctgctgccatcacagacatggctgacctggaggagctgagccggctgagccccctgcccccaggcagccctggcagcgctgcccggggccgggcagagcccccagaggaggaggaggaggatgagagcagcagcagcggcggcggggaggaggagagcagcgctgagagcctggtgggcagcagcggcggcagcagcagtgatgagaccaggagcctgagccctggggccgccagcagcagcagtggagatggagatggcaaggagggcctggaggagcccaagggcccccggggcagccagggcggcggcggcggcggcagcagcagcagctctgtggtgtcctctggaggagatgagggctatggaactggaggcggcggcagcagcgccaccagcggcggcagaagaggcagcctggagatgagcagtgatggagagcccctgagcaggatggattctgaggacagcatcagcagcaccatcatggatgtggacagcaccatcagcagcggccgcagcaccccagccatgatgaatggccagggcagcaccaccagcagcagcaagaacatcgcctacaactgctgctgggaccagtgccaggcctgcttcaacagcagcccagacctggccgaccacatccgcagcatccacgtggatggccagagaggaggagtgtttgtgtgcctgtggaagggctgcaaggtgtacaacacccccagcaccagccagagctggctgcagaggcacatgctgacccacagcggggacaagcccttcaagtgtgtggtgggcggctgcaatgccagctttgccagccagggcggcctggcccggcacgtgcccacccacttcagccagcagaacagcagcaaggtgagcagccagcccaaggccaaggaggagagccccagcaaggccggcatgaacaagaggaggaagctgaagaacaagagaagaagaagcctgccccggccccatgacttctttgatgcccagaccctggatgccatccgccaccgggccatctgcttcaacctgagcgcccacatcgagagcctgggcaagggccacagcgtggtgttccacagcacagtgattgccaagaggaaggaggacagcggcaagatcaagctgctgctgcactggatgcctgaggacatcctgcctgatgtgtgggtgaatgaaagtgagcggcaccagctgaagaccaaggtggtgcacctgagcaagctgcccaaggacacagccctgctgctggaccccaacatctaccgcaccatgccccagaagaggctgaagaggtag

SEQ ID NO: 245438 - DNA, 1512 bp, Artificial Sequence
  derived and/or modified sequence
atggccgccgccatcaccgacatggccgacctggaggagctgagccgattgtcacctttgccacctggcagccccggttcggccgcccgcggccgggccgagccacccgaggaagaggaagaggaagaagaagaggaagaggaggccgaggctgaagccgtggctgcactgttacttaacggtggatcaggagggggcggcggagggggagggggcggtgttggtggaggcgaggccgaaacaatgtcagaaccttcacccgaatcagcctcccaagctggcgaagacgaagacgaggaagaggacgacgaggaggaggaggacgagtcatcgagttctggtggcggagaggaggagtccagtgccgagagcctcgtcggaagtagcgggggatcaagctcagatgagaccagatcactgtcccctggagccgctagcagcagttcgggtgacggagatggcaaggagggcctcgaagagccaaaaggacctaggggaagccagggcggcggcggtggaggaagctcctcaagctcggtcgtcagctctggaggcgacgaaggctacggtacgggcggcgggggctccagcgccactagcggaggtaggcgtggatctctcgagatgtcgtctgacggggagcctctgtcacgcatggactcagaggattccatcagttctacgattatggatgtggatagtaccatttccagcgggcggagtacgcccgccatgatgaacgggcagggtagcactaccagtagctccaagaacattgcttacaattgttgttgggaccaatgccaggcgtgctttaacagttctcccgatctcgctgatcacattagatctattcatgtggatggacagagggggggtgtcttcgtgtgtctctggaaaggctgcaaggtgtataatacgccctcaacatcccagagttggttacagagacacatgctgacacattccggtgataagccattcaagtgtgtcgtcggcggatgtaatgcgtcttttgcaagccaggggggactggcacgccatgtgcccacgcacttctcccaacagaattcctctaaggtcagctcacagcccaaggctaaagaggagtcaccttctaaagccgggatgaataagcgccggaagctgaaaaataagagaaggaggtctctgccgcgtccccacgatttttttgacgcccagaccctcgatgccattcgtcaccgcgccatatgtttcaatctctctgcccacattgaatcactagggaaaggccactcggtggtcttccactcaacggtcatagctaagaggaaagaagactccgggaaaataaagttgctcctccactggatgcccgaggatatcttgcctgacgtctgggttaacgaatccgaacggcaccaattgaaaaccaaagttgtacacttaagcaaattgcccaaagacaccgctcttttattggaccccaacatatatagaaccatgccacagaaaagactgaagaggtag

SEQ ID NO: 245439 - DNA, 1314 bp, Artificial Sequence
  derived and/or modified sequence
atggccgccgccatcaccgacatggccgacctggaggagctgagcaggttaagtccgttgcccccgggtagccccggatctgctgcccgaggccgcgccgaacctccagaggaggaagaagaagacgagagttctagtagcggcggaggtgaagaggagagctccgctgagtcgctggtgggatcctccggtggcagcagtagcgatgagactcgatcactgtcccctggggcagcgagttcttcttccggcgatggggacggtaaagaaggactggaagaacctaaaggccctcgcggcagccaaggggggggcgggggaggaagttcttcctccagtgtcgtgtcctctggcggagatgaaggctacggcacagggggcggagggtcgtccgccacttcagggggaagaagggggtcgcttgaaatgtcctctgacggcgagcccctgtcaaggatggacagcgaggactccatctccagcacaattatggacgttgactcgacaataagcagtggacggagcacacccgccatgatgaatggtcagggctctactactagctctagtaaaaacattgcctataactgttgctgggaccagtgccaggcgtgtttcaattctagccccgatttggccgatcatatacggagcattcacgtcgacggtcaaaggggcggggtgtttgtctgcttgtggaaagggtgtaaagtttataatacgccgagcacaagtcagagttggctgcaaagacatatgctgacgcatagtggcgataagccattcaaatgcgtggtggggggctgcaatgcgtcctttgcatcccagggcggtctcgcccggcatgttccaacacacttctcacagcagaactcgtcaaaggtgtcctcacagccaaaagccaaggaggagtccccatccaaggccggcatgaataaacgaagaaaactgaagaacaaacgtaggcggagtctcccccgaccccatgactttttcgacgctcagacgctcgacgccatacgccatagagcaatttgttttaatttatccgctcacattgagagtcttggtaaaggccactctgtggtatttcacagcacagtgatcgccaaaagaaaggaggacagcggcaagatcaagttacttttgcactggatgcccgaggatattttgcccgacgtctgggtgaacgaaagtgaaagacatcaactgaagacaaaggtcgtacatctgtctaaactgcccaaagatactgccctgttgctcgaccctaatatctaccggacgatgccacagaagcgactcaagcgttag

SEQ ID NO: 245440 - DNA, 1512 bp, Artificial Sequence
  derived and/or modified sequence
atggcggcagctataactgacatggcagatcttgaggagctgtcgcggcttagcccgctgccaccaggttcaccgggaagtgcggcaagggggagggcagagcccccagaagaggaggaagaggaagaggaggaagaggaggaggcagaggctgaggcggtggcagccctgctgctgaacgggggaagcggaggcggaggagggggaggtggcggaggggttgggggtggcgaagccgagaccatgtccgagccgtccccagaatctgcctctcaggccggagaagatgaggacgaggaggaggacgacgaagaagaagaggacgaaagtagcagtagcggaggcggagaagaggagtcgtctgccgagtccctggttggcagctctgggggatcgagttccgatgaaacccgttctctctctcccggtgccgcttcttcaagcagtggtgacggggacggcaaggaggggttagaggagccgaaggggcctaggggctcccagggtggcggaggtggcggatcttcctcttccagcgtggtatcctctggaggcgacgaggggtacggaaccggcggagggggttcatccgccaccagtggaggtagacgcggaagtctggaaatgtcttcggatggggagccactgagcaggatggatagcgaggattccatcagcagcactattatggacgttgactctaccatctctagtggtcgatcaactccagccatgatgaatggtcagggctctaccacctcttcatccaaaaatatcgcttacaactgctgttgggatcagtgccaggcctgttttaattcaagccccgacctcgcagaccacatccggtccattcatgtggacgggcagcgtggcggtgtgttcgtgtgcctttggaaaggctgcaaagtctacaacactccttctacctcccagagctggctgcagagacatatgttgacccatagcggggacaagccttttaagtgcgtagtggggggatgcaatgctagctttgcaagccaagggggactggcaaggcacgtaccaacccatttcagtcagcagaattcttctaaggtatccagccaacccaaagcaaaggaggaatccccatctaaagctggaatgaataagcgaaggaaactgaagaacaagcgtagaaggagccttcctaggccacacgatttctttgatgcccagaccctggatgcaatacgccatagagccatatgttttaacctgagtgcccatatcgaatccctgggtaaggggcactcagtggttttccacagcacagtcattgctaaacggaaagaagattctgggaagataaaactgctgctccattggatgcctgaggatatcctgccggacgtgtgggttaacgaatctgaacgacaccagctgaaaacaaaagttgtccatctgtccaaactgcccaaagacactgccctgctgctggaccctaacatttacagaaccatgccacagaagcggcttaaaagatag

SEQ ID NO: 245441 - DNA, 1314 bp, Artificial Sequence
  derived and/or modified sequence
atggcggcagcgattactgacatggccgatctggaagaactgagcagactttctccgcttccacccggatcaccaggctctgcagccaggggcagagctgagcctccggaagaggaggaagaggacgaatccagttccagcggtggaggcgaggaggaatctagcgcggagtctctcgttggatcaagcgggggatcgagctccgatgagacccgctccctctcccctggtgcggcatcatcttcctctggagacggcgacggcaaagaaggcctcgaggaacctaaggggcctaggggttcgcagggcggtggcggtggaggtagttcatccagtagcgtcgtgtcgagcggaggagatgagggctatggaacaggtggaggaggatcctcagccacaagtgggggtagacgcggttctttggagatgagttctgatggggaaccccttagtcgtatggattccgaagactccattagcagtacaatcatggatgttgactcgacaatttcatccggaaggtcaacgccggcaatgatgaacggacagggctccaccaccagcagttccaagaacatcgcctataactgttgctgggaccagtgtcaggcgtgtttcaattcgagcccagacctagcagatcacatacgttctattcatgtggacggccaaagaggcggagtgttcgtctgcctgtggaagggatgtaaagtttataataccccctctacatctcaaagttggcttcagcgccacatgttgacccatagcggggataaaccttttaagtgcgtcgtcggcggttgtaatgctagctttgcctcacaggggggtcttgctagacatgtccctacacacttctcacagcaaaatagttccaaggtgtcttctcaacctaaagctaaagaggagtctccatctaaggccggtatgaacaagcggcgaaagctaaagaacaagcggagaagatcactccccagaccacacgacttcttcgacgcgcaaacgctcgacgccataaggcaccgcgcaatctgttttaatctgagcgcgcacatcgagtcattaggcaaaggccacagtgtagtgttccactctacagttattgccaagaggaaggaggactctgggaaaattaagctactgttgcattggatgcccgaggacatcttgcctgatgtttgggtcaacgaatctgaacgtcaccagctaaaaacaaaggtggtgcatttgtcgaagctgcccaaggacacagccctgttgctggacccaaacatctacagaacaatgccacaaaaaaggctgaagaggtag

SEQ ID NO: 245442 - DNA, 1512 bp, Artificial Sequence
  derived and/or modified sequence
atggccgccgccatcaccgacatggccgacctggaggagctgagcagactgagccccctgccccccggcagccccggcagcgccgccagaggcagagccgagccccccgaggaggaggaggaggaggaggaggaggaggaggaggccgaggccgaggccgtggccgccctgctgctgaacggcggcagcggcggcggcggcggcggcggcggcggcggcgtgggcggcggcgaggccgagaccatgagcgagcccagccccgagagcgccagccaggccggcgaggacgaggacgaggaggaggacgacgaggaggaggaggacgagagcagcagcagcggcggcggcgaggaggagagcagcgccgagagcctggtgggcagcagcggcggcagcagcagcgacgagaccagaagcctgagccccggcgccgccagcagcagcagcggcgacggcgacggcaaggagggcctggaggagcccaagggccccagaggcagccagggcggcggcggcggcggcagcagcagcagcagcgtggtgagcagcggcggcgacgagggctacggcaccggcggcggcggcagcagcgccaccagcggcggcagaagaggcagcctggagatgagcagcgacggcgagcccctgagcagaatggacagcgaggacagcatcagcagcaccatcatggacgtggacagcaccatcagcagcggcagaagcacccccgccatgatgaacggccagggcagcaccaccagcagcagcaagaacatcgcctacaactgctgctgggaccagtgccaggcctgcttcaacagcagccccgacctggccgaccacatcagaagcatccacgtggacggccagagaggcggcgtgttcgtgtgcctgtggaagggctgcaaggtgtacaacacccccagcaccagccagagctggctgcagagacacatgctgacccacagcggcgacaagcccttcaagtgcgtggtgggcggctgcaacgccagcttcgccagccagggcggcctggccagacacgtgcccacccacttcagccagcagaacagcagcaaggtgagcagccagcccaaggccaaggaggagagccccagcaaggccggcatgaacaagagaagaaagctgaagaacaagagaagaagaagcctgcccagaccccacgacttcttcgacgcccagaccctggacgccatcagacacagagccatctgcttcaacctgagcgcccacatcgagagcctgggcaagggccacagcgtggtgttccacagcaccgtgatcgccaagagaaaggaggacagcggcaagatcaagctgctgctgcactggatgcccgaggacatcctgcccgacgtgtgggtgaacgagagcgagagacaccagctgaagaccaaggtggtgcacctgagcaagctgcccaaggacaccgccctgctgctggaccccaacatctacagaaccatgccccagaagagactgaagagatag

SEQ ID NO: 245443 - DNA, 1314 bp, Artificial Sequence
  derived and/or modified sequence
atggccgccgccatcaccgacatggccgacctggaggagctgagcagactgagccccctgccccccggcagccccggcagcgccgccagaggcagagccgagccccccgaggaggaggaggaggacgagagcagcagcagcggcggcggcgaggaggagagcagcgccgagagcctggtgggcagcagcggcggcagcagcagcgacgagaccagaagcctgagccccggcgccgccagcagcagcagcggcgacggcgacggcaaggagggcctggaggagcccaagggccccagaggcagccagggcggcggcggcggcggcagcagcagcagcagcgtggtgagcagcggcggcgacgagggctacggcaccggcggcggcggcagcagcgccaccagcggcggcagaagaggcagcctggagatgagcagcgacggcgagcccctgagcagaatggacagcgaggacagcatcagcagcaccatcatggacgtggacagcaccatcagcagcggcagaagcacccccgccatgatgaacggccagggcagcaccaccagcagcagcaagaacatcgcctacaactgctgctgggaccagtgccaggcctgcttcaacagcagccccgacctggccgaccacatcagaagcatccacgtggacggccagagaggcggcgtgttcgtgtgcctgtggaagggctgcaaggtgtacaacacccccagcaccagccagagctggctgcagagacacatgctgacccacagcggcgacaagcccttcaagtgcgtggtgggcggctgcaacgccagcttcgccagccagggcggcctggccagacacgtgcccacccacttcagccagcagaacagcagcaaggtgagcagccagcccaaggccaaggaggagagccccagcaaggccggcatgaacaagagaagaaagctgaagaacaagagaagaagaagcctgcccagaccccacgacttcttcgacgcccagaccctggacgccatcagacacagagccatctgcttcaacctgagcgcccacatcgagagcctgggcaagggccacagcgtggtgttccacagcaccgtgatcgccaagagaaaggaggacagcggcaagatcaagctgctgctgcactggatgcccgaggacatcctgcccgacgtgtgggtgaacgagagcgagagacaccagctgaagaccaaggtggtgcacctgagcaagctgcccaaggacaccgccctgctgctggaccccaacatctacagaaccatgccccagaagagactgaagagatag

SEQ ID NO: 245444 - protein, 287 aa, Artificial Sequence
  derived and/or modified sequence
MAAPRQIPSHIVRLKPSCSTDSSFTRTPVPTVSLASRELPVSSWQVTEPSSKNLWEQICKEYEAEQPPFPEGYKVKQEPVITVAPVEEMLFHGFSAEHYFPVSHFTMISRTPCPQDKSETINPKTCSPKEYLETFIFPVLLPGMASLLHQAKKEKCFERKRTKFIACDFLTEWLYNQNPKRAGEPFTEFFSIPFVEERLKQHPRPPIPLSLLLTEEEAALYIQSFWRACVVRCDPEIQELRQWQKKLREAKHIHQQVKIFWAKQEQKVKCKMEDDAVPAAKMKIPSS

SEQ ID NO: 245445 - protein, 199 aa, Artificial Sequence
  derived and/or modified sequence
MLFHGFSAEHYFPVSHFTMISRTPCPQDKSETINPKTCSPKEYLETFIFPVLLPGMASLLHQAKKEKCFERKRTKFIACDFLTEWLYNQNPKRAGEPFTEFFSIPFVEERLKQHPRPPIPLSLLLTEEEAALYIQSFWRACVVRCDPEIQELRQWQKKLREAKHIHQQVKIFWAKQEQKVKCKMEDDAVPAAKMKIPSS

SEQ ID NO: 245446 - DNA, 864 bp, Artificial Sequence
  derived and/or modified sequence
atggccgcccccagacagatccccagccacatcgtgagactgaagcccagctgcagcaccgacagcagcttcaccagaacccccgtgcccaccgtgagcctggccagcagagagctgcccgtgagcagctggcaggtgaccgagcccagcagcaagaacctgtgggagcagatctgcaaggagtacgaggccgagcagccccccttccccgagggctacaaggtgaagcaggagcccgtgatcaccgtggcccccgtggaggagatgctgttccacggcttcagcgccgagcactacttccccgtgagccacttcaccatgatcagcagaaccccctgcccccaggacaagagcgagaccatcaaccccaagacctgcagccccaaggagtacctggagaccttcatcttccccgtgctgctgcccggcatggccagcctgctgcaccaggccaagaaggagaagtgcttcgagagaaagagaaccaagttcatcgcctgcgacttcctgaccgagtggctgtacaaccagaaccccaagagagccggcgagcccttcaccgagttcttcagcatccccttcgtggaggagagactgaagcagcaccccagaccccccatccccctgagcctgctgctgaccgaggaggaggccgccctgtacatccagagcttctggagagcctgcgtggtgagatgcgaccccgagatccaggagctgagacagtggcagaagaagctgagagaggccaagcacatccaccagcaggtgaagatcttctgggccaagcaggagcagaaggtgaagtgcaagatggaggacgacgccgtgcccgccgccaagatgaagatccccagcagctag

SEQ ID NO: 245447 - DNA, 864 bp, Artificial Sequence
  derived and/or modified sequence
atggcagcccccaggcaaattcccagccatattgtgcggctgaagccctcttgttccactgattctagttttacaagaacacccgtgcctaccgtatctctcgcaagtcgagagctccctgtgtcttcctggcaggtgactgagccctctagcaaaaatctgtgggagcagatttgtaaagaatatgaagccgaacaaccaccattcccggaaggatataaggtcaaacaggagcctgtgattactgtcgctcctgtggaggagatgctcttccatgggtttagtgcggaacattacttcccagtgtctcacttcaccatgatttcgcgaactccatgccctcaggacaaaagcgagaccatcaatccaaagacatgctcccccaaggaatatttggagacttttatctttcccgtgcttttgcccgggatggcgagccttttgcatcaggcaaaaaaagagaagtgcttcgagcgcaagagaacaaagttcatcgcctgtgactttctgacagagtggctatataaccaaaacccaaaaagagcgggggaaccgttcacagagttctttagcatcccatttgtcgaggaaagactgaaacagcatcctaggccccctattccactgagcctccttttaaccgaggaggaggctgctttgtacattcagtcattctggcgcgcatgcgttgttcgatgcgaccctgaaattcaggagcttaggcaatggcagaaaaagcttagggaggccaagcacatccaccagcaggtaaagatcttctgggctaaacaagaacagaaggtgaagtgtaaaatggaggacgacgcggtgccggccgcaaaaatgaagataccatcttcttag

SEQ ID NO: 245448 - DNA, 864 bp, Artificial Sequence
  derived and/or modified sequence
atggccgccccccggcagatccccagccacatcgtgcggctgaagcccagctgcagcacagacagcagcttcaccaggacccctgtgcccaccgtgtccctggccagccgggagctgcctgtgtcctcctggcaggtgacagagcccagcagcaagaacctgtgggagcagatctgcaaggagtatgaggccgagcagccccccttccctgagggctacaaggtgaagcaggagcctgtgatcaccgtggcccctgtggaggagatgctgttccacggcttctctgctgagcactacttccctgtgagccacttcaccatgatcagcaggaccccctgcccccaggacaagtctgagaccatcaaccccaagacctgcagccccaaggagtacctggagaccttcatcttccctgtgctgctgcccggcatggccagcctgctgcaccaggccaagaaggagaagtgctttgagaggaagaggaccaagttcatcgcctgtgacttcctgacagagtggctgtacaaccagaaccccaagagagctggggagcccttcacagagttcttcagcatcccctttgtggaggagcggctgaagcagcaccccaggcctcccatccccctgagcctgctgctgacagaggaggaggccgccctgtacatccagagcttctggagggcctgtgtggtgcgctgtgaccctgagatccaggagctgcggcagtggcagaagaagctgcgggaggccaagcacatccaccagcaggtgaagatcttctgggccaagcaggagcagaaggtgaagtgcaagatggaggatgatgctgtgcctgctgccaagatgaagatccccagcagctag

SEQ ID NO: 245449 - DNA, 2600 bp, Artificial Sequence
  derived and/or modified sequence
attaatccctgagacaaaggtactgaaggcaagtggctgaagaacaggcttgattggacagatgacttggagatgttcactggacagggacagccttgtgaagatctttgtgaatacccgacctcgcaagctccagagactacaataattcacttgccctaggttccaaagccagcaagtggaaaacggagactggaattccgcccacaggactccaaagcctgtgcagcaacaccccactcccccggcaggatcaccagcaggacgcgcgggagccaggaagtaagatccgtacctccaaggctcccatgggcccaagcctccgcatcaacagactgggagggattacgtggggtcccagggccggctctgaggcgggaaaactttctggaggcggcggcctcaggccggagcgggcgcacaccgactggaggggtcggattcagggatgtgggtggaccgcatttccccatcttccccgccgcgcacttcctctggtgcaatctccacaccccgcgccggcccgcctgcaacgcgccctggcactcaccggtgggcgaaatttccccgcctccacgtgagagccagctccgccgtgacccggaagtccacttcgagtcgccggcccaccctctcgggttccggcttcttccgggtcgcggccttccggcgaacgcggttaccgtggaaaccgcggccatggcggcaccgcggcaaatccccagccacatagtgcgcctcaagcccagctgctctacagactcgtcgttcacccggacgccggtgcccaccgtgtctctcgcgtcccgcgagctgcctgtctcgtcgtggcaggtcaccgagccgtcaagcaagaatctgtgggagcagatctgcaaggagtatgaagctgagcagcctccctttccagaaggatataaagtcaaacaggagcctgtgattacggttgcgccagtagaggaaatgctttttcatggcttcagtgcagagcactattttccggtttcccatttcaccatgatctcacgtacaccctgtcctcaagataaatcggaaacaatcaacccaaaaacatgttctcccaaagaatatttggaaactttcatctttcctgttctgcttcccggaatggctagcctgcttcaccaagcgaagaaagaaaaatgttttgagaggaaaagaaccaaattcattgcctgtgattttctgactgagtggttatacaaccaaaatccaaagagggcaggggagccattcacagaatttttctccattccatttgtggaggagcggctaaagcaacacccacggccgccaatcccactctcgctcctgctgacagaagaggaagcagccctctacattcaatccttctggagagcctgtgtggttcgctgtgatcctgagattcaagaactgcgtcagtggcagaagaaacttcgcgaggccaagcacattcaccagcaagtcaaaattttctgggccaagcaagaacaaaaagtgaaatgcaaaatggaggacgatgcagtacctgcagccaagatgaaaattccatcatcttaaccatagctaagacgtatctttgcccattcgagcacaagttaccttgtgcaaggaaaatgtccaaatgatgctctctctcttgtgatttctttaacaagacttggaacatgtgcaaatggaatcttttctgtacaagataggattcattgcaaacaagctttaatgcaaatagtttagaaaagaaaggaccagtcttcactttctgcattatccccacattttattcattcatccagattacttcttcagtgcctcaggagtattcttctacaccagctgctgttaaaatgtacaatgaactctagtcccaaggaatacagaagtgctcttattaccagttttcccacttgtggccgcctttgcaaagatccatattctaatttaagtccccaacctctgaatttggttttaagtttacctagtgactgactactctctttataaaaaagaccttatacttaatgatcatttccaaaggagaccactccttaacttttactgcaaacccaacaagatgagacacttaaacccagacagatgtaacaaaggatttttgttgtctaagtcccaaagtattatatagaaagttcctgcttttatgggtaaacttattaccttaatatgttctgtggtttgctgttaaccaagattctcccatttaaaatgccacagaccgaccctcaaggcagatccgaaagcctagtagttagttgcactgggttgttttgacaagctaccacacgtcttaagtaaatagtaaagcctttatttttgtgttaagaacagcattttgaaaataaaacctatctgcccatggtttacagccttttaaatttgtaatatttatatagtcgtttatggtacatattgattgtcttgaaatttctttaacttcttttttataagtatgcaacagtcagccgggggaagataaaggtacattataaaacacacattaatgcatttaataaatatatattatctatcaaaagtgagccttagctcttcatcagttaataaaaagcacctgctgagaa

SEQ ID NO: 245450 - DNA, 884 bp, Artificial Sequence
  derived and/or modified sequence
accgcggcaaatccccagccacatagtgcgcctcaagcccagctgctctacagactcgtcgttcacccggacgccggtgcccaccgtgtctctcgcgtcccgcgagctgcctgtctcgtcgtggcaggtcaccgagccgtcaagcaagaatctgtgggagcagatctgcaagggttgcgccagtagaggaaatgctttttcatggcttcagtgcagagcactattttccggtttcccatttcaccatgatctcacgtacaccctgtcctcaagataaatcggaaacaatcaacccaaaaacatgttctcccaaagaatatttggaaactttcatctttcctgttctgcttcccggaatggctagcctgcttcaccaagcgaagaaagaaaaatgttttgagaggaaaagaaccaaattcattgcctgtgattttctgactgagtggttatacaaccaaaatccaaagagggcaggggagccattcacagaatttttctccattccatttgtggaggagcggctaaagcaacacccacggccgccaatcccactctcgctcctgctgacagaagaggaagcagccctctacattcaatccttctggagagcctgtgtggttcgctgtgatcctgagattcaagaactgcgtcagtggcagaagaaacttcgcgaggccaagcacattcaccagcaagtcaaaattttctgggccaagcaagaacaaaaagtgaaatgcaaaatggaggacgatgcagtacctgcagccaagatgaaaattccatcatcttaaccatagctaagacgtatctttgcccattcgagcacaagttaccttgtgcaaggaaaatgtccaaatgatgctctctctcttgtgatttcttta

SEQ ID NO: 245451 - DNA, 864 bp, Artificial Sequence
  derived and/or modified sequence
atggccgccccccggcagatccccagccacatcgtgcggctgaagccttcatgctccactgacagctcgttcaccaggactccggtgccaaccgtttccctggcgagtcgagagctgcctgtgagcagttggcaggtaaccgagccttctagcaaaaatctgtgggagcagatatgcaaagaatacgaagcagagcagcccccttttcccgaagggtacaaggtgaagcaggagccagtgatcacagtggcacccgtggaagagatgttatttcatggctttagcgcggagcactacttcccggtgtcgcacttcaccatgatttcccgcactccatgcccacaggataagtctgagactatcaatccgaagacatgttctcctaaggagtaccttgaaacctttatctttcctgtcttattgcccggtatggcaagcctcctacaccaagcaaagaaggagaagtgttttgagcgaaaaaggacaaaatttatcgcttgcgattttttgaccgagtggttgtacaatcaaaatcctaagcgcgcaggcgagcccttcactgagttttttagcattccattcgtagaagaaaggctgaagcagcaccctcgccctccaattccactgtctctactacttactgaggaggaggccgcactctacatccaaagcttctggcgcgcgtgcgtcgtgcggtgcgatcccgagatccaggaactcaggcagtggcaaaagaagctccgggaagcaaagcatatccatcagcaggtgaagattttctgggccaaacaggagcagaaggtgaagtgcaagatggaagacgacgcggttcccgcagctaagatgaagattccatcgtcctag

SEQ ID NO: 245452 - DNA, 864 bp, Artificial Sequence
  derived and/or modified sequence
atggccgcaccccgtcagatcccatcacacatcgtgcgactgaagccaagttgttccacagatagtagctttacccgcacacccgtgcccacagtatcattggcctctcgggagttgccagtctcctcgtggcaagtcactgaaccctcatctaaaaacctttgggagcaaatttgcaaggaatacgaggcagaacagcctccatttcccgaaggatacaaagtgaagcaggaacccgtgataacagtcgcccctgttgaagaaatgctgtttcatggtttttccgctgaacattacttccctgtgagccactttactatgataagcaggactccctgccctcaggacaaaagtgagaccatcaatccgaagacctgcagtccaaaagagtatttagagacattcattttcccagtgttgctaccgggaatggccagcctgctgcatcaggccaaaaaggagaaatgttttgagaggaagcgcacaaagtttatagcatgcgacttcctgaccgagtggctgtataatcagaacccaaagagagcaggtgaaccctttacagagttcttctcgatcccgtttgtggaggagcgcctcaaacagcaccctcgcccaccaattcctttgtctctgttgttgactgaagaggaggctgccttgtacatccagtcattctggagggcctgcgtagtgagatgcgatcccgagatacaggaactgcggcagtggcagaagaaattgcgcgaagctaaacatatccaccagcaggtgaaaattttctgggcaaaacaggaacagaaggtaaaatgtaagatggaggacgacgctgtgcccgctgcgaaaatgaaaattccatcaagttag

SEQ ID NO: 245453 - protein, 1123 aa, Artificial Sequence
  derived and/or modified sequence
MDLGPGDAAGGGPLAPRPRRRRSLRRLFSRFLLALGSRSRPGDSPPRPQPGHCDGDGEGGFACAPGPVPAAPGSPGEERPPGPQPQLQLPAGDGARPPGAQGLKNHGNTCFMNAVVQCLSNTDLLAEFLALGRYRAAPGRAEVTEQLAALVRALWTREYTPQLSAEFKNAVSKYGSQFQGNSQHDALEFLLWLLDRVHEDLEGSSRGPVSEKLPPEATKTSENCLSPSAQLPLGQSFVQSHFQAQYRSSLTCPHCLKQSNTFDPFLCVSLPIPLRQTRFLSVTLVFPSKSQRFLRVGLAVPILSTVAALRKMVAEEGGVPADEVILVELYPSGFQRSFFDEEDLNTIAEGDNVYAFQVPPSPSQGTLSAHPLGLSASPRLAAREGQRFSLSLHSESKVLILFCNLVGSGQQASRFGPPFLIREDRAVSWAQLQQSILSKVRHLMKSEAPVQNLGSLFSIRVVGLSVACSYLSPKDSRPLCHWAVDRVLHLRRPGGPPHVKLAVEWDSSVKERLFGSLQEERAQDADSVWQQQQAHQQHSCTLDECFQFYTKEEQLAQDDAWKCPHCQVLQQGMVKLSLWTLPDILIIHLKRFCQVGERRNKLSTLVKFPLSGLNMAPHVAQRSTSPEAGLGPWPSWKQPDCLPTSYPLDFLYDLYAVCNHHGNLQGGHYTAYCRNSLDGQWYSYDDSTVEPLREDEVNTRGAYILFYQKRNSIPPWSASSSMRGSTSSSLSDHWLLRLGSHAGSTRGSLLSWSSAPCPSLPQVPDSPIFTNSLCNQEKGGLEPRRLVRGVKGRSISMKAPTTSRAKQGPFKTMPLRWSFGSKEKPPGASVELVEYLESRRRPRSTSQSIVSLLTGTAGEDEKSASPRSNVALPANSEDGGRAIERGPAGVPCPSAQPNHCLAPGNSDGPNTARKLKENAGQDIKLPRKFDLPLTVMPSVEHEKPARPEGQKAMNWKESFQMGSKSSPPSPYMGFSGNSKDSRRGTSELDRPLQGTLTLLRSVFRKKENRRNERAEVSPQVPPVSLVSGGLSPAMDGQAPGSPPALRIPEGLARGLGSRLERDVWSAPSSLRLPRKASRAPRGSALGMSQRTVPGEQASYGTFQRVKYHTLSLGRKKTLPESSF

SEQ ID NO: 245454 - DNA, 3372 bp, Artificial Sequence
  derived and/or modified sequence
atggacctgggccccggcgacgccgccggcggcggccccctggcccccagacccagaagaagaagaagcctgagaagactgttcagcagattcctgctggccctgggcagcagaagcagacccggcgacagcccccccagaccccagcccggccactgcgacggcgacggcgagggcggcttcgcctgcgcccccggccccgtgcccgccgcccccggcagccccggcgaggagagaccccccggcccccagccccagctgcagctgcccgccggcgacggcgccagaccccccggcgcccagggcctgaagaaccacggcaacacctgcttcatgaacgccgtggtgcagtgcctgagcaacaccgacctgctggccgagttcctggccctgggcagatacagagccgcccccggcagagccgaggtgaccgagcagctggccgccctggtgagagccctgtggaccagagagtacaccccccagctgagcgccgagttcaagaacgccgtgagcaagtacggcagccagttccagggcaacagccagcacgacgccctggagttcctgctgtggctgctggacagagtgcacgaggacctggagggcagcagcagaggccccgtgagcgagaagctgccccccgaggccaccaagaccagcgagaactgcctgagccccagcgcccagctgcccctgggccagagcttcgtgcagagccacttccaggcccagtacagaagcagcctgacctgcccccactgcctgaagcagagcaacaccttcgaccccttcctgtgcgtgagcctgcccatccccctgagacagaccagattcctgagcgtgaccctggtgttccccagcaagagccagagattcctgagagtgggcctggccgtgcccatcctgagcaccgtggccgccctgagaaagatggtggccgaggagggcggcgtgcccgccgacgaggtgatcctggtggagctgtaccccagcggcttccagagaagcttcttcgacgaggaggacctgaacaccatcgccgagggcgacaacgtgtacgccttccaggtgccccccagccccagccagggcaccctgagcgcccaccccctgggcctgagcgccagccccagactggccgccagagagggccagagattcagcctgagcctgcacagcgagagcaaggtgctgatcctgttctgcaacctggtgggcagcggccagcaggccagcagattcggcccccccttcctgatcagagaggacagagccgtgagctgggcccagctgcagcagagcatcctgagcaaggtgagacacctgatgaagagcgaggcccccgtgcagaacctgggcagcctgttcagcatcagagtggtgggcctgagcgtggcctgcagctacctgagccccaaggacagcagacccctgtgccactgggccgtggacagagtgctgcacctgagaagacccggcggccccccccacgtgaagctggccgtggagtgggacagcagcgtgaaggagagactgttcggcagcctgcaggaggagagagcccaggacgccgacagcgtgtggcagcagcagcaggcccaccagcagcacagctgcaccctggacgagtgcttccagttctacaccaaggaggagcagctggcccaggacgacgcctggaagtgcccccactgccaggtgctgcagcagggcatggtgaagctgagcctgtggaccctgcccgacatcctgatcatccacctgaagagattctgccaggtgggcgagagaagaaacaagctgagcaccctggtgaagttccccctgagcggcctgaacatggccccccacgtggcccagagaagcaccagccccgaggccggcctgggcccctggcccagctggaagcagcccgactgcctgcccaccagctaccccctggacttcctgtacgacctgtacgccgtgtgcaaccaccacggcaacctgcagggcggccactacaccgcctactgcagaaacagcctggacggccagtggtacagctacgacgacagcaccgtggagcccctgagagaggacgaggtgaacaccagaggcgcctacatcctgttctaccagaagagaaacagcatccccccctggagcgccagcagcagcatgagaggcagcaccagcagcagcctgagcgaccactggctgctgagactgggcagccacgccggcagcaccagaggcagcctgctgagctggagcagcgccccctgccccagcctgccccaggtgcccgacagccccatcttcaccaacagcctgtgcaaccaggagaagggcggcctggagcccagaagactggtgagaggcgtgaagggcagaagcatcagcatgaaggcccccaccaccagcagagccaagcagggccccttcaagaccatgcccctgagatggagcttcggcagcaaggagaagccccccggcgccagcgtggagctggtggagtacctggagagcagaagaagacccagaagcaccagccagagcatcgtgagcctgctgaccggcaccgccggcgaggacgagaagagcgccagccccagaagcaacgtggccctgcccgccaacagcgaggacggcggcagagccatcgagagaggccccgccggcgtgccctgccccagcgcccagcccaaccactgcctggcccccggcaacagcgacggccccaacaccgccagaaagctgaaggagaacgccggccaggacatcaagctgcccagaaagttcgacctgcccctgaccgtgatgcccagcgtggagcacgagaagcccgccagacccgagggccagaaggccatgaactggaaggagagcttccagatgggcagcaagagcagcccccccagcccctacatgggcttcagcggcaacagcaaggacagcagaagaggcaccagcgagctggacagacccctgcagggcaccctgaccctgctgagaagcgtgttcagaaagaaggagaacagaagaaacgagagagccgaggtgagcccccaggtgccccccgtgagcctggtgagcggcggcctgagccccgccatggacggccaggcccccggcagcccccccgccctgagaatccccgagggcctggccagaggcctgggcagcagactggagagagacgtgtggagcgcccccagcagcctgagactgcccagaaaggccagcagagcccccagaggcagcgccctgggcatgagccagagaaccgtgcccggcgagcaggccagctacggcaccttccagagagtgaagtaccacaccctgagcctgggcagaaagaagaccctgcccgagagcagcttctag

SEQ ID NO: 245455 - DNA, 3372 bp, Artificial Sequence
  derived and/or modified sequence
atggacttggggccaggggatgccgcaggcggcggccccctcgccccccgacccagaagaaggagatcgctacgaaggctgttctccaggtttctactcgcgctcggctcacgctcaaggcctggggatagcccacctcgtcctcagccaggacactgtgacggcgatggggagggcggcttcgcttgcgccccaggtcctgtcccagcagccccaggatcgcccggagaggagcgaccgccagggccgcagccacagctgcaattgccagcaggtgacggcgcccgaccacccggtgctcaaggcctcaagaatcacgggaacacttgcttcatgaacgcagtggtgcaatgcctgtccaacacagacctgctagcagagttcctcgccctaggacgctatcgggccgctccaggcagagccgaggtgacggaacagcttgctgccttggtacgagctctttggactcgggagtatacacctcagctctccgcggagtttaagaatgcagtgtcaaaatacgggagtcagtttcaaggaaacagtcaacacgacgcccttgagttcttgctctggctcttggacagggtccatgaagacctggagggaagctctagagggccagtctcagagaaactccctcccgaggcaactaagacgtctgaaaattgcctgtcgccatccgcacagctgcctctgggccagtcttttgttcaatcccactttcaggctcagtacagatcctctctgacttgcccccattgtctgaaacaatccaacaccttcgacccctttctctgtgtctctttgccaatacccctgcgccagacaaggttccttagtgtcacccttgtgtttccctcgaagtcccagcggtttttacgcgtgggtctcgctgtacccatattgtccactgtggcagctttacgaaagatggtggccgaggagggcggggttccagcagacgaagtcatcctagtggaactgtacccttctggcttccagcggagctttttcgacgaagaagacctgaacactatcgccgagggggataacgtttatgcctttcaagtgcccccctctccttcccagggtactctctccgcacatccgcttgggctgagtgccagtcctcgcctcgctgctagagaaggccagagattctcgctgtccctgcacagcgagagcaaggtcctgatccttttctgcaacctggtcggttcaggacaacaagcatcccgctttggccctccatttctgatccgggaggacagagccgtgtcttgggcacagttgcagcaaagcatcttgtccaaggtgaggcatttgatgaaatctgaagctccagttcagaatcttgggtccctgttctcaatcagggtagtagggcttagtgtggcatgcagttacctgtcccccaaagacagtaggcccctgtgtcattgggccgtcgatcgggtgttgcatctcagaaggcctggcggacccccgcacgttaagctggcggttgaatgggattcctccgtgaaggaaaggctattcggatccctacaggaggagcgggctcaggatgccgactccgtttggcagcagcagcaagctcaccaacagcacagctgtacgcttgatgaatgttttcaattttacaccaaggaggagcagctagctcaggatgatgcttggaaatgtcctcattgccaggtgcttcaacagggcatggtgaaactgagtctctggaccctgccagacatcctcattattcacctcaaacgcttttgtcaagttggcgaaaggcggaataaattgagtactctggtcaagtttcctctttctgggctcaacatggcacctcacgtcgcccagcgaagcacgtcacccgaggcagggctgggcccctggccaagctggaagcaacccgattgtctgccaaccagttaccccctagactttctgtatgatttgtatgccgtgtgcaatcatcacggcaacctgcagggagggcactataccgcctattgcagaaattccttggacggacaatggtattcatacgacgacagcacggtagagcctctgagggaggatgaagtgaacactaggggtgcatatatcctcttttaccagaaacggaactctattccgccgtggtcagcatctagttccatgagagggtcgacctcctcttcgctgagcgaccactggcttctgcggttgggatcccacgctggatccacgcgcggatctctgctgagctggagctcagccccctgcccatcccttccccaagttcccgattcccctatcttcacaaactccctatgcaatcaggagaaaggaggactggagcctaggcggcttgtgagaggggtcaaaggacgaagtatcagcatgaaggcccctactaccagtcgcgccaagcaagggcctttcaagacaatgcctctccgctggagctttggatctaaggaaaagccccccggcgcctctgttgagttagttgaatatctcgaatccagacgccggccccgtagtaccagccagagtatcgtgagtctgcttacgggaactgcaggggaagatgaaaagtcagctagccccagaagcaacgtggcccttcccgcgaatagtgaagatggcggtcgcgccatagagcgtggtcctgcaggagtgccctgtccttccgcccagcccaatcattgtcttgcccctggtaactccgacggtccgaacactgctcggaagctgaaggaaaatgccggacaggatataaagttgccacgcaaattcgacctaccactgaccgtcatgccgtctgttgaacacgaaaagccagcacgtcccgagggccaaaaggctatgaattggaaagagtcgttccagatgggtagcaaaagcagtccaccctcaccctatatgggctttagcggcaattccaaggactcccgacggggcaccagcgagctggatcgcccgcttcaaggaaccctgaccttactaaggtccgtcttcaggaagaaggagaatcgccgcaacgaaagggccgaggtctccccacaggtgccacctgtcagcctggtgtccggtggactgtcacctgctatggatggccaggcccctggttctcccccggccctgcggattcctgaaggactcgcgcggggtctgggctcacgactcgaaagggatgtgtggtcagctccatcgtcattgaggctccctagaaaagccagcagagctccacgggggtctgcccttggaatgagccagaggacagtgcccggagaacaggcttcttacggtacgttccagcgggtgaaatatcacacactgtctctaggacgaaagaaaaccttgcccgagtcttccttttag

SEQ ID NO: 245456 - DNA, 3372 bp, Artificial Sequence
  derived and/or modified sequence
atggacctgggccctggagatgctgctgggggcggccccctggccccccggcccaggagaagaagaagcctgcggcggctcttcagccgcttcctgctggccctgggcagccgcagcaggcctggggacagccccccccggccccagcccggccactgtgatggagatggagagggcggctttgcctgtgcccctggccctgtgcctgctgcccctggcagccctggagaggagcggcccccaggcccccagccccagctgcagctgcctgctggagatggagcccggcccccaggggcccagggcctgaagaaccacggcaacacctgcttcatgaatgctgtggtgcagtgcctgagcaacacagacctgctggccgagttcctggccctgggccgctaccgggccgcccctggccgggcagaggtgacagagcagctggccgccctggtgcgggccctgtggacccgggagtacaccccccagctgtctgctgagttcaagaatgctgtgtccaaatatggcagccagttccagggcaacagccagcatgatgccctggagttcctgctgtggctgctggacagagtgcatgaggacctggagggcagcagccggggccctgtgtctgagaagctgcccccagaggccaccaagaccagcgagaactgcctgagccccagcgcccagctgcccctgggccagagctttgtgcagagccacttccaggcccagtaccgcagcagcctgacctgcccccactgcctgaagcagagcaacacctttgaccccttcctgtgtgtgtccctgcccatccccctgcggcagacccgcttcctgtctgtgaccctggtgttccccagcaagagccagcgcttcctgcgggtgggcctggccgtgcccatcctgagcacagtggccgccctgaggaagatggtggccgaggagggcggcgtgcctgcagatgaggtgatcctggtggagctgtaccccagcggcttccagaggagcttctttgatgaggaggacctgaacaccatcgccgagggggacaacgtgtatgccttccaggtgccccccagccccagccagggcaccctgagcgcccaccccctgggcctgagcgccagcccccggctggccgcccgggagggccagcgcttcagcctgagcctgcacagcgagagcaaggtgctgatcctcttctgcaacctggtgggcagcggccagcaggccagcagatttggaccacccttcctgatcagagaagatagagctgtgtcctgggcccagctgcagcagagcatcctgagcaaggtgcgccacctgatgaagtctgaggcccctgtgcagaacctgggcagcctcttcagcatccgggtggtgggcctgtctgtggcctgcagctacctgagccccaaggacagccggcccctgtgccactgggccgtggacagagtgctgcacctgcggcggcctgggggccccccccacgtgaagctggccgtggagtgggacagctctgtgaaggagcggctgtttggcagcctgcaggaggagcgggcccaggatgctgacagcgtgtggcagcagcagcaggcccaccagcagcacagctgcaccctggatgagtgcttccagttctacaccaaggaggagcagctggcccaggatgatgcctggaagtgcccccactgccaggtgctgcagcagggcatggtgaagctgagcctgtggaccctgcctgacatcctgatcatccacctgaagcgcttctgccaggtgggggagaggaggaacaagctgagcaccctggtgaagttccccctgagcggcctgaacatggccccccacgtggcccagaggagcaccagccctgaggccggcctgggcccctggcccagctggaagcagcctgactgcctgcccaccagctaccccctggacttcctgtatgacctgtatgctgtgtgcaaccaccacggcaacctgcagggcggccactacacagcctactgcaggaacagcctggatggccagtggtacagctatgatgacagcacagtggagcccctgcgggaggatgaggtgaacaccaggggggcctacatcctcttctaccagaagaggaacagcatccccccctggagcgccagcagctccatgaggggcagcaccagcagcagcctgagtgaccactggctgctgcggctgggcagccacgccggcagcacccggggcagcctgctgtcctggagcagcgccccctgccccagcctgccccaggtgcctgacagccccatcttcaccaacagcctgtgcaaccaggagaagggcggcctggagccccggcggctggtgcggggcgtgaagggccgcagcatctccatgaaggcccccaccaccagccgggccaagcagggccccttcaagaccatgcccctgcgctggagctttggcagcaaggagaagcccccaggggcctctgtggagctggtggagtacctggagagcagaagaagacccaggagcaccagccagagcatcgtgtccctgctgaccggcacagctggagaagatgagaagagcgccagccccaggagcaatgtggccctgcctgccaacagtgaagatggcggccgggccatcgagcggggccctgctggggtgccctgccccagcgcccagcccaaccactgcctggcccctggcaacagtgatggccccaacacagccaggaagctgaaggaaaatgccggccaggacatcaagctgcccaggaagtttgacctgcccctgactgtgatgcccagcgtggagcacgagaagccagcccggcctgagggccagaaggccatgaactggaaggagagcttccagatgggcagcaagagcagcccccccagcccctacatgggcttcagcggcaacagcaaggacagccggcggggcaccagcgagctggaccggcccctgcagggcaccctgaccctgctgcggtctgtgttcaggaagaaggaaaatagaagaaatgaaagagctgaggtgagcccccaggtgccccctgtgtccctggtgtctgggggcctgagccctgccatggatggccaggcccctggcagccccccagccctgcgcatccctgagggcctggcccggggcctgggcagccggctggagagagatgtgtggagcgcccccagcagcctgcggctgcccaggaaggccagccgggccccccggggcagcgccctgggcatgagccagaggacagtgcctggagagcaggccagctatggcaccttccagagggtgaagtaccacaccctgagcctgggcaggaagaagaccctgcctgagagcagcttctag

SEQ ID NO: 245457 - DNA, 3372 bp, Artificial Sequence
  derived and/or modified sequence
atggacctgggccccggcgacgccgccggcggcggccccctggccccaaggccgcgcagaaggcgaagcttacgacgacttttcagtcgctttctgttagcacttgggtctcgctccaggcccggggatagtccgcctcgccctcagcccggccactgtgacggtgacggcgagggaggcttcgcatgcgcccctggccccgttccagcggctccagggtctcctggcgaggagaggccaccagggccacagccccagctgcagctccccgctggtgatggagcgcggcctccaggtgcccagggcttaaaaaaccacggtaacacctgcttcatgaatgcagtcgtgcagtgcttaagcaacacggatttattggcagagttcctcgctctaggccgttatagagccgcacccggaagagcagaagttaccgaacagctcgcagcactggtccgcgccctttggactcgcgagtacacaccgcaactgagcgccgaattcaaaaatgcagtgtcaaagtacggttctcaattccaaggaaactctcagcacgacgcactcgaattcttgctgtggctactagatcgggttcatgaggacctggaaggatctagtcgagggccagtgtccgagaagcttccccccgaggcaaccaaaaccagtgaaaactgtctgagccctagtgcacagcttccattaggccagtcattcgtgcagtcccacttccaggctcagtaccgcagcagcctcacctgtccccattgcctgaaacaatcaaataccttcgacccgttcctctgtgtgagcctcccaatccctctgagacagactcggtttctcagtgtgacactggttttcccatctaagagtcaacgcttcctgcgcgtaggcctggcagtgccaatcctttccaccgtggctgctctgcggaagatggtggctgaagaaggcggtgtacctgccgatgaggtcattctggttgaactgtacccatcggggttccagcgctccttcttcgacgaggaagacctgaacactattgcagaaggggacaatgtttacgccttccaggttccaccatccccgtcccagggaaccctcagtgcccaccctctgggccttagtgcctctccacggcttgccgcccgagagggccaacgattttcgctgtcgcttcatagtgagagcaaggtgctgatcctgttctgcaacctggtgggtagtggccaacaagccagcaggtttggccccccattcctgattagagaggatcgcgcagtgtcctgggcccagctacagcagtccattctgagtaaggtgcgtcacctgatgaagtctgaggccccagtccagaatctgggaagcctgttctcaattcgggtggtggggttatccgtggcctgttcctacctgagtcctaaggattctcgaccactgtgccactgggccgtggacagggtgctgcatcttcgaaggcccggcgggccccctcatgtgaaactcgccgtggaatgggatagctcagttaaggagcgcctcttcgggagcctgcaggaagaaagagcacaggacgccgacagcgtgtggcagcagcagcaggctcatcagcagcattcatgcacactggatgagtgcttccaattctatacaaaggaggagcagcttgcccaagacgatgcctggaaatgccctcattgccaggttctccaacaaggcatggtaaagctcagtttgtggacgctgcccgacatcttgatcatccacctcaagcggttttgccaagtgggtgagagaaggaacaagctgagcacactagttaagttccccctcagtggactgaacatggcgcctcatgtggcgcaaagaagtacctcccccgaagctggcctggggccatggccttcctggaaacagccagactgtctgcccacctcatatcccttggattttttgtacgacctgtacgctgtatgcaatcatcacggcaatcttcaaggaggacactacacggcctattgcaggaattcccttgatggtcagtggtactcatacgacgatagcaccgttgaacccctgcgggaggatgaagtgaatactagaggggcatacattttgttctaccaaaagaggaactcgatcccgccctggtcagcctcaagcagcatgcgaggcagcacatcctccagcctgtcagatcattggctgctccgcctcggttctcatgcaggatcgacccgtggatccctcttgagctggagttctgcgccatgtccaagccttccgcaggtgccagattcaccaattttcacgaattccctgtgcaaccaagagaagggaggccttgagccccggaggttagtcagaggggttaaaggacgttctatctctatgaaagcccccaccacttcacgggcgaagcagggaccctttaaaacaatgccactacgctggtcctttggctctaaagagaagccacccggagcgagtgtggagttggtggagtacctggagagcaggaggcgccctcggagcactagtcagagtatcgtaagtctgctcaccggcacggccggcgaagacgagaagtcggcctctccccgcagtaatgtagcgctgccagcaaacagcgaggacgggggtcgggcgatcgagaggggccctgccggcgttccctgtccatccgcccaacccaatcactgtcttgctcctggcaatagcgacggaccaaacaccgccagaaagctaaaagagaacgcaggccaggacataaaacttcctcgaaagtttgacctgcccctcacagtgatgccaagtgtcgagcatgagaagcccgcccggccagagggccagaaggccatgaattggaaggaaagcttccaaatggggtctaagagctcccctccgagtccttacatgggattcagtggtaactcaaaggattccagacgcggcacctcggagctggatcgccctctccaaggaaccttaaccttgttgagatctgttttcaggaaaaaggagaatcggcgcaacgaacgcgctgaggtttcgccacaggtgccccctgtgtctcttgtatcagggggtctgagccccgctatggacgggcaggcccccgggagcccccccgctctccggatacccgagggactggcaagaggtctgggatccaggttagagagagacgtgtggtcagccccttcaagcctgcggctgcctaggaaagcctccagggcaccgcgggggtccgcactagggatgtctcagagaactgtgcctggtgaacaggcttcttatggaacattccagagagtgaaatatcacaccctctcccttggtagaaagaaaaccctccctgagtcatcattctag

SEQ ID NO: 245458 - DNA, 3372 bp, Artificial Sequence
  derived and/or modified sequence
atggatctgggaccaggtgacgcagctgggggtggcccactcgctccgaggccgaggcggcgtcgctccctacggaggttgttctctagattcttactggcccttgggtccaggagtagacccggtgactccccgccacggcctcagcctggacattgtgatggtgacggggaggggggatttgcctgtgccccagggccagtgccagcggcacccggtagtcctggggaggagcggcctcctggtcctcagccacagctacaactgcctgcaggtgatggcgcaaggcctcctggggcacagggcctcaaaaaccatggcaatacttgctttatgaacgcagtagttcaatgcctctctaacacggatctgctagccgaattcttggctctcgggcgatatagggctgctcctggcagagctgaagtcaccgagcaacttgcagctctcgtgcgcgctctgtggacccgcgaatacacacctcagctgtccgcagagttcaagaatgccgtatccaagtacggatcacagtttcaggggaatagtcaacacgatgctctggagtttctgctgtggctcctggaccgggttcacgaagatttggagggttcaagtaggggaccagtatccgagaaactaccccctgaggctacgaagacatccgagaattgcttatccccctccgctcagctcccactggggcagtcttttgtacagtcccacttccaggcgcagtaccgatctagcctgacctgcccacattgtcttaagcaaagcaacacgttcgatcctttcctctgcgtgtcactcccgattcctctcagacagacaagattcctttcggttacgctggtgtttcccagtaagtcacagcgctttctgcgggtgggtctggcggtgcctattttgtcaacagtagccgctctcagaaaaatggtagcggaagaaggaggggtgccggctgatgaggttatattggtggagctctatccgtcaggcttccagcggagcttttttgacgaagaggacttgaacactatcgctgagggcgataacgtctacgcttttcaagtgcctcctagtccatcgcaggggactctgagtgctcacccactgggactcagcgcgagtcctcgcctagcagcgagagaaggtcagcgattcagcctcagcctgcactccgagtccaaagtgttgatattgttctgcaacctggttggctcgggacagcaggccagccgtttcggaccgccatttctgatcagagaagacagagctgtttcatgggctcagttgcaacagtctattctctccaaggtcaggcatctcatgaagagtgaggcgcctgtgcagaatctgggtagtttattttccattcgagttgtggggctttcagtagcctgttcatacctcagccctaaggatagccgcccactctgccattgggcagtggaccgcgtattgcacctgcgcagacctggcggtccaccacacgtgaagctcgcagtggaatgggacagtagcgtgaaagagcgcctgttcgggtcactccaggaggaacgggcacaggacgcagacagcgtgtggcagcaacagcaggctcatcagcagcattcttgcacactggatgagtgttttcagttctacaccaaagaggagcagctcgctcaagacgatgcatggaagtgtccacattgtcaggtactccagcagggaatggttaagctctcactttggaccctaccggacatccttatcatacatctcaagagattttgtcaggtgggggagaggcgcaataagcttagcactctggtaaagttccccctctctgggctgaacatggctccacatgtcgcacagcggagtacatcccctgaagccggtttgggcccttggcctagttggaagcagccagattgcctgccaacttcctatcccctggatttcctgtacgatctgtacgccgtgtgtaaccaccatggaaatctgcagggcggacattataccgcttactgccggaatagcctcgacggacagtggtactcatatgatgactcaacggtagaaccactccgcgaagacgaagtgaatactcggggtgcctacatcctgttctaccagaagcgaaactccattcccccttggtctgccagtagttccatgcgtggctctacaagctcatctttgagtgaccactggcttcttaggctggggtctcatgcaggatctacacgcggaagccttctgagctggagtagcgcaccgtgtccctccctgcctcaggtgcccgattcacccatttttacgaatagcctgtgtaaccaggagaaagggggactggagcctcgtaggctcgtcaggggcgtgaaagggagatctatttccatgaaagcaccgacaacctcgcgcgctaaacaagggccattcaaaactatgccactgcggtggagcttcgggtcaaaagaaaagcctcccggtgcttccgtagaactagtggaatatcttgagtctaggaggcggcctagaagtacctctcagagcattgttagcctcctgactggaaccgcgggagaggatgagaagagtgcaagccctagatcgaacgtggcccttcccgctaattcagaggacggaggtcgggctatcgagagagggcctgccggagtgccctgcccttccgctcaacccaaccattgcctggccccaggtaactccgacggacccaacaccgctcgaaagctgaaggaaaatgccggtcaagacattaaattgccacgaaagtttgacctgccattaactgtcatgcctagcgtggagcacgagaaaccagcaagaccggaaggacagaaggcaatgaactggaaggagtcatttcaaatgggcagcaaaagcagtcccccttcaccttatatgggatttagcggcaattctaaggatagtagacgagggacgtctgagctcgaccggccactccaagggaccttgaccctgttacggtccgtgtttaggaaaaaagaaaataggcgcaacgagagggccgaagtgagtcctcaagtgcctcctgtttccctggttagcggaggactgtctcccgcaatggatggtcaagccccaggatccccccctgccttacgtatcccagaaggattggcaaggggcctgggtagtaggttggaacgggatgtctggtcagcaccttcgagcctgagattacctcgaaaagcttcccgggctcctaggggctctgcactgggaatgagccaacgtacagtacctggggagcaggctagctacggcaccttccagagagtgaagtaccataccctgtcactggggcgtaaaaaaaccctgcctgagtcctcattctag

SEQ ID NO: 245459 - DNA, 4066 bp, Artificial Sequence
  derived and/or modified sequence
atggacctgggccccggggacgcggcaggagggggaccgctcgcgccccggccccgccgccgccgctccctgcgccgcctgttcagccgcttcctgctggcgctgggcagccgctcacgccccggggactcaccgccccggccccagccgggacactgtgatggcgacggtgaggggggcttcgcctgcgccccgggcccagttccagcggcccccgggagccccggggaggaacgcccgcccggaccccagccccagctccagctccccgccggcgatggggcgcggccgccgggcgctcagggcttgaagaaccacggcaacacctgtttcatgaacgcggtggtgcagtgtctcagcaacaccgacctgctggccgagttcctggcgctggggcgctaccgggcggctccgggccgcgccgaggtcaccgagcagctggcggcgctggtgcgcgcgctctggactcgcgaatacacgccccaactttccgcggagttcaagaatgcagtttccaagtacggctctcagttccaaggcaattcccagcacgacgccctggaattcctgctctggttgctggatcgtgtacatgaggacctggagggttcatcccgagggccggtgtcggagaagcttccgcctgaagccactaaaacctctgagaactgcctgtcaccatcagctcagcttcctctaggtcaaagctttgtgcaaagccactttcaagcacaatatagatcttccttgacttgtccccactgcctgaaacagagcaacacctttgatcctttcctgtgtgtgtccctacctatccccttgcgccagacgaggttcttgagtgtcaccttggtcttcccctctaagagccagcggttcctgcgggttggcctggccgtgccgatcctcagcacagtggcagccctgaggaagatggttgcagaggaaggaggcgtccctgcagatgaggtgatcttggttgaactgtatcccagtggattccagcggtctttctttgatgaagaggacctgaataccatcgcagagggagataatgtgtatgcctttcaagttcctccctcacccagccaggggactctctcagctcatccactgggtctgtcggcctccccacgcctggcagcccgtgagggccagcgattctccctctctctccacagtgagagcaaggtgctaatcctcttctgtaacttggtggggtcagggcagcaggctagcaggtttgggccacccttcctgataagggaagacagagctgtttcctgggcccagctccagcagtctatcctcagcaaggtccgccatcttatgaagagtgaggcccctgtacagaacctggggtctctgttctccatccgtgttgtgggactctctgtggcctgcagctatttgtctccgaaggacagtcggcccctctgtcactgggcagttgacagggttttgcatctcaggaggccaggaggccctccacatgtcaagctggcggtggagtgggatagctctgtcaaggagcgcctgttcgggagcctccaggaggagcgagcgcaggatgccgacagtgtgtggcagcagcagcaggcgcatcagcagcacagctgtaccttggatgaatgttttcagttctacaccaaggaggagcagctggcccaggatgacgcctggaagtgtcctcactgccaagtcctgcagcaggggatggtgaagctgagtttgtggacgctgcctgacatcctcatcatccacctcaaaaggttctgccaggtgggcgagagaagaaacaagctctccacgctggtgaagtttccgctctctggactcaacatggctccccatgtggcccagagaagcaccagccctgaggcaggactgggcccctggccttcctggaagcagccggactgcctgcccaccagttacccgctggacttcctgtacgacctgtatgccgtctgcaaccaccatggcaacctgcaaggtgggcattacacagcctactgccggaactctctggatggccagtggtacagttatgatgacagcacggtggaaccgcttcgagaagatgaggtcaacaccagaggggcttatatcctgttctatcagaagcggaacagcatccctccctggtcagccagcagctccatgagaggctctaccagctcctccctgtctgatcactggctcttacggctcgggagccacgctggcagcacaaggggaagcctgctgtcctggagctctgccccctgcccctccctgccccaggttcctgactctcccatcttcaccaacagcctctgcaatcaggaaaagggagggttggagcccaggcgtttggtacggggcgtgaaaggcagaagcattagcatgaaggcacccaccacttcccgagccaagcagggaccattcaagaccatgcctctgcggtggtcctttggatccaaggagaaaccaccaggtgcctccgtcgagttggtggagtacttggaatccagacgaagacctcggtccacgagccagtccattgtgtcgctgttgacgggcactgcgggtgaggatgagaagtcagcatcgccgaggtccaacgtcgcccttcctgctaacagcgaagatggtgggcgggccattgaaagaggtccagccggggtgccctgtccctcggctcaacccaaccactgtctggcccctggaaactcagatggtccaaacacagcaaggaaactcaaggaaaatgcagggcaggacatcaagcttcccagaaagtttgacctgcctctcactgtgatgccttcagtggagcatgagaaaccagctcgaccggagggccagaaggccatgaactggaaggagagcttccagatgggaagcaaaagcagcccaccctccccctatatgggattctctggaaacagcaaagacagtcgccgaggcacctctgagctagacagacccctgcaggggacactcacccttctgaggtccgtgtttcggaagaaggagaacaggaggaatgagagggcagaggtctctccacaggtgccccccgtctccctggtgagtggcgggctgagccctgccatggacgggcaggctccaggctcacctcctgccctcaggatcccagagggcctggccaggggcctgggcagccggctcgagagggatgtctggtcagcccccagctctctccgcctccctcgtaaagccagcagggccccgagaggcagtgcactgggcatgtcacaaaggactgttccaggggagcaggcttcttatggcacctttcagagagtcaaatatcacactctttctttaggtcgaaagaaaaccttaccggagtccagcttttgatggagcgtgtcagtattgtgtgacgctggcattcttgggactttgccaagcaactgtaggcagctcatgttgagaatgggtttccaggaaacccgttgtcttgtaatctctaaaaaaaaatttttttttttttgtggtggggggtctccatatctagacttccaacacccaaggtccatataacccaaggtcgaaaaccttcctgcatcattgggtgctttgctacagtttggccactagaggatgctattgggtcagtattaccagtttcagggcaagaactgatatttactaaagagttttggatgtgggcaaacaagatgaggctggtttaataagaatcttcaatgtcatgtcaaatactgtcaatggcttttcctttttctttcttttttttttttaaattgtggacttaaagaaaaatattttatttttaatgcttttctgggataagcattaaagatgccaaaaagaaaaaaaaaacaaaagaatgatagtgatggtaaggcaagattctagcaaagagagatgggagataaatggctgagagttcaggtgaatatttaatatattaaaaattgtattaaagtttttcaaggtattttaaaaataactattttgatactagaaaaaaagtccattttttaatttaaatatgagatctatgtacaattttaataaaatcctgtccatg

SEQ ID NO: 245460 - protein, 1156 aa, Artificial Sequence
  derived and/or modified sequence
MASLLPLLCLCVVAAHLAGARDATPTEEPMATALGLERRSVYTGQPSPALEDWEEASEWTSWFNVDHPGGDGDFESLAAIRFYYGPARVCPRPLALEARTTDWALPSAVGERVHLNPTRGFWCLNREQPRGRRCSNYHVRFRCPLEASWGAWGPWGPCSGSCGPGRRLRRRHCPSPAGDACPGRPLEAQKCVRPRCPGCSLDTCECPDHILLGSVVTPSGQPLLGARVSLRDQPGTVATSDAHGTFRVPGVCADSRANIRAQMDGFSAGEAQAQANGSISVVTIILDKLEKPYLVKHPESRVREAGQNVTFCCKASGTPMPKKYSWFHNGTLLDRRAHGYGAHLELRGLRPDQAGIYHCKAWNEAGAVRSGTARLTVLAPGQPACDPRPREYLIKLPEDCGQPGSGPAYLDVGLCPDTRCPSLAGSSPRCGDASSRCCSVRRLERREIHCPGYVLPVKVVAECGCQKCLPPRGLVRGRVVAADSGEPLRFARILLGQEPIGFTAYQGDFTIEVPPSTQRLVVTFVDPSGEFMDAVRVLPFDPRGAGVYHEVKAMRKKAPVILHTSQSNTIPLGELEDEAPLGELVLPSGAFRRADGKPYSGPVEARVTFVDPRDLTSAASAPSDLRFVDSDGELAPLRTYGMFSVDLRAPGSAEQLQVGPVAVRVAASQIHMPGHVEALKLWSLNPETGLWEEESGFRREGSSGPRVRREERVFLVGNVEIRERRLFNLDVPERRRCFVKVRAYANDKFTPSEQVEGVVVTLVNLEPAPGFSANPRAWGRFDSAVTGPNGACLPAFCDADRPDAYTALVTATLGGEELEPAPSLPRPLPATVGVTQPYLDRLGYRRTDHDDPAFKRNGFRINLAKPRPGDPAEANGPVYPWRSLRECQGAPVTASHFRFARVEADKYEYNVVPFREGTPASWTGDLLAWWPNPQEFRACFLKVKIQGPQEYMVRSHNAGGSHPRTRGQLYGLRDARSVRDPERPGTSAACVEFKCSGMLFDQRQVDRTLVTIMPQGSCRRVAVNGLLRDYLTRHPPPVPAEDPAAFSMLAPLDPLGHNYGVYTVTDQSPRLAKEIAIGRCFDGSSDGFSREMKADAGTAVTFQCREPPAGRPSLFQRLLESPATALGDIRREMSEAAQAQARASGPLRTRRGRVRQ

SEQ ID NO: 245461 - DNA, 3471 bp, Artificial Sequence
  derived and/or modified sequence
atggcctcactgctaccattgctgtgtctatgtgtggtagccgcccatctcgccggcgccagggatgctacccctacagaggagccaatggcaaccgcgctagggcttgaacgccgttccgtctacacaggccaaccaagccccgctctggaggattgggaagaggcaagcgaatggaccagctggttcaacgtcgatcatccgggtggggatggagatttcgaatccctggctgcaatccgtttttactatggcccagctagggtctgcccgagacccttggcattggaagcacgcactacggactgggcactgccctccgccgtaggtgaacgtgtgcatctgaatcccacgcgagggttttggtgtcttaatagagaacagcctaggggaaggaggtgtagcaactatcacgtcagattcagatgcccgctggaggcatcttggggcgcttggggaccttggggtccctgtagtggtagttgtggcccgggcagacggctgcggcgaagacactgcccatcccctgcgggcgacgcctgtcccggtcggcccctggaggcccagaaatgcgtgagacctaggtgcccgggctgcagtctcgatacgtgtgagtgccctgaccacatcctgctggggtctgtcgtcaccccttccggccagccactgctgggtgccagggtatcccttcgggaccagcccgggacagtggctacctctgacgctcacggcacgttccgagtgcctggtgtttgtgctgactcgcgcgccaacatccgggcccaaatggacggcttttccgccggtgaggcccaagcacaggcgaacgggtcaatctccgtagtcactatcattcttgataaactggagaagccctatttggtgaagcatcccgagagtcgggtccgcgaggctgggcagaatgtgacgttttgctgcaaagcaagtggcacaccaatgccaaaaaagtacagctggtttcataacggaactttactggatcggcgcgcacatgggtatggcgctcacttggagctgcgcggtcttcggcccgatcaggccggaatctatcactgtaaggcttggaacgaggcaggcgccgtacggagcggtacggccagactgacggtgctcgcgcctggacagccagcgtgcgatccgcgaccccgggagtatcttatcaagctgccagaggattgcgggcagcccgggagtggccccgcctatctagacgtcggtctgtgtcccgataccaggtgcccctcactcgcaggatcgagtccgcgttgcggtgacgcctcaagcagatgctgcagcgtccggagacttgaacggagggagatccattgcccaggttatgtgttgcccgtgaaagtggtcgccgagtgtgggtgccaaaaatgcctacctccgcgtgggctcgtccggggacgggtggtggccgccgactccggagagcccctccgattcgcacgaattttgttgggtcaggaaccgattggatttaccgcttatcaaggcgacttcactatcgaagtgccgccttcaactcaaaggttggtcgtgaccttcgtggacccctccggcgagtttatggatgctgtgagagttttgccctttgatccccggggcgctggtgtgtatcatgaagtcaaagccatgcggaaaaaggcacctgtgatcctgcataccagtcaaagcaacaccataccacttggagagctagaagatgaggccccactgggggagcttgtcctgccctctggggcatttaggcgtgcggacggaaagccttactctggtcccgtggaggcccgtgtcaccttcgtagatcctagggatctgacctcagccgccagtgccccttctgacctgaggttcgttgatagcgacggcgagcttgcaccccttcgcacctatgggatgttttcagtggacctgagagctcccggctccgctgaacaactgcaggtggggcccgtggccgtgcgggtggccgcctctcagatccatatgcctggtcacgtcgaggccctcaagctctggagtctgaacccggagacagggctgtgggaagaggagagtggttttcgtcgggagggttcgagtgggcctagagtgagaagggaggagcgtgtattcctggtgggaaatgtcgaaatccgggaaaggcgcttgtttaatttggatgtgcccgaaaggcgccggtgcttcgtgaaggtgcgcgcttacgcaaacgacaagttcacgccatctgagcaagtggagggcgtcgtggtgacgctggttaacctggaacctgctcctgggttctcagctaatcctcgcgcctgggggaggtttgactccgcagtaactggtcccaatggagcctgccttccagccttctgcgacgctgaccgaccagacgcctataccgcgctggtgaccgccacgttggggggcgaagagctcgagccagccccatccctcccacgaccactccccgcgacagttggggtgacgcagccgtatctggacagactgggttatagacgaacagaccatgatgaccctgcgtttaagaggaatggattccggatcaacttggcaaaacctaggcccggcgatcccgcagaagctaatgggcctgtgtatccatggaggtcactcagggagtgccagggggccccagtgactgcttcgcacttccggtttgcgagggtcgaagcggacaagtatgagtacaatgtcgtgcctttccgggagggtacaccggcctcctggactggcgatctcctggcttggtggcctaatccacaggaattcagggcatgcttccttaaggtgaagatacaaggccctcaggaatacatggttcgctcacataatgctggggggtctcatcctagaacccgcggacagctttacggactgagagatgcccggagcgtgcgcgatccagagaggccagggacttccgccgcctgcgtggaattcaaatgtagtggcatgctgttcgaccagaggcaggtggacaggacgctggtcactatcatgccacagggaagctgtaggcgagtggccgtcaacggtttactgcgagactatctaacacgacaccccccacctgttcctgccgaggaccccgcagctttctccatgctcgcaccactcgatcccctgggccataattacggcgtgtacacagtcacagaccagagtcctcgcctggccaaggagatcgccataggaaggtgcttcgatggatcctccgatgggttctcccgggagatgaaagccgacgcgggcaccgctgtgacatttcagtgccgcgaaccccctgctggacgaccttcactcttccagcggttgctggagtcacccgcaactgcactgggggatatcaggcgtgagatgtcagaagccgcgcaggctcaggcccgagcaagcgggcccctccgcacgcggcgcggcagagtgaggcagtag

SEQ ID NO: 245462 - DNA, 3471 bp, Artificial Sequence
  derived and/or modified sequence
atggccagcctgctgcccctgctgtgcctgtgtgtggtggccgcccacctggccggggccagagatgccacccccacagaggagcccatggccacagccctgggcctggagcggcgctctgtgtacacaggccagcccagccctgccctggaggactgggaggaggccagcgagtggacctcctggttcaacgtggaccaccctggaggagatggagactttgagagcctggccgccatccgcttctactacggccctgcccgggtgtgcccccggcccctggccctggaggcccggaccacagactgggccctgcccagcgctgtgggggagcgggtgcacctgaaccccacccggggcttctggtgcctgaaccgggagcagccccggggccgccgctgcagcaactaccacgtgcgcttccgctgccccctggaggcctcctggggcgcctggggcccctggggcccctgcagcggcagctgtggccctggccggcggctgcggcggcggcactgccccagccctgctggagatgcctgccccggccggcccctggaggcccagaagtgtgtgcggccccgctgccccggctgcagcctggacacctgtgaatgtcctgaccacatcctgctgggctctgtggtgaccccatctggccagcccctgctgggcgcccgggtgtccctgcgggaccagcccggcaccgtggccaccagtgatgcccacggcaccttccgggtgcctggggtgtgtgccgacagccgggccaacatccgggcccagatggatggcttctctgctggggaggcccaggcccaggccaacggcagcatctctgtggtgaccatcatcctggacaagctggagaagccctacctggtgaagcaccctgagagccgggtgcgggaggccggccagaatgtgaccttctgctgcaaggccagcggcacccccatgcccaagaagtacagctggttccacaacggcaccctgctggacagaagagcccacggctacggggcccacctggagctgcggggcctgcggccagaccaggccggcatctaccactgcaaggcctggaatgaagctggagctgtgcgcagcggcacagcccggctgactgtgctggcccctggccagcctgcctgtgacccccggccccgggagtacctgatcaagctgcctgaggactgtggccagcccggcagcggccctgcctacctggatgtgggcctgtgcccagacacccgctgccccagcctggccggcagcagcccccgctgtggagatgccagcagccgctgctgcagcgtgcggcggctggagcggcgggagatccactgccccggctacgtgctgcctgtgaaggtggtggccgagtgtggctgccagaagtgcctgcccccccggggcctggtgcggggccgggtggtggccgctgacagcggggagcccctgcgctttgcccgcatcctgctgggccaggagcccatcggcttcaccgcctaccagggcgacttcaccatcgaggtgccccccagcacccagaggctggtggtgacctttgtggaccccagcggggagttcatggatgctgtgcgggtgctgccctttgaccccagaggagctggggtgtaccacgaggtgaaggccatgaggaagaaggcccctgtgatcctgcacaccagccagagcaacaccatccccctgggggagctggaggatgaggcccccctgggggagctggtgctgcccagcggggccttccggcgggcagatggcaagccctacagcggccctgtggaggcccgggtgacctttgtggacccccgggacctgaccagcgctgccagcgcccccagcgacctgcgctttgtggacagtgatggagagctggcccccctgcggacctacggcatgttttctgtggacctgcgggcccctggcagcgctgagcagctgcaggtgggccctgtggccgtgcgggtggccgccagccagatccacatgcctggccacgtggaggccctgaagctgtggagcctgaaccctgagaccggcctgtgggaggaggagagcggcttccggcgggagggcagcagcggcccccgggtgcggcgggaggagagggtcttcctggtgggcaatgtggagatccgggagcggcggctcttcaacctggatgtgcctgagcggcggcgctgctttgtgaaggtgcgggcctatgccaatgacaagttcacccccagcgagcaggtggagggcgtggtggtgaccctggtgaacctggagcccgcccctggcttcagcgccaacccccgggcctggggccgctttgattctgctgtgacaggccccaatggagcctgcctgcctgccttctgtgatgctgacagaccagatgcctacacagccctggtgacagccaccctgggcggggaggagctggagcccgcccccagcctgccccggcccctgcctgccaccgtgggcgtgacccagccctacctggaccggctgggctacagaagaacagaccatgatgatcctgccttcaagagaaatggcttccgcatcaacctggccaagcccaggcctggggaccctgctgaggccaatggacctgtgtacccctggaggagcctgcgggagtgccagggcgcccctgtgacagccagccacttccgctttgcccgggtggaggccgacaagtatgagtacaacgtggtgcccttccgggagggcaccccagcctcctggacaggagacctgctggcctggtggcccaacccccaggagttccgggcctgcttcctgaaggtgaagatccagggcccccaggagtacatggtgcgcagccacaatgctgggggcagccaccccaggacccggggccagctgtatggcctgagagatgcccggtctgtgcgggaccctgagcggcccggcaccagcgctgcctgtgtggagttcaagtgcagcggcatgctgtttgaccagaggcaggtggacaggaccctggtgaccatcatgccccagggcagctgcagaagagtggccgtgaatggcctgctgcgggactacctgaccaggcaccccccacctgtgcctgcagaagatcctgctgccttctccatgctggcccccctggaccccctgggccacaactatggagtgtacacagtgacagaccagagcccccggctggccaaggagatcgccatcggccgctgctttgatggcagcagtgatggcttcagccgggagatgaaggcagatgctggaacagctgtgaccttccagtgccgggagcccccagctggccggcccagcctcttccagaggctgctggagagccctgccacagccctgggggacatccggcgggagatgtctgaggccgcccaggcccaggcccgggccagcggccccctgcggacccggcggggccgggtgcggcagtag

SEQ ID NO: 245463 - DNA, 3471 bp, Artificial Sequence
  derived and/or modified sequence
atggccagcctgctgcccctgctgtgcctgtgcgtggtggccgcccacctggctggcgcccgagacgccacccctacagaggaacctatggccaccgcacttggcctcgagagaagatctgtgtacacaggtcaacccagtcctgcactggaggactgggaggaggcaagcgaatggactagctggtttaatgtggaccacccgggaggtgacggggactttgagagcctggcagcaataagattttactatggccccgccagagtctgtcctagacccttggcgctagaagcgcgcaccacagactgggccctcccctccgcggtgggggagagagtacatctgaacccaacacggggtttttggtgtctcaatcgggagcagcctcgcggcagacgttgctctaactatcacgttagattccgatgtcccctggaggcctcttggggcgcctggggcccctggggcccatgctctggctcctgtgggcccggcagacgactccggagacgtcactgccccagccccgcgggggacgcctgtcccggaagacccctggaagcacagaagtgcgtgcggcctaggtgtcccggatgttctctggatacatgtgagtgcccggatcatattcttctagggagcgtggtgacgccttccgggcaacctctcctcggagcgagagtatccctgagagaccagccaggcaccgtcgccacatccgacgcgcatgggacatttagggtgccaggcgtgtgtgctgactcaagagcgaatatacgagcacaaatggatggcttcagcgccggagaggcccaagcccaggcaaacggctctatctcagtagtgacaataattttagacaagctggagaaaccgtatctcgtgaagcaccccgagagcagagttagagaggcaggtcaaaacgtgaccttctgttgcaaggcctcgggcacacccatgccaaaaaaatacagttggtttcacaacggcaccctgctcgaccgcagggctcatggctacggagcccacctggagctgcggggacttcggccagatcaggcagggatctatcactgtaaagcctggaacgaagctggcgccgtgcggtccggaacagccaggctgaccgtgttagcacccggacagccggcttgcgaccccaggcctcgggagtaccttatcaagctgccggaagattgcggtcagcccggatctggtccggcctatctggacgttggtctttgtccagacactaggtgtccgtcactggcagggtcgtctccaaggtgtggcgacgcctcctccaggtgttgcagcgtgagaagactggaacgccgggagattcattgcccgggctacgtcctgcctgtgaaagttgtggcagaatgtgggtgccagaagtgcctgcctccacgtgggctggttagaggaagagtggtggcagcggactcgggagaaccgctgcgcttcgcccgaatcctgctgggccaggagcccatcggcttcacagcctaccagggggacttcactatagaggttcccccaagcactcagaggctcgtggtaacatttgtcgatccatctggagagttcatggatgctgtgagagtgctgccttttgacccaagaggcgccggtgtctaccacgaagtgaaggcaatgaggaagaaagccccagttatcttgcataccagccagtccaatacaatccctctgggcgaactggaagatgaggccccgttgggcgaactggtcctacccagcggagcattccggagggctgacggcaaaccatattccggccccgttgaggcccgcgttacattcgtggaccctcgcgacctaacatctgcagcctctgccccaagcgacctcagattcgtggacagcgatggcgaactagcgcccctccgcacatatggaatgtttagcgtggaccttagggcgccaggctccgcagaacaattacaggttgggcccgtcgccgtgagggtcgccgcttcgcagatacatatgccggggcacgtggaagccctgaaattgtggtctcttaatcccgaaaccggtctgtgggaagaagaaagtgggtttaggagagaagggtcttcgggcccccgggtccgcagagaggaaagggtgttcctcgttggcaacgtggaaatccgcgagagaaggctgttcaatttagacgtcccggagaggcgccgatgcttcgtcaaagtccgcgcttacgctaacgacaagtttacgccctctgaacaggttgaaggcgtggtggtaaccttggttaatctggaacctgcacccggtttctcagctaatcctagggcttggggtaggtttgattctgccgttacagggcccaatggggcctgtctgccagctttctgcgatgccgaccgccccgacgcctatacagctcttgtaactgcaaccctggggggcgaggagctggaacccgcgcctagtctgcctcgtcccctgcccgctactgtgggggtgacccagccttaccttgacagactgggctaccgaaggacggatcacgacgacccagcttttaagaggaatggatttcgcataaatctcgccaaacctcgaccaggcgatccagctgaagccaatggacccgtttacccttggagatcgctgcgcgaatgccagggagcacctgtgaccgcatctcattttcggtttgccagggtcgaggccgataagtatgagtacaacgtcgtgcccttccgcgaaggcacgcctgcctcctggacaggagacctgctggcatggtggccaaaccctcaagagtttcgcgcttgctttcttaaggtaaagatccaagggccccaggagtatatggtaaggagtcacaatgccggtggctcccacccccggactcgaggccagctttatggcttgagagatgcacgttctgttagagaccccgagaggcccggaactagcgctgcatgcgtggagtttaagtgttcaggtatgctctttgatcagaggcaggtagacaggaccctggtcaccattatgccccagggcagctgtcgaagagttgccgtgaatgggctcctacgggactacttaacacgccaccccccgcccgtccccgctgaagatcctgccgcttttagtatgctggccccacttgaccccctgggacataattatggagtttacacagtcaccgatcagagtccaaggttggccaaggaaatagccatcgggcgctgcttcgacgggagttccgacggtttttctcgggaaatgaaggcagatgccggaaccgccgtgacatttcagtgcagggaacccccggctgggaggcccagcctctttcagaggctgcttgagagtcccgccacagctttgggcgacattaggagagagatgtcagaggctgcccaagcacaagcacgggcaagcggccctctgaggacccgaaggggccgtgtaagacagtag

SEQ ID NO: 245464 - DNA, 3471 bp, Artificial Sequence
  derived and/or modified sequence
atggcgtcgctgctaccactcctatgtctgtgcgtggtcgctgcacacttggctggcgcacgagatgcgacacccactgaagaaccaatggccaccgccttggggctcgagcgcagatctgtgtacaccggccagccatcccccgctctggaggattgggaggaggccagcgagtggaccagttggtttaatgtggatcatccaggcggtgacggcgattttgaatcactcgctgccatccggttttactacgggccagccagggtctgcccacggccactggcacttgaagcccgaacaacggattgggctctgccttctgccgtgggggaaagagtgcatctaaaccctacacggggattttggtgtctgaatcgcgagcagcctcgtggcaggaggtgttccaactaccatgttaggttccgttgccctctagaggcatcttggggagcctggggtccttggggtccttgcagtgggtcttgtggaccagggagacgactgagaaggaggcactgtccttcgccggctggggacgcctgcccaggccgacccctggaagcgcagaagtgtgtgagacccaggtgcccaggatgctctttggatacatgcgagtgccctgaccatattctgctcggatctgtggttactccttctggccagccgctgctcggcgcacgtgtctccttgcgtgatcaacccggaacagtagccaccagcgacgcacacgggacgtttcgggttcctggcgtgtgtgctgattctcgggcaaacatccgcgcacagatggatggtttctcagccggagaggctcaggctcaggccaacggctccatctcagtggtcaccataatcctcgataaactggaaaagccttatcttgtgaaacatccagaaagtcgtgtgagagaagctggtcagaatgtgactttttgttgcaaagcctctggcactccaatgcccaagaaatatagctggttccataatggcactctactcgatcggagggcgcacggttacggggctcacctggagctccgcggactgcgccctgaccaggccggaatatatcactgtaaagcatggaatgaggcaggggcagtgcgctccggcaccgctagactaaccgtgctggcgccaggccagccagcttgcgatccaagacctagagagtacctgatcaaacttccagaagattgcggtcagcccggatcagggccagcctatttagatgtgggcctttgccccgatacacggtgtccatctctggccggttcaagcccgaggtgcggcgacgccagttcacgatgctgttctgtccgaagattggagcggagagagattcattgccccggatatgtgcttcccgtcaaggttgtggccgagtgtggctgtcagaagtgccttccgccaaggggacttgtgcggggtcgcgtggtcgccgctgattcaggagaaccactgaggttcgctcggattcttctggggcaagagcccattggcttcaccgcttaccagggcgactttacgatcgaggtcccaccctcaactcagcgtctcgtcgtcacctttgtggatcctagtggcgagttcatggatgcggtccgggtgctgccattcgaccccaggggggcaggggtttatcatgaagtgaaggccatgcgcaaaaaggctcctgttattctgcacacatcccagtccaacacaattccactcggggagctggaagacgaagcccctttgggagagctggtcctgcccagcggcgcattcagaagagcagacggcaagccatactcaggtcccgtggaggctcgcgtgactttcgtggatccacgtgacctgacctctgcagccagcgctccatcagatttgcggttcgttgactcagacggcgagctagctcctctgcggacatacggcatgttcagcgtggatctgcgagcccctggcagcgcagagcagctgcaagtgggtcctgtcgccgttcgcgtggccgctagtcaaatccatatgcccggacacgttgaggctcttaagctttggtccctcaatcctgagaccggactgtgggaggaagaatctgggttccggagagaaggctcaagcggcccaagagtgaggcgagaggagcgtgtctttctggtggggaatgtggagataagggagcgcagactgtttaatttggatgtacctgagcgtaggaggtgttttgtaaaagttcgcgcttatgcaaatgataaattcacacctagcgagcaggttgaaggcgtcgttgtcaccctggtgaacctcgagcccgctcccggtttttcggccaatccaagagcctggggcagattcgatagcgcagtgaccggaccaaacggagcatgcttacctgcattttgcgacgctgatcgtccagatgcatacaccgccttggtgaccgccacattgggcggagaagagctggagccagccccatccctaccacggcctcttccagccaccgtgggtgtcactcagccttatctggaccggctgggatatcgacggaccgaccacgatgaccccgcttttaagagaaacggcttccggattaatttggcgaagccaagacccggagatcccgctgaagcgaatgggccagtttacccctggcgatcactccgtgagtgccaaggtgctcccgtcaccgctagccattttagattcgctcgcgtggaggccgacaaatacgagtacaacgtcgtccctttccgggaggggactccggcatcatggacaggcgatctcttagcatggtggcccaatcctcaggagtttcgcgcatgcttcctgaaagtgaaaatccaggggccacaggaatacatggtgcgttcccataatgccggagggtcgcatccaagaaccaggggtcagctgtacggactgagagacgctagaagcgtgcgggatccggaaaggcctgggaccagcgccgcttgcgtcgagttcaagtgttctgggatgctgttcgaccaacggcaagtggacagaacgttagtgaccattatgcctcagggatcatgtaggagagtcgccgtaaacggcttgttgcgagactatcttacccgtcatccccctcctgtgcctgctgaagatcctgccgctttctctatgttagctcccttggatccattgggtcacaactatggcgtctacaccgttactgaccagagccctagactggccaaggagattgctattggacgatgcttcgatggatcatccgatgggtttagtagggagatgaaagcggatgccggaacagctgtgactttccagtgtagagaaccacctgctggtcgccctagtctcttccagagactgctggagagccccgcaacagctctgggtgatattaggagagaaatgagcgaggcagctcaggcacaggcgcgtgcgtctgggcctttgcggaccagaagagggagggttcggcagtag

SEQ ID NO: 245465 - DNA, 4199 bp, Artificial Sequence
  derived and/or modified sequence
agtcccagcggccgccagacccgccggagttggacccgagcacgccgcggagcccggaccctccctcggacgctctgccccggccatggcgtcgctgctgccactgctctgtctctgtgtcgtcgctgcgcacctggcgggggcccgagacgccacccccaccgaggagccaatggcgactgcactgggcctggaaagacggtccgtgtacaccggccagccctcaccagccctggaggactgggaagaggccagcgagtggacgtcctggttcaacgtggaccaccccggaggcgacggcgacttcgagagcctggctgccatccgcttctactacgggccagcgcgcgtgtgcccgcgaccgctggcgctggaagcgcgcaccacggactgggccctgccgtccgccgtcggcgagcgcgtgcacttgaaccccacgcgcggcttctggtgcctcaaccgcgagcaaccgcgtggccgccgctgctccaactaccacgtgcgcttccgctgcccactagaagcctcgtggggcgcgtggggcccgtggggtccctgctcggggagctgtgggccaggccgtcgcttgcgccgccgccactgcccaagccccgctggggatgcgtgtcccgggcgtcctctggaggcgcagaagtgcgtgcggcctcggtgtccagggtgcagccttgacacctgtgaatgcccggaccacatcctcctgggctcggtggtcaccccatctgggcaaccactgctaggagccagggtctccctgcgagaccagcctggcactgtggccaccagcgatgctcacggaaccttccgggtgcctggtgtctgtgctgacagccgcgccaacatcagggcccagatggatggcttctctgcaggggaggcccaggcccaggccaacggatccatctctgtggtcaccatcatccttgataagttggagaagccgtacctggtgaaacaccctgagtcccgagtgcgagaggctggccagaatgtgactttctgctgcaaagcctccgggacccccatgcccaagaaatactcctggttccacaatgggaccctgctggacaggcgagctcatgggtacggggcccacctggagctgcggggactgcgcccagaccaggctggcatctaccactgcaaggcatggaatgaggcgggtgccgtgcgctcgggcactgcccggctcactgtacttgccccaggccagccagcctgcgacccccggccccgagagtacctgatcaagctccctgaggactgtggtcagccaggtagtggccctgcctacctggatgtgggcctctgtcccgacacccgctgccccagcctggcaggctccagcccccgctgcggggacgccagctcccgctgctgctctgtgcgccgtctggagagaagggagattcactgccctggctacgtcctcccagtgaaggtggtggcagagtgtggctgccagaagtgtctgccccctcgggggctggtccggggccgtgttgtggctgctgactccggggagccgctacgcttcgccaggattctgctgggccaggagcccatcggcttcaccgcctaccagggcgactttaccattgaggtgccgccctccacccagcggctggtggtgacttttgtggaccccagcggtgagttcatggacgctgtccgggtcttgccttttgatcctcgaggtgccggcgtgtaccacgaggtcaaggccatgcggaagaaagccccggtcattttacataccagccagagcaacacgatccccctgggcgagctggaagatgaggcgcccctgggcgagctggtcctgccttctggcgctttccgcagagccgacggcaaaccctactcggggcctgtggaggcccgggtgacgttcgtggacccccgagacctcacctcggcggcgtctgcccccagtgacctgcgcttcgtggacagcgacggcgagctggctccactgcgcacctacggcatgttctccgtggacctccgtgcgcccggctccgcggagcagctgcaggtggggccggtggccgtgcgggtggccgccagccagatccacatgccaggccacgtggaggccctcaagctgtggtcgctgaaccccgagaccggcttgtgggaggaggagagcggcttccggcgcgaggggtcctcgggcccccgggtgcgccgggaggagcgcgtcttcctggtgggcaacgtggagatccgggagcggcgcctgttcaatctggacgtgcctgagcgccgccgctgcttcgtgaaggtgcgcgcctacgccaacgacaagttcacccccagcgagcaggtggagggcgtggtggtcacgctggtcaatctggagcccgcccccggcttctccgccaacccccgtgcctggggccgctttgacagcgcggtcaccggccccaatggcgcctgcctccccgccttctgcgacgccgacaggccagacgcctacaccgccctggtcaccgccaccctgggcggcgaggagctggagccggccccttccttgccccgcccactcccggccaccgtgggcgtcacccagccctacctggacaggctggggtaccgtcggacggaccacgacgatcccgccttcaagcgtaacggcttccgcatcaacctcgccaagcccaggccaggtgaccccgccgaggccaatgggcctgtgtacccgtggcgcagcctgcgggaatgccagggggccccggtgactgccagccacttccgcttcgccagggtggaggcggacaagtacgagtacaacgtggtccccttccgagagggcacacctgcctcctggactggcgatctcctggcctggtggcccaacccgcaggagttccgggcctgcttcctcaaggtgaagatccagggtccccaggagtatatggtccgctcccacaacgcagggggcagccacccacgcacccgcggccagctctacggacttcgggatgcccggagtgtgcgagaccccgagcgtccgggcacctcggcagcctgcgtggagttcaagtgcagcgggatgctgttcgaccagcggcaggtggacaggacgctggtgaccattatgccccagggcagctgccggcgcgtggccgtcaacggactccttcgggattacctgacccggcaccccccaccggtgcccgcggaggacccagctgccttctccatgctggcccccctagaccctctgggccacaactatggcgtctacactgtcactgaccagagcccacgcttggccaaggagatcgccattggccgctgctttgatggttcctctgacggcttctccagagagatgaaggctgatgccggcacagccgtcaccttccagtgccgggagccaccggccggacgacccagcctcttccagaggctgctggagtccccggcgacagcacttggtgacatccgcagggagatgagcgaggcggcgcaggcacaggcccgggcctcaggtcccctccgcacccgccggggtagggtccggcagtgacctgggcaggggcctcgctttcccacctccctccagactcctttgaccccaggaagttttgcccctccttcttctccagacagccccctccccaggtgtctgggtcccctttcccgcccctttccagaactcagagtcagacaagaacccagagcatccgatggtagaaacaccaggaagacaattgttgctgtgtggtatggaatggagtttgcggtgactctggggccagcacccaggggacgacgttcaaccctagcctgaagggacccgctcccagctcagaagccgtctctgacttctcgtgcgtattttgaccctgatttcaatcttctacccttgggagttctggcgtttggcacaaagtcccctctgcctgtttggagctcagtgctagaccaggtcccctgccccgagctttgtttttggggttatttattgaaacaaagtgtggggagctggttgtgggtgtgagtgggggtgtggggtccaggctgggcccagtgaaaaggaggaaggggttcccatgcgggggaggctctggggctgaggggaacaattctcacgtgtttggtgcttagagacctgcccggggcgttgggcaggccctccgggggctgaattaaaaatgctttatttccaa

SEQ ID NO: 245466 - DNA, 3471 bp, Artificial Sequence
  derived and/or modified sequence
atggccagcctgctgcccctgctgtgcctgtgcgtggtggccgcccacctggccggcgccagagacgccacccccaccgaggagcccatggccaccgccctgggcctggagagaagaagcgtgtacaccggccagcccagccccgccctggaggactgggaggaggccagcgagtggaccagctggttcaacgtggaccaccccggcggcgacggcgacttcgagagcctggccgccatcagattctactacggccccgccagagtgtgccccagacccctggccctggaggccagaaccaccgactgggccctgcccagcgccgtgggcgagagagtgcacctgaaccccaccagaggcttctggtgcctgaacagagagcagcccagaggcagaagatgcagcaactaccacgtgagattcagatgccccctggaggccagctggggcgcctggggcccctggggcccctgcagcggcagctgcggccccggcagaagactgagaagaagacactgccccagccccgccggcgacgcctgccccggcagacccctggaggcccagaagtgcgtgagacccagatgccccggctgcagcctggacacctgcgagtgccccgaccacatcctgctgggcagcgtggtgacccccagcggccagcccctgctgggcgccagagtgagcctgagagaccagcccggcaccgtggccaccagcgacgcccacggcaccttcagagtgcccggcgtgtgcgccgacagcagagccaacatcagagcccagatggacggcttcagcgccggcgaggcccaggcccaggccaacggcagcatcagcgtggtgaccatcatcctggacaagctggagaagccctacctggtgaagcaccccgagagcagagtgagagaggccggccagaacgtgaccttctgctgcaaggccagcggcacccccatgcccaagaagtacagctggttccacaacggcaccctgctggacagaagagcccacggctacggcgcccacctggagctgagaggcctgagacccgaccaggccggcatctaccactgcaaggcctggaacgaggccggcgccgtgagaagcggcaccgccagactgaccgtgctggcccccggccagcccgcctgcgaccccagacccagagagtacctgatcaagctgcccgaggactgcggccagcccggcagcggccccgcctacctggacgtgggcctgtgccccgacaccagatgccccagcctggccggcagcagccccagatgcggcgacgccagcagcagatgctgcagcgtgagaagactggagagaagagagatccactgccccggctacgtgctgcccgtgaaggtggtggccgagtgcggctgccagaagtgcctgccccccagaggcctggtgagaggcagagtggtggccgccgacagcggcgagcccctgagattcgccagaatcctgctgggccaggagcccatcggcttcaccgcctaccagggcgacttcaccatcgaggtgccccccagcacccagagactggtggtgaccttcgtggaccccagcggcgagttcatggacgccgtgagagtgctgcccttcgaccccagaggcgccggcgtgtaccacgaggtgaaggccatgagaaagaaggcccccgtgatcctgcacaccagccagagcaacaccatccccctgggcgagctggaggacgaggcccccctgggcgagctggtgctgcccagcggcgccttcagaagagccgacggcaagccctacagcggccccgtggaggccagagtgaccttcgtggaccccagagacctgaccagcgccgccagcgcccccagcgacctgagattcgtggacagcgacggcgagctggcccccctgagaacctacggcatgttcagcgtggacctgagagcccccggcagcgccgagcagctgcaggtgggccccgtggccgtgagagtggccgccagccagatccacatgcccggccacgtggaggccctgaagctgtggagcctgaaccccgagaccggcctgtgggaggaggagagcggcttcagaagagagggcagcagcggccccagagtgagaagagaggagagagtgttcctggtgggcaacgtggagatcagagagagaagactgttcaacctggacgtgcccgagagaagaagatgcttcgtgaaggtgagagcctacgccaacgacaagttcacccccagcgagcaggtggagggcgtggtggtgaccctggtgaacctggagcccgcccccggcttcagcgccaaccccagagcctggggcagattcgacagcgccgtgaccggccccaacggcgcctgcctgcccgccttctgcgacgccgacagacccgacgcctacaccgccctggtgaccgccaccctgggcggcgaggagctggagcccgcccccagcctgcccagacccctgcccgccaccgtgggcgtgacccagccctacctggacagactgggctacagaagaaccgaccacgacgaccccgccttcaagagaaacggcttcagaatcaacctggccaagcccagacccggcgaccccgccgaggccaacggccccgtgtacccctggagaagcctgagagagtgccagggcgcccccgtgaccgccagccacttcagattcgccagagtggaggccgacaagtacgagtacaacgtggtgcccttcagagagggcacccccgccagctggaccggcgacctgctggcctggtggcccaacccccaggagttcagagcctgcttcctgaaggtgaagatccagggcccccaggagtacatggtgagaagccacaacgccggcggcagccaccccagaaccagaggccagctgtacggcctgagagacgccagaagcgtgagagaccccgagagacccggcaccagcgccgcctgcgtggagttcaagtgcagcggcatgctgttcgaccagagacaggtggacagaaccctggtgaccatcatgccccagggcagctgcagaagagtggccgtgaacggcctgctgagagactacctgaccagacaccccccccccgtgcccgccgaggaccccgccgccttcagcatgctggcccccctggaccccctgggccacaactacggcgtgtacaccgtgaccgaccagagccccagactggccaaggagatcgccatcggcagatgcttcgacggcagcagcgacggcttcagcagagagatgaaggccgacgccggcaccgccgtgaccttccagtgcagagagccccccgccggcagacccagcctgttccagagactgctggagagccccgccaccgccctgggcgacatcagaagagagatgagcgaggccgcccaggcccaggccagagccagcggccccctgagaaccagaagaggcagagtgagacagtag

SEQ ID NO: 245467 - protein, 986 aa, Artificial Sequence
  derived and/or modified sequence
MVSKSDQLLIVVSILEGRHFPKRPKHMLVVEAKFDGEQLATDPVDHTDQPEFATELAWEIDRKALHQHRLQRTPIKLQCFALDPVTSAKETIGYIVLDLRTAQETKQAPKWYQLLSNKYTKFKSEIQISIALETDTKPPVDSFKAKGAPPRDGKVPAILAGLDPRDIVAVLNEEGGYHQIGPAEYCTDSFIMSVTIAFATQLEQLIPCTMKLPERQPEFFFYYSLLGNDVTNEPFNDLINPNFEPERASVRIRSSVEILRVYLALQSKLQIHLCCGDQSLGSTEIPLTGLLKKGSTEINQHPVTVEGAFTLDPPNRAKQKLAPIPVELAPTVGVSVALQREGIDSQSLIELKTQNEHEPEHSKKKVLTPIKEKTLTGPKSPTVSPVPSHNQSPPTKDDATESEVESLQYDKDTKPNPKASSSVPASLAQLVTTSNASEVASGQKIAVPATSHHFCFSIDLRSIHALEIGFPINCILRYSYPFFGSAAPIMTNPPVEVRKNMEVFLPQSYCAFDFATMPHQLQDTFLRIPLLVELWHKDKMSKDLLLGIARIQLSNILSSEKTRFLGSNGEQCWRQTYSESVPVIAAQGSNNRIADLSYTVTLEDYGLVKMREIFISDSSQGVSAVQQKPSSLPPAPCPSEIQTEPRETLEYKAALELEMWKEMQEDIFENQLKQKELAHMQALAEEWKKRDRERESLVKKKVAEYTILEGKLQKTLIDLEKREQQLASVESELQREKKELQSERQRNLQELQDSIRRAKEDCIHQVELERLKIKQLEEDKHRLQQQLNDAENKYKILEKEFQQFKDQQNNKPEIRLQSEINLLTLEKVELERKLESATKSKLHYKQQWGRALKELARLKQREQESQMARLKKQQEELEQMRLRYLAAEEKDTVKTERQELLDIRNELNRLRQQEQKQYQDSTEIASGKKDGPHGSVLEEGLDDYLTRLIEERDTLMRTGVYNHEDRIISELDRQIREILAKSNASN

SEQ ID NO: 245468 - protein, 380 aa, Artificial Sequence
  derived and/or modified sequence
MVSKSDQLLIVVSILEGRHFPKRPKHMLVVEAKFDGEQLATDPVDHTDQPEFATELAWEIDRKALHQHRLQRTPIKLQCFALDPVTSAKETIGYIVLDLRTAQETKQAPKWYQLLSNKYTKFKSEIQISIALETDTKPPVDSFKAKGAPPRDGKVPAILAGLDPRDIVAVLNEEGGYHQIGPAEYCTDSFIMSVTIAFATQLEQLIPCTMKLPERQPEFFFYYSLLGNDVTNEPFNDLINPNFEPERASVRIRSSVEILRVYLALQSKLQIHLCCGDQSLGSTEIPLTGLLKKGSTEINQHPVTVEGAFTLDPPNRAKQKLAPIPVELAPTVGVSVALQREGIDSQDAFWYSALDIIFPLFIFLFLVLDAIRKFANYEEK

SEQ ID NO: 245469 - DNA, 2961 bp, Artificial Sequence
  derived and/or modified sequence
atggtcagcaaatctgaccaactactcattgttgtgtcaatcctcgagggacgccattttcccaagcggccaaagcacatgcttgtggtggaggcaaaattcgacggcgagcagttagctactgaccccgttgatcacaccgaccagcctgaatttgccacagagcttgcttgggaaatcgaccgcaaagccctgcatcagcatcgcctgcagcgaacccctattaaactccagtgcttcgccctggatccggtgacctctgccaaagagaccatcggttatatcgtgttggatctgagaacggcacaggaaaccaagcaagctccgaaatggtatcaactcctctcgaacaaatacactaagtttaaatccgaaattcagatcagcatcgcattggagacggacaccaagcctcctgttgactctttcaaggccaaaggggcacctccaagggacggcaaagtgccagctatcctggcaggacttgatccaagagatatcgtggccgtgttaaacgaggaaggaggatatcatcagattgggcctgcggaatattgtacagactcatttattatgagcgtcacaatagcctttgccacccagctcgagcagttaatcccttgcaccatgaagttacctgaacggcagcccgaatttttcttttattactcccttttaggtaatgatgtcaccaatgaaccgttcaacgacctgattaaccccaatttcgagccagagagagccagcgtgagaattcgaagcagcgtggaaattctgagagtatacctcgccctgcagagcaagttgcaaatccatctttgctgcggcgaccagtcactcgggtcgactgagattcctctcaccggactgttgaagaagggctccacggagataaatcagcatccggtaaccgtggaaggagctttcactctcgatcctcccaacagggcaaaacagaagcttgcaccaatccccgtagaattggctccaaccgttggcgtgtctgtggctcttcagcgggagggtatcgactcgcagtcgttaatagaactgaagacccagaatgagcatgaaccagaacactctaagaagaaagtgctgaccccaatcaaggagaagacacttaccggtcccaaatcacccactgtaagccccgtccctagccataaccaatccccccctactaaagacgacgcaactgagtctgaagtggagagcctccaatacgacaaggatactaaaccaaaccctaaggctagctcatccgtccctgccagtctcgcacagctggtcactacctccaatgcgagcgaggtcgcctctggtcagaaaatcgccgtgccagccacttcacaccacttctgtttcagcatagacctgaggtctatacatgccctagagataggctttccaatcaactgcatccttcgctatagctaccccttcttcgggagtgcagcccccatcatgaccaatccccctgttgaggtgcgcaagaatatggaagtgtttctacctcagagctattgcgctttcgacttcgccaccatgcctcaccagttgcaggatacctttttgcgcatccctcttctggttgagttgtggcataaggacaagatgtccaaggacctgctgctgggcattgcccgcatccagctttccaatatcttatcatccgagaaaacccgatttctgggatccaatggcgaacagtgttggaggcagacatacagcgaaagtgtgccagttattgctgcccaaggatcaaataaccggattgcagatctgagctacacggttactctggaagactatggactggtcaagatgagggagatcttcatctctgactcctctcagggagtctcagcagtgcagcagaagcccagcagtctgcctcctgcaccttgccccagtgagatccaaaccgaacctcgggaaacactcgaatataaggccgccctagagctggagatgtggaaagagatgcaggaagacatattcgaaaaccaactgaaacagaaagagctggcccatatgcaggccctcgccgaggaatggaaaaaaagggaccgcgaaagagagtcacttgtgaagaaaaaggtagctgagtataccatcctcgaggggaagctacaaaagactcttatcgacttggagaagagggagcagcaattggcaagcgtggagtccgaactgcaacgcgaaaaaaaggagctgcagtccgaaagacaaagaaacctgcaagagttgcaggattccattcggcgagccaaggaagattgtattcaccaggtggagcttgagcgcctcaagatcaagcaattggaagaggacaaacatagattacagcagcagttgaatgacgcagaaaataagtacaagatccttgagaaagaatttcagcaatttaaggatcagcagaataacaaaccagaaatcaggctacagtccgagatcaacttactgacactggagaaagtggagctggaacgaaaactggagtccgctacgaagagcaagctgcactacaaacagcagtggggcagggccctgaaggagctcgccaggctgaaacagagggagcaggagtcccagatggcccggctcaagaagcagcaggaggagcttgagcaaatgcggctgcgatacctggcggccgaggagaaggatacggttaaaaccgaaagacaggaactgctggatattcgaaacgagctcaatagacttcgccagcaggagcaaaaacagtatcaggactcaactgagatagcttccgggaagaaggatggtccccacggctctgttcttgaagaaggactagacgactacctgacacgactgattgaggaaagagacaccttaatgcgaaccggtgtttataaccacgaagatcggattatatctgagctggaccggcagatacgtgagatccttgcaaagagtaatgcaagtaattag

SEQ ID NO: 245470 - DNA, 2883 bp, Artificial Sequence
  derived and/or modified sequence
atgttagtcgtcgaagccaagtttgacggcgagcagctggcaacagaccccgtggaccataccgaccaacctgagttcgccactgagcttgcctgggagattgatagaaaagctcttcatcagcacagactgcaacgcacgccgatcaaactgcaatgcttcgctctcgacccagtcacgtctgctaaggagaccatagggtacatagtgctggatctgcgcaccgctcaagagaccaagcaggcacccaagtggtaccagctgctgtctaacaaatatacaaaattcaagtcggaaattcaaattagcattgcccttgagactgacaccaaacctccagtggattcttttaaagcgaagggtgcgccaccgagagatgggaaggtgcccgctatcctggcgggcctagacccccgcgatatcgtcgccgtactcaacgaggagggcggataccaccagatcggtcctgcagagtattgtactgactcattcattatgagtgtgactatagcttttgcaacacagctggagcagctcattccatgcacaatgaaactgccggagagacagccggaattcttcttctactatagcctactcggtaatgatgttaccaacgaaccatttaacgatctgataaacccgaactttgaaccggaaagagccagtgtgaggattagaagcagtgtggaaatactaagggtataccttgccctgcaaagcaagttgcaaattcacttatgttgtggagaccagagtcttggcagtaccgaaattccgcttactgggttactcaagaaagggtccacagaaattaaccagcaccccgtgaccgtggaaggcgccttcaccctggacccacccaacagagcaaaacaaaagctggcacctatccccgtagagctggctcccaccgtcggcgtgtccgtcgccttgcagcgcgagggcattgactcccagtctctcattgagctgaaaactcaaaacgagcacgagcctgaacatagtaagaaaaaagtgctcacacccatcaaggaaaagacattgacgggccctaaaagtcctaccgtgtcgccagtgccttcccacaatcagagcccccccacaaaggacgatgccacagaaagcgaggtggagtctttgcagtacgataaagacaccaaaccaaaccccaaagcatcctccagcgtcccagctagtctggcacaattggtgactacttccaatgctagcgaggtcgcatccggccagaagatcgctgtcccggctacgtcgcatcatttctgctttagcattgacctcagatccatccatgccctggagatcggtttccccataaactgtattctgcgctactcctatccctttttcggttccgcagcccctattatgacgaatcccccagtggaagtcaggaagaatatggaggtttttcttcctcagtcctactgcgcatttgactttgctacgatgccccaccagttgcaggacaccttcctgcgaatccctttgctcgtcgaactgtggcacaaggataaaatgtccaaggatttactgctcgggattgcgagaattcagctttcaaatatcctgtccagtgaaaagacccggtttctcgggagcaacggtgagcagtgctggcgccagacctactctgagagtgtccctgtcattgccgcccagggatccaataaccgaattgctgacctatcttacactgtgacccttgaagattacggcctagtaaaaatgcgcgaaatttttattagcgattcgtcgcagggtgtgagtgctgtgcaacagaaaccttcatcgctgccccctgctccctgtccctctgagatccagaccgagcctcgggagacacttgaatacaaagcagccctggaattagagatgtggaaagagatgcaggaggatattttcgaaaaccagctcaagcagaaagagttggcccacatgcaggctctcgcagaggagtggaaaaagagagatcgcgagagagaatcactcgtgaagaagaaagtggctgagtacactatcctggagggaaagctccagaagaccctgattgacttggaaaagcgagagcagcagcttgcttccgtggagtctgaactgcaaagagagaagaaagaactccagagtgagcggcagcgaaatttacaagagctccaggactccatccgtcgggcaaaggaagactgtattcaccaggtggaactcgagcggcttaagattaagcaactggaggaggataagcatcgactccagcagcagttgaatgacgctgagaacaaatataagatcctcgagaaggagttccagcaattcaaagaccagcagaacaacaagcctgaaattcggctccagagcgaaatcaatttgctaactctagagaaagtggagttagagaggaagctggagtcggcaaccaaaagtaaactacattacaagcagcagtggggcagagcgctcaaggaacttgctcggctgaagcagcgagaacaggagtcccaaatggctagactaaagaaacaacaggaggagctggagcagatgcggctacgttacttagcggccgaggaaaaagacacagtgaagactgaaagacaggagctgcttgatatcagaaatgaactgaatcgtctgagacaacaagaacaaaaacagtaccaggacagtacggagatcgcaagtggcaaaaaagacggaccacatggcagcgtcctggaggaggggttggatgattacctgaccagattgatcgaagaaagagacacgttaatgagaaccggagtgtacaatcacgaggatagaatcatttctgagctcgatcggcagatacgcgaaatcttagctaagagtaacgcctccaactag

SEQ ID NO: 245471 - DNA, 2961 bp, Artificial Sequence
  derived and/or modified sequence
atggtctccaagtccgatcagctgttgattgtggtttctattctggaaggacgccattttcccaagaggcccaagcacatgctcgtggtggaggctaagttcgatggggaacagctggctaccgaccctgtcgaccacaccgaccagccagaattcgccactgaactggcctgggagatcgaccggaaggcactccaccagcaccggctgcagaggacccccatcaaacttcagtgcttcgccctggatcccgtgacaagcgccaaggagaccataggatacatcgtgttagacttgagaacagctcaagaaactaaacaggcccccaagtggtaccagctgttgtcgaacaagtataccaagtttaagtctgagattcagatttcgattgcgcttgaaactgacacaaagccgcctgttgacagctttaaggccaagggagcccctcctcgcgacggcaaggtgcccgcaatcttggccggattggacccaagagacatcgtcgccgtcctgaatgaggagggaggctaccatcagattggacccgcggagtactgcacagatagcttcattatgtcggtaactattgccttcgcaacacaactggagcagctgataccatgcaccatgaagttgcccgagagacaaccagaattctttttctactactccttgctgggaaacgacgtgacaaatgagccttttaacgaccttataaatcccaatttcgagcctgagcgagcttctgtcagaatcagaagctcggtcgagatcctgagagtatatctggccttacagtccaagttacagattcacctgtgctgcggcgatcaatctctggggtctaccgaaatcccactgactggccttctcaaaaagggttccacagaaattaatcagcatcctgtcacggtggaaggagccttcacacttgatccacccaatagggcaaagcagaagttggctccaatccccgtggagctggcacccactgtaggtgtcagtgtggccttgcagcgagaagggatcgattcccagagcctgatcgagttgaaaacccaaaatgaacacgagcctgagcactctaagaagaaggtactgacgcccattaaagaaaaaacacttacggggcctaagtctcccaccgtgtctcctgtgcccagtcacaaccaatcaccccctaccaaagacgacgcaaccgagagtgaagtggaaagcttacagtacgataaagacaccaaacctaatccaaaggccagttcttcggtgcctgcatccctggctcagcttgtcaccaccagtaatgcaagtgaagtggcctctggacagaagatcgccgtgcccgccacctcccaccacttctgcttttccatagacctgaggagcattcatgcactcgagatcggtttcccaatcaactgcatcctcaggtacagttatcccttttttggctctgccgctcctatcatgaccaaccccccagtggaagtgagaaaaaacatggaagtctttcttccacagtcttactgtgcttttgacttcgcaactatgccccaccagcttcaagatacatttctgcggatacctcttctcgtcgagctctggcacaaggataagatgtccaaagacctactgctgggaattgccagaatacagctcagcaacatactctcgagcgagaagactaggtttctcggaagcaacggcgagcagtgttggcggcagacctacagcgaaagcgttcccgtgatcgctgctcaggggagcaataatcgaattgccgacctaagttacacagtcactctggaggattacgggctagtaaagatgagagaaatttttatcagtgacagttcacagggcgtgtctgccgtgcagcagaagccatcgtctctcccccccgctccgtgcccatcagagatacagaccgaaccccgcgagacactcgagtataaggctgctttggagttggagatgtggaaggaaatgcaagaggatatctttgagaatcaactgaaacaaaaggagctggcccatatgcaggccctggccgaagagtggaaaaaaagggaccgagagagggagagtcttgtcaaaaagaaagtcgcagaatatactatcctcgaaggaaaattacagaaaacactgatcgatcttgaaaaacgagaacagcagctggccagtgtcgaaagcgaacttcaacgcgagaaaaaagagctccagagtgagcggcagcgtaatctccaggaacttcaagattctattcgaagagccaaagaggactgcattcaccaggtcgagcttgaaaggcttaaaatcaaacaactggaggaagataagcaccgccttcagcagcaactgaatgatgcagagaacaagtacaagatactggagaaagagtttcagcaatttaaggatcagcaaaataacaagcctgaaattagattacagtctgagatcaatctcctgacattggaaaaggttgagcttgagagaaaactggagtccgcaaccaaaagtaagcttcactacaaacagcaatgggggcgtgccctcaaggaattggccaggctgaaacagcgcgagcaagaatctcaaatggcccgactgaaaaagcagcaagaggagttggagcaaatgagactcagataccttgccgcagaggaaaaggacaccgtgaagactgagagacaggagctcctggacattcgcaatgagctaaataggttgcgccagcaagagcagaagcagtatcaggactctaccgagatcgcctctggtaagaaagacggcccccatgggtccgtcttagaggaggggctggacgattacttaacccgcctgatcgaggagagagacaccctcatgcgcacaggcgtgtacaaccacgaggacaggattatcagcgaattagaccggcagatccgggaaatcctcgcgaagtctaatgcatcaaactag

SEQ ID NO: 245472 - DNA, 2961 bp, Artificial Sequence
  derived and/or modified sequence
atggtgtccaagagtgaccagctgctgattgtggtgtccatcctggagggccgccacttccccaagaggcccaagcacatgctggtggtggaggccaagtttgatggagagcagctggccacagatcctgtggaccacacagaccagcctgagtttgccacagagctggcctgggagattgacaggaaggccctgcaccagcaccggctgcagaggacccccatcaagctgcagtgctttgccctggaccctgtgaccagcgccaaggagaccatcggctacatcgtgctggacctgaggacagcccaggagaccaagcaggcccccaagtggtaccagctgctgagcaacaagtacaccaagttcaagtctgagatccagatcagcatcgccctggagacagacaccaagccccctgtggacagcttcaaggccaagggggcccccccaagagatggcaaggtgcctgccatcctggccggcctggacccccgggacatcgtggccgtgctgaatgaggagggcggctaccaccagatcggccctgctgagtactgcacagacagcttcatcatgtctgtgaccatcgcctttgccacccagctggagcagctgatcccctgcaccatgaagctgcctgagcggcagcctgagttcttcttctactacagcctgctgggcaatgatgtgaccaatgagcccttcaatgacctgatcaaccccaactttgagcctgagcgggcctctgtgcgcatccgcagctctgtggagatcctgcgggtgtacctggccctgcagagcaagctgcagatccacctgtgctgcggggaccagagcctgggcagcacagagatccccctgaccggcctgctgaagaagggcagcacagagatcaaccagcaccctgtgacagtggagggcgccttcaccctggacccccccaacagagccaagcagaagctggcccccatccctgtggagctggcccccaccgtgggcgtgtctgtggccctgcagcgggagggcatcgacagccagagcctgattgagctgaagacccagaatgaacatgagcctgagcacagcaagaagaaggtgctgacccccatcaaggagaagaccctgaccggccccaagagccccaccgtgtcccctgtgcccagccacaaccagagcccccccaccaaggatgatgccacagagagcgaggtggagagcctgcagtatgacaaggacaccaagcccaaccccaaggccagcagctctgtgcctgccagcctggcccagctggtgaccaccagcaatgccagcgaggtggccagcggccagaagattgctgtgcctgccaccagccaccacttctgcttcagcattgacctgcggagcatccacgccctggagatcggcttccccatcaactgcatcctgcgctacagctaccccttctttggatctgctgcccccatcatgaccaacccccctgtggaggtgaggaagaacatggaggtgttcctgccccagagctactgtgcctttgattttgccaccatgccccaccagctgcaggacaccttcctgcgcatccccctgctggtggagctgtggcacaaggacaagatgagcaaggacctgctgctgggcatcgcccgcatccagctgagcaacatcctgagcagcgagaagacccgcttcctgggcagcaatggagagcagtgctggaggcagacctacagcgagagcgtgcctgtgattgctgcccagggcagcaacaacagaattgctgacctgagctacacagtgaccctggaggactatggcctggtgaagatgagggagatcttcatcagtgacagcagccagggcgtgtctgctgtgcagcagaagcccagcagcctgcccccagccccctgccccagcgagatccagacagagccccgggagaccctggagtacaaggccgccctggagctggagatgtggaaggagatgcaggaggacatctttgagaaccagctgaagcagaaggagctggcccacatgcaggccctggccgaggagtggaagaagagggaccgggagcgggagagcctggtgaagaagaaggtggccgagtacaccatcctggagggcaagctgcagaagaccctgattgacctggagaagcgggagcagcagctggcctctgtggagagcgagctgcagcgggagaagaaggagctgcagagcgagcggcagaggaacctgcaggagctgcaggacagcatccggcgggccaaggaggactgcatccaccaggtggagctggagcggctgaagatcaagcagctggaggaggacaagcaccggctgcagcagcagctgaatgatgctgagaacaagtacaagatcctggagaaggagttccagcagttcaaggaccagcagaacaacaagccagagatccggctgcagagcgagatcaacctgctgaccctggagaaggtggagctggagaggaagctggagagcgccaccaagagcaagctgcactacaagcagcagtggggccgggccctgaaggagctggcccggctgaagcagcgggagcaggagagccagatggcccggctgaagaagcagcaggaggagctggagcagatgaggctgcgctacctggccgctgaggagaaggacacagtgaagacagagcggcaggagctgctggacatcagaaatgagctgaaccggctgcggcagcaggagcagaagcagtaccaggacagcacagagatcgccagcggcaagaaggatggcccccacggctctgtgctggaggagggcctggatgactacctgacccggctgattgaggagcgggacaccctgatgaggactggagtgtacaaccacgaggaccgcatcatcagcgagctggaccggcagatccgggagatcctggccaagagcaatgccagcaactag

SEQ ID NO: 245473 - DNA, 2883 bp, Artificial Sequence
  derived and/or modified sequence
atgctggtggtggaggccaagtttgatggagagcagctggccacagatcctgtggaccacacagaccagcctgagtttgccacagagctggcctgggagattgacaggaaggccctgcaccagcaccggctgcagaggacccccatcaagctgcagtgctttgccctggaccctgtgaccagcgccaaggagaccatcggctacatcgtgctggacctgaggacagcccaggagaccaagcaggcccccaagtggtaccagctgctgagcaacaagtacaccaagttcaagtctgagatccagatcagcatcgccctggagacagacaccaagccccctgtggacagcttcaaggccaagggggcccccccaagagatggcaaggtgcctgccatcctggccggcctggacccccgggacatcgtggccgtgctgaatgaggagggcggctaccaccagatcggccctgctgagtactgcacagacagcttcatcatgtctgtgaccatcgcctttgccacccagctggagcagctgatcccctgcaccatgaagctgcctgagcggcagcctgagttcttcttctactacagcctgctgggcaatgatgtgaccaatgagcccttcaatgacctgatcaaccccaactttgagcctgagcgggcctctgtgcgcatccgcagctctgtggagatcctgcgggtgtacctggccctgcagagcaagctgcagatccacctgtgctgcggggaccagagcctgggcagcacagagatccccctgaccggcctgctgaagaagggcagcacagagatcaaccagcaccctgtgacagtggagggcgccttcaccctggacccccccaacagagccaagcagaagctggcccccatccctgtggagctggcccccaccgtgggcgtgtctgtggccctgcagcgggagggcatcgacagccagagcctgattgagctgaagacccagaatgaacatgagcctgagcacagcaagaagaaggtgctgacccccatcaaggagaagaccctgaccggccccaagagccccaccgtgtcccctgtgcccagccacaaccagagcccccccaccaaggatgatgccacagagagcgaggtggagagcctgcagtatgacaaggacaccaagcccaaccccaaggccagcagctctgtgcctgccagcctggcccagctggtgaccaccagcaatgccagcgaggtggccagcggccagaagattgctgtgcctgccaccagccaccacttctgcttcagcattgacctgcggagcatccacgccctggagatcggcttccccatcaactgcatcctgcgctacagctaccccttctttggatctgctgcccccatcatgaccaacccccctgtggaggtgaggaagaacatggaggtgttcctgccccagagctactgtgcctttgattttgccaccatgccccaccagctgcaggacaccttcctgcgcatccccctgctggtggagctgtggcacaaggacaagatgagcaaggacctgctgctgggcatcgcccgcatccagctgagcaacatcctgagcagcgagaagacccgcttcctgggcagcaatggagagcagtgctggaggcagacctacagcgagagcgtgcctgtgattgctgcccagggcagcaacaacagaattgctgacctgagctacacagtgaccctggaggactatggcctggtgaagatgagggagatcttcatcagtgacagcagccagggcgtgtctgctgtgcagcagaagcccagcagcctgcccccagccccctgccccagcgagatccagacagagccccgggagaccctggagtacaaggccgccctggagctggagatgtggaaggagatgcaggaggacatctttgagaaccagctgaagcagaaggagctggcccacatgcaggccctggccgaggagtggaagaagagggaccgggagcgggagagcctggtgaagaagaaggtggccgagtacaccatcctggagggcaagctgcagaagaccctgattgacctggagaagcgggagcagcagctggcctctgtggagagcgagctgcagcgggagaagaaggagctgcagagcgagcggcagaggaacctgcaggagctgcaggacagcatccggcgggccaaggaggactgcatccaccaggtggagctggagcggctgaagatcaagcagctggaggaggacaagcaccggctgcagcagcagctgaatgatgctgagaacaagtacaagatcctggagaaggagttccagcagttcaaggaccagcagaacaacaagccagagatccggctgcagagcgagatcaacctgctgaccctggagaaggtggagctggagaggaagctggagagcgccaccaagagcaagctgcactacaagcagcagtggggccgggccctgaaggagctggcccggctgaagcagcgggagcaggagagccagatggcccggctgaagaagcagcaggaggagctggagcagatgaggctgcgctacctggccgctgaggagaaggacacagtgaagacagagcggcaggagctgctggacatcagaaatgagctgaaccggctgcggcagcaggagcagaagcagtaccaggacagcacagagatcgccagcggcaagaaggatggcccccacggctctgtgctggaggagggcctggatgactacctgacccggctgattgaggagcgggacaccctgatgaggactggagtgtacaaccacgaggaccgcatcatcagcgagctggaccggcagatccgggagatcctggccaagagcaatgccagcaactag

SEQ ID NO: 245474 - DNA, 2961 bp, Artificial Sequence
  derived and/or modified sequence
atggtgagcaagagcgaccagctgctgatcgtggtgagcatcctggaaggcagacacttccctaagaggcctaaacacatgctggtcgtcgaggccaaattcgacggagagcagctggctaccgatcctgtggaccataccgaccagcctgagtttgcgacagaactggcatgggagattgatagaaaggccctgcaccagcacagactgcagagaacacctatcaagttgcagtgctttgccctggaccccgtcaccagtgcaaaagagaccattggctatatagtgctggatctccgcaccgctcaggaaactaagcaggccccaaaatggtaccagctcttgtctaacaaatacactaagttcaaatcggaaattcagatatctatagctctggagaccgataccaaacccccagttgactcttttaaggccaaaggagcaccaccgcgggatgggaaggtgcccgccattctcgccgggcttgacccgagggacatcgtagccgtgctgaacgaggagggcggataccatcaaattggccccgccgaatattgtacagactccttcattatgtccgtaaccatcgccttcgccactcagctagagcagttgatcccgtgcacgatgaagcttcccgagcgacaacctgaattttttttctattattcccttctcggcaacgacgtgaccaacgaaccttttaatgacctaataaaccccaacttcgagcctgaacgcgcatcagtgcgcatacggtcaagtgtggagattctgcgagtctaccttgcccttcagtcaaagctgcagattcacctgtgttgtggagaccagagtctaggatcaacagagatccctcttacggggctcctcaagaaaggcagcacagagatcaaccagcacccagtcaccgtcgagggggctttcaccctggacccgcccaaccgggccaagcaaaagctggcgcctattcctgtcgagctggcaccaaccgtgggcgtgtctgtggctcttcagagggagggaatcgactcacaatccctcatcgagttgaagacccagaatgaacacgagcctgaacattcgaagaagaaggtactaacccctattaaggagaagactctgacgggacccaagtctccaacggtttcccctgtgccaagccacaaccaatccccccccacaaaagatgacgctaccgaaagcgaggtggagagtctgcaatatgataaagacaccaaacccaatccaaaagcaagttcgtccgttcccgccagccttgcacagctggtgaccactagcaacgcttccgaggtggcaagcgggcaaaaaattgctgtgcccgctactagtcatcacttctgtttctccattgaccttcggagcattcatgccctggagattggattccccattaactgcatcctgcgatattcctatccctttttcggtagcgctgctccaatcatgaccaacccaccagtggaagtccgcaagaacatggaggtgtttctcccccagtcctactgtgcgtttgactttgcgactatgcctcaccaactgcaggacacttttctccgcataccgctcctcgtagaactgtggcacaaggataagatgagcaaggatctcttactgggtatagccaggattcagctgtcaaacatcctcagcagcgagaaaacaagattcttggggtccaacggcgagcagtgctggcgccagacctacagtgaaagtgtgcctgttatcgcggctcaggggagcaacaatcggatcgctgacctctcctacaccgtgaccctggaggattatggcctggtgaaaatgagggagatctttatatccgatagctcccagggagtgagcgctgttcagcagaagcctagtagtttgcctcccgctccttgtccatctgaaatccagactgaaccacgcgaaactctagaatataaagcagccttggaattagaaatgtggaaagaaatgcaggaggacatttttgagaatcaattaaagcagaaagagctggcgcacatgcaggccctggccgaggagtggaaaaaaagagaccgcgaaagggaatcacttgtgaagaaaaaggtggccgaatataccatcctggagggcaaactgcagaagacactaattgatctcgagaaacgagagcaacagctagccagcgttgagagcgagctgcagagagagaagaaggagttgcagagcgagcggcaaaggaatctacaggaactccaggactctatcaggcgggccaaggaggactgtatccatcaagtggaactggagcggctgaaaatcaaacaattagaagaagataaacatcgattgcagcagcaacttaacgacgctgagaataagtataaaatcttggagaaagagttccagcaattcaaggatcagcagaacaacaagcccgagattcgtctgcagagcgagatcaatctcctgaccctcgagaaggtagaactagaaagaaagcttgaaagcgccaccaaatctaaattgcactataaacaacaatggggaagagccctgaaagagctcgctaggctgaaacagagagagcaggagtctcagatggccaggctcaaaaaacaacaggaagagctggaacagatgcgcctccggtaccttgcagccgaggaaaaggacaccgtcaaaactgagcgacaggagctgctggatattagaaatgagctgaaccggctccgacaacaggaacagaagcagtaccaagacagtacagaaatcgcaagcggcaaaaaagatggccctcacggtagcgtgcttgaggagggcctggatgattatctgactagactgattgaagaacgcgatacactgatgcgcacaggtgtctacaatcacgaggataggatcatatccgagctcgatcggcagattcgggagatcttggcaaagagtaatgcaagcaactag

SEQ ID NO: 245475 - DNA, 2883 bp, Artificial Sequence
  derived and/or modified sequence
atgctggtggtggaggccaagttcgacggcgagcagctggccaccgacccggttgaccataccgatcagccggagtttgccaccgagctggcttgggagatcgacaggaaggcattgcatcagcacaggctgcagcggactcctatcaaactacagtgttttgctctggacccagtgacttccgctaaagagactatcgggtacatagtgctcgacttacggacggctcaggaaacaaagcaagctcctaagtggtatcagctgttaagcaacaaatataccaagtttaagagtgagatccagattagtatcgctttagaaacagacacaaagccaccggtggactctttcaaggccaaaggagcccctcctagggacggcaaagtgccagcaattctggctgggcttgaccctcgcgatattgttgccgtactcaacgaggaaggggggtaccatcagatcgggcccgctgagtactgtacagattcgttcatcatgtccgtcactatcgcatttgccacacaactggagcaacttatcccttgtaccatgaaactgcccgagcgccaaccagaatttttcttctactactccctgttaggaaacgacgtgaccaacgagcccttcaacgacttgattaacccaaacttcgaaccagaacgggcaagcgtgcggattcgatcctccgtagaaattctgcgtgtgtatttggcgctgcaaagtaaattgcaaattcacctttgctgcggtgaccaatccttggggtcaactgagatccccctgactggactgctgaagaaagggtctacggagatcaaccagcaccctgtcactgtcgaaggggccttcacactggaccctcccaatagagccaagcaaaagctggctcccatccccgtcgaactggctcccaccgtgggtgtctcggtcgctctacagagggaggggatagatagccaaagcctcatcgaactgaagactcagaatgagcatgagcctgagcactctaagaagaaggtgcttacgccaatcaaggaaaaaactctcacaggccctaagtcacctacagtcagcccggtgccaagtcataaccagtctccacctacaaaggacgatgccaccgagtcagaagtagaaagcctacagtacgataaggacacgaagcctaatccgaaggcaagtagcagtgtgccggcctcactggctcagctggtgactaccagtaatgcctccgaagtcgccagtggccaaaaaatcgccgtcccagccaccagccatcatttctgtttcagcattgatctccgctccatccatgccctggagattggtttcccgatcaattgcatcctgagatacagttatcctttcttcgggtctgccgctccaattatgacaaatccaccagtggaggtgcggaagaatatggaagtgtttctgccacagtcatattgtgcatttgactttgccactatgccacaccaactccaagataccttcctccgtattcccctgctggtcgagctgtggcacaaggacaaaatgtctaaagacctcctgctcggaatcgcaaggatccagctttctaacattctctcaagcgagaagacacgcttcctcgggtcaaatggtgagcagtgctggcgacagacatatagtgaaagcgtccccgtgatagcagcccagggttctaacaatagaatcgccgatctgagctatacagtgacactggaggattacggcctggttaagatgcgcgaaatttttatctctgactcatcgcaaggcgtcagtgctgtgcaacagaagccaagtagcctgccgcctgccccctgtcccagcgaaattcaaacagaacctagagagaccctcgagtacaaggccgccctggaactcgagatgtggaaggagatgcaagaagatatttttgagaatcagctcaagcagaaggaattggcccacatgcaagctctcgcagaggaatggaagaagcgggaccgggagagagagtccctggtcaagaagaaggtggcggaatataccatcttagaaggtaagcttcagaaaacattgatcgatctggaaaagcgagagcagcaactggcctccgtcgaaagcgaactgcagagagagaagaaggaattgcagagcgagcgccagcgcaacctgcaagagctgcaagattccatcaggagagccaaggaggactgtattcaccaggtcgaactcgagagattgaaaattaaacagctggaagaggacaaacacagacttcagcagcagctcaatgacgcagagaataagtacaagatcctcgaaaaggagtttcagcaattcaaggatcagcagaacaataagcccgagatcagacttcagagtgagatcaacttgctgacgttggagaaggttgagctagaacgaaagctcgagtcagcgacaaaatccaaactacattacaagcagcaatgggggagagctttgaaggaactggcccggctcaagcagcgggaacaagaaagtcagatggcaaggttgaaaaaacagcaggaagaactggagcagatgaggctcagatacctcgccgcagaagagaaggatacagtcaagactgagagacaggagttgctggatattcgaaacgagttgaatcggcttcgccagcaagaacagaagcagtatcaagatagcacggagattgccagtgggaagaaagatgggccgcacggatcagtcctggaggaagggctcgatgattatttgacccgcctgatcgaagagcgggatacccttatgaggaccggagtttacaatcacgaggacagaatcatctctgagctggataggcagatcagggaaatcctcgcaaaatctaacgcctctaattag

SEQ ID NO: 245476 - DNA, 2961 bp, Artificial Sequence
  derived and/or modified sequence
atggtgagcaagagcgaccagctgctgatcgtggtgagcatcctggaaggccgacattttcctaagcggcccaagcatatgctggtcgtggaagccaagtttgacggcgagcaacttgctacagatcctgtcgaccataccgaccagcctgagtttgcaactgagctcgcttgggagattgaccggaaagctctccaccagcatcgactgcagcgcacccccatcaagctgcagtgcttcgcattagatccagtgacctcggctaaggagactattggctatatcgtgctcgatttgcggaccgcacaggaaactaaacaggcccccaagtggtaccaactgctgtccaataagtatacaaagttcaaatcagagattcagatctcgatagcactggagaccgataccaaaccccccgtggactctttcaaagcgaaaggagctccaccacgggatggtaaagtgcctgccattctcgcagggctggatccacgggacatcgtagccgtgttaaacgaggagggaggataccaccagatcgggcctgccgaatactgtaccgactctttcatcatgagcgtgactattgccttcgctacccagttggagcagcttataccgtgcacgatgaaactcccagaaagacagcccgaattttttttctactatagcctcttaggcaacgacgttaccaacgagcctttcaatgatctgattaatccaaacttcgagccagaaagagcgagtgtgcggattcgctcttcagtagagattctgcgagtctacctagccctgcagtctaagctacagatccacttgtgttgtggtgaccaatctctggggtcaactgagatcccccttaccggactattgaagaagggcagcactgaaatcaaccagcacccagttactgtggaaggcgcctttacactcgatcctcccaaccgcgcaaagcagaaactcgctccaatccccgtcgagctggcacctactgtgggcgtttctgtggcactgcagcgtgagggaatagacagccagagcctgattgaactcaagacccaaaatgagcacgagccagaacattctaagaagaaggttctgacgcccattaaggaaaagactttgacgggaccaaagtctcccactgtttcacctgtacccagccacaaccagtctccccctacaaaagatgatgctacagagtcagaagtcgaatcccttcagtatgataaagacaccaagccaaaccctaaagcttctagttcagtgccagcgtctctcgcacagctggtgacgacctctaacgcctccgaggtagctagtggccagaagatagcggtccccgccacaagccaccacttttgcttctctattgatctccgttcaattcatgccctggagatcgggttccctatcaactgcattttgagatatagctatccattcttcgggagtgcagcccctatcatgactaatccacccgtcgaagtgaggaaaaatatggaagtgttcttaccccaatcttactgtgcattcgactttgccaccatgccacaccagctccaggacacttttttgcgtataccgctgctggtggagctgtggcataaggataaaatgtccaaagatctattgctgggaattgcccgaatccagctcagcaatattctgtcctccgaaaaaacccgatttctggggagcaatggagagcagtgttggagacaaacttattccgagtcagtcccagtaattgccgctcaaggctcaaacaaccgcattgccgatcttagctacactgttacactggaagactatgggctggtaaaaatgcgcgagatctttatctctgactcttctcagggcgtgagcgccgttcagcaaaagcccagctctctgccccccgccccgtgtccttccgaaattcagacagagccacgcgagacacttgagtataaagcagcactggaactggaaatgtggaaggagatgcaggaagacatctttgagaatcagctcaagcagaaagaattggcccacatgcaggcccttgccgaagagtggaagaagagagacagagagcgagagagtctagtgaagaagaaggtagccgaatacaccatactcgagggcaagctgcaaaagacgctgatcgatttggagaagagggagcaacagctcgccagcgttgaatccgagctccagagagagaaaaaagagctgcagagcgaaaggcagcgtaacctccaggagcttcaggactccatacggagggcaaaggaagactgcattcatcaagttgaactagaaagactgaaaattaagcaactggaggaagacaaacataggcttcagcagcaactgaacgacgctgagaataagtacaaaatactcgagaaggagtttcaacaattcaaagatcagcagaacaacaaacctgagatccgtctgcagtccgagatcaacctgttgaccctggaaaaagtcgagctcgagagaaaactggagtcagccacgaaatccaaactacactacaaacaacagtggggtagagctttaaaggagctggcaaggctgaaacagagggagcaagaatcacaaatggcgcgcctgaaaaaacagcaggaggagttagaacagatgcggttaaggtaccttgccgccgaagagaaagatactgtgaaaacagagaggcaggaattactcgacatccggaatgaactcaatcgcttgcgacagcaagaacagaagcagtatcaagatagcacagagatcgcctctggaaaaaaggacgggccacacggatcagtgctggaggaagggttggatgattatctgaccagacttatcgaagaaagagacactctcatgagaacaggtgtgtacaaccacgaggatagaatcattagcgagctagaccggcagatacgggagattttggcaaaaagtaacgcctctaactag

SEQ ID NO: 245477 - DNA, 2961 bp, Artificial Sequence
  derived and/or modified sequence
atggttagtaagagtgatcagcttctgattgtggtatctatattagaaggcaggcacttccctaagaggcccaaacacatgctggttgtcgaagcgaagttcgatggagagcagttagccactgatccagtggatcataccgatcagcctgagtttgccacggagctagcctgggagatcgataggaaagcactgcaccagcaccgtctccaacggacaccgataaagttacagtgtttcgccctggatcccgtgacctccgccaaagaaacaataggatatatcgttttggacctgaggacagcccaagaaaccaagcaagcaccaaagtggtatcaattactttccaataagtataccaagttcaagagtgaaatccagatcagtatcgctctggagactgacacgaagccgccagtggatagctttaaggccaaaggcgcacccccacgagacgggaaggtgccagccatcctggccggtctggatcctcgcgatatcgtggcagtactgaatgaagaaggaggataccatcagatcggccctgctgagtattgtacagattcctttataatgagcgttacaatcgccttcgccactcaactggagcagctgatcccctgcactatgaagctcccagaacggcagcctgagttctttttctactatagcctgctcgggaatgatgtgaccaacgaacccttcaatgatttaattaatccaaattttgaaccggagcgggcaagcgtgagaatccggtctagtgtggagatcctgcgagtatatctagccttgcagtcgaaactgcagatacatttgtgctgcggcgaccaatccctggggtccacagagattcccctgactggtctcctgaagaaaggttctacagaaatcaaccagcatcctgttactgttgaaggtgcctttactctggatcccccaaaccgcgcaaaacagaaactggccccaatacccgtcgaattagcccctacagttggcgttagcgtagctctccagcgggaaggcatcgacagtcagagcttaatcgaactgaaaacccagaatgagcacgagcctgagcactccaagaagaaagtactcacccccattaaagaaaagacactcactgggcctaagtctcctacagtctcaccagtgcctagccacaaccaatcaccacctacaaaagacgacgccacggagagtgaggtggaatcacttcagtatgataaggatacaaagccaaatccgaaggcctctagtagtgtccctgcctctctggcccagctggtgaccacctctaatgctagcgaggtcgccagcggccaaaagatcgccgtcccagctacctctcatcatttctgcttctccatcgatctccgttcgattcatgcgctagaaatcggttttccgataaactgcatcctgagatacagctatcctttttttggtagcgcagccccaatcatgacgaatcccccagtagaggtgagaaagaatatggaagtgttcttgcctcagtcgtattgcgccttcgacttcgcgacaatgccgcaccagttacaagatacctttctgcgcatcccactccttgttgaactgtggcacaaagacaagatgtccaaggatctgctgctcggcattgccagaattcaactgtctaacatcctgtcctccgagaagacacgttttctggggtctaacggtgagcagtgttggaggcaaacatactccgagagtgttccagtaatagctgcccaggggagtaataaccgaattgctgacttaagttacacggttaccctggaggactatggacttgtgaagatgcgagaaattttcatcagtgatagttcacaaggagtgtccgccgtgcagcaaaaaccatcgtccctccctccagccccttgccccagcgagattcaaaccgagcctcgcgaaacgctggaatataaagcagcactcgaacttgagatgtggaaggaaatgcaagaggatatcttcgaaaatcagttgaagcagaaggagctcgcacatatgcaggcgctggctgaggagtggaaaaaaagagatagagagagagagtctcttgtgaagaaaaaggttgccgaatacaccatccttgagggtaagcttcaaaagaccctgattgacctcgaaaagagagagcagcaacttgcctcagtcgagagtgaactgcagcgggagaagaaggaacttcaaagtgaaaggcagcgcaatctgcaggagttgcaggacagtatcaggcgagctaaggaagattgtatacaccaggtcgaactcgagagactgaagatcaaacagctggaagaggacaagcatcgactgcagcagcagctgaacgatgccgaaaacaagtacaagatactggaaaaagagttccagcagttcaaagatcagcaaaacaacaagcctgagatccgcctccagagcgagataaacctcctgaccctcgagaaggtggaactggagagaaagcttgaaagcgcaaccaagtccaagctgcactataagcagcaatgggggcgtgccctgaaggaactagccagactaaagcagagagagcaggagtcacaaatggcacggttgaagaaacagcaagaagaactggagcaaatgcgactgaggtatctggcggcagaagagaaagacactgtaaaaaccgagagacaggagctccttgatatcagaaacgagcttaatcgactccgacagcaggaacagaagcagtatcaggacagtactgagattgcttctggcaaaaaagacggccctcacgggtctgtgctagaggaaggcctggatgattatctgactagactgatcgaggaaagggacactctgatgagaactggcgtgtacaatcacgaagaccggataatcagtgaattggatcgtcagatccgcgaaatcctcgctaaatcaaacgcttcaaattag

SEQ ID NO: 245478 - DNA, 2883 bp, Artificial Sequence
  derived and/or modified sequence
atgctggtagtggaggcgaagtttgacggagagcagttagccactgatcctgttgatcacaccgatcagccagagtttgcgaccgagctggcgtgggagatcgatcgcaaggcgctgcatcagcatcggcttcaaaggactcccatcaagctgcagtgtttcgctctggatccagtgacatctgcgaaagaaacaatcggctatatcgttctggatctgcgaacagcacaagaaacaaagcaggctcccaaatggtaccagctgctgagcaataagtacacaaagtttaagtccgagattcagatctcaatagcccttgagacagacactaaaccacctgtggatagtttcaaggccaaaggagcgcctcccagagacggtaaagtacccgctatccttgctggactcgaccccagggatatcgtcgctgtcctgaacgaagaagggggttaccaccagataggccctgccgagtactgtactgatagcttcatcatgtccgtgactatcgccttcgcaactcagctcgaacagcttattccctgcacgatgaaattgccagaaagacagccagaattctttttctactattctctgctaggcaacgacgtgacaaatgaacccttcaatgatctgatcaatccaaacttcgaacccgaaagagctagcgtgagaatcaggagtagcgtcgagatcttacgcgtgtacttagccctgcagtccaaacttcagatccacctgtgctgcggcgaccagtccttggggtctaccgagattcccctgacaggattattgaaaaaggggtcaactgaaattaatcaacaccccgtcaccgtagaaggtgccttcactctcgacccccctaatagagctaagcagaaattagccccaatcccagtggagctggcccctaccgtgggcgtttctgtagcccttcagcgggagggcattgacagccagtctctaatcgagttgaagactcaaaatgaacacgaacccgaacattctaagaagaaagtcctgacccctatcaaagaaaaaacactgacaggccctaagtccccaacagtgagtccagtccccagccacaatcagagtcctcctactaaagacgatgcaactgagtccgaagttgagtccttgcaatatgacaaggacactaaaccaaaccccaaggccagctcttcagtacctgcgtcgttggcccagcttgtgacgacttcaaacgccagcgaggtagcttccggacagaagatagccgtgcccgctaccagtcatcatttttgttttagcatagatctgaggtccatccacgctttggaaatcggattccccataaactgcattttacgctactcctatccttttttcggcagtgcagcaccaatcatgaccaatcccccagtagaggtgaggaagaacatggaggtcttcctgccacaatcgtactgtgccttcgacttcgccaccatgccccaccaactccaggatacattcctgagaatcccactgttggtggagttgtggcataaggacaaaatgagtaaggacctgctgctcgggatcgcacgaatccaactgtccaatattctctcatccgagaaaacaaggtttttaggttcgaatggcgagcagtgttggcgccaaacctacagcgaaagcgtgcccgtgatcgcagcacaagggtctaacaatcgaattgccgatttgtcttatactgtaaccttagaggactatggactggtgaaaatgagggagatcttcataagcgacagctcccagggagtctccgcggtccagcagaaaccgtctagcctgcccccagccccttgcccatctgagatccagaccgaaccgcgagagactttagagtacaaggctgcccttgaactagagatgtggaaggagatgcaggaagacatatttgagaaccagctgaagcagaaggaactcgcacacatgcaagccctggccgaggagtggaagaagcgggatcgagagcgggaaagtcttgtgaagaaaaaagtcgcagagtacaccatactggagggaaagcttcagaagacactgatagacctggagaagcgcgagcagcagcttgcctccgtggaatcggagctgcagagggagaaaaaagagttacagtctgaacgccaacggaaccttcaagaactccaagactcaattaggcgggctaaagaagattgcattcatcaggtggaattagagcgactgaagatcaaacagctggaagaagataaacatagactgcagcagcagctcaatgacgcagaaaataaatataaaatcttagagaaagagtttcagcagttcaaagatcagcagaataacaagccggagatccggctgcaatcagagattaacctcctgaccctcgagaaagtggaacttgaaaggaagctcgagtccgcaaccaaatccaagctgcattataaacagcagtggggcagagccctcaaagagttagctcgactgaaacagcgtgagcaggaatcccagatggccagactcaaaaagcagcaggaggaactggaacaaatgcgcttgcgctacctggcggctgaggagaaagacaccgtgaagacggagaggcaggaactcttggatatacgcaacgaactgaaccggttgagacaacaggaacagaagcagtaccaggattctacagaaatcgccagcggaaaaaaagatgggcctcacggcagcgttctagaagaaggactggatgattaccttacccggttaatcgaagagcgcgacaccctgatgcgcaccggagtttacaatcacgaggaccgaataatctcagagctggaccggcagattagagaaattctggccaagtcgaacgcttcgaactag

SEQ ID NO: 245479 - DNA, 2961 bp, Artificial Sequence
  derived and/or modified sequence
atggtgtctaagagtgaccagctcttgattgttgtctcaatcctcgagggaaggcattttcccaagcggccaaagcacatgctcgtcgtcgaagcaaaatttgacggggaacagttagccactgatcctgtggaccacaccgatcagcccgaattcgctacagagctagcgtgggaaatcgatcgcaaagccctgcaccaacaccggctgcagcgcacccctatcaagttgcaatgttttgctttggacccggtgacgtcagctaaagagacaatcgggtatatcgtcctggatctacggaccgcacaggaaactaagcaggctccaaaatggtatcaactgctcagcaacaagtatacaaagttcaaaagcgagattcagataagcatcgctttggagacagatacgaaacccccagtggactcctttaaggccaagggcgcacctccccgtgatggcaaggtccctgcgatcctggctggactcgacccccgagacatcgtggccgtgttaaatgaggaaggaggataccaccagattggccctgccgaatattgtaccgactcttttataatgtccgtgacgattgctttcgccactcagcttgagcagctcatcccgtgcactatgaaactgcctgagcgtcaaccagagttcttcttttactattccctgctgggaaacgacgtcacgaacgaaccattcaacgatctcatcaatccaaacttcgagcccgagcgggctagcgtgagaatacggtcatccgtagagattctgcgagtttatctggccctccagtcaaagctgcagatccacctgtgctgtggagatcaaagcctgggctcaacagaaattccgttaaccgggcttctgaagaagggtagtaccgagattaatcagcatcctgtgacagtggagggtgcttttacacttgaccccccaaaccgcgcaaagcaaaaactcgctccaatcccggtcgaactcgcaccgaccgtgggggtgtctgtagctctgcagcgcgaggggatcgatagccagtccctcattgaacttaagacccaaaacgaacacgaaccagagcacagcaagaaaaaggtgctgactcccatcaaggaaaaaactctgacaggcccaaaaagccctaccgtgtcgccagtaccctcccataatcaatcaccaccgactaaagatgacgctaccgagtctgaggttgagagtctgcaatacgacaaagataccaagccgaacccgaaagcatcctcttcggtaccagcaagcctggcccagctcgtgacaacgtccaacgccagcgaggtcgcatcgggacagaagatcgctgttcccgctaccagccatcacttctgtttctcaattgacctcagatctatccacgcccttgaaatcgggtttccaataaactgtatcctccgatactcttatcccttcttcgggagtgctgcaccaatcatgacgaaccctcccgtggaggtgaggaaaaacatggaagtctttctgccccagtcttactgcgccttcgactttgcgactatgccacaccagctgcaggatacttttctccgcattcctctgctagtagaactgtggcacaaggacaaaatgtctaaagacctgctgcttggcatagccagaatccagctgtccaatatcctgtcaagtgagaagacccgctttctgggatccaacggcgagcagtgttggagacagacctattcagagtccgtgccagttattgctgcccagggcagcaacaatcgcattgcagacttgagttataccgttacactggaagactatggtctggtgaaaatgcgggagatatttatcagtgactctagtcaaggtgtttctgccgtgcaacagaagccctcttccctcccgccagctccatgtccatccgaaatacagacagaacctcgggaaacccttgagtacaaggccgcattggagcttgaaatgtggaaggaaatgcaggaggacattttcgaaaaccaactgaagcagaaagaactggcccatatgcaggccctagctgaagagtggaagaagagggatagggagagagagtccctcgtgaagaaaaaggtggcagagtacacaatcctcgagggcaagcttcagaagacactgatcgatctggaaaaacgcgagcagcagcttgctagcgtggaaagcgagcttcagagagaaaagaaggaacttcagtctgaacgccagcggaatctacaggaactgcaggattctattcgaagggccaaagaagactgcattcaccaggtcgagctggagaggctgaagataaaacaattggaagaagacaagcaccggctgcagcagcagttgaatgatgctgaaaacaagtacaagatactcgaaaaagagttccaacaatttaaagatcagcagaacaataaacccgaaattcggttacagagcgaaattaaccttttgacattagaaaaagtcgagctggaacgcaagctggaatcggccacaaagagtaaactgcattacaagcagcagtggggcagagctttgaaggaacttgcacggttgaagcaacgagagcaagagagtcaaatggctcgtctcaagaagcagcaggaagagctggaacagatgcgattaaggtatctggctgcagaggaaaaggacacggtgaagaccgaaaggcaggagttgctggacatcagaaatgagctgaacaggctgagacagcaggaacagaagcagtatcaagactctacagagatcgcttcaggcaagaaagacggccctcatggatcagtcctggaggaaggtctggatgactacctgactcgccttatcgaagaacgtgatacgctgatgcgcactggtgtgtataaccacgaggaccgtatcattagtgagctggacagacagattagagagatcctggccaagtccaacgcctctaattag

SEQ ID NO: 245480 - DNA, 4900 bp, Artificial Sequence
  derived and/or modified sequence
agcggctacgcaggcggcaaaaggtcctcgggtggcgggcttgtctctgcttgcagactggcagggctgcagcgtggctttttccttgagtcggggcacagttaggatctgggctggcggcccgaggcagaggagccgggcgcgctgcagcagacggcggtgggacctggctgcggagcggggtccgggcatcagggaccgggggcgggcagtgggggtcccgccgggggtcccggattacccgcgactcaactggacctcacttccccccagccgccttcgcccccggaccgctcaccgcaaccatggtctccaaatccgaccaattgctcatcgtcgtgtccatcctagaaggtcggcatttccccaaacgtccaaagcatatgcttgtagtggaagcaaagtttgatggagaacagttggctactgatcctgtggaccacactgaccagccagaatttgctactgagttagcttgggaaattgacaggaaagcgcttcatcagcacaggctacagcgtactcctatcaaactccaatgttttgccttggatcctgtaacttcagccaaggaaaccataggttacatcgttctggatttaagaaccgctcaagaaacaaagcaggcaccaaaatggtaccagttgctgagtaataaatacaccaaattcaagtctgagatacagataagtattgctttggaaaccgatacaaagccaccagtggatagctttaaagcaaagggggctccccctcgagatggaaaagtacctgccatcctggctggacttgaccccagggacattgtggctgtgctgaatgaagagggaggctaccatcagattggaccagcagaatactgtactgactcctttattatgtcagtgaccatagcatttgctacccagttggaacagttaattccatgtaccatgaaacttccagaaagacagcctgagtttttcttttactactctttactgggaaatgatgttacaaatgaacccttcaatgatttaatcaacccaaactttgagccagagagagcatcagttcgcatccgtagcagtgtagaaattcttcgtgtttacctggctcttcagtctaaactgcagattcacctctgctgtggagaccagtcacttggaagtacagaaatacctttaactggattacttaaaaagggcagtacagaaatcaaccagcacccagtcacagtcgaaggtgcttttacccttgaccctccaaacagagccaaacagaagcttgcacctattcctgtggagctagccccaactgtgggagtgtctgtggctctgcagagagaaggcatagactcccagtctttaattgaattaaagacccagaatgaacatgagccagagcattcaaagaagaaagttttaacccccataaaggagaagacacttactgggccaaaatcaccaacagtgtcccctgttccatctcacaaccagtcacctccaacaaaagatgatgcaacagaaagtgaagtggaaagtttacagtatgataaggacaccaaaccaaatccaaaagccagttcttctgtacctgcttcactggcccagctagtgactacatccaatgcttcagaagtagcttcaggacagaagattgctgtaccagcaacatcacatcatttttgcttttcaatagacttaaggagtatacatgccttggagattggttttccaatcaactgtatattaaggtactcatatccattctttggaagtgcagctcctattatgactaatcctcctgtagaagttcggaaaaacatggaagtttttcttccccagtcttactgtgcatttgattttgcaactatgcctcatcagctgcaagacaccttcttaaggattccattactggttgaactatggcacaaggataaaatgagtaaagatttacttctgggaattgcgagaatccagctttctaacatcttgtcttcagaaaaaactcgttttttaggttctaatggtgaacagtgttggcgtcaaacttacagtgaaagtgtgcctgttatagcagcacaaggatcaaataacaggatagcagatctttcttacacagtgactctagaagattatggactagtaaaaatgcgtgagatttttatctctgattcatctcagggtgtatctgccgtacagcaaaagccgtcttctcttcctccagcaccttgtccttcagagatccagacagagcctcgtgaaacgttagaatacaaagcagcacttgagctagaaatgtggaaggagatgcaagaagatatatttgaaaatcagctgaagcagaaagaactggctcatatgcaggctcttgcagaggaatggaagaaaagggaccgagaaagagaatcactagtaaagaaaaaggtggctgaatatactattctagaaggaaaacttcaaaaaactctaattgacttggagaagcgagagcagcagcttgctagtgtggaatcagagcttcaaagagaaaaaaaggaactgcaatcagaacgtcagcggaacctgcaagaactgcaggactctatccgtagggccaaagaggactgtattcaccaagtagaactagaaaggttaaaaatcaaacagctcgaagaggataaacaccgccttcagcaacagcttaatgatgctgaaaataagtataagattttggaaaaagagttccaacagttcaaggaccagcaaaacaacaaaccagaaatccgtctacagtctgaaataaatcttctcaccttggaaaaggttgaacttgaaagaaagttggaatctgcaactaagtctaaactgcattacaagcagcagtggggacgagctttgaaagaacttgccagacttaaacagagggagcaagaaagtcaaatggctcgtcttaaaaaacagcaggaagaattggaacagatgagactacgttaccttgccgctgaggaaaaagatacagtaaaaaccgagcgacaagaattgttggatataagaaatgaattgaacaggttaaggcaacaagagcaaaaacaataccaggattccacagagattgcaagtggaaaaaaggatggcccccatggcagtgtattggaagaaggtttggatgattatttgactcgcctgatagaagaaagggatactttgatgagaacgggtgtgtataatcacgaggatcgaataataagtgaactcgaccgacagatcagagagattttggcaaaaagcaatgccagtaattaataacatttggaaaagctttatagagactctaagtctaaattttaatttctttgtaaaaacctcaaaagtgaggaaaatggatgttttaaaatggtattttcaattttttataagcaaaattttgtatgttattgtatagtatttatttgatcttatttactttatgctacctctcccacactggttttatttgtaatttgcatttatatactcattttaaatgacttttcagtgtttttcatagtttataatctgatggctaactaactttcaaaacagcttttaactaagtttgttgtaggagaaatgactgcggtaatttccagttctataatgtttcatgttgagccaaaagagtatatcttgcactttaaaaacgctgcgtcctattccatttgaatgtaaattcttaaaagttgagaccaattgtaaccagtttaactcattttagatgacctttttttcttataatatttgcaagtgacaagtttgaaaacaaagcaagatcagtgcagagaagccacatgacatgttgggtgacagattggtcatttatttaaataaagttaatacagattaaatttgtttcaagagctattgaattttcaaattttcagtgtatttataacttttaagaacatgaagtattagcttaatatagttttctctgttggtttcttcctcaagtttgcattgttttcttttgttaaaattagagatttctttttattttccagttatagtaatactagctgtcagcttaaaccctctgtaatagaacatggaaacagacacataaagacattagctgaaaaaatagagtgaaaatcaactattttttactcccgctaatttcaatcaatcgttttcaaaagcgcacgagattcactcattggatttatgcagtgccctgtctgtataaaaactcttaagagttcctttatatcatattcttcagagccaacatttgtcctcaaagcaacgtttcccacctccttttactgagtactgaaaaagttttagcaaagtcacagattaggttgaatttcaaaatatatgtactttaaaaagttctgatttccaaatataataaagttaaaattaagtatatactttaggaagttaccaataacttccatcaaagcagagtaggatatatggtaacattaattttcggtcatttcaaatgaggtatatttcttattagggaaattaaagtccctatatttattatatattttttccttattaacagagtattaatctagtaaaaaataacccagcagtaaataataaagaaattactgaatgagaggataatgaatctgaatcatagcaggaatttgcaatattaattatggttagctatttttctctcattgatttttgtgccacttgaatggaacagaagcaagccttatgttttggaaggtctgcggtaaaatgctgtgactgtttactttcaattgcattgtgtgttgcctgtgactgctttcaaacgctagagggggcctctgatttaaagaaataaaaaggacttttctaaaatggatgtgtagtttattttgccttttgtaaagctcttttggctattgtaacttaacaaataaaatcataattgtgtgcatctctga

SEQ ID NO: 245481 - DNA, 4629 bp, Artificial Sequence
  derived and/or modified sequence
tttacagcagtagtgcgcttgcgcagctggtcccacaccaagtcgcccgcctctcctcgtccggctagcagagggcgctgtgaggtcggcatttccccaaacgtccaaagcatatgcttgtagtggaagcaaagtttgatggagaacagttggctactgatcctgtggaccacactgaccagccagaatttgctactgagttagcttgggaaattgacaggaaagcgcttcatcagcacaggctacagcgtactcctatcaaactccaatgttttgccttggatcctgtaacttcagccaaggaaaccataggttacatcgttctggatttaagaaccgctcaagaaacaaagcaggcaccaaaatggtaccagttgctgagtaataaatacaccaaattcaagtctgagatacagataagtattgctttggaaaccgatacaaagccaccagtggatagctttaaagcaaagggggctccccctcgagatggaaaagtacctgccatcctggctggacttgaccccagggacattgtggctgtgctgaatgaagagggaggctaccatcagattggaccagcagaatactgtactgactcctttattatgtcagtgaccatagcatttgctacccagttggaacagttaattccatgtaccatgaaacttccagaaagacagcctgagtttttcttttactactctttactgggaaatgatgttacaaatgaacccttcaatgatttaatcaacccaaactttgagccagagagagcatcagttcgcatccgtagcagtgtagaaattcttcgtgtttacctggctcttcagtctaaactgcagattcacctctgctgtggagaccagtcacttggaagtacagaaatacctttaactggattacttaaaaagggcagtacagaaatcaaccagcacccagtcacagtcgaaggtgcttttacccttgaccctccaaacagagccaaacagaagcttgcacctattcctgtggagctagccccaactgtgggagtgtctgtggctctgcagagagaaggcatagactcccagtctttaattgaattaaagacccagaatgaacatgagccagagcattcaaagaagaaagttttaacccccataaaggagaagacacttactgggccaaaatcaccaacagtgtcccctgttccatctcacaaccagtcacctccaacaaaagatgatgcaacagaaagtgaagtggaaagtttacagtatgataaggacaccaaaccaaatccaaaagccagttcttctgtacctgcttcactggcccagctagtgactacatccaatgcttcagaagtagcttcaggacagaagattgctgtaccagcaacatcacatcatttttgcttttcaatagacttaaggagtatacatgccttggagattggttttccaatcaactgtatattaaggtactcatatccattctttggaagtgcagctcctattatgactaatcctcctgtagaagttcggaaaaacatggaagtttttcttccccagtcttactgtgcatttgattttgcaactatgcctcatcagctgcaagacaccttcttaaggattccattactggttgaactatggcacaaggataaaatgagtaaagatttacttctgggaattgcgagaatccagctttctaacatcttgtcttcagaaaaaactcgttttttaggttctaatggtgaacagtgttggcgtcaaacttacagtgaaagtgtgcctgttatagcagcacaaggatcaaataacaggatagcagatctttcttacacagtgactctagaagattatggactagtaaaaatgcgtgagatttttatctctgattcatctcagggtgtatctgccgtacagcaaaagccgtcttctcttcctccagcaccttgtccttcagagatccagacagagcctcgtgaaacgttagaatacaaagcagcacttgagctagaaatgtggaaggagatgcaagaagatatatttgaaaatcagctgaagcagaaagaactggctcatatgcaggctcttgcagaggaatggaagaaaagggaccgagaaagagaatcactagtaaagaaaaaggtggctgaatatactattctagaaggaaaacttcaaaaaactctaattgacttggagaagcgagagcagcagcttgctagtgtggaatcagagcttcaaagagaaaaaaaggaactgcaatcagaacgtcagcggaacctgcaagaactgcaggactctatccgtagggccaaagaggactgtattcaccaagtagaactagaaaggttaaaaatcaaacagctcgaagaggataaacaccgccttcagcaacagcttaatgatgctgaaaataagtataagattttggaaaaagagttccaacagttcaaggaccagcaaaacaacaaaccagaaatccgtctacagtctgaaataaatcttctcaccttggaaaaggttgaacttgaaagaaagttggaatctgcaactaagtctaaactgcattacaagcagcagtggggacgagctttgaaagaacttgccagacttaaacagagggagcaagaaagtcaaatggctcgtcttaaaaaacagcaggaagaattggaacagatgagactacgttaccttgccgctgaggaaaaagatacagtaaaaaccgagcgacaagaattgttggatataagaaatgaattgaacaggttaaggcaacaagagcaaaaacaataccaggattccacagagattgcaagtggaaaaaaggatggcccccatggcagtgtattggaagaaggtttggatgattatttgactcgcctgatagaagaaagggatactttgatgagaacgggtgtgtataatcacgaggatcgaataataagtgaactcgaccgacagatcagagagattttggcaaaaagcaatgccagtaattaataacatttggaaaagctttatagagactctaagtctaaattttaatttctttgtaaaaacctcaaaagtgaggaaaatggatgttttaaaatggtattttcaattttttataagcaaaattttgtatgttattgtatagtatttatttgatcttatttactttatgctacctctcccacactggttttatttgtaatttgcatttatatactcattttaaatgacttttcagtgtttttcatagtttataatctgatggctaactaactttcaaaacagcttttaactaagtttgttgtaggagaaatgactgcggtaatttccagttctataatgtttcatgttgagccaaaagagtatatcttgcactttaaaaacgctgcgtcctattccatttgaatgtaaattcttaaaagttgagaccaattgtaaccagtttaactcattttagatgacctttttttcttataatatttgcaagtgacaagtttgaaaacaaagcaagatcagtgcagagaagccacatgacatgttgggtgacagattggtcatttatttaaataaagttaatacagattaaatttgtttcaagagctattgaattttcaaattttcagtgtatttataacttttaagaacatgaagtattagcttaatatagttttctctgttggtttcttcctcaagtttgcattgttttcttttgttaaaattagagatttctttttattttccagttatagtaatactagctgtcagcttaaaccctctgtaatagaacatggaaacagacacataaagacattagctgaaaaaatagagtgaaaatcaactattttttactcccgctaatttcaatcaatcgttttcaaaagcgcacgagattcactcattggatttatgcagtgccctgtctgtataaaaactcttaagagttcctttatatcatattcttcagagccaacatttgtcctcaaagcaacgtttcccacctccttttactgagtactgaaaaagttttagcaaagtcacagattaggttgaatttcaaaatatatgtactttaaaaagttctgatttccaaatataataaagttaaaattaagtatatactttaggaagttaccaataacttccatcaaagcagagtaggatatatggtaacattaattttcggtcatttcaaatgaggtatatttcttattagggaaattaaagtccctatatttattatatattttttccttattaacagagtattaatctagtaaaaaataacccagcagtaaataataaagaaattactgaatgagaggataatgaatctgaatcatagcaggaatttgcaatattaattatggttagctatttttctctcattgatttttgtgccacttgaatggaacagaagcaagccttatgttttggaaggtctgcggtaaaatgctgtgactgtttactttcaattgcattgtgtgttgcctgtgactgctttcaaacgctagagggggcctctgatttaaagaaataaaaaggacttttctaaaatggatgtgtagtttattttgccttttgtaaagctcttttggctattgtaacttaacaaataaaatcataattgtgtgcatctctg

SEQ ID NO: 245482 - DNA, 4710 bp, Artificial Sequence
  derived and/or modified sequence
tttacagcagtagtgcgcttgcgcagctggtcccacaccaagtcgcccgcctctcctcgtccggctagcagagggcgctgtgagccgccttcgcccccggaccgctcaccgcaaccatggtctccaaatccgaccaattgctcatcgtcgtgtccatcctagaaggtcggcatttccccaaacgtccaaagcatatgcttgtagtggaagcaaagtttgatggagaacagttggctactgatcctgtggaccacactgaccagccagaatttgctactgagttagcttgggaaattgacaggaaagcgcttcatcagcacaggctacagcgtactcctatcaaactccaatgttttgccttggatcctgtaacttcagccaaggaaaccataggttacatcgttctggatttaagaaccgctcaagaaacaaagcaggcaccaaaatggtaccagttgctgagtaataaatacaccaaattcaagtctgagatacagataagtattgctttggaaaccgatacaaagccaccagtggatagctttaaagcaaagggggctccccctcgagatggaaaagtacctgccatcctggctggacttgaccccagggacattgtggctgtgctgaatgaagagggaggctaccatcagattggaccagcagaatactgtactgactcctttattatgtcagtgaccatagcatttgctacccagttggaacagttaattccatgtaccatgaaacttccagaaagacagcctgagtttttcttttactactctttactgggaaatgatgttacaaatgaacccttcaatgatttaatcaacccaaactttgagccagagagagcatcagttcgcatccgtagcagtgtagaaattcttcgtgtttacctggctcttcagtctaaactgcagattcacctctgctgtggagaccagtcacttggaagtacagaaatacctttaactggattacttaaaaagggcagtacagaaatcaaccagcacccagtcacagtcgaaggtgcttttacccttgaccctccaaacagagccaaacagaagcttgcacctattcctgtggagctagccccaactgtgggagtgtctgtggctctgcagagagaaggcatagactcccagtctttaattgaattaaagacccagaatgaacatgagccagagcattcaaagaagaaagttttaacccccataaaggagaagacacttactgggccaaaatcaccaacagtgtcccctgttccatctcacaaccagtcacctccaacaaaagatgatgcaacagaaagtgaagtggaaagtttacagtatgataaggacaccaaaccaaatccaaaagccagttcttctgtacctgcttcactggcccagctagtgactacatccaatgcttcagaagtagcttcaggacagaagattgctgtaccagcaacatcacatcatttttgcttttcaatagacttaaggagtatacatgccttggagattggttttccaatcaactgtatattaaggtactcatatccattctttggaagtgcagctcctattatgactaatcctcctgtagaagttcggaaaaacatggaagtttttcttccccagtcttactgtgcatttgattttgcaactatgcctcatcagctgcaagacaccttcttaaggattccattactggttgaactatggcacaaggataaaatgagtaaagatttacttctgggaattgcgagaatccagctttctaacatcttgtcttcagaaaaaactcgttttttaggttctaatggtgaacagtgttggcgtcaaacttacagtgaaagtgtgcctgttatagcagcacaaggatcaaataacaggatagcagatctttcttacacagtgactctagaagattatggactagtaaaaatgcgtgagatttttatctctgattcatctcagggtgtatctgccgtacagcaaaagccgtcttctcttcctccagcaccttgtccttcagagatccagacagagcctcgtgaaacgttagaatacaaagcagcacttgagctagaaatgtggaaggagatgcaagaagatatatttgaaaatcagctgaagcagaaagaactggctcatatgcaggctcttgcagaggaatggaagaaaagggaccgagaaagagaatcactagtaaagaaaaaggtggctgaatatactattctagaaggaaaacttcaaaaaactctaattgacttggagaagcgagagcagcagcttgctagtgtggaatcagagcttcaaagagaaaaaaaggaactgcaatcagaacgtcagcggaacctgcaagaactgcaggactctatccgtagggccaaagaggactgtattcaccaagtagaactagaaaggttaaaaatcaaacagctcgaagaggataaacaccgccttcagcaacagcttaatgatgctgaaaataagtataagattttggaaaaagagttccaacagttcaaggaccagcaaaacaacaaaccagaaatccgtctacagtctgaaataaatcttctcaccttggaaaaggttgaacttgaaagaaagttggaatctgcaactaagtctaaactgcattacaagcagcagtggggacgagctttgaaagaacttgccagacttaaacagagggagcaagaaagtcaaatggctcgtcttaaaaaacagcaggaagaattggaacagatgagactacgttaccttgccgctgaggaaaaagatacagtaaaaaccgagcgacaagaattgttggatataagaaatgaattgaacaggttaaggcaacaagagcaaaaacaataccaggattccacagagattgcaagtggaaaaaaggatggcccccatggcagtgtattggaagaaggtttggatgattatttgactcgcctgatagaagaaagggatactttgatgagaacgggtgtgtataatcacgaggatcgaataataagtgaactcgaccgacagatcagagagattttggcaaaaagcaatgccagtaattaataacatttggaaaagctttatagagactctaagtctaaattttaatttctttgtaaaaacctcaaaagtgaggaaaatggatgttttaaaatggtattttcaattttttataagcaaaattttgtatgttattgtatagtatttatttgatcttatttactttatgctacctctcccacactggttttatttgtaatttgcatttatatactcattttaaatgacttttcagtgtttttcatagtttataatctgatggctaactaactttcaaaacagcttttaactaagtttgttgtaggagaaatgactgcggtaatttccagttctataatgtttcatgttgagccaaaagagtatatcttgcactttaaaaacgctgcgtcctattccatttgaatgtaaattcttaaaagttgagaccaattgtaaccagtttaactcattttagatgacctttttttcttataatatttgcaagtgacaagtttgaaaacaaagcaagatcagtgcagagaagccacatgacatgttgggtgacagattggtcatttatttaaataaagttaatacagattaaatttgtttcaagagctattgaattttcaaattttcagtgtatttataacttttaagaacatgaagtattagcttaatatagttttctctgttggtttcttcctcaagtttgcattgttttcttttgttaaaattagagatttctttttattttccagttatagtaatactagctgtcagcttaaaccctctgtaatagaacatggaaacagacacataaagacattagctgaaaaaatagagtgaaaatcaactattttttactcccgctaatttcaatcaatcgttttcaaaagcgcacgagattcactcattggatttatgcagtgccctgtctgtataaaaactcttaagagttcctttatatcatattcttcagagccaacatttgtcctcaaagcaacgtttcccacctccttttactgagtactgaaaaagttttagcaaagtcacagattaggttgaatttcaaaatatatgtactttaaaaagttctgatttccaaatataataaagttaaaattaagtatatactttaggaagttaccaataacttccatcaaagcagagtaggatatatggtaacattaattttcggtcatttcaaatgaggtatatttcttattagggaaattaaagtccctatatttattatatattttttccttattaacagagtattaatctagtaaaaaataacccagcagtaaataataaagaaattactgaatgagaggataatgaatctgaatcatagcaggaatttgcaatattaattatggttagctatttttctctcattgatttttgtgccacttgaatggaacagaagcaagccttatgttttggaaggtctgcggtaaaatgctgtgactgtttactttcaattgcattgtgtgttgcctgtgactgctttcaaacgctagagggggcctctgatttaaagaaataaaaaggacttttctaaaatggatgtgtagtttattttgccttttgtaaagctcttttggctattgtaacttaacaaataaaatcataattgtgtgcatctctg

SEQ ID NO: 245483 - DNA, 2961 bp, Artificial Sequence
  derived and/or modified sequence
atggtgagcaagagcgaccagctgctgatcgtggtgagcatcctggagggcagacacttccccaagagacccaagcacatgctggtggtggaggccaagttcgacggcgagcagctggccaccgaccccgtggaccacaccgaccagcccgagttcgccaccgagctggcctgggagatcgacagaaaggccctgcaccagcacagactgcagagaacccccatcaagctgcagtgcttcgccctggaccccgtgaccagcgccaaggagaccatcggctacatcgtgctggacctgagaaccgcccaggagaccaagcaggcccccaagtggtaccagctgctgagcaacaagtacaccaagttcaagagcgagatccagatcagcatcgccctggagaccgacaccaagccccccgtggacagcttcaaggccaagggcgccccccccagagacggcaaggtgcccgccatcctggccggcctggaccccagagacatcgtggccgtgctgaacgaggagggcggctaccaccagatcggccccgccgagtactgcaccgacagcttcatcatgagcgtgaccatcgccttcgccacccagctggagcagctgatcccctgcaccatgaagctgcccgagagacagcccgagttcttcttctactacagcctgctgggcaacgacgtgaccaacgagcccttcaacgacctgatcaaccccaacttcgagcccgagagagccagcgtgagaatcagaagcagcgtggagatcctgagagtgtacctggccctgcagagcaagctgcagatccacctgtgctgcggcgaccagagcctgggcagcaccgagatccccctgaccggcctgctgaagaagggcagcaccgagatcaaccagcaccccgtgaccgtggagggcgccttcaccctggacccccccaacagagccaagcagaagctggcccccatccccgtggagctggcccccaccgtgggcgtgagcgtggccctgcagagagagggcatcgacagccagagcctgatcgagctgaagacccagaacgagcacgagcccgagcacagcaagaagaaggtgctgacccccatcaaggagaagaccctgaccggccccaagagccccaccgtgagccccgtgcccagccacaaccagagcccccccaccaaggacgacgccaccgagagcgaggtggagagcctgcagtacgacaaggacaccaagcccaaccccaaggccagcagcagcgtgcccgccagcctggcccagctggtgaccaccagcaacgccagcgaggtggccagcggccagaagatcgccgtgcccgccaccagccaccacttctgcttcagcatcgacctgagaagcatccacgccctggagatcggcttccccatcaactgcatcctgagatacagctaccccttcttcggcagcgccgcccccatcatgaccaacccccccgtggaggtgagaaagaacatggaggtgttcctgccccagagctactgcgccttcgacttcgccaccatgccccaccagctgcaggacaccttcctgagaatccccctgctggtggagctgtggcacaaggacaagatgagcaaggacctgctgctgggcatcgccagaatccagctgagcaacatcctgagcagcgagaagaccagattcctgggcagcaacggcgagcagtgctggagacagacctacagcgagagcgtgcccgtgatcgccgcccagggcagcaacaacagaatcgccgacctgagctacaccgtgaccctggaggactacggcctggtgaagatgagagagatcttcatcagcgacagcagccagggcgtgagcgccgtgcagcagaagcccagcagcctgccccccgccccctgccccagcgagatccagaccgagcccagagagaccctggagtacaaggccgccctggagctggagatgtggaaggagatgcaggaggacatcttcgagaaccagctgaagcagaaggagctggcccacatgcaggccctggccgaggagtggaagaagagagacagagagagagagagcctggtgaagaagaaggtggccgagtacaccatcctggagggcaagctgcagaagaccctgatcgacctggagaagagagagcagcagctggccagcgtggagagcgagctgcagagagagaagaaggagctgcagagcgagagacagagaaacctgcaggagctgcaggacagcatcagaagagccaaggaggactgcatccaccaggtggagctggagagactgaagatcaagcagctggaggaggacaagcacagactgcagcagcagctgaacgacgccgagaacaagtacaagatcctggagaaggagttccagcagttcaaggaccagcagaacaacaagcccgagatcagactgcagagcgagatcaacctgctgaccctggagaaggtggagctggagagaaagctggagagcgccaccaagagcaagctgcactacaagcagcagtggggcagagccctgaaggagctggccagactgaagcagagagagcaggagagccagatggccagactgaagaagcagcaggaggagctggagcagatgagactgagatacctggccgccgaggagaaggacaccgtgaagaccgagagacaggagctgctggacatcagaaacgagctgaacagactgagacagcaggagcagaagcagtaccaggacagcaccgagatcgccagcggcaagaaggacggcccccacggcagcgtgctggaggagggcctggacgactacctgaccagactgatcgaggagagagacaccctgatgagaaccggcgtgtacaaccacgaggacagaatcatcagcgagctggacagacagatcagagagatcctggccaagagcaacgccagcaactag

SEQ ID NO: 245484 - DNA, 2883 bp, Artificial Sequence
  derived and/or modified sequence
atgctggtggtggaggccaagttcgacggcgagcagctggccaccgaccccgtggaccacaccgaccagcccgagttcgccaccgagctggcctgggagatcgacagaaaggccctgcaccagcacagactgcagagaacccccatcaagctgcagtgcttcgccctggaccccgtgaccagcgccaaggagaccatcggctacatcgtgctggacctgagaaccgcccaggagaccaagcaggcccccaagtggtaccagctgctgagcaacaagtacaccaagttcaagagcgagatccagatcagcatcgccctggagaccgacaccaagccccccgtggacagcttcaaggccaagggcgccccccccagagacggcaaggtgcccgccatcctggccggcctggaccccagagacatcgtggccgtgctgaacgaggagggcggctaccaccagatcggccccgccgagtactgcaccgacagcttcatcatgagcgtgaccatcgccttcgccacccagctggagcagctgatcccctgcaccatgaagctgcccgagagacagcccgagttcttcttctactacagcctgctgggcaacgacgtgaccaacgagcccttcaacgacctgatcaaccccaacttcgagcccgagagagccagcgtgagaatcagaagcagcgtggagatcctgagagtgtacctggccctgcagagcaagctgcagatccacctgtgctgcggcgaccagagcctgggcagcaccgagatccccctgaccggcctgctgaagaagggcagcaccgagatcaaccagcaccccgtgaccgtggagggcgccttcaccctggacccccccaacagagccaagcagaagctggcccccatccccgtggagctggcccccaccgtgggcgtgagcgtggccctgcagagagagggcatcgacagccagagcctgatcgagctgaagacccagaacgagcacgagcccgagcacagcaagaagaaggtgctgacccccatcaaggagaagaccctgaccggccccaagagccccaccgtgagccccgtgcccagccacaaccagagcccccccaccaaggacgacgccaccgagagcgaggtggagagcctgcagtacgacaaggacaccaagcccaaccccaaggccagcagcagcgtgcccgccagcctggcccagctggtgaccaccagcaacgccagcgaggtggccagcggccagaagatcgccgtgcccgccaccagccaccacttctgcttcagcatcgacctgagaagcatccacgccctggagatcggcttccccatcaactgcatcctgagatacagctaccccttcttcggcagcgccgcccccatcatgaccaacccccccgtggaggtgagaaagaacatggaggtgttcctgccccagagctactgcgccttcgacttcgccaccatgccccaccagctgcaggacaccttcctgagaatccccctgctggtggagctgtggcacaaggacaagatgagcaaggacctgctgctgggcatcgccagaatccagctgagcaacatcctgagcagcgagaagaccagattcctgggcagcaacggcgagcagtgctggagacagacctacagcgagagcgtgcccgtgatcgccgcccagggcagcaacaacagaatcgccgacctgagctacaccgtgaccctggaggactacggcctggtgaagatgagagagatcttcatcagcgacagcagccagggcgtgagcgccgtgcagcagaagcccagcagcctgccccccgccccctgccccagcgagatccagaccgagcccagagagaccctggagtacaaggccgccctggagctggagatgtggaaggagatgcaggaggacatcttcgagaaccagctgaagcagaaggagctggcccacatgcaggccctggccgaggagtggaagaagagagacagagagagagagagcctggtgaagaagaaggtggccgagtacaccatcctggagggcaagctgcagaagaccctgatcgacctggagaagagagagcagcagctggccagcgtggagagcgagctgcagagagagaagaaggagctgcagagcgagagacagagaaacctgcaggagctgcaggacagcatcagaagagccaaggaggactgcatccaccaggtggagctggagagactgaagatcaagcagctggaggaggacaagcacagactgcagcagcagctgaacgacgccgagaacaagtacaagatcctggagaaggagttccagcagttcaaggaccagcagaacaacaagcccgagatcagactgcagagcgagatcaacctgctgaccctggagaaggtggagctggagagaaagctggagagcgccaccaagagcaagctgcactacaagcagcagtggggcagagccctgaaggagctggccagactgaagcagagagagcaggagagccagatggccagactgaagaagcagcaggaggagctggagcagatgagactgagatacctggccgccgaggagaaggacaccgtgaagaccgagagacaggagctgctggacatcagaaacgagctgaacagactgagacagcaggagcagaagcagtaccaggacagcaccgagatcgccagcggcaagaaggacggcccccacggcagcgtgctggaggagggcctggacgactacctgaccagactgatcgaggagagagacaccctgatgagaaccggcgtgtacaaccacgaggacagaatcatcagcgagctggacagacagatcagagagatcctggccaagagcaacgccagcaactag

SEQ ID NO: 245485 - protein, 364 aa, Artificial Sequence
  derived and/or modified sequence
MRPQDSTGVAELQEPGLPLTDDAPPGATEEPAAAEAAGAPDRGRCWLCLSSPCCSRTEPAKKKAPCPGLGLFYTLLSAFLFSVGSLFVKKVQDVHAVEISAFRCVFQMLVVIPCLIYRKTGFIGPKGQRIFLILRGVLGSTAMMLIYYAYQTMSLADATVITFSSPVFTSIFAWICLKEKYSPWDALFTVFTITGVILIVRPPFLFGSDTSGMEESYSGHLKGTFAAIGSAVFAASTLVILRKMGKSVDYFLSIWYYVVLGLVESVIILSVLGEWSLPYCGLDRLFLIFIGLFGLGGQIFITKALQIEKAGPVAIMKTMDVVFAFIFQIIFFNNVPTWWTVGGALCVVASNVGAAIRKWYQSSK

SEQ ID NO: 245486 - DNA, 1095 bp, Artificial Sequence
  derived and/or modified sequence
atgagaccccaggacagcaccggcgtggccgagctgcaggagcccggcctgcccctgaccgacgacgccccccccggcgccaccgaggagcccgccgccgccgaggccgccggcgcccccgacagaggcagatgctggctgtgcctgagcagcccctgctgcagcagaaccgagcccgccaagaagaaggccccctgccccggcctgggcctgttctacaccctgctgagcgccttcctgttcagcgtgggcagcctgttcgtgaagaaggtgcaggacgtgcacgccgtggagatcagcgccttcagatgcgtgttccagatgctggtggtgatcccctgcctgatctacagaaagaccggcttcatcggccccaagggccagagaatcttcctgatcctgagaggcgtgctgggcagcaccgccatgatgctgatctactacgcctaccagaccatgagcctggccgacgccaccgtgatcaccttcagcagccccgtgttcaccagcatcttcgcctggatctgcctgaaggagaagtacagcccctgggacgccctgttcaccgtgttcaccatcaccggcgtgatcctgatcgtgagaccccccttcctgttcggcagcgacaccagcggcatggaggagagctacagcggccacctgaagggcaccttcgccgccatcggcagcgccgtgttcgccgccagcaccctggtgatcctgagaaagatgggcaagagcgtggactacttcctgagcatctggtactacgtggtgctgggcctggtggagagcgtgatcatcctgagcgtgctgggcgagtggagcctgccctactgcggcctggacagactgttcctgatcttcatcggcctgttcggcctgggcggccagatcttcatcaccaaggccctgcagatcgagaaggccggccccgtggccatcatgaagaccatggacgtggtgttcgccttcatcttccagatcatcttcttcaacaacgtgcccacctggtggaccgtgggcggcgccctgtgcgtggtggccagcaacgtgggcgccgccatcagaaagtggtaccagagcagcaagtag

SEQ ID NO: 245487 - DNA, 1095 bp, Artificial Sequence
  derived and/or modified sequence
atgaggcctcaggatagcacaggagtggcagagcttcaggagccaggccttcctctaacagacgacgccccgccgggcgcgacggaggagcctgctgctgcagaggctgcgggggcacctgaccgcggccgctgttggttgtgcctgtcatcaccatgttgcagcaggaccgagcccgcaaagaaaaaggccccatgtccagggctgggcctcttctataccctactgtcagcttttctgttttcggtaggttccttgttcgtaaagaaggtgcaagatgtccatgcagtggagatcagtgcgttcaggtgcgtctttcagatgctcgtggtgattccctgtctgatctacagaaagaccggctttatcggaccaaaaggccagcggatctttcttatactccgaggagtcctggggtctaccgcgatgatgctgatatattatgcataccaaaccatgtcactggctgatgccaccgtgataacgttctcatcgccagtctttacgtctatctttgcatggatctgccttaaggagaagtattctccttgggacgcactgtttaccgttttcactatcaccggtgttattctgattgtgagaccacctttcttgttcggctccgacaccagcgggatggaagaatcttacagcggacacttgaaaggaactttcgcagctatcggctccgcagtcttcgccgcttccacactggtgatcctgcgtaagatgggaaagagcgttgattacttcctgtcaatctggtactatgtggtcctcggattagttgagagcgttatcattctgtctgttctgggggagtggtccctgccctactgtggactagatcggctctttcttattttcatcgggctgttcggacttggcggacagatcttcataactaaggctttgcagatcgaaaaggccggaccggtggcgataatgaagaccatggatgtagtattcgctttcatatttcagatcatttttttcaataatgtgccaacttggtggacagttggcggggcactctgtgtcgttgcctctaatgtgggggctgccattaggaaatggtaccagagttcaaagtag

SEQ ID NO: 245488 - DNA, 1095 bp, Artificial Sequence
  derived and/or modified sequence
atgaggccccaggacagcactggagtggccgagctgcaggagcccggcctgcccctgacagatgatgcccctcctggggccacagaggagcctgctgctgctgaggccgccggggccccagaccggggccgctgctggctgtgcctgagcagcccctgctgcagcaggacagagcccgccaagaagaaggccccctgccccggcctgggcctcttctacaccctgctgagcgccttcctgttctctgtgggcagcctgtttgtgaagaaggtgcaggatgtgcatgctgtggagatcagcgccttccgctgtgtgttccagatgctggtggtgatcccctgcctgatctacaggaagacaggcttcatcggccccaagggccagaggatcttcctgatcctgcggggcgtgctgggcagcacagccatgatgctgatctactatgcctaccagaccatgagcctggctgatgccaccgtcatcaccttcagcagccctgtgttcaccagcatctttgcctggatctgcctgaaggagaagtacagcccctgggatgccctcttcaccgtcttcaccatcaccggggtcatcctgattgtgcggccccccttcctgtttggaagtgacaccagcggcatggaggagagctacagcggccacctgaagggcacctttgctgccatcggcagcgctgtgtttgctgccagcaccctggtgatcctgaggaagatgggcaagtctgtggactacttcctgagcatctggtactacgtggtgctgggcctggtggagagcgtcatcatcctgtctgtgctgggggagtggagcctgccctactgcggcctggacaggctcttcctgatcttcatcggcctgtttggcctgggcggccagatcttcatcaccaaggccctgcagatcgagaaggccggccctgtggccatcatgaagaccatggatgtggtgtttgccttcatcttccagatcatcttcttcaacaacgtgcccacctggtggacagtgggcggggccctgtgtgtggtggccagcaatgtgggcgccgccatcaggaagtggtaccagagcagcaagtag

SEQ ID NO: 245489 - DNA, 1095 bp, Artificial Sequence
  derived and/or modified sequence
atgcggccccaggacagcaccggcgtggccgagctgcaggagcccgggctgccgttgactgatgatgctcctcccggtgctaccgaagagccagccgctgccgaagccgctggcgccccagaccgaggtcgctgctggctgtgtctatctagcccttgttgttcgagaacagagcccgcgaaaaagaaggccccctgcccgggactaggcctcttctatacgctactctccgctttcctattctcagtaggcagtctgttcgttaagaaggtgcaagatgtgcatgccgtcgagatttctgctttcaggtgtgtgttccagatgctagtggtgatcccatgcctaatttatagaaaaacagggtttatcggacccaaaggccagcggatcttcctgattctccgaggcgttctgggctccacggcaatgatgctgatttactacgcttaccagacaatgagcttggccgatgctacagtgataaccttttcctcaccggtctttacttcaatctttgcttggatctgccttaaagagaagtattcgccgtgggatgcactgttcaccgtcttcactatcaccggcgttatccttattgtgaggccacctttcctgttcggttcagatacgtcaggaatggaagagtcatactcgggacatctgaagggcacttttgccgctattgggtccgccgtcttcgctgcctcaaccttggtcatccttcgtaagatgggaaaaagcgttgactacttcttgtccatctggtattatgtggtgttaggactagtggaatctgtgatcattctctccgtgttgggggagtggagcctaccatattgtgggctcgatcgcctcttcttgattttcatcggattgttcggcttagggggacagatcttcattaccaaagctctccagatcgaaaaggcagggcccgtggctataatgaaaacgatggatgtggtgttcgcattcatctttcagatcatattttttaataatgtcccaacatggtggacagtgggaggggctctttgcgtggtggcgtccaatgtgggagcggccattagaaaatggtatcagagctccaagtag

SEQ ID NO: 245490 - DNA, 1095 bp, Artificial Sequence
  derived and/or modified sequence
atgcggcctcaggattcgaccggcgtggcagagctccaggagccaggtctgccactgaccgatgacgccccacctggcgctaccgaagagcctgccgcagcagaggctgccggagcacctgacagaggacggtgctggctgtgcctgtccagcccttgctgtagccgaacagagcctgccaagaaaaaggccccttgccccggtcttgggctgttttatacgctgctctccgccttcctgttttcagtggggtcactgttcgtaaagaaggtgcaggacgtgcacgccgtggagatcagcgccttcagatgtgtctttcagatgttggtggtgataccatgtctgatctacaggaagaccggcttcatagggccaaagggacagcggatattcctgatcctgcgaggcgtccttggatcgaccgctatgatgcttatttattatgcatatcagaccatgagcctggccgatgccacagtaatcacgttttcatctccggtgtttacaagcattttcgcatggatctgcctgaaagagaaatactccccgtgggacgctctcttcacagtgtttaccattacaggcgtgatcctgatagttagacccccatttctttttggtagtgacacctccggtatggaggaatcctattccggccatcttaagggaacgttcgccgctatcggcagcgccgtgttcgccgcaagcacactggtgatcctgcggaaaatgggcaaatccgtagactactttttgtcgatatggtattatgtcgtcttaggccttgttgagagtgtgatcatactctctgtgctgggagaatggagtctcccctattgcggtctcgacaggttatttctgattttcatcggattgttcggcctaggcggacagatcttcatcacaaaagccctgcaaattgaaaaagccggacctgtggccattatgaagactatggatgtggtgtttgctttcatctttcaaattatcttttttaataatgtcccaacctggtggacagtaggcggagcactctgcgtggtggcctccaatgtgggtgctgccattcgcaagtggtatcagtcttcaaagtag

SEQ ID NO: 245491 - DNA, 3490 bp, Artificial Sequence
  derived and/or modified sequence
agcccaggcgctgctgctggcgccagacggcaccggccgctggtagagcgcgtgccgcgagatgcggcctcaggacagcaccggggtcgcggagctccaggagcccgggctgccgctaacggacgatgcacccccgggcgccactgaggagccggcggccgccgaggcagctggggcgccagaccgcggtaggtgctggctctgcctttcctcgccgtgttgctcccgcaccgagccggccaagaagaaagcaccctgtcctggacttggcttgttttacacattattgtctgccttccttttctcagtgggctctttatttgttaaaaaagtgcaagacgtccatgctgtagagattagtgcgtttcgatgtgtgttccaaatgctagttgttatcccttgcttaatatacagaaaaactgggtttataggcccaaaaggtcaacgaattttcctcattctcagaggagtccttggttctaccgccatgatgcttatatactatgcttaccagacaatgtccctcgctgatgccacagttatcacgtttagcagtccagtgtttacgtccatatttgcttggatatgtctcaaggaaaaatatagcccttgggatgctcttttcaccgtgttcacaatcactggagtgatccttatcgtgagaccaccatttttgtttggttccgacacttcggggatggaagaaagctattcaggccaccttaagggaacattcgcagcaattggaagtgccgtatttgctgcatcgactctagttatcctaagaaaaatgggaaaatctgtggactactttctgagcatttggtattatgtagtacttggcctcgttgaaagtgtcatcatcctctctgtattaggagagtggagtctgccttactgtgggttggacaggctatttctcatattcattgggctctttggtttggggggtcagatatttatcacaaaagcacttcaaatagaaaaagcagggccagtagcaataatgaagacaatggatgtggtctttgcttttatctttcagattattttctttaataatgtgccaacgtggtggacagtgggtggtgctctctgcgtagtagccagtaatgttggagcggccattcgtaaatggtaccaaagttccaaatgaagcatcattgctgaaatacatatttttttcaagtacaccatcacctaattcacatacagcatacgcacacatctggaaaatctgcattttcttcattggttgtatttaataaattgcctaaagtaccatttttgaatatagtatgtctttagttaagaatagctagtctgtttggtgtaacaattttttggtagctttggttttggttttggttttttttgttgttgttgttggggtcaagttggtgagaggagagctcattgtttgaagaaaaaccaaaacattttatggctagtaatatttatgtaatttttaaaatgtatttttggtactgatgggatatgggtggggaggctattttagatattcttttagcagtgtagagcctaagaaacttggttctactaccatgatctttataaactatgccttccagacaattgataatgctgctataattagtattatgttgataattcatttgcaaccttattctatttaggaggatgaagttgaagcttagaataggtgcctgcttaatggtgttaataatacaaatgaattggccttattttcaaggattttataaatgattatcatacttgtaactcatatttgtgccttttcattttaatgctggaatttttattatgtcacctctaaaacacttaaattgccaaatttggctagtagttttgtttcagtggcattagcaactgcagctagcatactataattttaattgtcctcacttttttttgaaactgcactaaatttttcttaacattccaagatttcagatctctaaatcacaaagagaaatcttggcatgaccagtgtgcacgtttccatcctgaagtgttttctcttcactagaaatgtgattttctataaattccccttgaatttatagtgtgatgccaaataaaattttctcaggatcttattaggttgaaccatatgtaattgccaagattttactattttaacttagaaaaaccatcgtttcatatgattcaccctaatagatacctccattattctctaaatgaaatagaagactttggagtatatgtttttaaagtaattttttaaaatatggtaatgtattaaacttatttttatagttatgaaattatgtgtaataatgctttatgttatacattaaatgtaaagacttgtgaatccatgtttgattgactttcatagtttcctgcattgaaataaaatcactatgaattctagtttatcagcatgatgttaaatgtcagtgccataccatgatgcagcaccatgacactaacgccatgaattcaaacagcacgttttacacctggaacttcatcagaccaatactttgcagttagagagaatttaatatctagaaaagcttgggaggttagtcaggacttagggagtatacataaatggttacttgttgtaatgagccctttattggtgaggttgcaatagcttccagctcttactgtgtcagatgaagcatctgtcattatcttaagcctgcagagttgaaaggttataggctctttcctaccctctcatcataatttttccaaagcaaagaggaacttggcttctggggttcgtgccttagtgagaaagaatcttttccaatagttccaatgggggaatttttggcttgctgattttatcaattgccttgacacctgacaaaccctaaatgaagtctatgtaggtgagtcatctctgttccacctgatttacagtattggaatttagacttgcaaaaacatcattctgcaaatatcttagataattacagaatcaggagcatttgagaactctagaggtctcagaaatcatcacataggggccatgcttcgtagatagggatgatagagaggagacctgcccaagttgaatttccatggccttcctcccttccttagttccatgataaagtatggacagtaaaccactacttgagctacctaaggtgaattaactctcagggaaccctcttccagttctttaccttgcacagtgaaagaatcagtggcacctagaaagttaaatccctttaggcccatacactagagacatgttttgtttgaacaatgtagtttaagtacttgaatgtcacactatataactgaggttagagaaaatgtttcttctagcccttacagggtgtgattcttaaacacaatgtccaaggtgtatacaaggatatgtattgtaacaactatgggtatgtatattttgcagagcgtagtttctatatcttgaaaaggaaaatattttcataaattgtttttataagtactaataaaataatatgaaagaaagcta

SEQ ID NO: 245492 - protein, 763 aa, Artificial Sequence
  derived and/or modified sequence
MEASLTRRLLFKDRHFTCSKIIGRRFACFAQRLSHRRKQSQCDLLNESTGQLPTTCSSAASNSINWNCRVKMTQQMQNLHLCQSKKHSAPSSPNAAKRLYRNLSEKLKGSHSSFDEAYFRTRTDRLSLRKTSVNFQGNEAMFEAVEQQDMDAVQILLYQYTPEELDLNTPNSEGLTPLDIAIMTNNVPIARILLRTGARESPHFVSLESRAMHLNTLVQEAQERVSELSAQVENEGFTLDNTEKEKQLKAWEWRYRLYRRMKTGFEHARAPEMPTNVCLMVTSSTSLTVSFQEPLSVNAAVVTRYKVEWSMSEDFSPLAGEIIMDNLQTLRCTITGLTMGQQYFVQVSAYNMKGWGPAQTTTPACASPSNWKDYDDREPRHKGQSEVLEGLLQQVRALHQHYSCRESTKLQTTGRKQSVSRSLKHLFHSSNKFVKTLKRGLYIAVIFYYKDNILVTNEDQVPIVEIDDSHTSSITQDFLWFTKLSCMWEDIRWLRQSIPISSSSSTVLQTRQKMLAATAQLQNLLGTHNLGRVYYEPIKDRHGNILIVTIREVEMLYSFFNGKWMQISKLQSQRKSLSTPEEPTALDILLITIQDILSYHKRSHQRLFPGLYLGYLKLCSSVDQIKVLVTQKLPNILCHVKIRENNNISREEWEWIQKLSGSESMESVDHTSDCPMQLFFYELQMAVKALLQQINIPLHQARNFRLYTQEVLEMGHNVSFLLLLPASDDVCTAPGQNNPYTPHSGFLNLPLQMFELGIVACFT

SEQ ID NO: 245493 - DNA, 2292 bp, Artificial Sequence
  derived and/or modified sequence
atggaggccagcctgaccagaagactgctgttcaaggacagacacttcacctgcagcaagatcatcggcagaagattcgcctgcttcgcccagagactgagccacagaagaaagcagagccagtgcgacctgctgaacgagagcaccggccagctgcccaccacctgcagcagcgccgccagcaacagcatcaactggaactgcagagtgaagatgacccagcagatgcagaacctgcacctgtgccagagcaagaagcacagcgcccccagcagccccaacgccgccaagagactgtacagaaacctgagcgagaagctgaagggcagccacagcagcttcgacgaggcctacttcagaaccagaaccgacagactgagcctgagaaagaccagcgtgaacttccagggcaacgaggccatgttcgaggccgtggagcagcaggacatggacgccgtgcagatcctgctgtaccagtacacccccgaggagctggacctgaacacccccaacagcgagggcctgacccccctggacatcgccatcatgaccaacaacgtgcccatcgccagaatcctgctgagaaccggcgccagagagagcccccacttcgtgagcctggagagcagagccatgcacctgaacaccctggtgcaggaggcccaggagagagtgagcgagctgagcgcccaggtggagaacgagggcttcaccctggacaacaccgagaaggagaagcagctgaaggcctgggagtggagatacagactgtacagaagaatgaagaccggcttcgagcacgccagagcccccgagatgcccaccaacgtgtgcctgatggtgaccagcagcaccagcctgaccgtgagcttccaggagcccctgagcgtgaacgccgccgtggtgaccagatacaaggtggagtggagcatgagcgaggacttcagccccctggccggcgagatcatcatggacaacctgcagaccctgagatgcaccatcaccggcctgaccatgggccagcagtacttcgtgcaggtgagcgcctacaacatgaagggctggggccccgcccagaccaccacccccgcctgcgccagccccagcaactggaaggactacgacgacagagagcccagacacaagggccagagcgaggtgctggagggcctgctgcagcaggtgagagccctgcaccagcactacagctgcagagagagcaccaagctgcagaccaccggcagaaagcagagcgtgagcagaagcctgaagcacctgttccacagcagcaacaagttcgtgaagaccctgaagagaggcctgtacatcgccgtgatcttctactacaaggacaacatcctggtgaccaacgaggaccaggtgcccatcgtggagatcgacgacagccacaccagcagcatcacccaggacttcctgtggttcaccaagctgagctgcatgtgggaggacatcagatggctgagacagagcatccccatcagcagcagcagcagcaccgtgctgcagaccagacagaagatgctggccgccaccgcccagctgcagaacctgctgggcacccacaacctgggcagagtgtactacgagcccatcaaggacagacacggcaacatcctgatcgtgaccatcagagaggtggagatgctgtacagcttcttcaacggcaagtggatgcagatcagcaagctgcagagccagagaaagagcctgagcacccccgaggagcccaccgccctggacatcctgctgatcaccatccaggacatcctgagctaccacaagagaagccaccagagactgttccccggcctgtacctgggctacctgaagctgtgcagcagcgtggaccagatcaaggtgctggtgacccagaagctgcccaacatcctgtgccacgtgaagatcagagagaacaacaacatcagcagagaggagtgggagtggatccagaagctgagcggcagcgagagcatggagagcgtggaccacaccagcgactgccccatgcagctgttcttctacgagctgcagatggccgtgaaggccctgctgcagcagatcaacatccccctgcaccaggccagaaacttcagactgtacacccaggaggtgctggagatgggccacaacgtgagcttcctgctgctgctgcccgccagcgacgacgtgtgcaccgcccccggccagaacaacccctacaccccccacagcggcttcctgaacctgcccctgcagatgttcgagctgggcatcgtggcctgcttcacctag

SEQ ID NO: 245494 - DNA, 2292 bp, Artificial Sequence
  derived and/or modified sequence
atggaggccagtctgacgcggcgactgcttttcaaggatcggcacttcacatgctctaagatcatcggaaggcgttttgcctgtttcgcacaacgcttgtcccatcgccggaagcaaagtcagtgcgaccttctgaatgagtccacaggccaactccctacgacatgttcatctgcggcctctaattcaattaattggaactgccgtgttaagatgacacaacagatgcagaatctgcatttgtgccagagtaaaaagcattccgcaccgagcagcccgaacgctgccaaacggctttatagaaatctgtccgagaagctgaagggttcccactcaagtttcgacgaggcctactttcgaacgagaactgaccggctgagcctgcgcaagacctcagtcaacttccaggggaacgaggccatgtttgaggccgtggagcagcaggacatggacgcagtgcagattctgctctaccagtatacacccgaggagctggacctgaatacgcctaattccgagggtttaacacccctagacatcgcaattatgaccaataacgtgccaatcgcccgcatacttctccgaaccggggcgagagagagtccgcactttgtgtctttggaaagccgggctatgcacctgaataccctagtgcaggaggcccaggagcgggtgagcgaactatccgcgcaggtggagaatgaggggtttaccctggacaacaccgaaaaagaaaaacagctgaaggcgtgggaatggcgttatcgtctctaccggagaatgaagactggctttgagcacgcaagggccccagaaatgcccaccaatgtgtgtctgatggtgacctctagcaccagcctgacagttagttttcaggaaccgctcagcgtgaatgcggctgtggtaaccaggtataaggtagagtggtccatgtcggaggatttctctcccctggccggggagataatcatggataatctccagacactccgctgcactatcactggcttgaccatgggccagcagtacttcgtccaagtgtccgcgtataatatgaaggggtgggggcccgctcagacgactacaccagcttgcgcctctccgtcaaattggaaagactacgacgatagagaacctcggcataaagggcaaagcgaggtgcttgaagggttgttacagcaggtaagggcacttcaccagcactatagttgtagggaatcaacgaaattgcaaaccaccggacgaaagcaaagcgtgtcacgctccctgaaacacttatttcatagtagtaacaagttcgttaaaactctcaagagagggctgtatatagccgttattttctactataaagataatatcttagtcacgaacgaggaccaggtgcccatcgtggagattgatgattcacatacatcctctattacgcaggatttcctgtggttcacaaagctcagttgcatgtgggaggatatcagatggttgaggcagtcgataccgatcagcagcagctcgagcaccgtcctccaaacgcggcaaaagatgctcgccgccaccgcgcagctccagaatttattaggcacccacaacctggggcgggtctactacgaacccatcaaagaccgacatgggaacatcctgatcgtgacaatacgggaggtggagatgctgtactccttctttaacggtaagtggatgcagattagtaagctgcaaagtcaacgtaaaagtctgagcacacctgaggagcctacagcgctcgatatcctcctgatcaccatacaggatatcctgagttatcacaaacgctcccaccagaggctgtttcctgggctgtacctcggctacctcaagttatgtagctccgtcgatcagattaaggtcctagtgacacaaaaactgcccaatattctctgtcacgtgaagatccgagagaataacaacatttcccgggaggagtgggaatggattcagaaactcagcggcagcgaaagcatggagagcgttgatcacactagcgattgtcctatgcaactgttcttttatgaactgcagatggccgtcaaggccctgttacagcagataaatatacccctccaccaggccaggaatttccgactctatacacaggaagtccttgagatgggtcacaacgtatcttttcttcttctgctgccagcatctgacgatgtgtgcaccgcacccggtcaaaataacccgtacaccccccattctggttttctgaatttgccccttcagatgttcgaactgggtattgtggcttgctttacctag

SEQ ID NO: 245495 - DNA, 2292 bp, Artificial Sequence
  derived and/or modified sequence
atggaggccagcctgacccggcggctgctcttcaaggacagacacttcacctgcagcaagatcatcggccgccgctttgcctgctttgcccagaggctgagccacaggaggaagcagagccagtgtgacctgctgaatgaaagcacaggccagctgcccaccacctgcagcagcgctgccagcaacagcatcaactggaactgccgggtgaagatgacccagcagatgcagaacctgcacctgtgccagagcaagaagcacagcgcccccagcagccccaatgctgccaagaggctgtacagaaacctgtctgagaagctgaagggcagccacagcagctttgatgaggcctacttccgcaccaggacagaccggctgagcctgaggaagacctctgtgaacttccagggcaatgaggccatgtttgaggccgtggagcagcaggacatggatgctgtgcagatcctgctgtaccagtacaccccagaggagctggacctgaacacccccaacagcgagggcctgacccccctggacatcgccatcatgaccaacaacgtgcccatcgcccgcatcctgctgaggactggagcccgggagagcccccactttgtgtccctggagagccgggccatgcacctgaacaccctggtgcaggaggcccaggagcgggtgtctgagctgagcgcccaggtggagaatgaaggcttcaccctggacaacacagagaaggagaagcagctgaaggcctgggagtggagataccgcctgtacagaaggatgaagacaggctttgaacatgcccgggcccctgagatgcccaccaacgtgtgcctgatggtgaccagcagcaccagcctgactgtgtccttccaggagcccctgtctgtgaatgctgctgtggtgacccgctacaaggtggagtggagcatgtctgaggacttcagccccctggccggggagatcatcatggacaacctgcagaccctgcgctgcaccatcaccggcctgaccatgggccagcagtactttgtgcaggtgtctgcctacaacatgaagggctggggccctgcccagaccaccaccccagcctgtgccagccccagcaactggaaggactatgatgaccgggagcccaggcacaagggccagagcgaggtgctggagggcctgctgcagcaggtgcgggccctgcaccagcactacagctgccgggagagcaccaagctgcagaccactggaaggaagcagagcgtgagccgcagcctgaagcacctgttccacagcagcaacaagtttgtgaagaccctgaagaggggcctgtacatcgccgtcatcttctactacaaggacaacatcctggtgaccaatgaagaccaggtgcccatcgtggagattgatgacagccacaccagcagcatcacccaggacttcctgtggttcaccaagctgagctgcatgtgggaggacatccgctggctgcggcagagcatccccatcagcagcagcagcagcacagtgctgcagacccggcagaagatgctggccgccacagcccagctgcagaacctgctgggcacccacaacctgggccgggtgtactatgagcccatcaaggacagacatggcaacatcctgattgtgaccatccgggaggtggagatgctgtacagcttcttcaacgggaagtggatgcagatcagcaagctgcagagccagaggaagagcctgagcaccccagaggagcccacagccctggacatcctgctgatcaccatccaggacatcctgagctaccacaagaggagccaccagaggctcttccctggcctgtacctgggctacctgaagctgtgcagctctgtggaccagatcaaggtgctggtgacccagaagctgcccaacatcctgtgccacgtgaagatccgggagaacaacaacatcagccgggaggagtgggagtggatccagaagctgagcggcagcgagagcatggagagcgtggaccacaccagtgactgccccatgcagctgttcttctatgagctgcagatggctgtgaaggccctgctgcagcagatcaacatccccctgcaccaggccaggaacttccggctgtacacccaggaggtgctggagatgggccacaacgtgtccttcctgctgctgctgcctgccagtgatgatgtgtgcacagcccctggccagaacaacccctacaccccccacagcggcttcctgaacctgcccctgcagatgtttgagctgggcatcgtggcctgcttcacctag

SEQ ID NO: 245496 - DNA, 2292 bp, Artificial Sequence
  derived and/or modified sequence
atggaggccagcctgacccggcggctgctgttcaaggaccggcacttcacctgcagcaagatcatcggaagaagatttgcttgtttcgcccagagattgtctcataggagaaagcagagtcagtgcgatctcctgaacgaatcgacgggtcagttgcctacgacatgtagctccgccgcaagcaattccatcaactggaactgccgggtgaaaatgacccagcaaatgcagaatctccatctctgccagagcaaaaagcacagcgccccatcctcgccaaatgccgccaagcggctctatcgcaatctttccgaaaagctgaagggctctcactcctcatttgacgaagcctatttcaggactcgcaccgacagactgtcactgaggaagacctcagtcaatttccaggggaacgaggctatgtttgaagcagtggaacagcaggacatggatgcggtgcagatcctgctttaccaatataccccagaagagctggacctgaacacgccaaacagtgagggtctaactcctttagatattgcgattatgactaacaatgtgcctatcgccaggattctgctacggacaggtgcaagagaatccccccattttgtttcactggaatcaagagctatgcacctaaacaccctcgtgcaggaagcacaggaaagggtgtcagagctgtctgctcaagttgagaatgagggctttacactcgataacacagaaaaggagaaacagctgaaagcttgggaatggcgttacaggctgtatcggcgcatgaaaaccgggtttgagcacgctagggcccccgagatgcccactaatgtctgcctaatggtcacttcttccaccagcctgactgtttccttccaggaacctctgtctgttaatgctgcagtggttaccaggtataaagtagagtggagcatgtctgaggatttcagcccactggccggcgaaatcatcatggacaacctccaaactctccgctgtactatcacagggctgactatgggccaacagtatttcgtgcaggtcagtgcgtacaacatgaaaggctgggggccggctcaaaccacgacccccgcctgtgcatccccatctaactggaaagactacgacgaccgggaaccacgccataagggccagagtgaagtactggagggtctccttcagcaggttcgagcccttcatcagcactactcatgtcgggagagtaccaaactgcaaaccacagggcggaaacagtcagtgagccgatctttgaagcatctgttccactcctctaacaaatttgtgaaaaccctgaagagaggcctgtacattgctgtcattttctattacaaggataacatcctggtgaccaatgaggaccaggttcccattgtggaaatagatgactctcacacttcctccatcactcaggatttcttgtggtttaccaagctatcttgcatgtgggaagacattcgatggctgcgtcaaagcatccctatcagcagctcctccagcactgtattgcagacaaggcagaaaatgctggctgccacagcgcagctgcagaatctcctgggaacccacaaccttggaagagtctactatgagcccatcaaagacagacacggcaacattctgattgtgaccatcagggaggtcgagatgctgtattcattttttaatgggaaatggatgcagattagtaaactgcagagtcaacgtaaatcactgtccacacccgaagagccaaccgcactggatattctgctcatcacaatccaagacatacttagctaccacaaaaggtcccatcagaggctatttcccggactgtatctaggatacctcaagttgtgctcctcagtagatcagatcaaggtcttagttacccagaaacttccaaatatactgtgccatgttaagattcgggagaataataatatctccagggaagaatgggaatggatccagaagctcagcggcagtgagagcatggagagtgtggaccatacctcagattgcccaatgcagctgtttttctatgagctgcagatggctgttaaggcacttctccaacagatcaacatccctctccaccaggcccggaacttcagactctatacacaggaggtgttagaaatgggtcataatgtctcgtttctgctgctgctgccagcgagcgacgatgtgtgcacagcccccggtcagaacaatccatatacaccccatagtggcttcctgaatttgcccctccagatgtttgagttgggaatcgtggcatgcttcacatag

SEQ ID NO: 245497 - DNA, 2426 bp, Artificial Sequence
  derived and/or modified sequence
ctctttcaactcaagagctcagtcctgtgtctctcatggaggcgtctctaaccaggaggctactctttaaagacaggcattttacttgcagcaaaataataggaaggagattcgcttgctttgcacagaggctgagccacaggagaaagcaaagccaatgtgatttattgaatgaaagcactggacaattaccaacaacttgttcctctgctgcctcgaacagcataaactggaattgtcgtgtgaaaatgacgcaacaaatgcaaaatttacatctctgtcagtcaaaaaaacatagtgctccctcatctcccaacgcagccaaacgcctgtacaggaacctctctgagaaactgaaagggagccactcttccttcgatgaggcctattttaggacaagaactgatcggctgagtctcaggaagacctcggtgaatttccagggcaatgaagccatgtttgaggcagtcgaacagcaggacatggatgctgtgcagatcctcctgtatcagtacacaccagaagaacttgacctcaacacacctaacagcgagggcttgacacccctggatattgccatcatgaccaacaatgtgcccattgcaaggattcttctgaggacaggggcccgagaaagtccacactttgtcagcctggaaagccgagcaatgcacctcaacacactggtccaggaagcccaggagagggtgagtgaactgtctgcccaggtggagaatgaaggattcactctggacaacacagagaaagagaagcagctgaaagcttgggagtggaggtatcggctctacagacgcatgaaaacaggctttgagcatgccagagcccctgagatgccaaccaatgtctgtctcatggtaaccagcagcacatcactcactgtcagcttccaagagcctcttagcgtcaatgcagctgtagtaaccaggtataaagtggaatggagtatgtccgaagacttttctcctttggctggagaaatcatcatggataatctgcagactctgagatgcacaatcacaggacttacaatgggccaacagtattttgttcaagtctcggcttacaatatgaaaggatggggacctgctcagaccacgacaccggcatgtgcctctccttctaactggaaagactatgacgacagagagcccagacacaagggacagagtgaagttttggaaggtctgctgcagcaggtccgagcccttcatcagcattacagttgccgggaaagcacaaaattacaaaccacaggccgcaagcagtcagtctcaagaagcctgaaacacctgttccattcctcgaacaagtttgtgaagaccttaaaacggggactctacatagccgttatattttattacaaagacaatatcttagtcaccaatgaagatcaagtaccaattgttgaaatagatgactctcacaccagttctattacacaagattttctgtggttcacgaagctgtcttgtatgtgggaagatataaggtggctgaggcaaagcataccaatatcctcatcctcatccacagtgctgcaaactcggcagaagatgctcgcagcaacagcacagctacagaatttacttgggacacacaacttgggaagagtttactatgagcccattaaagatcgacatggaaacatactcatagtcaccatcagggaggtggagatgctttattcattttttaatggcaaatggatgcagatctcaaagctgcaaagccagagaaagtctctatcaacacctgaggagccaacagctttagacattctactgataaccatccaggatattctatcctatcacaaaaggagtcatcagcgtctctttcctggattatatctgggttacctaaagctctgtagctctgtggatcaaatcaaagttcttgttacccaaaagttgcccaacattctctgccacgtgaagatccgtgaaaacaataatatttctagagaggaatgggaatggatccaaaagctttctggctctgaatctatggaaagtgtggatcatacttctgactgccccatgcaattgttcttctacgagctccagatggcagtgaaagctctccttcagcagatcaatatacctctacaccaggcaaggaacttccgcctctacacacaggaggtgttggaaatgggtcacaatgtgtcctttcttctcctgctccctgcctcagacgacgtctgtacagccccaggacagaataatccttacaccccacactcagggtttcttaacctccctcttcagatgtttgaacttggtatagtagcttgtttcacctagaaatattaacccagcctccttataataaaatcacaaagttatatctgttcccccttgtcccagtggagggtcaataaatcacatgatggctttggcaac

SEQ ID NO: 245498 - DNA, 2292 bp, Artificial Sequence
  derived and/or modified sequence
atggaagcgagcctgaccagaaggttgttgttcaaggacagacacttcacttgctctaagatcattgggagacggttcgcctgctttgcccagaggttgagccatcgcaggaaacaaagtcaatgcgatcttttaaatgagtcgaccggtcagctgcccactacgtgctcctccgcggcttcaaactcaattaactggaattgtcgagtgaagatgacccagcagatgcaaaacctgcatctttgtcagtctaagaagcattccgcaccatcaagcccgaatgccgctaagcgtctgtaccggaaccttagtgaaaagcttaaaggctcacactctagcttcgacgaagcctacttcaggaccaggaccgatcgtctgtcgctccggaagacctctgttaacttccagggcaatgaagccatgttcgaagccgtggagcaacaagatatggacgctgtgcaaattcttttgtaccagtatacccccgaagagctggatctgaacactccaaacagtgaaggcttaacccctctcgacatcgccatcatgacaaacaatgtgcccatcgccagaattttgctgcgaaccggggctagggagagcccgcatttcgtgagcctagagtcaagagcaatgcatctgaataccctggtgcaggaagctcaagagagggtgtctgagctgtccgctcaggtggagaatgaaggattcacgctagacaataccgagaaggagaaacagctgaaagcctgggaatggagataccgtctgtatcgaagaatgaaaaccggctttgaacacgcacgggcacccgagatgcccacaaatgtctgtctgatggtcacctcaagcacatctctaacagtttcttttcaggaacctttgagcgtcaatgcggctgttgtgactcggtacaaggtcgagtggagcatgtccgaagacttttctccactggcgggagaaatcatcatggacaatctccagactttgcgatgtactatcaccggcttaactatggggcagcagtatttcgtccaggtcagcgcgtacaatatgaaaggctggggtcccgcacaaaccaccacgccagcctgcgcatctcccagcaattggaaggactacgacgacagagagccacgacacaagggccagagcgaggtgttagaaggcctcttgcagcaggtcagagcacttcatcagcattatagctgtagggagagcacaaaactacagacaaccggacggaagcagagtgtttcccgcagtttgaagcacttgtttcactctagcaacaaatttgtgaagacactcaagagaggcctgtacatcgctgtaatcttctactacaaggacaatatccttgtaaccaacgaggatcaagtgcctatcgtggagatcgatgattcccatactagcagtattacacaggacttcttgtggttcacaaaacttagctgtatgtgggaagatattaggtggctcagacagtccatccctatctcatcaagctcaagtactgtacttcagacccgacagaagatgcttgctgccaccgcacagctgcagaatttgctgggcactcataacttagggagggtatattacgaacctattaaggacaggcatgggaacattctaattgtgaccattagagaggtcgaaatgctgtactcattttttaacggcaaatggatgcagatctctaagctccaaagccagcggaaatcgttatccaccccagaggaacctactgctctggatatactcctcatcaccattcaggacattttgagttatcacaaacgcagtcaccagagactgtttccgggactatacctcggctacctcaagctgtgtagcagcgtagatcagattaaggtcttggttacacagaagctgcctaacattctgtgtcacgtcaagatacgcgagaacaataacattagccgcgaggagtgggaatggatacaaaaactgtcagggagcgaatccatggagtctgtggatcatacctcagattgtcccatgcaactgttcttttacgaactccagatggcagtcaaggcacttttgcagcaaatcaatatccctctccatcaggctcggaacttccgcctctatactcaggaagtgctggaaatgggccacaatgtgagcttcttgcttctgctccctgctagcgacgacgtgtgtaccgcaccaggtcagaacaatccgtataccccacattctgggttcctgaacctcccgctgcagatgttcgagctgggaatcgtggcttgcttcacttag

SEQ ID NO: 245499 - protein, 282 aa, Artificial Sequence
  derived and/or modified sequence
MDRTLESLRHIIAQVLPHRDPALVFKDLNVVSMLQEFWESKQQQKAAFPSEGVVVYESLPAPGPPFVSYVTLPGGSCFGNFQCCLSRAEARRDAAKVALINSLFNELPSRRITKEFIMESVQEAVASTSGTLDDADDPSTSVGAYHYMLESNMGKTMLEFQELMTIFQLLHWNGSLKALRETKCSRQEVISYYSQYSLDEKMRSHMALDWIMKERDSPGIVSQELRMALRQLEEARKAGQELRFYKEKKEILSLALTQICSDPDTSSPSDDQLSLTALCGYH

SEQ ID NO: 245500 - DNA, 849 bp, Artificial Sequence
  derived and/or modified sequence
atggacagaaccctggagagcctgagacacatcatcgcccaggtgctgccccacagagaccccgccctggtgttcaaggacctgaacgtggtgagcatgctgcaggagttctgggagagcaagcagcagcagaaggccgccttccccagcgagggcgtggtggtgtacgagagcctgcccgcccccggcccccccttcgtgagctacgtgaccctgcccggcggcagctgcttcggcaacttccagtgctgcctgagcagagccgaggccagaagagacgccgccaaggtggccctgatcaacagcctgttcaacgagctgcccagcagaagaatcaccaaggagttcatcatggagagcgtgcaggaggccgtggccagcaccagcggcaccctggacgacgccgacgaccccagcaccagcgtgggcgcctaccactacatgctggagagcaacatgggcaagaccatgctggagttccaggagctgatgaccatcttccagctgctgcactggaacggcagcctgaaggccctgagagagaccaagtgcagcagacaggaggtgatcagctactacagccagtacagcctggacgagaagatgagaagccacatggccctggactggatcatgaaggagagagacagccccggcatcgtgagccaggagctgagaatggccctgagacagctggaggaggccagaaaggccggccaggagctgagattctacaaggagaagaaggagatcctgagcctggccctgacccagatctgcagcgaccccgacaccagcagccccagcgacgaccagctgagcctgaccgccctgtgcggctaccactag

SEQ ID NO: 245501 - DNA, 849 bp, Artificial Sequence
  derived and/or modified sequence
atggaccgtactcttgagagcttgagacatataatcgcacaggtcctcccgcatagagaccccgcccttgtatttaaagatcttaatgtggtgagcatgcttcaggaattctgggagagcaagcagcaacagaaagcagctttcccgtctgagggtgtggtggtctacgaatccctgcccgcccccggaccccccttcgtctcctacgtgaccctgcccggggggagctgcttcggaaattttcaatgttgcttaagtcgcgcagaggctagacgcgatgccgctaaagtggccctgatcaactccctatttaatgagctgccttcacggaggatcaccaaggagttcatcatggaaagcgtgcaggaggccgtcgcgtcaacttccgggaccctggacgacgctgatgatccttccactagcgtgggtgcgtaccactacatgcttgagtccaacatgggaaaaactatgctggaattccaggaactcatgaccatattccaactacttcactggaatgggtctctcaaggccctgagagaaaccaagtgtagcagacaagaagtgatctcctactacagccaatattccctggatgagaaaatgcgttcacacatggcactggattggatcatgaaagaaagagattcacctggaatcgtgagccaggagctgaggatggccctcagacaactggaggaggcccgtaaagcagggcaggagttaaggttttacaaagagaaaaaggagatcttgagcctcgcccttacacagatctgttctgaccccgacacgagttccccaagcgacgaccagctttccctcactgcactgtgtgggtaccactag

SEQ ID NO: 245502 - DNA, 849 bp, Artificial Sequence
  derived and/or modified sequence
atggacaggaccctggagagcctgcggcacatcatcgcccaggtgctgccccaccgggaccctgccctggtgttcaaggacctgaatgtggtgtccatgctgcaggagttctgggagagcaagcagcagcagaaggccgccttccccagcgagggcgtggtggtgtatgagagcctgcctgcccctggccccccatttgtgtcctatgtgaccctgcccggcggcagctgcttcggcaacttccagtgctgcctgagcagagctgaggccaggagagatgctgccaaggtggccctgatcaacagcctcttcaatgagctgcccagccgccgcatcaccaaggagttcatcatggagagcgtgcaggaggccgtggccagcaccagcggcaccctggatgatgctgatgaccccagcacctctgtgggcgcctaccactacatgctggagagcaacatgggcaagaccatgctggagttccaggagctgatgaccatcttccagctgctgcactggaatggcagcctgaaggccctgcgggagaccaagtgcagccggcaggaggtgatctcctactacagccagtacagcctggatgagaagatgaggagccacatggccctggactggatcatgaaggagcgggacagccctggcatcgtgtcccaggagctgaggatggccctgcggcagctggaggaggccaggaaggccggccaggagctgcgcttctacaaggagaagaaggagatcctgagcctggccctgacccagatctgcagcgaccctgacaccagcagccccagtgatgaccagctgagcctgacagccctgtgtggctaccactag

SEQ ID NO: 245503 - DNA, 4023 bp, Artificial Sequence
  derived and/or modified sequence
agcgagcttccccagctagcctgtaggtgggtgtgtttaacagaagaaagcaatgggaacccgcctgtcagccagcctttcgagctaattagctcagcatacaacaaagataagtgagcctgggaagagggccccctgaggggtctttagattctgggaaatgtctgattggcagatgttaaaagggattccttggtaatccagtgcatcaatgagctgcagaaattcagcccaggactgcaagaattcaggcatgaggacactctgtacaggaggctcacacaggcagacccaagatggacagaaccttggaatctctgagacacatcattgcccaagtcttgcctcacagagatccggctctagtcttcaaagacttgaacgttgtgtcaatgttacaggaattttgggaaagcaagcagcagcagaaggctgcattcccaagtgaaggtgtggtggtctatgagtcactgccagctcctgggcctccctttgtgagttacgtgaccctcccagggggaagctgttttggcaactttcagtgctgcttaagtagagccgaggccaggcgggatgcagctaaagtggccctgatcaactccctcttcaatgagctgccctctcgcaggatcaccaaggaattcattatggaaagtgttcaggaagcagtagcctccaccagcggcaccttagatgatgcagatgaccccagcaccagtgttggggcctatcactacatgctggagtcaaacatggggaagactatgctggagtttcaggagctgatgaccattttccaactattgcactggaatggaagcctaaaagcccttcgtgaaacaaagtgttcccgacaggaagtcatctcctactattctcagtattctctagatgaaaagatgcgcagccacatggccctggactggatcatgaaggagcgggactcaccaggaattgtctctcaagagctacgaatggccctgaggcagttggaggaagccaggaaagcaggacaagaactacggttttacaaagaaaagaaagaaatattgagcttagccctgactcagatctgcagtgaccctgacacttcctcacccagtgatgatcagctgagccttacggccctgtgtggctatcactagcaaggccaagccccgggtaccctcagtgatggcagaggccagattaacattaggaatctcagtgcagaggtcctcagaggctccagcatctctagtactacctgaaggctctcctaaccctctccacacattccatttacagagtatgagagtcgtaggacccttacaagacccaacaagccactcgatgcatttttctatcacattctcaatagttccagctcaggatgaaaggatagacacaaaattgtttgaaaaacattttccaggcctggctccaacctaaagcctgactgtcacgtgccttgcttgattttatatatattgtttcaagaatagtccaatatagcattccccaaatgaacagcagccagaattaggtgaagtagcatgatagcagtgtttaaaaatacttaggattaaataaataatatggattgttttaaaaaatatccaaggatcagagtctctttctaagctttgtaagctaagcaatagtttatgtcctactagatacactgcaaactacagtggggattttatctggacatcccaccatcaaagatcttgaaatagtaatagtatgaaaatactagataaaattaatgtttaaaatgtttttgtaacaataatttttaaaacccacactcttccatatatggggataaatatcacctagaaaagtagcctcactcttattcctcaagaattaatatccaatgtttatgagtcttgcaatcaattttgttcatttttaatttgcaaatcgataacctgaactaatttgttcttattttttgccactgcaaacatatatctacagagagaaaaattaatggcattttaaaggttaaaacattttgaaaaattattagcatgtaacaaagaatgcttgcatttgattagtttcaccagcatttgagagaaggaccctttagctctgtttgttgttcaagaacataagcaaccagtagctcaaatgtagtatcattattaagtttaagtcactggaatcttctttaaaggaaggataagacattgccatctctatttaactcatccatatgggtcaatcaactgattagaaaatcaaaaaacaataaaaactttttttttttttttttttttagtagagacgggatttcatcatgttgcccaggctggtcttgaactcctgggctcaagccatctgcctgcctccacctcccaaaatgctgagattacaggtgtgagccaccatgcctggcctaaactaatttttagatagttcctggtcactcaaatttaagaatgtcagcaatgtcaattttaaatgctcataggtctttccatatctgtaacatgaaaatgattattctgcattttattcagtagtccaaattaaagaaaatgtttttctcaatttaaaataatttctttttcttttgtttatgcaagtgcatacatgcttcactgaaagcaaaaccattataattacattaaagtttataaaatatgatattttaacctcatatctaataagtatgtacaaaggtaaccatcactccttaaatccacatgaaaactactgtaactgatcatgtattttggaattagacttgataataaaagattatcatgtatcacatatctcacaccaggggaacaattagctacataattgtcataccttaatatcttttaaaggtaacagtaattttcaacacattttattttaaaatattattttaacaaaagttacattcctctccacaatgaggctaaatgtcacccacgaaagaactttattcccttatattcctgaaaagaaatcagaattaacatttttatgttgaataaattttaaaatttaggaaatgttctatttaaagttaatttctttcataaagccattactctttacattgtcatttccaaaaagccacaatttcccatgctggatgtgatgaaagttaggcacacctttactgcattagcagcctttgacaatgacttcctcaaactgacaccatcttaattagatgcagggacagggatcagatgggacaatatcaaatttactttgtgccctacaagttaaaaactgcacccattctgtaaattgaatatagaggttctcccttggccactgtcagcttttcttgactggccaaaactgcccattcttcctggaatggtatgaaagcttcagcaaaataaataaaagtcagaatctttgctggtccctttaatgctgatttgatagtaaatcaatttcagctgagacataagggctgtcagtctatcatataaacatctttaactatagcctagagaaaagagggttgaagagcaaagcagattttttttttccttttctatatcttgttctgaacaacacactgtgataaaggggactagagtggaagattccctatttaaacacatgaagctctgggtcctagccttttttggttataagccctttgagaatctgataaaagctgtggatcatctcctaggaaaatagaacaaaacatacatattcacattacacagttccagagtatgtggaccccccaaagtccagagattgccctaggggatctttagattcttgtttagaactgttgattttgaacacaacatacactgtcaaactttacatcagggatccaacataactcagacatagcccaggtagcctgtttctaacacaactgtcataatcctgaaatccaaaattgcactgtgtttgacatgagatagtttaagttccacaaaatccaaatttaccatattattgtttttaaaaaagcagtttagagcaaactgtcactaaacttggataaatgggtcagaaagtacagatttaataaagtcgtacctctaatgttca

SEQ ID NO: 245504 - DNA, 849 bp, Artificial Sequence
  derived and/or modified sequence
atggaccggaccctggagagcctgcggcacatcatcgcccaggtgctcccccatcgggaccctgctctggtattcaaggacctcaatgtcgtttccatgctgcaggagttttgggaaagtaagcagcaacagaaggcagccttcccatccgagggcgtggtcgtgtatgagagtctgcctgcccctggcccacctttcgtgtcgtatgtaacccttcccggtgggtcttgctttggtaacttccaatgctgcctgtcacgagccgaggctcgccgggatgctgctaaggttgctctgatcaactctctgtttaatgagttaccaagcaggcgaatcaccaaggagttcatcatggaatccgtgcaggaagccgtggcctccacatcaggaacacttgatgacgccgatgaccctagtacctctgttggagcatatcactacatgttagagagcaacatggggaagaccatgctggaatttcaggagctgatgacgatcttccagctgcttcattggaacgggagcctcaaggcactccgtgagacaaaatgctcccgtcaggaggtgatctcatactactcacagtacagtctggacgagaagatgcggtctcacatggcactcgattggattatgaaggagcgtgatagtcccggaattgtatcccaggaacttaggatggcgcttaggcagctagaggaggctcggaaggccggccaggagttgaggttctacaaggaaaaaaaagagatactctccttggctctgacccagatttgcagtgacccagacacaagctcgccttctgacgatcaactctcccttacggccctgtgtggttaccactag

SEQ ID NO: 245505 - DNA, 849 bp, Artificial Sequence
  derived and/or modified sequence
atggaccggaccctcgagtctctccgccacattatagctcaggttctgccgcatagagacccagccctggttttcaaggacttaaacgtggtaagcatgttacaggaattttgggagtccaaacagcagcaaaaagcggctttcccatcagaaggcgtagttgtctatgaaagtctccccgctcccggacctccgtttgtgtcatatgtaacgctgcctggcggttcatgctttgggaacttccagtgttgtctgagtcgggcagaagctcgaagggatgccgcaaaagtagccttgatcaactcgttatttaacgagctgcctagccgcaggatcaccaaggaattcatcatggaatcggtccaggaagccgttgcgtcgacctctgggaccttagacgacgcagatgacccgagtacatctgtgggggcatatcactatatgctggagagcaacatgggaaaaaccatgctcgagtttcaggagctgatgactattttccagcttctgcactggaacggttcactcaaggccctccgagaaacaaaatgtagccggcaggaggtgatctcttactatagtcagtactccctggatgagaaaatgagatcccacatggcactggactggatcatgaaggagagagactccccagggatagtgtctcaagaattgagaatggcgctgcgccaactggaggaagctcggaaagcaggccaggaattgagattttacaaggagaagaaagagatccttagtctggctctgacgcaaatttgctctgaccctgacacatcaagcccatctgacgatcagctaagcctgaccgctctctgtggttaccactag

SEQ ID NO: 245506 - protein, 300 aa, Artificial Sequence
  derived and/or modified sequence
MAESEDRSLRIVLVGKTGSGKSATANTILGEEIFDSRIAAQAVTKNCQKASREWQGRDLLVVDTPGLFDTKESLDTTCKEISRCIISSCPGPHAIVLVLLLGRYTEEEQKTVALIKAVFGKSAMKHMVILFTRKEELEGQSFHDFIADADVGLKSIVKECGNRCCAFSNSKKTSKAEKESQVQELVELIEKMVQCNEGAYFSDDIYKDTEERLKQREEVLRKIYTDQLNEEIKLVEEDKHKSEEEKEKEIKLLKLKYDEKIKNIREEAERNIFKDVFNRIWKMLSEIWHRFLSKCKFYSS

SEQ ID NO: 245507 - DNA, 903 bp, Artificial Sequence
  derived and/or modified sequence
atggccgagagcgaggacagaagcctgagaatcgtgctggtgggcaagaccggcagcggcaagagcgccaccgccaacaccatcctgggcgaggagatcttcgacagcagaatcgccgcccaggccgtgaccaagaactgccagaaggccagcagagagtggcagggcagagacctgctggtggtggacacccccggcctgttcgacaccaaggagagcctggacaccacctgcaaggagatcagcagatgcatcatcagcagctgccccggcccccacgccatcgtgctggtgctgctgctgggcagatacaccgaggaggagcagaagaccgtggccctgatcaaggccgtgttcggcaagagcgccatgaagcacatggtgatcctgttcaccagaaaggaggagctggagggccagagcttccacgacttcatcgccgacgccgacgtgggcctgaagagcatcgtgaaggagtgcggcaacagatgctgcgccttcagcaacagcaagaagaccagcaaggccgagaaggagagccaggtgcaggagctggtggagctgatcgagaagatggtgcagtgcaacgagggcgcctacttcagcgacgacatctacaaggacaccgaggagagactgaagcagagagaggaggtgctgagaaagatctacaccgaccagctgaacgaggagatcaagctggtggaggaggacaagcacaagagcgaggaggagaaggagaaggagatcaagctgctgaagctgaagtacgacgagaagatcaagaacatcagagaggaggccgagagaaacatcttcaaggacgtgttcaacagaatctggaagatgctgagcgagatctggcacagattcctgagcaagtgcaagttctacagcagctag

SEQ ID NO: 245508 - DNA, 903 bp, Artificial Sequence
  derived and/or modified sequence
atggctgaatcagaggatagatcactccgcatcgtgttggtggggaagacaggatctggaaagagtgcaacagccaatactatcctaggagaggaaatcttcgacagcagaattgccgctcaggctgtgacgaagaactgccagaaggcgtctagagagtggcagggacgggatttgttggtggttgatacccccggcttgttcgacaccaaagaatcactggacactacctgcaaggagatttccagatgtataatttcatcgtgtcccggcccacatgctattgtccttgtactactcctgggccgctacaccgaagaggagcagaaaaccgttgccctgattaaagccgtcttcggcaaatcagctatgaaacacatggtaatactgttcaccagaaaagaggagctggagggccaatcattccacgactttatcgctgacgccgatgtcggactcaaatccattgtgaaagaatgtgggaaccggtgctgcgctttcagtaactcgaaaaaaacttcgaaagccgagaaagaatcccaagtgcaggagttagtcgagctgatcgagaaaatggtgcagtgtaatgaaggcgcctacttttcggatgacatctacaaggataccgaggagcgactcaagcaacgggaagaagtcttacgaaagatatatactgaccaactgaatgaggagatcaagttagtggaggaagataagcacaagtccgaggaagagaaggagaaggagataaagttgctgaagctcaaatacgacgaaaaaattaagaatattagggaggaagcagaacgcaatatctttaaagatgtgttcaatcgaatctggaagatgctgagcgagatatggcatcggttcctcagtaagtgcaagttttacagtagttag

SEQ ID NO: 245509 - DNA, 903 bp, Artificial Sequence
  derived and/or modified sequence
atggccgagagtgaagatagaagcctgagaattgtgctggtgggcaagacaggcagcggcaagagcgccacagccaacaccatcctgggggaggagatctttgacagcagaattgctgcccaggccgtgaccaagaactgccagaaggccagccgggagtggcagggccgggacctgctggtggtggacaccccaggcctgtttgacaccaaggagagcctggacaccacctgcaaggagatcagccgctgcatcatcagcagctgccccggcccccacgccatcgtgctggtgctgctgctgggccgctacacagaggaggagcagaagacagtggccctgatcaaggctgtgtttgggaagagcgccatgaagcacatggtgatcctcttcaccaggaaggaggagctggagggccagagcttccatgacttcatcgcagatgctgatgtgggcctgaagagcatcgtgaaggaatgtggcaaccgctgctgtgccttcagcaacagcaagaagaccagcaaggccgagaaggagagccaggtgcaggagctggtggagctgattgagaagatggtgcagtgcaatgaaggagcctacttcagtgatgacatctacaaggacacagaggagcggctgaagcagcgggaggaggtgctgaggaagatctacacagaccagctgaatgaggagatcaagctggtggaggaggacaagcacaagtctgaggaggagaaggagaaggagatcaagctgctgaagctgaagtatgatgagaagatcaagaacatccgggaggaggccgagaggaacatcttcaaggatgtgttcaaccgcatctggaagatgctgtctgagatctggcaccgcttcctgagcaagtgcaagttctacagcagctag

SEQ ID NO: 245510 - DNA, 1256 bp, Artificial Sequence
  derived and/or modified sequence
ctgactgagaggttttggtggcggtacagacacttttaactcacagtaaaagcaaaagcaacagctcaagcagcctccttggagaaaacctgaaaattcaacttgttcaagagaaggtcttgtacgtgcctaagttctagagcctcctgacgtgagcatggctgagagtgaggaccgctccctgaggatcgttctggtagggaaaactggaagtgggaaaagtgcaacagcgaacaccatccttggagaggaaatctttgattctagaattgctgcccaagctgttaccaagaactgtcaaaaagcatcccgggaatggcaggggagagaccttcttgttgtagacactccagggctctttgacaccaaggagagcctggacaccacctgcaaggaaatcagccgctgcatcatctcctcctgcccagggccccatgctattgtcctagttctgctgctgggccgctacacagaggaggagcagaaaaccgttgcattgatcaaggctgtctttgggaagtcagccatgaagcacatggtcatcttgttcactcgcaaagaagagttggagggccagagcttccatgacttcatagcagatgcggatgtgggcctaaaaagcatcgtcaaggagtgcgggaaccgctgctgtgcctttagcaacagcaagaaaaccagtaaggcagagaaggaaagtcaagtgcaggagttggtggagctgatagagaaaatggtgcagtgcaacgaaggggcttacttttctgatgacatatacaaggacacagaggaaaggctgaaacaacgggaagaggttttgaggaaaatctacactgaccaattaaatgaagaaattaaactagtagaagaggataagcataaatcagaggaagaaaaggagaaagaaattaaattactaaaattaaaatatgatgaaaaaataaaaaatataagggaagaagctgagagaaatatatttaaagatgtttttaataggatttggaagatgctttcagaaatatggcataggtttttgtcgaaatgtaagttttattcttcctaatttactgtgatttgttaatggatgaattgtattttgcaaagatagttagagaaatacctccttccccttagctttattaaggtatcattgataaataaaaataaaatatgtttaatgtatataatgtgatttttaaatatatatatatatatacacacattgtgaaataatgaaataaaggtaattaacacatcta

SEQ ID NO: 245511 - DNA, 903 bp, Artificial Sequence
  derived and/or modified sequence
atggccgagagcgaggaccggagcctgcggatcgtgctggtgggcaagaccggttctggaaagagcgcaaccgccaatacgattctgggagaagagatcttcgacagtcgtattgccgctcaggcagttaccaagaactgccagaaggctagccgggagtggcaaggtagagacctgctggtagttgacacgccagggctgtttgacaccaaggagtctcttgatactacatgcaaggagatttcccggtgtatcatttcttcatgtccaggcccccacgccattgtcctcgtgttgctgcttggtaggtacacagaggaagagcaaaaaacagtcgccctcattaaggctgtgtttggaaagagcgccatgaagcacatggtgattttatttacacggaaggaggaacttgaaggccaaagtttccatgatttcatagccgatgcagacgtggggcttaagtctattgtgaaggaatgtggcaatcggtgttgtgctttcagtaactctaaaaagacttctaaagcagagaaagagtcacaggtgcaagagctggtcgagctgattgagaaaatggtccaatgcaacgagggagcctatttttccgacgatatctacaaggacacagaagagcgcctaaaacaaagagaggaggtgctcagaaaaatatacaccgaccaactgaatgaagaaattaaactcgttgaggaggataagcacaaatccgaggaggaaaaagaaaaagagattaagttattgaagttaaaatatgacgagaagattaagaatattcgcgaggaggccgaaaggaatatcttcaaggatgtattcaatagaatctggaaaatgctgtcagaaatctggcatagatttcttagcaaatgcaaattctacagctcatag

SEQ ID NO: 245512 - DNA, 903 bp, Artificial Sequence
  derived and/or modified sequence
atggccgagtctgaggaccgatctctgagaatcgtccttgtgggaaaaactgggtccgggaaatccgcaacagccaacactattctgggcgaggagatcttcgacagtcgcatcgccgcacaggctgtgaccaagaactgtcaaaaagccagccgagagtggcagggccgagatctactagttgttgacacaccaggactattcgacacgaaggaatccttggacaccacctgcaaagaaatctctaggtgtatcatctccagttgtcctgggccacatgccatcgtgctggtgctgctcctcggcagatataccgaagaggaacagaaaactgtcgccctgataaaagccgtcttcggcaaatcagcaatgaagcacatggtgatcctttttacccggaaagaggagttggagggccagtccttccatgacttcattgccgacgccgacgtcggcctcaagagcatcgttaaggagtgtggcaatagatgctgtgccttcagtaattctaagaagacctcaaaagcagaaaaggagtcccaggtgcaggagcttgtggagctgatcgaaaaaatggtgcagtgtaatgagggcgcttacttctccgatgacatttataaagacactgaggaacgcctaaaacagcgcgaggaggtcctgaggaaaatctacacagaccagttgaatgaggagattaagctggtcgaggaggacaaacacaagtctgaggaggagaaggaaaaggagatcaagcttcttaaactgaaatacgacgagaaaataaaaaacatcagggaagaggccgagaggaacattttcaaagatgtgttcaatagaatttggaagatgctctcagagatctggcacagattcctcagtaaatgcaagttttactctagctag

SEQ ID NO: 245513 - protein, 704 aa, Artificial Sequence
  derived and/or modified sequence
MGTASSLVSPAGGEVIEDTYGAGGGEACEIPVEVKPKARLLRNSFRRGAGAAAGAGPGSLPRGVGAGGLLGASFKSTGSSVPELEYAAAEYERLRKEYEIFRVSKNQELLSMGRREAKLDTENKRLRAELQALQKTYQKILREKESALEAKYQAMERAATFEHDRDKVKRQFKIFRETKENEIQDLLRAKRELESKLQRLQAQGIQVFDPGESDSDDNCTDVTAAGTQCEYWTGGALGSEPSIGSMIQLQQSFRGPEFAHSSIDVEGPFANVNRDDWDIAVASLLQVTPLFSHSLWSNTVRCYLIYTDETQPEMDLFLKDYSPKLKRMCETMGYFFHAVYFPIDVENQYLTVRKWEIEKSSLVILFIHLTLPSLLLEDCEEAFLKNPEGKPRLIFHRLEDGKVSSDSVQQLIDQVSNLNKTSKAKIIDHSGDPAEGVYKTYICVEKIIKQDILGFENTDLETKDLGSEDSIPEEDDFGDVLWDIHDEQEQMETFQQASNSAHELGFEKYYQRLNDLVAAPAPIPPLLVSGGPGSGKSLLLSKWIQLQQKNSPNTLILSHFVGRPMSTSSESSLIIKRLTLKLMQHSWSVSALTLDPAKLLEEFPRWLEKLSARHQGSIIIVIDSIDQVQQVEKHMKWLIDPLPVNVRVIVSVNVETCPPAWRLWPTLHLDPLSPKDAKSIIIAECHSVDIKLSKEQCWESRQFR

SEQ ID NO: 245514 - protein, 1330 aa, Artificial Sequence
  derived and/or modified sequence
MGTASSLVSPAGGEVIEDTYGAGGGEACEIPVEVKPKARLLRNSFRRGAGAAAGAGPGSLPRGVGAGGLLGASFKSTGSSVPELEYAAAEYERLRKEYEIFRVSKNQELLSMGRREAKLDTENKRLRAELQALQKTYQKILREKESALEAKYQAMERAATFEHDRDKVKRQFKIFRETKENEIQDLLRAKRELESKLQRLQAQGIQVFDPGESDSDDNCTDVTAAGTQCEYWTGGALGSEPSIGSMIQLQQSFRGPEFAHSSIDVEGPFANVNRDDWDIAVASLLQVTPLFSHSLWSNTVRCYLIYTDETQPEMDLFLKDYSPKLKRMCETMGYFFHAVYFPIDVENQYLTVRKWEIEKSSLVILFIHLTLPSLLLEDCEEAFLKNPEGKPRLIFHRLEDGKVSSDSVQQLIDQVSNLNKTSKAKIIDHSGDPAEGVYKTYICVEKIIKQDILGFENTDLETKDLGSEDSIPEEDDFGDVLWDIHDEQEQMETFQQASNSAHELGFEKYYQRLNDLVAAPAPIPPLLVSGGPGSGKSLLLSKWIQLQQKNSPNTLILSHFVGRPMSTSSESSLIIKRLTLKLMQHSWSVSALTLDPAKLLEEFPRWLEKLSARHQGSIIIVIDSIDQVQQVEKHMKWLIDPLPVNVRVIVSVNVETCPPAWRLWPTLHLDPLSPKDAKSIIIAECHSVDIKLSKEQEKKLERHCRSATTCNALYVTLFGKMIARAGRAGNLDKILHQCFQCQDTLSLYRLVLHSIRESMANDVDKELMKQILCLVNVSHNGVSESELMELYPEMSWTFLTSLIHSLYKMCLLTYGCGLLRFQHLQAWETVRLEYLEGPTVTSSYRQKLINYFTLQLSQDRVTWRSADELPWLFQQQGSKQKLHDCLLNLFVSQNLYKRGHFAELLSYWQFVGKDKSAMATEYFDSLKQYEKNCEGEDNMSCLADLYETLGRFLKDLGLLSQAIVPLQRSLEIRETALDPDHPRVAQSLHQLASVYVQWKKFGNAEQLYKQALEISENAYGADHPYTARELEALATLYQKQNKYEQAEHFRKKSFKIHQKAIKKKGNLYGFALLRRRALQLEELTLGKDTPDNARTLNELGVLYYLQNNLETADQFLKRSLEMRERVLGPDHPDCAQSLNNLAALCNEKKQYDKAEELYERALDIRRRALAPDHPSLAYTVKHLAILYKKMGKLDKAVPLYELAVEIRQKSFGPKHPSVATALVNLAVLYSQMKKHVEALPLYERALKIYEDSLGRMHPRVGETLKNLAVLSYEGGDFEKAAELYKRAMEIKEAETSLLGGKAPSRHSSSGDTFSLKTAHSPNVFLQQGQR

SEQ ID NO: 245515 - protein, 239 aa, Artificial Sequence
  derived and/or modified sequence
MGTASSLVSPAGGEVIEDTYGAGGGEACEIPVEVKPKARLLRNSFRRGAGAAAGAGPGSLPRGVGAGGLLGASFKSTGSSVPELEYAAAEYERLRKEYEIFRVSKNQELLSMGRREAKLDTENKRLRAELQALQKTYQKILREKESALEAKYQAMERAATFEHDRDKVKRQFKIFRETKENEIQDLLRAKRELESKLQRLQAQGIQVFDPGESDSDDNCTDVTVSLESDQHPGIFIANF

SEQ ID NO: 245516 - protein, 150 aa, Artificial Sequence
  derived and/or modified sequence
MGTASSLVSPAGGEVIEDTYGAGGGEACEIPVEVKPKARLLRNSFRRGAGAAAGAGPGSLPRGVGAGGLLGASFKSTGSSVPELEYAAAEYERLRKEYEIFRVSKNQELLSMGRREAKLDTENKRLRAELQGLAAVARSRLTATWNSWAQ

SEQ ID NO: 245517 - protein, 637 aa, Artificial Sequence
  derived and/or modified sequence
IIANAGRAGNLDKILHQCFQCQDTLSLYRLVLHSIRESMANDVDKELMKQILCLVNVSHNGVSESELMELYPEMSWTFLTSLIHSLYKMCLLTYGCGLLRFQHLQAWETVRLEYLEGPTVTSSYRQKLINYFTLQLSQDRVTWRSADELPWLFQQQGSKQKLHDCLLNLFVSQNLYKRGHFAELLSYWQFVGKDKSAMATEYFDSLKQYEKNCEGEDNMSCLADLYETLGRFLKDLGLLSQAIVPLQRSLEIRETALDPDHPRVAQSLHQLASVYVQWKKFGNAEQLYKQALEISENAYGADHPYTARELEALATLYQKQNKYEQAEHFRKKSFKIHQKAIKKKGNLYGFALLRRRALQLEELTLGKDTPDNARTLNELGVLYYLQNNLETADQFLKRSLEMRERVLGPDHPDCAQSLNNLAALCNEKKQYDKAEELYERALDIRRRALAPDHPSLAYTVKHLAILYKKMGKLDKAVPLYELAVEIRQKSFGPKHPSVATALVNLAVLYSQMKKHVEALPLYERALKIYEDSLGRMHPRVGETLKNLAVLSYEGGDFEKAAELYKRAMEIKEAETSLLGGKAPSRHSSSGDTFSLKTAHSPNVFLQQGQRKVQSNLLSPEGLSNICAQEKTTRFTSS

SEQ ID NO: 245518 - protein, 411 aa, Artificial Sequence
  derived and/or modified sequence
MSCLADLYETLGRFLKDLGLLSQAIVPLQRSLEIRETALDPDHPRVAQSLHQLASVYVQWKKFGNAEQLYKQALEISENAYGADHPYTARELEALATLYQKQNKYEQAEHFRKKSFKIHQKAIKKKGNLYGFALLRRRALQLEELTLGKDTPDNARTLNELGVLYYLQNNLETADQFLKRSLEMRERVLGPDHPDCAQSLNNLAALCNEKKQYDKAEELYERALDIRRRALAPDHPSLAYTVKHLAILYKKMGKLDKAVPLYELAVEIRQKSFGPKHPSVATALVNLAVLYSQMKKHVEALPLYERALKIYEDSLGRMHPRVGETLKNLAVLSYEGGDFEKAAELYKRAMEIKEAETSLLGGKAPSRHSSSGDTFSLKTAHSPNVFLQQGQRAGKSNPTFYLQKGFQTYVL

SEQ ID NO: 245519 - DNA, 2115 bp, Artificial Sequence
  derived and/or modified sequence
atgggtacagcatcctcccttgtgtcccctgctggcggggaggtgattgaagacacttacggtgcaggaggtggggaggcatgcgaaatcccagtagaagtgaagcccaaagcacgcttacttagaaactccttccgcaggggagcaggagctgcggccggtgccgggcctggctctctgccgcggggggtcggcgctggtggcctgttaggagcatcattcaagtcgactggttcctcagtccctgagctggaatacgccgccgccgaatacgaacgcttacgcaaagaatacgaaatcttccgagtgtccaaaaatcaagaacttctttccatggggcgtcgagaagctaagctcgataccgaaaataagagactccgcgccgaactgcaggcccttcagaaaacatatcagaagattctgagagaaaaggaatctgccttagaggcaaagtatcaagcgatggaacgtgctgcaaccttcgagcatgatagagataaagtgaaacgccagtttaaaatcttcagggaaacaaaggagaacgagattcaggatctgctgcgagccaaacgagagctggagagtaagctgcagcgtctgcaggcgcaggggatccaagtgttcgaccctggggagtcagatagtgacgataattgtaccgacgtaactgcagccgggacccagtgcgagtattggaccgggggagcattaggttctgagccctctattggttctatgatccagctccagcagagctttcggggaccagaattcgcccatagcagtattgatgtggaaggtccatttgcaaacgtgaaccgcgacgactgggacatcgctgtggctagtcttctccaggtgacccccctcttttctcacagtctttggagcaatactgtgagatgctatctcatatatactgatgagacgcaacccgagatggacctgttcctaaaggattactctccgaagctgaagaggatgtgcgaaaccatggggtacttcttccacgcggtttacttcccaatcgatgttgagaaccaatacctgaccgtgagaaagtgggaaatagagaagtcttccctcgtaatcctctttatacatctgactctcccatccctacttctggaagactgcgaggaagctttcctcaagaaccccgaaggtaaaccccgtctgatcttccacaggctcgaggatggcaaagtgtccagtgatagcgtgcaacagctcatagaccaagtgtccaacttaaataagacttcaaaggccaagattattgaccactcgggtgaccctgccgaaggtgtctacaaaacctatatttgtgtggaaaaaatcataaaacaggatatcttgggattcgagaacacagatctggagacaaaagatttaggttcagaagatagcatcccggaggaggacgatttcggggatgtgctttgggatatacacgacgaacaggagcagatggaaacgttccaacaagcctctaacagtgcacacgaactcgggtttgagaagtattatcagagactgaatgacttagtggccgcccccgcacctatcccaccgctgctagtgtcaggtggcccaggaagcggaaagagcctgctgctgagcaagtggatacagctccaacaaaagaacagcccaaatacccttattctcagtcacttcgtcggccgtccgatgagcacgagctccgagtcttcactcattataaaacggctgaccctgaaattaatgcagcactcttggtcagttagcgccctgacattggatcccgcaaaactgttggaggagttccccagatggctagagaagttgagtgcccggcaccagggaagtatcatcatcgtgatagacagtatcgatcaggtgcaacaagtcgaaaagcatatgaaatggctcattgaccctctgccagtgaacgtgagggtcattgtctcagttaatgtggagacctgtccccctgcctggcgactgtggccaactctgcatttggatcctcttagcccaaaagatgctaagtccatcatcattgccgaatgccactcagtggatataaagctgagcaaggaacagtgctgggaaagcaggcagttccggtag

SEQ ID NO: 245520 - DNA, 3993 bp, Artificial Sequence
  derived and/or modified sequence
atggggacagcgagttcgctggtgtcacccgcgggtggggaagtgatcgaggacacatacggagctggtggtggcgaggcttgtgaaattcctgtggaagtcaagccaaaagcacggcttctgagaaactcattcaggagaggtgctggcgccgctgccggggcaggtccaggaagcttacccaggggagtgggcgcgggcggcctcctgggagcctccttcaaatcaaccggctcatccgtcccagagctggaatacgccgcggcagagtacgaacgcctgcgcaaggagtacgagatatttcgggtctccaagaatcaggagctgctgtctatgggcagacgggaggccaagttagacacagaaaataaaaggttaagagccgagctgcaggccttgcaaaagacatatcagaagattctgcgagaaaaggagagtgccctggaagccaaataccaggcgatggagagggccgccacgttcgaacatgaccgcgacaaagtcaagcgccagtttaagatctttcgtgaaaccaaggagaatgagatacaggacctgttgcgagcgaagagagaactggagtctaaactccagcgactacaggcccaggggatccaagtgttcgatccaggggagtctgattccgacgacaattgtactgacgttacagctgccggaactcaatgtgaatactggacaggaggtgctttgggctccgagccttctatcggtagcatgattcagcttcaacagtcattcagaggacccgagtttgcccacagcagtatcgacgtggaaggcccatttgccaatgtgaaccgagatgattgggatatcgccgtagccagtctcctgcaggtgaccccattatttagtcactcactgtggtccaacaccgtacgctgttatctgatctacacggatgagacacaaccagagatggatttgttcctgaaggactattctcccaaattaaagcgcatgtgcgagactatggggtacttctttcacgctgtctatttcccaatcgatgtcgaaaaccagtatttgactgtgaggaagtgggaaatagaaaaaagttccctcgtgatcctctttatccatcttaccctccccagcctactgcttgaagactgtgaggaagcatttttgaagaaccccgagggaaagccacgactgatttttcaccggctggaggatggcaaggtgtcatccgactccgtgcagcaactgatcgatcaggtttctaacttaaacaagactagcaaggccaagattattgatcattctggagacccggctgagggtgtctacaagacttacatatgtgttgaaaagattatcaagcaggacatcttgggctttgaaaacaccgatctcgaaactaaggaccttggaagtgaggacagtattcctgaggaggatgacttcggagatgtcctgtgggacattcacgatgaacaagagcagatggaaacatttcagcaggcttcgaattctgcccatgaacttgggttcgaaaagtactatcagaggctgaacgacttagtagccgcccctgctccgatcccccctctactggtttccggcggtccagggtctgggaagtctctgctgctgtccaaatggattcagctgcagcaaaagaacagtcctaacacactgatactgagccactttgtgggaagaccgatgtcaactagtagcgagtcctctcttattatcaaaagacttacactgaagctaatgcaacacagctggtccgtgtcggcactcaccttagaccccgcgaaactgctggaggagtttccacgctggcttgagaagttatctgccaggcaccaggggtcaatcatcatagtaattgactctatcgaccaggtgcagcaggtcgagaaacacatgaagtggctgattgacccactgcctgtcaacgtgagggtcatcgtctccgttaacgtggagacatgccccccagcatggcgcctgtggcccactctgcatctagaccctctctccccaaaggacgcaaagtccattattattgcggagtgtcattccgtcgacatcaagctgagcaaagagcaggaaaagaaactggagcgccattgtcgctctgccacaacatgtaacgctctgtacgtgaccttgtttggcaaaatgatcgcccgcgcggggcgtgctggcaacctagataagatcctgcatcaatgtttccagtgtcaggacactctttcactctaccgacttgtgttgcatagcatacgcgaatccatggcgaatgacgttgacaaagagctcatgaaacagatactgtgtctcgtgaatgtctctcataatggggtcagcgagtctgagctgatggagttgtatccggaaatgagctggaccttcctcacatccctcatacattctctctataagatgtgtctcctcacatatggatgcggcctcctgcggtttcagcacctgcaggcatgggagacagtccggttggaatacctcgagggcccaactgtaactagcagctaccggcagaaattaatcaattacttcacactacagcttagccaagaccgagtgacctggaggtcagccgacgaactcccatggctgttccagcaacagggatccaaacagaaactgcacgactgccttttgaatctcttcgtgtctcaaaacctttacaagagaggacactttgcagagcttctctcgtactggcagtttgtgggcaaggataaatctgccatggccactgagtacttcgattctcttaaacagtacgaaaagaattgcgaaggagaagataatatgtcttgcttagctgatctatatgagacgctcggtaggtttttgaaggatctaggactgctctcccaggctatagttccccttcaacgatctttggaaattagggagacagctctggaccccgaccatcctcgggtggcccagtctctgcatcagctggcctcagtgtatgttcagtggaagaagttcggtaacgcagagcaactgtataaacaggccctggagatcagcgagaacgcttacggggccgatcatccctacaccgcccgagagctggaagccctagccaccctctaccagaaacaaaacaagtatgagcaggccgaacatttccggaagaaatcattcaagattcaccaaaaggccataaaaaaaaagggcaatctctacggattcgccctgttgcggcggagagctctgcaactcgaggaacttactctcggcaaggacactcccgataacgctcgcacactaaacgagctcggggtgctgtactatctccaaaataacctggagaccgccgaccagtttctgaagcgttctctggaaatgcgggagagagtacttggaccagatcatccagattgcgctcagtcattaaataatctcgccgccctttgtaacgagaagaaacaatatgacaaggccgaggaactttacgagcgagctcttgacatccgaaggagagcgctcgctcctgatcacccttccctggcatacaccgtcaaacacttggccatcctgtacaagaaaatgggcaagctggataaggccgtgcccctttatgagttggctgtggaaattaggcagaaatcattcggtcctaagcacccatctgtggcaaccgcactggtgaaccttgccgtgctctactcacagatgaagaagcatgtggaggcactgcctctgtatgagagggccctcaaaatctacgaagatagtttgggccgcatgcatccgagggtgggtgaaaccctcaaaaacctggccgtgctgagttacgaaggaggtgacttcgaaaaggccgctgaactgtacaaacgggccatggagatcaaagaggccgagacttctctgcttggaggaaaggccccatcaagacactcgagcagtggcgacacctttagtctaaagaccgcgcatagcccaaatgtgtttctccaacagggacagaggtag

SEQ ID NO: 245521 - DNA, 720 bp, Artificial Sequence
  derived and/or modified sequence
atggggactgctagcagcctcgttagtccagctggaggcgaggtgatcgaggacacctacggggcaggaggcggcgaggcttgcgaaattccagtagaggtcaagcccaaggctagacttctgcggaactcgttcaggagaggagccggtgcagctgcgggtgctgggcctggctcattgcctcggggcgtaggcgctggggggctgctgggtgcatcttttaagtcaaccggctcctctgtgccagaactagaatatgcagctgccgagtacgaacggctccggaaggagtacgagatcttccgagtgtcaaaaaaccaggagcttttaagcatggggaggcgtgaagccaagcttgacacagagaacaagagattacgcgccgagctccaggccttgcagaagacttaccagaagatcctgcgcgagaaggagtcagcgctcgaggccaaataccaggccatggagcgggctgccacttttgaacacgatagagacaaggtcaagcgccagttcaagatatttcgagagacgaaggaaaacgagatccaagatttgttgagagcaaagcgcgagctggagagcaaactccagaggctgcaggcccaaggcattcaggtgtttgaccccggtgaatcagactccgacgacaattgtacagacgtaactgtgagtctggaaagcgatcagcaccccgggatttttatagcaaatttctag

SEQ ID NO: 245522 - DNA, 453 bp, Artificial Sequence
  derived and/or modified sequence
atgggcacagcctctagcctggtgagcccagcgggtggcgaggtgattgaagacacctatggcgcgggaggtggcgaggcatgcgagataccagtcgaggtcaagcctaaggccaggctcttgcggaactccttccggcgcggcgccggtgccgcagccggagcagggccgggctctctgccccgcggcgtcggagcaggggggttgttgggcgcctcctttaaaagtactggaagtagtgtgccggaattagagtacgctgccgcggaatatgagaggctgagaaaggagtatgaaatcttccgggtgtcaaagaatcaggaactgctctctatgggtaggagagaagccaaactggacactgagaacaaacgtctgagggccgaactgcaaggcctggcagctgtggccaggtccagactcacagccacctggaacagctgggcccagtag

SEQ ID NO: 245523 - DNA, 1914 bp, Artificial Sequence
  derived and/or modified sequence
ataattgctaatgccgggcgcgccggtaacctcgacaaaatcctccaccaatgctttcagtgtcaagacacactgagcctctatcgcctggtactgcacagcatccgagagtctatggccaatgatgtggataaagaattgatgaagcaaatcctctgtctggtgaacgtcagccacaatggagtgtcagaatccgagctaatggagttgtaccccgaaatgagctggaccttccttacaagtttaatacattctctctacaaaatgtgccttctcacatacggatgcggactcttgaggttccagcacctccaggcctgggagaccgtgagactggaatacctggaggggccaaccgtgacctcaagctaccgccagaagttgataaattattttaccctgcagctctcacaggatcgagtcacatggagatccgctgatgagttaccatggctgttccagcagcaagggtctaaacaaaaactgcacgactgcctgctgaacttgtttgtgtcccagaatctttacaagagaggacacttcgccgagctattgagctactggcagttcgttggcaaggacaagtctgccatggccaccgaatatttcgacagcctcaaacaatacgaaaagaactgcgaaggggaggacaacatgagctgcttagcggacctgtacgagactctgggccgctttctcaaagacctgggccttctgagtcaggcgatagtgcctctgcaacgatccctcgagatccgagagacagccttggaccccgaccatccacgggtagcccagagcttgcaccagttagcttccgtgtacgtgcaatggaaaaaattcggaaatgctgagcagttgtacaagcaggccctggaaatctctgaaaacgcttacggagcagaccatccgtacacggcgcgggaactggaagccttagccaccttgtatcagaaacaaaataagtacgaacaggcagaacactttagaaagaaatctttcaagatccaccaaaaggcaataaagaagaaggggaatttatacgggtttgcccttttaagacgccgcgccctacaattagaagagctcactctgggtaaagatacgcccgataacgcacgcaccctgaatgagctaggagtgctgtattacctgcagaacaacttggaaactgccgaccaattcttaaaacgaagtctcgaaatgcgtgaaagagtgctgggccctgaccaccctgattgcgcgcagagcttaaacaacctggctgctttatgcaacgaaaagaaacaatatgacaaggccgaggaattgtatgagagagcattggacataagacgtagggcactggctcccgatcaccccagcctcgcttatacagtcaagcatctggccatactgtacaaaaagatggggaaactggacaaggctgtgccgctgtacgaactcgccgttgaaattcgacaaaagtcgttcggcccaaaacaccctagcgtcgccacggccttggtaaatttggctgtattatactcgcagatgaaaaagcacgtggaagcgcttcctctgtatgaaagggcattaaaaatttacgaggactccctgggtagaatgcacccacgggtgggggagaccctgaaaaacttagcagtgctgtcctatgaaggcggtgattttgagaaagctgcagaactttataaacgggctatggagataaaagaagctgaaacaagcctgctgggaggcaaagccccaagtcggcacagctcaagtggagacacattcagcctaaaaacagcacattcccctaatgtgttcctgcagcagggccagaggaaggtccagagcaacctactctcaccagaggggctctctaacatctgcgcccaggagaaaactacaagattcaccagcagctag

SEQ ID NO: 245524 - DNA, 1236 bp, Artificial Sequence
  derived and/or modified sequence
atgtcctgtcttgccgatctttacgagactctgggccgcttcctaaaggatctgggcctcctttctcaggccatcgtccctctgcagcgctctctcgagattcgtgagaccgctctcgaccccgatcatcctcgggtggctcaatcgttgcaccagctggcttctgtgtacgtgcaatggaagaagttcgggaatgccgagcagctgtataagcaggcactcgagatttcagaaaatgcatatggagcagatcacccatacacagcccgtgagctcgaggccctggctaccctttaccagaaacagaacaaatacgagcaagccgaacacttcaggaaaaagtcatttaagatccaccagaaggccatcaagaaaaagggtaatctgtacggattcgcgttgctgcggagaagggccctccagctagaagagctgactcttgggaaggacacaccagataacgctcgcacgctaaacgagctgggcgtgctgtactatttgcaaaataacctggagactgcagaccagttcctcaaacggtcacttgaaatgagagagcgtgtgctggggcccgaccaccctgattgtgctcagtctcttaataatttggcagcactctgcaatgaaaaaaaacagtacgacaaagctgaagaactctacgaaagagcattggacatcagacgccgggccctcgccccagatcacccctctttagcttataccgtgaagcatttggctatcctgtacaagaagatggggaaactggataaggccgtacctttatatgagttggccgtggagattcgacaaaagagtttcgggcccaaacacccctccgtggcaactgctctcgttaacctggcggtgttgtatagccaaatgaagaagcacgtggaagctctgcccctgtacgaacgggctttgaagatatacgaggatagcttgggccgtatgcacccgcgcgtaggcgaaacccttaagaatctcgctgtgctgtcgtacgaagggggcgactttgagaaggccgcagaactatacaaacgcgctatggagattaaggaggctgagaccagtctcctgggaggcaaagcgccctcacgccactcatcaagcggcgatacgttctctctgaagaccgctcacagccctaacgttttcctgcaacagggtcagcgcgcgggtaagagtaatccgacgttctacttacaaaagggatttcagacttacgttctatag

SEQ ID NO: 245525 - DNA, 2115 bp, Artificial Sequence
  derived and/or modified sequence
atgggcacagccagcagcctggtgtccccagctggaggagaggtgattgaggacacctacggggccggcggcggggaggcctgtgagatccctgtggaggtgaagcccaaggcccggctgctgaggaacagcttcagaagaggagctggagctgctgctggagctggccctggcagcctgccccggggcgtgggcgctgggggcctgctgggcgccagcttcaagagcacaggcagctctgtgcctgagctggagtatgctgctgctgaatatgagcggctgaggaaggagtatgagatcttccgggtgtccaagaaccaggagctgctgtccatgggccggcgggaggccaagctggacacagagaacaagaggctgcgggcagagctgcaggccctgcagaagacctaccagaagatcctgcgggagaaggagagcgccctggaggccaagtaccaggccatggagcgggccgccacctttgaacatgaccgggacaaggtgaagaggcagttcaagatcttccgggagaccaaggaaaatgagatccaggacctgctgcgggccaagcgggagctggagagcaagctgcagaggctgcaggcccagggcatccaggtgtttgaccccggggagagtgacagtgatgacaactgcacagatgtgacagctgctggcacccagtgtgagtactggacaggaggagccctgggcagcgagcccagcatcggctccatgatccagctgcagcagagcttccggggccctgagtttgcccacagcagcattgatgtggagggcccctttgccaacgtgaacagagatgactgggacattgctgtggccagcctgctgcaggtgacccccctcttcagccacagcctgtggagcaacacagtgcgctgctacctgatctacacagatgagacccagcctgagatggacctcttcctgaaggactacagccccaagctgaagaggatgtgtgagaccatgggctacttcttccacgctgtgtacttccccattgatgtggagaaccagtacctgactgtgaggaagtgggagattgagaagagcagcctggtgatcctcttcatccacctgaccctgcccagcctgctgctggaggactgtgaggaggccttcctgaagaaccctgagggcaagcccaggctcatcttccaccggctggaggatggcaaggtgtccagtgacagcgtgcagcagctgattgaccaggtgagcaacctgaacaagaccagcaaggccaagatcatcgaccacagcggggaccctgctgagggcgtgtacaagacctacatctgtgtggagaagatcatcaagcaggacatcctgggctttgagaacacagacctggagaccaaggacctgggcagcgaggacagcatccctgaggaggatgactttggagatgtgctgtgggacatccatgatgagcaggagcagatggagaccttccagcaggccagcaacagcgcccacgagctgggctttgagaagtactaccagaggctgaatgacctggtggccgccccagcccccatcccccccctgctggtgtctgggggccctggcagcggcaagagcctgctgctgagcaagtggatccagctgcagcagaagaacagccccaacaccctcatcctgagccactttgtgggccggcccatgagcaccagcagcgagagcagcctcatcatcaagaggctgaccctgaagctgatgcagcacagctggagcgtgtctgccctgaccctggaccctgccaagctgctggaggagttcccccgctggctggagaagctgagcgcccggcaccagggcagcatcatcatcgtcatcgacagcattgaccaggtgcagcaggtggagaagcacatgaagtggctgattgaccccctgcctgtgaatgtgcgggtgattgtgtctgtgaatgtggagacctgccccccagcctggaggctgtggcccaccctgcacctggaccccctgagccccaaggatgccaagagcatcatcatcgccgagtgccacagcgtggacatcaagctgagcaaggagcagtgctgggagagccggcagttcagatag
